United States Patent Application Publication US 2007/0214517 A1 - sequence listing, part 84

SEQ ID NO: 108008 - protein, 439 aa, Arabidopsis thaliana
  peptide (1)..(439): Ceres Seq. ID no. 13653002
  misc_feature (8)..(362): Pfam Name: 3-beta hydroxysteroid dehydrogenase/isomerase family Pfam Description: 3-beta hydroxysteroid dehydrogenase/isomerase
  misc_feature (1)..(439): Homolog of NCBI NO: 30694041 NR Description: 3-beta hydroxysteroid dehydrogenase/isomerase [Arabidopsis thaliana] >gi|25405196|pir||F96513 hypothetical
  misc_feature (1)..(370): Homolog of NCBI NO: 18401656 NR Description: 3-beta hydroxysteroid dehydrogenase/isomerase
  misc_feature (3)..(370): Homolog of NCBI NO: 21553411 NR Description: 3-beta-hydroxysteroid dehydrogenase, putative
  misc_feature (6)..(370): Homolog of NCBI NO: 15225272 NR Description: 3-beta hydroxysteroid dehydrogenase/isomerase
  misc_feature (10)..(436): Homolog of NCBI NO: 31415899 NR Description: putative 3-beta hydroxysteroid
  misc_feature (10)..(366): Homolog of NCBI NO: 31415898 NR Description: putative 3-beta hydroxysteroid
  misc_feature (6)..(213): Homolog of NCBI NO: 23198272 NR Description: 3-beta-hydroxysteroid dehydrogenase [Arabidopsis
  misc_feature (249)..(434): Homolog of NCBI NO: 21539467 NR Description: 3-beta-hydroxysteroid dehydrogenase [Arabidopsis
  misc_feature (12)..(438): Homolog of NCBI NO: 18406234 NR Description: 3-beta hydroxysteroid dehydrogenase/isomerase [Arabidopsis thaliana] >gi|15027969|gb|AAK76515.1| putative dehydrogenase [Arabidopsis thaliana] >gi|20196859|gb|AAB64337.2|
  misc_feature (84)..(358): Homolog of NCBI NO: 25408868 NR Description: probable sterol dehydrogenase [imported] -
MVMEVTETERWCVVTGGRGFAARHLVEMLVRYQMFHVRIADLAPAIVLNPHEETGILGEAIRSGRVQYVSADLRNKTQVVKGFQGAEVVFHMAAPDSSINNHQLQYSVNVQGTTNVIDACIEVGVKRLIYTSSPSVVFDGVHGTLNADESLPYPPKHNDSYSATKAEGEALILKANGRSGLLTCCIRPSSIFGPGDKLMVPSLVTAARAGKSKFIIGDGSNFYDFTYVENVVHAHVCAERALASGGEVCAKAAGQAYFITNMEPIKFWEFMSQLLEGLGYERPSIKIPASLMMPIAYLVELAYKLLGPYGMKVPVLTPSRVRLLSCNRTFDSSKAKDRLGYSPVVPLQEGIKRTIDSFSHLKAQNQPKTEVTETIQWKKQTLIAIVILITLYHNFVATTGSSSVIITAVSKVLLVSSIFMFINGILPEKMKVFGSKKID

SEQ ID NO: 108009 - protein, 437 aa, Arabidopsis thaliana
  peptide (1)..(437): Ceres Seq. ID no. 13653003
  misc_feature (6)..(360): Pfam Name: 3-beta hydroxysteroid dehydrogenase/isomerase family Pfam Description: 3-beta hydroxysteroid dehydrogenase/isomerase
  misc_feature (1)..(437): Homolog of NCBI NO: 30694041 NR Description: 3-beta hydroxysteroid dehydrogenase/isomerase [Arabidopsis thaliana] >gi|25405196|pir||F96513 hypothetical
  misc_feature (1)..(368): Homolog of NCBI NO: 18401656 NR Description: 3-beta hydroxysteroid dehydrogenase/isomerase
  misc_feature (1)..(368): Homolog of NCBI NO: 21553411 NR Description: 3-beta-hydroxysteroid dehydrogenase, putative
  misc_feature (4)..(368): Homolog of NCBI NO: 15225272 NR Description: 3-beta hydroxysteroid dehydrogenase/isomerase
  misc_feature (8)..(434): Homolog of NCBI NO: 31415899 NR Description: putative 3-beta hydroxysteroid
  misc_feature (8)..(364): Homolog of NCBI NO: 31415898 NR Description: putative 3-beta hydroxysteroid
  misc_feature (4)..(211): Homolog of NCBI NO: 23198272 NR Description: 3-beta-hydroxysteroid dehydrogenase [Arabidopsis
  misc_feature (247)..(432): Homolog of NCBI NO: 21539467 NR Description: 3-beta-hydroxysteroid dehydrogenase [Arabidopsis
  misc_feature (10)..(436): Homolog of NCBI NO: 18406234 NR Description: 3-beta hydroxysteroid dehydrogenase/isomerase [Arabidopsis thaliana] >gi|15027969|gb|AAK76515.1| putative dehydrogenase [Arabidopsis thaliana] >gi|20196859|gb|AAB64337.2|
  misc_feature (82)..(356): Homolog of NCBI NO: 25408868 NR Description: probable sterol dehydrogenase [imported] -
MEVTETERWCVVTGGRGFAARHLVEMLVRYQMFHVRIADLAPAIVLNPHEETGILGEAIRSGRVQYVSADLRNKTQVVKGFQGAEVVFHMAAPDSSINNHQLQYSVNVQGTTNVIDACIEVGVKRLIYTSSPSVVFDGVHGTLNADESLPYPPKHNDSYSATKAEGEALILKANGRSGLLTCCIRPSSIFGPGDKLMVPSLVTAARAGKSKFIIGDGSNFYDFTYVENVVHAHVCAERALASGGEVCAKAAGQAYFITNMEPIKFWEFMSQLLEGLGYERPSIKIPASLMMPIAYLVELAYKLLGPYGMKVPVLTPSRVRLLSCNRTFDSSKAKDRLGYSPVVPLQEGIKRTIDSFSHLKAQNQPKTEVTETIQWKKQTLIAIVILITLYHNFVATTGSSSVIITAVSKVLLVSSIFMFINGILPEKMKVFGSKKID

SEQ ID NO: 108010 - protein, 412 aa, Arabidopsis thaliana
  peptide (1)..(412): Ceres Seq. ID no. 13653004
  misc_feature (1)..(335): Pfam Name: 3-beta hydroxysteroid dehydrogenase/isomerase family Pfam Description: 3-beta hydroxysteroid dehydrogenase/isomerase
  misc_feature (1)..(412): Homolog of NCBI NO: 30694041 NR Description: 3-beta hydroxysteroid dehydrogenase/isomerase [Arabidopsis thaliana] >gi|25405196|pir||F96513 hypothetical
  misc_feature (1)..(343): Homolog of NCBI NO: 18401656 NR Description: 3-beta hydroxysteroid dehydrogenase/isomerase
  misc_feature (1)..(343): Homolog of NCBI NO: 21553411 NR Description: 3-beta-hydroxysteroid dehydrogenase, putative
  misc_feature (1)..(343): Homolog of NCBI NO: 15225272 NR Description: 3-beta hydroxysteroid dehydrogenase/isomerase
  misc_feature (1)..(409): Homolog of NCBI NO: 31415899 NR Description: putative 3-beta hydroxysteroid
  misc_feature (1)..(339): Homolog of NCBI NO: 31415898 NR Description: putative 3-beta hydroxysteroid
  misc_feature (1)..(186): Homolog of NCBI NO: 23198272 NR Description: 3-beta-hydroxysteroid dehydrogenase [Arabidopsis
  misc_feature (222)..(407): Homolog of NCBI NO: 21539467 NR Description: 3-beta-hydroxysteroid dehydrogenase [Arabidopsis
  misc_feature (1)..(411): Homolog of NCBI NO: 18406234 NR Description: 3-beta hydroxysteroid dehydrogenase/isomerase [Arabidopsis thaliana] >gi|15027969|gb|AAK76515.1| putative dehydrogenase [Arabidopsis thaliana] >gi|20196859|gb|AAB64337.2|
  misc_feature (57)..(331): Homolog of NCBI NO: 25408868 NR Description: probable sterol dehydrogenase [imported] -
MLVRYQMFHVRIADLAPAIVLNPHEETGILGEAIRSGRVQYVSADLRNKTQVVKGFQGAEVVFHMAAPDSSINNHQLQYSVNVQGTTNVIDACIEVGVKRLIYTSSPSVVFDGVHGTLNADESLPYPPKHNDSYSATKAEGEALILKANGRSGLLTCCIRPSSIFGPGDKLMVPSLVTAARAGKSKFIIGDGSNFYDFTYVENVVHAHVCAERALASGGEVCAKAAGQAYFITNMEPIKFWEFMSQLLEGLGYERPSIKIPASLMMPIAYLVELAYKLLGPYGMKVPVLTPSRVRLLSCNRTFDSSKAKDRLGYSPVVPLQEGIKRTIDSFSHLKAQNQPKTEVTETIQWKKQTLIAIVILITLYHNFVATTGSSSVIITAVSKVLLVSSIFMFINGILPEKMKVFGSKKID

SEQ ID NO: 108011 - DNA, 2322 bp, Arabidopsis thaliana
  misc_feature (1)..(2322): Ceres Seq. ID no. 13653017
gtcgtcgttgtaaaatggctaccggaaacttggcttctcgtcttcatctcttgatcgatctttgtgttcgccaattccctgaaagagaagaagtaactttgccgacgaaggaaacggaaaaagatctgcttctttctctatctcaggtgttgagagaaattcaatcttggaggagcgaaatttcatgtgataaggcggtggaatcgcgagaggagactgttgttgatcatgatgaatctgctgatgctttatatggtccagactctatagagtatttatgcttagaaagacttgtggcggatcttgtttgtttgttgggtatggagaatgtgcatgttaaacatttggctggcaacatacttgtggaagtatccggttgtcttgttgaatctggaagtcaatgggatgagttcattcgtttgctttgtgaatgtttgcggttagcagttatctacagtttcccaattcctgctgtaggatctgaaactggatttggaagtctagatcaatgtttcttcggttctgatgttcttaaatgtaagctggaaaaggctaactggtccacggtgtcggatatctttcgagttcttcgtaatatattgaagcgcttgagccaagaagacaatgaggaaatttttgatgtatacttggaatctgtcaactctacacttgcaaaagttccttggtgccgattggatactattttttctcatcagcatggtagtggtgaaagaaatttccaaggtcagagtggaaacagtgaggaagcaactgtatttcttgggagctttgtccagtttctctgttccatggttcagcaggttcatgttgtagaagattctgatgattttgaaccttcatatttgatcctccaaaaaaccatcaagcttattccggatctcctccgttggtgccaaccaaagttgaaaagtcaaagtggctcttgcatgtcaagatacctagggcacaagttactggtgttgatgatcaggcttactgataagtccaaaatcaaatgtaccattcttctttcatggctgcaatatttgcaacgggattctcaaggctttcttcaacacaccctaacaaagtttaaacccgttcaagataattgtttggagggttcgccattctttgtgagtttgtctgatagggaggtcaatgagatgcattctaatcatttgcaaagactctctgtgtttctgttcctacggtgctccttcactttgatttactcaagtagacataacgacaagctatgtgagtttgattgtagaaagaaagggatggcagagatgtttaaatggattgaacgacagattccaggcaatatgttttctgatcacagaatttatagcaagaagaatgttgaattttctgcatccttcgttcggctgttcatgcatgaggatgatctattatttaaagtcctcctgcaattgctgtctgtaccattgcatagacaggaattgcctaacgtggaagggggttcgcttgaagatgaggaacaaattactctcttccgtttatcaaccttgttcaatcctgtaagattattctgtatatttctttcagagctgcattatgatcatcaagtacttcttgattaccttatatctaaagatattggggctagctgcgcagagtacctgctgagatgcttgcgtgcagtatgtgattcatggactctatttgtggaattcccatttgaaggaagtacagatgctccatctccgaagagaagaaaagttttgcctgagacttctgaggttgaacaaaactggagattacatgcccaggcttttgaagacgccaaagattgtctgctttcgttacaaaattcagttgttaagctacatcagaagaaactgtttccatacaacccagaggctcttctacgacgtttgtcaaggtttcatgagctctgtctatcccatgagtaatatatctggaccaaaggtgagattctctgagacagaacagaaggatcagatgccaacacaaagaagtctcctttccagatcaaatttcaaactaatcggctcaccagtagaagtgtatagagatcctacattctttggttggtgcagctgctatgaaacagagagcattatgttcttgcctccacaatccaaatctgaatggtataagatactctctagtcaagctaatgtgaaactgccccagccaattagagtaagcaatgaagtgtagaatatcaagaatcacaaatattgaaactctcttattcatatcatagatgtaactgagcccaaatcatacacaggtgtcatcattttacatttagttatatttcgctgc

SEQ ID NO: 108012 - protein, 646 aa, Arabidopsis thaliana
  peptide (1)..(646): Ceres Seq. ID no. 13653018
  misc_feature (175)..(642): Homolog of NCBI NO: 33146559 NR Description: unknown protein [Oryza sativa (japonica
  misc_feature (91)..(380): Homolog of NCBI NO: 34915430 NR Description: hypothetical protein~similar to Arabidopsis
  misc_feature (445)..(633): Homolog of NCBI NO: 34915430 NR Description: hypothetical protein~similar to Arabidopsis
RRCKMATGNLASRLHLLIDLCVRQFPEREEVTLPTKETEKDLLLSLSQVLREIQSWRSEISCDKAVESREETVVDHDESADALYGPDSIEYLCLERLVADLVCLLGMENVHVKHLAGNILVEVSGCLVESGSQWDEFIRLLCECLRLAVIYSFPIPAVGSETGFGSLDQCFFGSDVLKCKLEKANWSTVSDIFRVLRNILKRLSQEDNEEIFDVYLESVNSTLAKVPWCRLDTIFSHQHGSGERNFQGQSGNSEEATVFLGSFVQFLCSMVQQVHVVEDSDDFEPSYLILQKTIKLIPDLLRWCQPKLKSQSGSCMSRYLGHKLLVLMIRLTDKSKIKCTILLSWLQYLQRDSQGFLQHTLTKFKPVQDNCLEGSPFFVSLSDREVNEMHSNHLQRLSVFLFLRCSFTLIYSSRHNDKLCEFDCRKKGMAEMFKWIERQIPGNMFSDHRIYSKKNVEFSASFVRLFMHEDDLLFKVLLQLLSVPLHRQELPNVEGGSLEDEEQITLFRLSTLFNPVRLFCIFLSELHYDHQVLLDYLISKDIGASCAEYLLRCLRAVCDSWTLFVEFPFEGSTDAPSPKRRKVLPETSEVEQNWRLHAQAFEDAKDCLLSLQNSVVKLHQKKLFPYNPEALLRRLSRFHELCLSHE

SEQ ID NO: 108013 - protein, 642 aa, Arabidopsis thaliana
  peptide (1)..(642): Ceres Seq. ID no. 13653019
  misc_feature (171)..(638): Homolog of NCBI NO: 33146559 NR Description: unknown protein [Oryza sativa (japonica
  misc_feature (87)..(376): Homolog of NCBI NO: 34915430 NR Description: hypothetical protein~similar to Arabidopsis
  misc_feature (441)..(629): Homolog of NCBI NO: 34915430 NR Description: hypothetical protein~similar to Arabidopsis
MATGNLASRLHLLIDLCVRQFPEREEVTLPTKETEKDLLLSLSQVLREIQSWRSEISCDKAVESREETVVDHDESADALYGPDSIEYLCLERLVADLVCLLGMENVHVKHLAGNILVEVSGCLVESGSQWDEFIRLLCECLRLAVIYSFPIPAVGSETGFGSLDQCFFGSDVLKCKLEKANWSTVSDIFRVLRNILKRLSQEDNEEIFDVYLESVNSTLAKVPWCRLDTIFSHQHGSGERNFQGQSGNSEEATVFLGSFVQFLCSMVQQVHVVEDSDDFEPSYLILQKTIKLIPDLLRWCQPKLKSQSGSCMSRYLGHKLLVLMIRLTDKSKIKCTILLSWLQYLQRDSQGFLQHTLTKFKPVQDNCLEGSPFFVSLSDREVNEMHSNHLQRLSVFLFLRCSFTLIYSSRHNDKLCEFDCRKKGMAEMFKWIERQIPGNMFSDHRIYSKKNVEFSASFVRLFMHEDDLLFKVLLQLLSVPLHRQELPNVEGGSLEDEEQITLFRLSTLFNPVRLFCIFLSELHYDHQVLLDYLISKDIGASCAEYLLRCLRAVCDSWTLFVEFPFEGSTDAPSPKRRKVLPETSEVEQNWRLHAQAFEDAKDCLLSLQNSVVKLHQKKLFPYNPEALLRRLSRFHELCLSHE

SEQ ID NO: 108014 - protein, 540 aa, Arabidopsis thaliana
  peptide (1)..(540): Ceres Seq. ID no. 13653020
  misc_feature (69)..(536): Homolog of NCBI NO: 33146559 NR Description: unknown protein [Oryza sativa (japonica
  misc_feature (1)..(274): Homolog of NCBI NO: 34915430 NR Description: hypothetical protein~similar to Arabidopsis
  misc_feature (339)..(527): Homolog of NCBI NO: 34915430 NR Description: hypothetical protein~similar to Arabidopsis
MENVHVKHLAGNILVEVSGCLVESGSQWDEFIRLLCECLRLAVIYSFPIPAVGSETGFGSLDQCFFGSDVLKCKLEKANWSTVSDIFRVLRNILKRLSQEDNEEIFDVYLESVNSTLAKVPWCRLDTIFSHQHGSGERNFQGQSGNSEEATVFLGSFVQFLCSMVQQVHVVEDSDDFEPSYLILQKTIKLIPDLLRWCQPKLKSQSGSCMSRYLGHKLLVLMIRLTDKSKIKCTILLSWLQYLQRDSQGFLQHTLTKFKPVQDNCLEGSPFFVSLSDREVNEMHSNHLQRLSVFLFLRCSFTLIYSSRHNDKLCEFDCRKKGMAEMFKWIERQIPGNMFSDHRIYSKKNVEFSASFVRLFMHEDDLLFKVLLQLLSVPLHRQELPNVEGGSLEDEEQITLFRLSTLFNPVRLFCIFLSELHYDHQVLLDYLISKDIGASCAEYLLRCLRAVCDSWTLFVEFPFEGSTDAPSPKRRKVLPETSEVEQNWRLHAQAFEDAKDCLLSLQNSVVKLHQKKLFPYNPEALLRRLSRFHELCLSHE

SEQ ID NO: 108015 - DNA, 1761 bp, Arabidopsis thaliana
  misc_feature (1)..(1761): Ceres Seq. ID no. 13653021
  misc_feature: MA Experiment ID: 20000180 Result: Up-regulated in Transcription
  misc_feature: MA Experiment 20000180 PARAMETER Experiment Name: At_Germinating_Seeds_P Parameter: Age (hr) Value: 24 vs. 0
  misc_feature: MA Experiment 20000180 PARAMETER Experiment Name: At_Germinating_Seeds_P Parameter: Tissue Value: Germinating Seeds
  misc_feature: MA Experiment ID: 20000184 Result: Up-regulated in Transcription
  misc_feature: MA Experiment 20000184 PARAMETER Experiment Name: At_Shoots__P Parameter: Age (day) Value: 7
  misc_feature: MA Experiment 20000184 PARAMETER Experiment Name: At_Shoots__P Parameter: Tissue Value: Shoots vs. Whole Plant
  misc_feature: MA Experiment ID: 20000185 Result: Down-regulated in Transcription
  misc_feature: MA Experiment 20000185 PARAMETER Experiment Name: At_Roots__P Parameter: Age (day) Value: 7 vs. 21
  misc_feature: MA Experiment 20000185 PARAMETER Experiment Name: At_Roots__P Parameter: Organism Value: A. thaliana
  misc_feature: MA Experiment 20000185 PARAMETER Experiment Name: At_Roots__P Parameter: Tissue Value: Roots vs. Whole Plant
  misc_feature: MA Experiment ID: 20000264 Result: Down-regulated in Transcription
  misc_feature: MA Experiment 20000264 PARAMETER Experiment Name: At_Open_Flower_P Parameter: Age (day) Value: 21
  misc_feature: MA Experiment 20000264 PARAMETER Experiment Name: At_Open_Flower_P Parameter: Plant Line Value: WS
  misc_feature: MA Experiment 20000264 PARAMETER Experiment Name: At_Open_Flower_P Parameter: Tissue Value: Open Flower vs. Whole Plant
  misc_feature: MA Experiment ID: 20000437 Result: Down-regulated in Transcription
  misc_feature: MA Experiment 20000437 PARAMETER Experiment Name: At_Drought_P Parameter: Age (day) Value: 8
  misc_feature: MA Experiment 20000437 PARAMETER Experiment Name: At_Drought_P Parameter: Organism Value: A. thaliana
  misc_feature: MA Experiment 20000437 PARAMETER Experiment Name: At_Drought_P Parameter: Plant Line Value: WS
  misc_feature: MA Experiment 20000437 PARAMETER Experiment Name: At_Drought_P Parameter: Timepoint (hr) Value: 24
  misc_feature: MA Experiment 20000437 PARAMETER Experiment Name: At_Drought_P Parameter: Tissue Value: Whole Plant
  misc_feature: MA Experiment 20000437 PARAMETER Experiment Name: At_Drought_P Parameter: Treatment Value: Drought vs. No Drought
  misc_feature: MA Experiment ID: 20000438 Result: Up-regulated in Transcription
  misc_feature: MA Experiment 20000438 PARAMETER Experiment Name: At_Shoots__P Parameter: Age (day) Value: 14
  misc_feature: MA Experiment 20000438 PARAMETER Experiment Name: At_Shoots__P Parameter: Tissue Value: Shoots vs. Whole Plant
  misc_feature: MA Experiment ID: 20000439 Result: Down-regulated in Transcription
  misc_feature: MA Experiment 20000439 PARAMETER Experiment Name: At_Roots__P Parameter: Age (day) Value: 14 vs. 21
  misc_feature: MA Experiment 20000439 PARAMETER Experiment Name: At_Roots__P Parameter: Organism Value: A. thaliana
  misc_feature: MA Experiment 20000439 PARAMETER Experiment Name: At_Roots__P Parameter: Tissue Value: Roots vs. Whole Plant
  misc_feature: MA Experiment ID: 20000495 Result: Down-regulated in Transcription
  misc_feature: MA Experiment 20000495 PARAMETER Experiment Name: At_Guard_Cells_P Parameter: Harvest Date Value: 8/2/2002
  misc_feature: MA Experiment 20000495 PARAMETER Experiment Name: At_Guard_Cells_P Parameter: Organism Value: A. thaliana
  misc_feature: MA Experiment 20000495 PARAMETER Experiment Name: At_Guard_Cells_P Parameter: Tissue Value: Guard Cells vs. Leaves
  misc_feature: MA Experiment ID: 20000496 Result: Down-regulated in Transcription
  misc_feature: MA Experiment 20000496 PARAMETER Experiment Name: At_Guard_Cells_P Parameter: Harvest Date Value: 7/19/2002
  misc_feature: MA Experiment 20000496 PARAMETER Experiment Name: At_Guard_Cells_P Parameter: Organism Value: Canola
  misc_feature: MA Experiment 20000496 PARAMETER Experiment Name: At_Guard_Cells_P Parameter: Tissue Value: Guard Cells vs. Leaves
  misc_feature: MA Experiment ID: 20000794 Result: Down-regulated in Transcription
  misc_feature: MA Experiment 20000794 PARAMETER Experiment Name: At_Petals_P Parameter: Age (day) Value: 23-25 days
  misc_feature: MA Experiment 20000794 PARAMETER Experiment Name: At_Petals_P Parameter: Plant Line Value: WS
  misc_feature: MA Experiment 20000794 PARAMETER Experiment Name: At_Petals_P Parameter: Tissue Value: Petals vs. Whole plant
  misc_feature: MA Experiment ID: 20001248 Result: Down-regulated in Transcription
  misc_feature: MA Experiment 20001248 PARAMETER Experiment Name: At_Far-red-induction_P Parameter: Age (day) Value: 7
  misc_feature: MA Experiment 20001248 PARAMETER Experiment Name: At_Far-red-induction_P Parameter: Light Value: Far-red vs. White
  misc_feature: MA Experiment 20001248 PARAMETER Experiment Name: At_Far-red-induction_P Parameter: Organism Value: A. thaliana
  misc_feature: MA Experiment 20001248 PARAMETER Experiment Name: At_Far-red-induction_P Parameter: Plant Line Value: Columbia
  misc_feature: MA Experiment 20001248 PARAMETER Experiment Name: At_Far-red-induction_P Parameter: Timepoint (hr) Value: 4
  misc_feature: MA Experiment 20001248 PARAMETER Experiment Name: At_Far-red-induction_P Parameter: Tissue Value: Whole Plant
  misc_feature: MA Experiment ID: 20001450 Result: Down-regulated in Transcription
  misc_feature: MA Experiment 20001450 PARAMETER Experiment Name: At_Far-red-induction_P Parameter: Age (day) Value: 7
  misc_feature: MA Experiment 20001450 PARAMETER Experiment Name: At_Far-red-induction_P Parameter: Light Value: Far-red vs. White
  misc_feature: MA Experiment 20001450 PARAMETER Experiment Name: At_Far-red-induction_P Parameter: Organism Value: A. thaliana
  misc_feature: MA Experiment 20001450 PARAMETER Experiment Name: At_Far-red-induction_P Parameter: Plant Line Value: Columbia
  misc_feature: MA Experiment 20001450 PARAMETER Experiment Name: At_Far-red-induction_P Parameter: Timepoint (hr) Value: 8
  misc_feature: MA Experiment 20001450 PARAMETER Experiment Name: At_Far-red-induction_P Parameter: Tissue Value: Whole Plant
  misc_feature: MA Experiment ID: 20001451 Result: Down-regulated in Transcription
  misc_feature: MA Experiment 20001451 PARAMETER Experiment Name: At_Far-red-induction_P Parameter: Age (day) Value: 7
  misc_feature: MA Experiment 20001451 PARAMETER Experiment Name: At_Far-red-induction_P Parameter: Light Value: Far-red vs. White
  misc_feature: MA Experiment 20001451 PARAMETER Experiment Name: At_Far-red-induction_P Parameter: Organism Value: A. thaliana
  misc_feature: MA Experiment 20001451 PARAMETER Experiment Name: At_Far-red-induction_P Parameter: Plant Line Value: Columbia
  misc_feature: MA Experiment 20001451 PARAMETER Experiment Name: At_Far-red-induction_P Parameter: Timepoint (hr) Value: 24
  misc_feature: MA Experiment 20001451 PARAMETER Experiment Name: At_Far-red-induction_P Parameter: Tissue Value: Whole Plant
  misc_feature: MA Experiment ID: 20001555 Result: Down-regulated in Transcription
  misc_feature: MA Experiment 20001555 PARAMETER Experiment Name: At_Drought_Soil_Dry_P Parameter: Age (day) Value: 24
  misc_feature: MA Experiment 20001555 PARAMETER Experiment Name: At_Drought_Soil_Dry_P Parameter: Organism Value: A. thaliana
  misc_feature: MA Experiment 20001555 PARAMETER Experiment Name: At_Drought_Soil_Dry_P Parameter: Plant Line Value: WS
  misc_feature: MA Experiment 20001555 PARAMETER Experiment Name: At_Drought_Soil_Dry_P Parameter: Post Timepoint (hr) Value: None
  misc_feature: MA Experiment 20001555 PARAMETER Experiment Name: At_Drought_Soil_Dry_P Parameter: Post-Treatment Value: None
  misc_feature: MA Experiment 20001555 PARAMETER Experiment Name: At_Drought_Soil_Dry_P Parameter: Timepoint (day) Value: 10
  misc_feature: MA Experiment 20001555 PARAMETER Experiment Name: At_Drought_Soil_Dry_P Parameter: Treatment Value: Drought vs. No Drought
  misc_feature: MA Experiment ID: 20001757 Result: Up-regulated in Transcription
  misc_feature: MA Experiment 20001757 PARAMETER Experiment Name: At_50mM_NH4NO3_L-to-H_P Parameter: Timepoint (hr) Value: 6
  misc_feature: MA Experiment 20001757 PARAMETER Experiment Name: At_50mM_NH4NO3_L-to-H_P Parameter: Tissue Value: Leaf
  misc_feature: MA Experiment 20001757 PARAMETER Experiment Name: At_50mM_NH4NO3_L-to-H_P Parameter: Treatment Value: 50mM NH4NO3 vs 100mM Mannitol
  misc_feature: MA Experiment ID: 20001904 Result: Down-regulated in Transcription
  misc_feature: MA Experiment 20001904 PARAMETER Experiment Name: At_Drought_Reproduction_P Parameter: Age (day) Value: 37
  misc_feature: MA Experiment 20001904 PARAMETER Experiment Name: At_Drought_Reproduction_P Parameter: Organism Value: A. thaliana
  misc_feature: MA Experiment 20001904 PARAMETER Experiment Name: At_Drought_Reproduction_P Parameter: Plant Line Value: WS
  misc_feature: MA Experiment 20001904 PARAMETER Experiment Name: At_Drought_Reproduction_P Parameter: Timepoint (day) Value: 7
  misc_feature: MA Experiment 20001904 PARAMETER Experiment Name: At_Drought_Reproduction_P Parameter: Tissue Value: Rosettes
  misc_feature: MA Experiment 20001904 PARAMETER Experiment Name: At_Drought_Reproduction_P Parameter: Treatment Value: Drought vs. No Drought
  misc_feature: MA Experiment ID: 20001905 Result: Down-regulated in Transcription
  misc_feature: MA Experiment 20001905 PARAMETER Experiment Name: At_Drought_Reproduction_P Parameter: Age (day) Value: 40
  misc_feature: MA Experiment 20001905 PARAMETER Experiment Name: At_Drought_Reproduction_P Parameter: Organism Value: A. thaliana
  misc_feature: MA Experiment 20001905 PARAMETER Experiment Name: At_Drought_Reproduction_P Parameter: Plant Line Value: WS
  misc_feature: MA Experiment 20001905 PARAMETER Experiment Name: At_Drought_Reproduction_P Parameter: Timepoint (day) Value: 10
  misc_feature: MA Experiment 20001905 PARAMETER Experiment Name: At_Drought_Reproduction_P Parameter: Tissue Value: Rosettes
  misc_feature: MA Experiment 20001905 PARAMETER Experiment Name: At_Drought_Reproduction_P Parameter: Treatment Value: Drought vs. No Drought
  misc_feature: MA Experiment ID: 20001906 Result: Down-regulated in Transcription
  misc_feature: MA Experiment 20001906 PARAMETER Experiment Name: At_Drought_Reproduction_P Parameter: Age (day) Value: 35
  misc_feature: MA Experiment 20001906 PARAMETER Experiment Name: At_Drought_Reproduction_P Parameter: Organism Value: A. thaliana
  misc_feature: MA Experiment 20001906 PARAMETER Experiment Name: At_Drought_Reproduction_P Parameter: Plant Line Value: WS
  misc_feature: MA Experiment 20001906 PARAMETER Experiment Name: At_Drought_Reproduction_P Parameter: Timepoint (day) Value: 5
  misc_feature: MA Experiment 20001906 PARAMETER Experiment Name: At_Drought_Reproduction_P Parameter: Tissue Value: Siliques
  misc_feature: MA Experiment 20001906 PARAMETER Experiment Name: At_Drought_Reproduction_P Parameter: Treatment Value: Drought vs. No Drought
  misc_feature: MA Experiment ID: 20001907 Result: Down-regulated in Transcription
  misc_feature: MA Experiment 20001907 PARAMETER Experiment Name: At_Drought_Reproduction_P Parameter: Age (day) Value: 37
  misc_feature: MA Experiment 20001907 PARAMETER Experiment Name: At_Drought_Reproduction_P Parameter: Organism Value: A. thaliana
  misc_feature: MA Experiment 20001907 PARAMETER Experiment Name: At_Drought_Reproduction_P Parameter: Plant Line Value: WS
  misc_feature: MA Experiment 20001907 PARAMETER Experiment Name: At_Drought_Reproduction_P Parameter: Timepoint (day) Value: 7
  misc_feature: MA Experiment 20001907 PARAMETER Experiment Name: At_Drought_Reproduction_P Parameter: Tissue Value: Siliques
  misc_feature: MA Experiment 20001907 PARAMETER Experiment Name: At_Drought_Reproduction_P Parameter: Treatment Value: Drought vs. No Drought
agttagtaaacgagcaaaagaagaagagaaacaacaagaagtagtaatggcttcctctatgctctcctccgccgctgtggttacatccccggctcaggccaccatggtcgctccattcaccggcttgaagtcatccgctgcattcccggtcacccgcaagaccaacaaggacatcacttccatcgcaagcaacgggggaagagttagctgcatgaaggtgtggccaccaattggaaagaagaagtttgagactctatcttacctccctgaccttagtgacgtcgaattggctaaggaagttgactaccttctccgcaacaagtggattccttgtgttgaattcgagttagagcacggatttgtgtaccgtgagcacggaaacactcccggatactacgatggacggtactggacaatgtggaagcttccattgttcggatgcaccgactccgctcaagtgttgaaggaagttgaagaatgcaagaaggagtacccgggcgccttcattaggatcatcggattcgacaacacccgtcaagtacataaaggatcctcaattattgtctttcattgatgcagagtgtttcattgtgagcacagtcaatgctttgcagacgccaatgatcaatgcaagtatggttttatgtgacaggcactatggaggaattaactacccggttggtggagttggtgggattgccaagtctttggcagaagggcttgttgatcaaggcagtgaaatacaatacaaggctaatgtaaaaagtataatacttgatcatggaaaggcagttggtgtaaggctagcagatggaagagaatttttcgctaagacgataatttcaaatgctacaagatgggatacgtttgggaagctgttaaaaggagaaaagcttcctaaagaagaagaaaatttccagaaagtgtacgtcaaggctccatcatttctttcaattcacatgggtgttaaagcagaggttctccctccagatacagattgccatcattttgtgctcgaggacgattggaagaatctggaggagccttatggcagtattttcctcagcattccaaccattcttgattcatctttggctccagatggtcgacatatacttcacatatttacaacttcgtccattgaggattgggagggactccctccaaaagagtatgaggcgaaaaaggaagatgtggcagctagaataatccagagactagagaaaaaattgtttccagggctcagttcatctattacgttcaaggaggtgggaacaccaagaacacacagacgatttcttgcgagggataagggaacttatgggccaatgcctagaggaaccccgaaaggtttattaggcatgccattcaatacaacggctatagatggtctatactgcgtgggggatagttgttttcctggccagggagttatagctgtggctttttcaggagtgatgtgtgctcatcgggtagctgctgatattgggcttgagaagaaatcacgagtacttgatgttggccttcttggtttacttggttggctaaggacactcgcatagatccaatacattatttccttttcttctttattatgttaatttctattgttttactatttcttcatagaattttacttttctttattttcttatttcctcgtttacttttttctagttctatataaagaagaccttcttgtaagaaatacatctcataataattttcttaagaagcatagagtttttctctcttctactg

SEQ ID NO: 108016 - protein, 313 aa, Arabidopsis thaliana
  peptide (1)..(313): Ceres Seq. ID no. 13653022
  misc_feature (1)..(285): Pfam Name: Flavin containing amine oxidoreductase Pfam Description: Flavin containing amine oxidoreductase
  misc_feature (1)..(313): Homolog of NCBI NO: 25314928 NR Description: hypothetical protein [imported] - Arabidopsis >gi|7523710|gb|AAF63149.1|AC011001_19 Similar to phytoene
  misc_feature (1)..(313): Homolog of NCBI NO: 15222207 NR Description: carotenoid isomerase, putative [Arabidopsis
  misc_feature (1)..(313): Homolog of NCBI NO: 19550437 NR Description: carotenoid isomerase [Lycopersicon esculentum]
  misc_feature (1)..(291): Homolog of NCBI NO: 17229556 NR Description: hypothetical protein [Nostoc sp. PCC 7120]
  misc_feature (1)..(290): Homolog of NCBI NO: 23126287 NR Description: hypothetical protein [Nostoc punctiforme]
  misc_feature (1)..(296): Homolog of NCBI NO: 23043211 NR Description: hypothetical protein [Trichodesmium erythraeum
  misc_feature (1)..(291): Homolog of NCBI NO: 16331999 NR Description: unknown protein [Synechocystis sp. PCC 6803]
  misc_feature (1)..(291): Homolog of NCBI NO: 33865435 NR Description: Carotenoid isomerase [Synechococcus sp. WH 8102]
  misc_feature (1)..(291): Homolog of NCBI NO: 33240035 NR Description: Phytoene dehydrogenase / carotenoid isomerase marinus subsp. marinus str. CCMP1375] >gi|33237561|gb|AAP99629.1| dehydrogenase / carotenoid isomerase [Prochlorococcus marinus
  misc_feature (1)..(291): Homolog of NCBI NO: 33861671 NR Description: putative carotenoid isomerase [Prochlorococcus subsp. pastoris str. CCMP1378] >gi|33640039|emb|CAE19574.1| carotenoid isomerase [Prochlorococcus marinus subsp. pastoris
MINASMVLCDRHYGGINYPVGGVGGIAKSLAEGLVDQGSEIQYKANVKSIILDHGKAVGVRLADGREFFAKTIISNATRWDTFGKLLKGEKLPKEEENFQKVYVKAPSFLSIHMGVKAEVLPPDTDCHHFVLEDDWKNLEEPYGSIFLSIPTILDSSLAPDGRHILHIFTTSSIEDWEGLPPKEYEAKKEDVAARIIQRLEKKLFPGLSSSITFKEVGTPRTHRRFLARDKGTYGPMPRGTPKGLLGMPFNTTAIDGLYCVGDSCFPGQGVIAVAFSGVMCAHRVAADIGLEKKSRVLDVGLLGLLGWLRTLA

SEQ ID NO: 108017 - protein, 308 aa, Arabidopsis thaliana
  peptide (1)..(308): Ceres Seq. ID no. 13653023
  misc_feature (1)..(280): Pfam Name: Flavin containing amine oxidoreductase Pfam Description: Flavin containing amine oxidoreductase
  misc_feature (1)..(308): Homolog of NCBI NO: 25314928 NR Description: hypothetical protein [imported] - Arabidopsis >gi|7523710|gb|AAF63149.1|AC011001_19 Similar to phytoene
  misc_feature (1)..(308): Homolog of NCBI NO: 15222207 NR Description: carotenoid isomerase, putative [Arabidopsis
  misc_feature (1)..(308): Homolog of NCBI NO: 19550437 NR Description: carotenoid isomerase [Lycopersicon esculentum]
  misc_feature (1)..(286): Homolog of NCBI NO: 17229556 NR Description: hypothetical protein [Nostoc sp. PCC 7120]
  misc_feature (1)..(285): Homolog of NCBI NO: 23126287 NR Description: hypothetical protein [Nostoc punctiforme]
  misc_feature (1)..(291): Homolog of NCBI NO: 23043211 NR Description: hypothetical protein [Trichodesmium erythraeum
  misc_feature (1)..(286): Homolog of NCBI NO: 16331999 NR Description: unknown protein [Synechocystis sp. PCC 6803]
  misc_feature (1)..(286): Homolog of NCBI NO: 33865435 NR Description: Carotenoid isomerase [Synechococcus sp. WH 8102]
  misc_feature (1)..(286): Homolog of NCBI NO: 33240035 NR Description: Phytoene dehydrogenase / carotenoid isomerase marinus subsp. marinus str. CCMP1375] >gi|33237561|gb|AAP99629.1| dehydrogenase / carotenoid isomerase [Prochlorococcus marinus
  misc_feature (1)..(286): Homolog of NCBI NO: 33861671 NR Description: putative carotenoid isomerase [Prochlorococcus subsp. pastoris str. CCMP1378] >gi|33640039|emb|CAE19574.1| carotenoid isomerase [Prochlorococcus marinus subsp. pastoris
MVLCDRHYGGINYPVGGVGGIAKSLAEGLVDQGSEIQYKANVKSIILDHGKAVGVRLADGREFFAKTIISNATRWDTFGKLLKGEKLPKEEENFQKVYVKAPSFLSIHMGVKAEVLPPDTDCHHFVLEDDWKNLEEPYGSIFLSIPTILDSSLAPDGRHILHIFTTSSIEDWEGLPPKEYEAKKEDVAARIIQRLEKKLFPGLSSSITFKEVGTPRTHRRFLARDKGTYGPMPRGTPKGLLGMPFNTTAIDGLYCVGDSCFPGQGVIAVAFSGVMCAHRVAADIGLEKKSRVLDVGLLGLLGWLRTLA

SEQ ID NO: 108018 - protein, 200 aa, Arabidopsis thaliana
  peptide (1)..(200): Ceres Seq. ID no. 13653024
  misc_feature (1)..(172): Pfam Name: Flavin containing amine oxidoreductase Pfam Description: Flavin containing amine oxidoreductase
  misc_feature (1)..(200): Homolog of NCBI NO: 25314928 NR Description: hypothetical protein [imported] - Arabidopsis >gi|7523710|gb|AAF63149.1|AC011001_19 Similar to phytoene
  misc_feature (1)..(200): Homolog of NCBI NO: 15222207 NR Description: carotenoid isomerase, putative [Arabidopsis
  misc_feature (1)..(200): Homolog of NCBI NO: 19550437 NR Description: carotenoid isomerase [Lycopersicon esculentum]
  misc_feature (1)..(178): Homolog of NCBI NO: 17229556 NR Description: hypothetical protein [Nostoc sp. PCC 7120]
  misc_feature (1)..(177): Homolog of NCBI NO: 23126287 NR Description: hypothetical protein [Nostoc punctiforme]
  misc_feature (1)..(183): Homolog of NCBI NO: 23043211 NR Description: hypothetical protein [Trichodesmium erythraeum
  misc_feature (1)..(178): Homolog of NCBI NO: 16331999 NR Description: unknown protein [Synechocystis sp. PCC 6803]
  misc_feature (1)..(178): Homolog of NCBI NO: 33865435 NR Description: Carotenoid isomerase [Synechococcus sp. WH 8102]
  misc_feature (1)..(178): Homolog of NCBI NO: 33240035 NR Description: Phytoene dehydrogenase / carotenoid isomerase marinus subsp. marinus str. CCMP1375] >gi|33237561|gb|AAP99629.1| dehydrogenase / carotenoid isomerase [Prochlorococcus marinus
  misc_feature (1)..(178): Homolog of NCBI NO: 33861671 NR Description: putative carotenoid isomerase [Prochlorococcus subsp. pastoris str. CCMP1378] >gi|33640039|emb|CAE19574.1| carotenoid isomerase [Prochlorococcus marinus subsp. pastoris
MGVKAEVLPPDTDCHHFVLEDDWKNLEEPYGSIFLSIPTILDSSLAPDGRHILHIFTTSSIEDWEGLPPKEYEAKKEDVAARIIQRLEKKLFPGLSSSITFKEVGTPRTHRRFLARDKGTYGPMPRGTPKGLLGMPFNTTAIDGLYCVGDSCFPGQGVIAVAFSGVMCAHRVAADIGLEKKSRVLDVGLLGLLGWLRTLA

SEQ ID NO: 108019 - DNA, 1650 bp, Arabidopsis thaliana
  misc_feature (1)..(1650): Ceres Seq. ID no. 13653029
  misc_feature: MA Experiment ID: 20000327 Result: Up-regulated in Transcription
  misc_feature: MA Experiment 20000327 PARAMETER Experiment Name: At_42deg_Heat_Sub_P Parameter: Age (day) Value: 14
  misc_feature: MA Experiment 20000327 PARAMETER Experiment Name: At_42deg_Heat_Sub_P Parameter: Organism Value: A. thaliana
  misc_feature: MA Experiment 20000327 PARAMETER Experiment Name: At_42deg_Heat_Sub_P Parameter: Plant Line Value: WS
  misc_feature: MA Experiment 20000327 PARAMETER Experiment Name: At_42deg_Heat_Sub_P Parameter: Temperature (deg C) Value: 42 vs. 22
  misc_feature: MA Experiment 20000327 PARAMETER Experiment Name: At_42deg_Heat_Sub_P Parameter: Timepoint (hr) Value: 1
  misc_feature: MA Experiment 20000327 PARAMETER Experiment Name: At_42deg_Heat_Sub_P Parameter: Tissue Value: Aerial
  misc_feature: MA Experiment ID: 20000355 Result: Up-regulated in Transcription
  misc_feature: MA Experiment 20000355 PARAMETER Experiment Name: At_Siliques_Sub_P Parameter: Age (day) Value: 21
  misc_feature: MA Experiment 20000355 PARAMETER Experiment Name: At_Siliques_Sub_P Parameter: Organism Value: A. thaliana
  misc_feature: MA Experiment 20000355 PARAMETER Experiment Name: At_Siliques_Sub_P Parameter: Plant Line Value: WS
  misc_feature: MA Experiment 20000355 PARAMETER Experiment Name: At_Siliques_Sub_P Parameter: Tissue Value: Less Than 5mm Siliques vs. Whole Plant
  misc_feature: MA Experiment ID: 20000440 Result: Up-regulated in Transcription
  misc_feature: MA Experiment 20000440 PARAMETER Experiment Name: At_Closed-Flower__Sub_P Parameter: Tissue Value: Closed Flower vs. Whole Plant
ctcttccgttgccttttcgctttctccgtacacttggccttccttctagcgatcaaaccctaggtcccgccattgttggtcccagacttcaatcgaagctccaatttcactaatttcaggtgttgtttattctctggaagttggcgatacaatggattctactgctgcaaccaaacgtgttgttgacccacttactgttgggagtgcgtttgtcaatcagtactactacattttctgtaacatgcctgagcatctgccccggttttatcaagagatcagtagagttggccgtgttggacaggacggagtcatgcgtgatttctccacttttcaaggtataagtgaggagcttaagagactgacttatggagattgcaactcggctgagataaccagttatgatactcaagagtctcacaatgggggtttccttctcttcgttactggatacttcactctaaacgagagatcgagaaggaaattcacccaaacttttttccttgccccgcaagaaaagggtttctttgttctgaatgacatcctcagatttgttaatgatgatgctaaggataatgttccagagaccatagatggggaagttgtttctgggataaactctacaacacccactattatcaatggcatgaagggttcggagcaagctgcatgtgtttcagtgaatcctgtttgtaaggaagtgtccaaacccttggataatgagaatgctaaggataatgttctggtacctgagattgctaatgaagttgcaaggactgagataacttgcaaagaagttgcagatgattcacagaaaaattatgaccctgatgatggacttgcagatgctcccaagaaatcctatgcctctgtgttgaaggttacgaaagataaatttggagttccagctgtctctttaccttctccaaagaagatacctaaagaccaagaacatcaagcgccttcagatccttctacaggccagatactcaaagaccaaggtcaacaagcatcttcagatccttctcaagtgatagaatctgatacagtttctgagtctgttgatgcttctgaaaatgggcacaatcaggaagcggtagctgagggtacatctatttatgtgagacatcttccttttaatgccaacattgacatgcttgaggctgaatttaagcaatttggagctattaccaatggtgggattcaagtcataaatcaaaggggccttggttatccttatggttttgttgagtttgaggaggcagatgctgcccacagagcaatagaggcttcacctgtgaagattggtggactgagagcttttgtggaggagaagctatcgacatcaagaggtaaaagaggaaatggaaacgtgggatacggaaataggaatgtgggagtgggaatgagaggaagaggaagttatggatatggctatgattacaggaggggaggtcgaggtcctggaggaggaggaaggtcttttaaccgtagaggcaatgaatacgtcgccagcatcaactcgtactagagcggatttgggttctcttgtggcggataattgatttttggaatggtggaaagaagatggtagcaagacagacagaattggtagatatctctctctcgggtattcaaatattagtaaaaggc

SEQ ID NO: 108020 - protein, 458 aa, Arabidopsis thaliana
  peptide (1)..(458): Ceres Seq. ID no. 13653030
  misc_feature (16)..(133): Pfam Name: Nuclear transport factor 2 (NTF2) domain Pfam Description: Nuclear transport factor 2 (NTF2) domain
  misc_feature (1)..(458): Homolog of NCBI NO: 30695510 NR Description: NTF2-containing RNA-binding protein, putative
  misc_feature (1)..(458): Homolog of NCBI NO: 10177355 NR Description: RNA-binding protein-like [Arabidopsis thaliana]
  misc_feature (13)..(458): Homolog of NCBI NO: 30687772 NR Description: NTF2-containing RNA-binding protein, putative thaliana] >gi|17979475|gb|AAL50074.1| AT3g25150/MJL12_9 thaliana] >gi|21360395|gb|AAM47313.1| AT3g25150/MJL12_9
  misc_feature (14)..(458): Homolog of NCBI NO: 9294171 NR Description: RNA-binding protein-like [Arabidopsis thaliana]
  misc_feature (3)..(443): Homolog of NCBI NO: 21742151 NR Description: OSJNBa0069D17.2 [Oryza sativa (japonica
  misc_feature (11)..(451): Homolog of NCBI NO: 34394922 NR Description: putative Ras-GTPase activating protein SH3
  misc_feature (16)..(166): Homolog of NCBI NO: 6642641 NR Description: putative RNA-binding protein [Arabidopsis
  misc_feature (287)..(395): Homolog of NCBI NO: 6642641 NR Description: putative RNA-binding protein [Arabidopsis
  misc_feature (16)..(458): Homolog of NCBI NO: 15240057 NR Description: NTF2-containing RNA-binding protein, putative thaliana] >gi|9758555|dbj|BAB09056.1| to unknown protein [Arabidopsis thaliana]
  misc_feature (14)..(172): Homolog of NCBI NO: 6642640 NR Description: putative RNA-binding protein [Arabidopsis
MDSTAATKRVVDPLTVGSAFVNQYYYIFCNMPEHLPRFYQEISRVGRVGQDGVMRDFSTFQGISEELKRLTYGDCNSAEITSYDTQESHNGGFLLFVTGYFTLNERSRRKFTQTFFLAPQEKGFFVLNDILRFVNDDAKDNVPETIDGEVVSGINSTTPTIINGMKGSEQAACVSVNPVCKEVSKPLDNENAKDNVLVPEIANEVARTEITCKEVADDSQKNYDPDDGLADAPKKSYASVLKVTKDKFGVPAVSLPSPKKIPKDQEHQAPSDPSTGQILKDQGQQASSDPSQVIESDTVSESVDASENGHNQEAVAEGTSIYVRHLPFNANIDMLEAEFKQFGAITNGGIQVINQRGLGYPYGFVEFEEADAAHRAIEASPVKIGGLRAFVEEKLSTSRGKRGNGNVGYGNRNVGVGMRGRGSYGYGYDYRRGGRGPGGGGRSFNRRGNEYVASINSY

SEQ ID NO: 108021 - protein, 428 aa, Arabidopsis thaliana
  peptide (1)..(428): Ceres Seq. ID no. 13653031
  misc_feature (1)..(103): Pfam Name: Nuclear transport factor 2 (NTF2) domain Pfam Description: Nuclear transport factor 2 (NTF2) domain
  misc_feature (1)..(428): Homolog of NCBI NO: 30695510 NR Description: NTF2-containing RNA-binding protein, putative
  misc_feature (1)..(428): Homolog of NCBI NO: 10177355 NR Description: RNA-binding protein-like [Arabidopsis thaliana]
  misc_feature (1)..(428): Homolog of NCBI NO: 30687772 NR Description: NTF2-containing RNA-binding protein, putative thaliana] >gi|17979475|gb|AAL50074.1| AT3g25150/MJL12_9 thaliana] >gi|21360395|gb|AAM47313.1| AT3g25150/MJL12_9
  misc_feature (1)..(428): Homolog of NCBI NO: 9294171 NR Description: RNA-binding protein-like [Arabidopsis thaliana]
  misc_feature (1)..(413): Homolog of NCBI NO: 21742151 NR Description: OSJNBa0069D17.2 [Oryza sativa (japonica
  misc_feature (1)..(421): Homolog of NCBI NO: 34394922 NR Description: putative Ras-GTPase activating protein SH3
  misc_feature (1)..(136): Homolog of NCBI NO: 6642641 NR Description: putative RNA-binding protein [Arabidopsis
  misc_feature (257)..(365): Homolog of NCBI NO: 6642641 NR Description: putative RNA-binding protein [Arabidopsis
  misc_feature (1)..(428): Homolog of NCBI NO: 15240057 NR Description: NTF2-containing RNA-binding protein, putative thaliana] >gi|9758555|dbj|BAB09056.1| to unknown protein [Arabidopsis thaliana]
  misc_feature (1)..(142): Homolog of NCBI NO: 6642640 NR Description: putative RNA-binding protein [Arabidopsis
MPEHLPRFYQEISRVGRVGQDGVMRDFSTFQGISEELKRLTYGDCNSAEITSYDTQESHNGGFLLFVTGYFTLNERSRRKFTQTFFLAPQEKGFFVLNDILRFVNDDAKDNVPETIDGEVVSGINSTTPTIINGMKGSEQAACVSVNPVCKEVSKPLDNENAKDNVLVPEIANEVARTEITCKEVADDSQKNYDPDDGLADAPKKSYASVLKVTKDKFGVPAVSLPSPKKIPKDQEHQAPSDPSTGQILKDQGQQASSDPSQVIESDTVSESVDASENGHNQEAVAEGTSIYVRHLPFNANIDMLEAEFKQFGAITNGGIQVINQRGLGYPYGFVEFEEADAAHRAIEASPVKIGGLRAFVEEKLSTSRGKRGNGNVGYGNRNVGVGMRGRGSYGYGYDYRRGGRGPGGGGRSFNRRGNEYVASINSY

SEQ ID NO: 108022 - protein, 405 aa, Arabidopsis thaliana
  peptide (1)..(405): Ceres Seq. ID no. 13653032
  misc_feature (1)..(80): Pfam Name: Nuclear transport factor 2 (NTF2) domain Pfam Description: Nuclear transport factor 2 (NTF2) domain
  misc_feature (1)..(405): Homolog of NCBI NO: 30695510 NR Description: NTF2-containing RNA-binding protein, putative
  misc_feature (1)..(405): Homolog of NCBI NO: 10177355 NR Description: RNA-binding protein-like [Arabidopsis thaliana]
  misc_feature (1)..(405): Homolog of NCBI NO: 30687772 NR Description: NTF2-containing RNA-binding protein, putative thaliana] >gi|17979475|gb|AAL50074.1| AT3g25150/MJL12_9 thaliana] >gi|21360395|gb|AAM47313.1| AT3g25150/MJL12_9
  misc_feature (1)..(405): Homolog of NCBI NO: 9294171 NR Description: RNA-binding protein-like [Arabidopsis thaliana]
  misc_feature (1)..(390): Homolog of NCBI NO: 21742151 NR Description: OSJNBa0069D17.2 [Oryza sativa (japonica
  misc_feature (1)..(398): Homolog of NCBI NO: 34394922 NR Description: putative Ras-GTPase activating protein SH3
  misc_feature (1)..(113): Homolog of NCBI NO: 6642641 NR Description: putative RNA-binding protein [Arabidopsis
  misc_feature (234)..(342): Homolog of NCBI NO: 6642641 NR Description: putative RNA-binding protein [Arabidopsis
  misc_feature (1)..(405): Homolog of NCBI NO: 15240057 NR Description: NTF2-containing RNA-binding protein, putative thaliana] >gi|9758555|dbj|BAB09056.1| to unknown protein [Arabidopsis thaliana]
  misc_feature (1)..(119): Homolog of NCBI NO: 6642640 NR Description: putative RNA-binding protein [Arabidopsis
MRDFSTFQGISEELKRLTYGDCNSAEITSYDTQESHNGGFLLFVTGYFTLNERSRRKFTQTFFLAPQEKGFFVLNDILRFVNDDAKDNVPETIDGEVVSGINSTTPTIINGMKGSEQAACVSVNPVCKEVSKPLDNENAKDNVLVPEIANEVARTEITCKEVADDSQKNYDPDDGLADAPKKSYASVLKVTKDKFGVPAVSLPSPKKIPKDQEHQAPSDPSTGQILKDQGQQASSDPSQVIESDTVSESVDASENGHNQEAVAEGTSIYVRHLPFNANIDMLEAEFKQFGAITNGGIQVINQRGLGYPYGFVEFEEADAAHRAIEASPVKIGGLRAFVEEKLSTSRGKRGNGNVGYGNRNVGVGMRGRGSYGYGYDYRRGGRGPGGGGRSFNRRGNEYVASINSY

SEQ ID NO: 108023 - DNA, 2702 bp, Arabidopsis thaliana
  misc_feature (1)..(2702): Ceres Seq. ID no. 13653033
  misc_feature: MA Experiment ID: 20000267 Result: Down-regulated in Transcription
  misc_feature: MA Experiment 20000267 PARAMETER Experiment Name: At_Drought_P Parameter: Age (day) Value: 7
  misc_feature: MA Experiment 20000267 PARAMETER Experiment Name: At_Drought_P Parameter: Organism Value: A. thaliana
  misc_feature: MA Experiment 20000267 PARAMETER Experiment Name: At_Drought_P Parameter: Plant Line Value: WS
  misc_feature: MA Experiment 20000267 PARAMETER Experiment Name: At_Drought_P Parameter: Timepoint (hr) Value: 6
  misc_feature: MA Experiment 20000267 PARAMETER Experiment Name: At_Drought_P Parameter: Tissue Value: Whole Plant
  misc_feature: MA Experiment 20000267 PARAMETER Experiment Name: At_Drought_P Parameter: Treatment Value: Drought vs. No Drought
  misc_feature: MA Experiment ID: 20000527 Result: Down-regulated in Transcription
  misc_feature: MA Experiment 20000527 PARAMETER Experiment Name: At_10percent_PEG_P Parameter: Age (day) Value: 20
  misc_feature: MA Experiment 20000527 PARAMETER Experiment Name: At_10percent_PEG_P Parameter: Organism Value: A. thaliana
  misc_feature: MA Experiment 20000527 PARAMETER Experiment Name: At_10percent_PEG_P Parameter: Plant Line Value: WS
  misc_feature: MA Experiment 20000527 PARAMETER Experiment Name: At_10percent_PEG_P Parameter: Timepoint (day) Value: 20
  misc_feature: MA Experiment 20000527 PARAMETER Experiment Name: At_10percent_PEG_P Parameter: Tissue Value: Whole Plant
  misc_feature: MA Experiment 20000527 PARAMETER Experiment Name: At_10percent_PEG_P Parameter: Treatment Value: 10percent PEG vs. No Treatment
ggtgaatgcgggaggaagaaatggaatcttcgtcagaaggtgagacaaacaagatttcccgatgcaaagccactggttcagacaatcctgatgaggactacgtcgagatcacactcgaagtgcgagacgaaaccatcaacacaatgaaggccaaggcgacacttcgttcggttctttccgggaggctgaaaacgatggttaagtcgctatcgtttgcttcacgccggctcgaccgtagtaagtcgttcggtgctatgtttgctcttcgagggttgaggttcattgccaaaaacgacgccgttggtagaggctgggatgaggttgcaatgaggtttgataagttggccgttgaagggaaactccctaaatccaaatttggacattgcataggaatggttgaatctagcgaatttgtgaacgagctttttgaggcgttggtccgaaggagagggactacgtcatcgtcaatcaccaaaactgaattgtttgaattctgggagcagatcacaggcaatagttttgatgataggctgcaaatcttttttgatatggtggacaaaaatttggacggacgtattacaggagatgaggttaaggagataattgctttaagtgcttcggctaacaagctatcaaagattaaagaaaatgtagatgaatatgctgccttgatcatggaagaactagatcgcgacaacctcggatatattgagttacataacttggaaacattgcttctccaagttcctagccaatcaaataacagtccatcttccgcgaacaaacgtgcactcaacaagatgttgagccagaagctcataccaacaaaagatcgaaacccggtgaaaagatttgctatgaatatatcatacttcttcttggaaaattggaaaaggatttgggtgttaacattgtggatatccatttgcatcactctcttcacttggaaatttctccagtataaacgcaaaaccgtgttcgaggtgatgggctactgtgttaccgtggccaaaggcagtgcagagaccttgaaattcaacatggctctcattctcttgcccgtttgtaggaacactatcacttggctaaggaccaagtccaagcttattgggtctgttgttccatttgatgacaatatcaatttccacaaggttgttgcatttgggatcgcggttggaataggcttgcacgctatatctcacctggcatgtgatttcccgcgtttgctgcatgcaaaaaatgtagagtttgagccaatgaaaaagtttttcggagacgagaggcctgaaaattatggatggttcatgaaagggacagacgggtggaccggtgttaccatggtggttcttatgttagtggcctacgtcttggcgcagtcgtggttcagacgaaaccgggcaaacctaccaaaatcgttgaaacgattgactggtttcaacgcattttggtactcacaccatttgtttgtcatcgtttatgttcttctcatcgtgcatggctattttgtttatctctcaaaggaatggtaccacaagacgacgtggatgtatctggcagttcccgtactactatatgcatttgaacgattgattcgtgcatttagaccaggtgccaaggctgtcaaggttttgaaggtggcagtatatccaggaaatgtactttcactttacatgtcgaagcctaaaggtttcaagtacacaagtggacagtacatatatattaactgttctgacgtctcaccattacaatggcatccgttttcaattacttcggcttccggggatgattacctcagcgttcatatccgcacactcggagactggacatcgcaactcaaatccttatattccaaggttactatttttcaagagtaacatttgtgaattaatgatatatgtacttgatttgtttaattacaaaaccataggtttgtcaacttccctcaacaagtcaaagtgggctcttcatagctgacataggtcaagccaacaatataaccaggtttccgaggctgttaatcgatggtccatatggtgcacccgcacaagattaccggaactacgatgtattgcttctagtaggtctagggatcggagcgacgccattaatcagcataatcagggacgtccttaacaacatcaagaaccagaattccatcgaacgaggcactaaccaacacataaaaaactatgttgccacaaaacgagcttatttttattgggtaacaagagagcaaggatcattggaatggttcagtgaggtcatgaacgaggtagctgagtatgatagtgaggggatgattgaactacataattactgcactagcgtgtatgaggaaggagatgcgaggtcagcactaatcaccatgttgcagtcattgcaccacgccaagagcggcattgacatcgtatcgggcactcgggtccgaacccatttcgctcgacccaattggcgtagtgtcttcaagcacgtcgcagtcaaccacgtcaatcaacgagttggggttttctactgtggtaatacatgcatcataggagagttaaagagactggctcaagatttctctaggaaaactacgaccaagtttgagttccacaaggaaaatttctagtttcgattctattcatccatcagaccatcattagaaaataataagcaaaatatgtcaagctgatatctattataattataaccacactttg

SEQ ID NO: 108024 - protein, 622 aa, Arabidopsis thaliana
  peptide (1)..(622): Ceres Seq. ID no. 13653034
  misc_feature (328)..(617): Pfam Name: Ferric reductase like transmembrane component Pfam Description: Ferric reductase like transmembrane component
  misc_feature (3)..(617): Homolog of NCBI NO: 16549089 NR Description: respiratory burst oxidase homolog [Solanum
  misc_feature (21)..(617): Homolog of NCBI NO: 20805911 NR Description: NADPH oxidase [Nicotiana tabacum]
  misc_feature (21)..(617): Homolog of NCBI NO: 28268680 NR Description: respiratory burst oxidase homolog [Nicotiana
  misc_feature (21)..(617): Homolog of NCBI NO: 19715905 NR Description: NADPH oxidase [Nicotiana tabacum]
  misc_feature (15)..(617): Homolog of NCBI NO: 11358758 NR Description: respiratory burst oxidase protein D [imported] - thaliana >gi|3242789|gb|AAC39479.1| respiratory burst oxidase
  misc_feature (15)..(617): Homolog of NCBI NO: 15238842 NR Description: respiratory burst oxidase protein D (NADPH (RbohD) [Arabidopsis thaliana] >gi|10177927|dbj|BAB11338.1| burst oxidase protein [Arabidopsis thaliana]
  misc_feature (49)..(617): Homolog of NCBI NO: 8131846 NR Description: whitefly-induced gp91-phox [Lycopersicon
  misc_feature (11)..(617): Homolog of NCBI NO: 15241361 NR Description: respiratory burst oxidase protein C (NADPH (RbohC) [Arabidopsis thaliana] >gi|9758253|dbj|BAB08752.1|
  misc_feature (11)..(617): Homolog of NCBI NO: 26449420 NR Description: putative respiratory burst oxidase protein
  misc_feature (74)..(617): Homolog of NCBI NO: 3242781 NR Description: respiratory burst oxidase protein A [Arabidopsis
MREEEMESSSEGETNKISRCKATGSDNPDEDYVEITLEVRDETINTMKAKATLRSVLSGRLKTMVKSLSFASRRLDRSKSFGAMFALRGLRFIAKNDAVGRGWDEVAMRFDKLAVEGKLPKSKFGHCIGMVESSEFVNELFEALVRRRGTTSSSITKTELFEFWEQITGNSFDDRLQIFFDMVDKNLDGRITGDEVKEIIALSASANKLSKIKENVDEYAALIMEELDRDNLGYIELHNLETLLLQVPSQSNNSPSSANKRALNKMLSQKLIPTKDRNPVKRFAMNISYFFLENWKRIWVLTLWISICITLFTWKFLQYKRKTVFEVMGYCVTVAKGSAETLKFNMALILLPVCRNTITWLRTKSKLIGSVVPFDDNINFHKVVAFGIAVGIGLHAISHLACDFPRLLHAKNVEFEPMKKFFGDERPENYGWFMKGTDGWTGVTMVVLMLVAYVLAQSWFRRNRANLPKSLKRLTGFNAFWYSHHLFVIVYVLLIVHGYFVYLSKEWYHKTTWMYLAVPVLLYAFERLIRAFRPGAKAVKVLKVAVYPGNVLSLYMSKPKGFKYTSGQYIYINCSDVSPLQWHPFSITSASGDDYLSVHIRTLGDWTSQLKSLYSKVTIFQE

SEQ ID NO: 108025 - protein, 617 aa, Arabidopsis thaliana
  peptide (1)..(617): Ceres Seq. ID no. 13653035
  misc_feature (323)..(612): Pfam Name: Ferric reductase like transmembrane component Pfam Description: Ferric reductase like transmembrane component
  misc_feature (1)..(612): Homolog of NCBI NO: 16549089 NR Description: respiratory burst oxidase homolog [Solanum
  misc_feature (16)..(612): Homolog of NCBI NO: 20805911 NR Description: NADPH oxidase [Nicotiana tabacum]
  misc_feature (16)..(612): Homolog of NCBI NO: 28268680 NR Description: respiratory burst oxidase homolog [Nicotiana
  misc_feature (16)..(612): Homolog of NCBI NO: 19715905 NR Description: NADPH oxidase [Nicotiana tabacum]
  misc_feature (10)..(612): Homolog of NCBI NO: 11358758 NR Description: respiratory burst oxidase protein D [imported] - thaliana >gi|3242789|gb|AAC39479.1| respiratory burst oxidase
  misc_feature (10)..(612): Homolog of NCBI NO: 15238842 NR Description: respiratory burst oxidase protein D (NADPH (RbohD) [Arabidopsis thaliana] >gi|10177927|dbj|BAB11338.1| burst oxidase protein [Arabidopsis thaliana]
  misc_feature (44)..(612): Homolog of NCBI NO: 8131846 NR Description: whitefly-induced gp91-phox [Lycopersicon
  misc_feature (6)..(612): Homolog of NCBI NO: 15241361 NR Description: respiratory burst oxidase protein C (NADPH (RbohC) [Arabidopsis thaliana] >gi|9758253|dbj|BAB08752.1|
  misc_feature (6)..(612): Homolog of NCBI NO: 26449420 NR Description: putative respiratory burst oxidase protein
  misc_feature (69)..(612): Homolog of NCBI NO: 3242781 NR Description: respiratory burst oxidase protein A [Arabidopsis
MESSSEGETNKISRCKATGSDNPDEDYVEITLEVRDETINTMKAKATLRSVLSGRLKTMVKSLSFASRRLDRSKSFGAMFALRGLRFIAKNDAVGRGWDEVAMRFDKLAVEGKLPKSKFGHCIGMVESSEFVNELFEALVRRRGTTSSSITKTELFEFWEQITGNSFDDRLQIFFDMVDKNLDGRITGDEVKEIIALSASANKLSKIKENVDEYAALIMEELDRDNLGYIELHNLETLLLQVPSQSNNSPSSANKRALNKMLSQKLIPTKDRNPVKRFAMNISYFFLENWKRIWVLTLWISICITLFTWKFLQYKRKTVFEVMGYCVTVAKGSAETLKFNMALILLPVCRNTITWLRTKSKLIGSVVPFDDNINFHKVVAFGIAVGIGLHAISHLACDFPRLLHAKNVEFEPMKKFFGDERPENYGWFMKGTDGWTGVTMVVLMLVAYVLAQSWFRRNRANLPKSLKRLTGFNAFWYSHHLFVIVYVLLIVHGYFVYLSKEWYHKTTWMYLAVPVLLYAFERLIRAFRPGAKAVKVLKVAVYPGNVLSLYMSKPKGFKYTSGQYIYINCSDVSPLQWHPFSITSASGDDYLSVHIRTLGDWTSQLKSLYSKVTIFQE

SEQ ID NO: 108026 - protein, 576 aa, Arabidopsis thaliana
  peptide (1)..(576): Ceres Seq. ID no. 13653036
  misc_feature (282)..(571): Pfam Name: Ferric reductase like transmembrane component Pfam Description: Ferric reductase like transmembrane component
  misc_feature (1)..(571): Homolog of NCBI NO: 16549089 NR Description: respiratory burst oxidase homolog [Solanum
  misc_feature (1)..(571): Homolog of NCBI NO: 20805911 NR Description: NADPH oxidase [Nicotiana tabacum]
  misc_feature (1)..(571): Homolog of NCBI NO: 28268680 NR Description: respiratory burst oxidase homolog [Nicotiana
  misc_feature (1)..(571): Homolog of NCBI NO: 19715905 NR Description: NADPH oxidase [Nicotiana tabacum]
  misc_feature (1)..(571): Homolog of NCBI NO: 11358758 NR Description: respiratory burst oxidase protein D [imported] - thaliana >gi|3242789|gb|AAC39479.1| respiratory burst oxidase
  misc_feature (1)..(571): Homolog of NCBI NO: 15238842 NR Description: respiratory burst oxidase protein D (NADPH (RbohD) [Arabidopsis thaliana] >gi|10177927|dbj|BAB11338.1| burst oxidase protein [Arabidopsis thaliana]
  misc_feature (3)..(571): Homolog of NCBI NO: 8131846 NR Description: whitefly-induced gp91-phox [Lycopersicon
  misc_feature (1)..(571): Homolog of NCBI NO: 15241361 NR Description: respiratory burst oxidase protein C (NADPH (RbohC) [Arabidopsis thaliana] >gi|9758253|dbj|BAB08752.1|
  misc_feature (1)..(571): Homolog of NCBI NO: 26449420 NR Description: putative respiratory burst oxidase protein
  misc_feature (28)..(571): Homolog of NCBI NO: 3242781 NR Description: respiratory burst oxidase protein A [Arabidopsis
MKAKATLRSVLSGRLKTMVKSLSFASRRLDRSKSFGAMFALRGLRFIAKNDAVGRGWDEVAMRFDKLAVEGKLPKSKFGHCIGMVESSEFVNELFEALVRRRGTTSSSITKTELFEFWEQITGNSFDDRLQIFFDMVDKNLDGRITGDEVKEIIALSASANKLSKIKENVDEYAALIMEELDRDNLGYIELHNLETLLLQVPSQSNNSPSSANKRALNKMLSQKLIPTKDRNPVKRFAMNISYFFLENWKRIWVLTLWISICITLFTWKFLQYKRKTVFEVMGYCVTVAKGSAETLKFNMALILLPVCRNTITWLRTKSKLIGSVVPFDDNINFHKVVAFGIAVGIGLHAISHLACDFPRLLHAKNVEFEPMKKFFGDERPENYGWFMKGTDGWTGVTMVVLMLVAYVLAQSWFRRNRANLPKSLKRLTGFNAFWYSHHLFVIVYVLLIVHGYFVYLSKEWYHKTTWMYLAVPVLLYAFERLIRAFRPGAKAVKVLKVAVYPGNVLSLYMSKPKGFKYTSGQYIYINCSDVSPLQWHPFSITSASGDDYLSVHIRTLGDWTSQLKSLYSKVTIFQE

SEQ ID NO: 108027 - DNA, 1631 bp, Arabidopsis thaliana
  misc_feature (1)..(1631): Ceres Seq. ID no. 13653049
  misc_feature: MA Experiment ID: 20000185 Result: Down-regulated in Transcription
  misc_feature: MA Experiment 20000185 PARAMETER Experiment Name: At_Roots__P Parameter: Age (day) Value: 7 vs. 21
  misc_feature: MA Experiment 20000185 PARAMETER Experiment Name: At_Roots__P Parameter: Organism Value: A. thaliana
  misc_feature: MA Experiment 20000185 PARAMETER Experiment Name: At_Roots__P Parameter: Tissue Value: Roots vs. Whole Plant
  misc_feature: MA Experiment ID: 20000234 Result: Up-regulated in Transcription
  misc_feature: MA Experiment 20000234 PARAMETER Experiment Name: At_Siliques_P Parameter: Age (day) Value: 21
  misc_feature: MA Experiment 20000234 PARAMETER Experiment Name: At_Siliques_P Parameter: Organism Value: A. thaliana
  misc_feature: MA Experiment 20000234 PARAMETER Experiment Name: At_Siliques_P Parameter: Plant Line Value: WS
  misc_feature: MA Experiment 20000234 PARAMETER Experiment Name: At_Siliques_P Parameter: Tissue Value: Less Than 5mm Siliques vs. Whole Plant
  misc_feature: MA Experiment ID: 20000264 Result: Up-regulated in Transcription
  misc_feature: MA Experiment 20000264 PARAMETER Experiment Name: At_Open_Flower_P Parameter: Age (day) Value: 21
  misc_feature: MA Experiment 20000264 PARAMETER Experiment Name: At_Open_Flower_P Parameter: Plant Line Value: WS
  misc_feature: MA Experiment 20000264 PARAMETER Experiment Name: At_Open_Flower_P Parameter: Tissue Value: Open Flower vs. Whole Plant
  misc_feature: MA Experiment ID: 20000265 Result: Up-regulated in Transcription
  misc_feature: MA Experiment 20000265 PARAMETER Experiment Name: At_Open_Flower_P Parameter: Age (day) Value: 21
  misc_feature: MA Experiment 20000265 PARAMETER Experiment Name: At_Open_Flower_P Parameter: Plant Line Value: WS
  misc_feature: MA Experiment 20000265 PARAMETER Experiment Name: At_Open_Flower_P Parameter: Tissue Value: Closed Flower vs. Whole Plant
  misc_feature: MA Experiment ID: 20000286 Result: Up-regulated in Transcription
  misc_feature: MA Experiment 20000286 PARAMETER Experiment Name: At_Open_Flower_P Parameter: Age (day) Value: 21
  misc_feature: MA Experiment 20000286 PARAMETER Experiment Name: At_Open_Flower_P Parameter: Plant Line Value: WS
  misc_feature: MA Experiment 20000286 PARAMETER Experiment Name: At_Open_Flower_P Parameter: Tissue Value: Half Open vs. Whole Plant
  misc_feature: MA Experiment ID: 20001558 Result: Up-regulated in Transcription
  misc_feature: MA Experiment 20001558 PARAMETER Experiment Name: At_Drought_Soil_Dry_P Parameter: Age (day) Value: 27
  misc_feature: MA Experiment 20001558 PARAMETER Experiment Name: At_Drought_Soil_Dry_P Parameter: Organism Value: A. thaliana
  misc_feature: MA Experiment 20001558 PARAMETER Experiment Name: At_Drought_Soil_Dry_P Parameter: Plant Line Value: WS
  misc_feature: MA Experiment 20001558 PARAMETER Experiment Name: At_Drought_Soil_Dry_P Parameter: Post Timepoint (hr) Value: 6
  misc_feature: MA Experiment 20001558 PARAMETER Experiment Name: At_Drought_Soil_Dry_P Parameter: Post-Treatment Value: Re-Water vs. No Drought
  misc_feature: MA Experiment 20001558 PARAMETER Experiment Name: At_Drought_Soil_Dry_P Parameter: Timepoint (day) Value: 13
  misc_feature: MA Experiment 20001558 PARAMETER Experiment Name: At_Drought_Soil_Dry_P Parameter: Treatment Value: Drought vs. No Drought
  misc_feature: MA Experiment ID: 20001905 Result: Down-regulated in Transcription
  misc_feature: MA Experiment 20001905 PARAMETER Experiment Name: At_Drought_Reproduction_P Parameter: Age (day) Value: 40
  misc_feature: MA Experiment 20001905 PARAMETER Experiment Name: At_Drought_Reproduction_P Parameter: Organism Value: A. thaliana
  misc_feature: MA Experiment 20001905 PARAMETER Experiment Name: At_Drought_Reproduction_P Parameter: Plant Line Value: WS
  misc_feature: MA Experiment 20001905 PARAMETER Experiment Name: At_Drought_Reproduction_P Parameter: Timepoint (day) Value: 10
  misc_feature: MA Experiment 20001905 PARAMETER Experiment Name: At_Drought_Reproduction_P Parameter: Tissue Value: Rosettes
  misc_feature: MA Experiment 20001905 PARAMETER Experiment Name: At_Drought_Reproduction_P Parameter: Treatment Value: Drought vs. No Drought
  misc_feature: MA Experiment ID: 20001906 Result: Down-regulated in Transcription
  misc_feature: MA Experiment 20001906 PARAMETER Experiment Name: At_Drought_Reproduction_P Parameter: Age (day) Value: 35
  misc_feature: MA Experiment 20001906 PARAMETER Experiment Name: At_Drought_Reproduction_P Parameter: Organism Value: A. thaliana
  misc_feature: MA Experiment 20001906 PARAMETER Experiment Name: At_Drought_Reproduction_P Parameter: Plant Line Value: WS
  misc_feature: MA Experiment 20001906 PARAMETER Experiment Name: At_Drought_Reproduction_P Parameter: Timepoint (day) Value: 5
  misc_feature: MA Experiment 20001906 PARAMETER Experiment Name: At_Drought_Reproduction_P Parameter: Tissue Value: Siliques
  misc_feature: MA Experiment 20001906 PARAMETER Experiment Name: At_Drought_Reproduction_P Parameter: Treatment Value: Drought vs. No Drought
  misc_feature: Pfam Name: SBP Pfam Description: SBP domain
actcgtaaacttaaaaaaaaaaaaaaaaaaaacagaacaatttcttcttcctctgggatccataagttttgaggtatgttgttgctgattttgtccttttatgtctgcaaataacagagaagataaatgaggattttctcctaggttgaagttttatattttggtggtcagtgtctgatggagtgtaatgcaaagccaccgtttcaatgggaattggaaaacttgatatcttttggcacttctacagctgaagttcctagaaagctaaaaccaatggagtgggaaattgatggatttgattgcacctctctgtattcttcaagctttgcctatgctggtagttcaggttctgatatagctcatgctttctctaaaagctcaaagtcaacttccattagctcttcatcagctgaagtaagaacacacaattttacatccgaaactggtgaaagtcttcctggagaatttgcaaaggggattgatacttctccaagtcttgaactttcttttggctctggtgatccggttctcggtttaaagcttggtaaacgaacgtactttgaagactttgggaagtggagaatgctaaaggtttgggacttccagtgactctggcttcatcttctgtttctcccgtgaagaaatcgaaatccattcctcagaggttacaaactcctcactgtcaagttgaaggctgtaatcttgatctttcatcagctaaagactatcatcggaaacataggatttgtgaaaatcattcaaagtttcctaaagtcgttgtgagtggcgtagagcgtcggttctgccaacaatgtagcaggttccactgtctctctgagtttgatgagaagaaacgtagctgtcgccgacgtctctcagatcacaatgcaagacgtcgcaagccaaatcctggaaggacatatgatgggaaaccacaggtggattttgtatggaacagatttgcacttatccatccaagaagtgaggaaaagtttatatggccaagttcgaagcacgtaccatcaagagtgttaatgccgcaacctgcaaagactgagatttccgataccgagcacaatagatttggattgttggaccccaaaaccaaaaccgcaagagccgagttattcagtaaagaaaaggtcacaatctcttcacacatgggtgcttctcaagatcttgatggtgctctctctcttctgtcaaattcaacaacatgggtttcttcctctgaccaaccaaggcgttttacccttgatcaccatccctcaagcaacctccaacccgtagctcaccggtctgcggctcaactcaattcagtttccggctattggcagccggacccacccgcagttgaaggcccgaccgctctgcatagaaatggggtaggccagtttaatgaaaactacttcagcttgaaccagttttataactgaaaattgtatgcctttaaatcctaataagatatttgatgttaaaggatcaagcaagctagtgataagttaagataggagctttgaaacttgcaagacaccaaatcctctcttgtttttttgtccaaatattttcatgggttagagagctttgacaattgtcttaatatcatctttgtcgtgttatacattaggatt

SEQ ID NO: 108028 - protein, 143 aa, Arabidopsis thaliana
  peptide (1)..(143): Ceres Seq. ID no. 13653050
  misc_feature: Pfam Name: SBP Pfam Description: SBP domain
  misc_feature (1)..(136): Homolog of NCBI NO: 15239820 NR Description: squamosa promoter binding protein-related 2 [Arabidopsis thaliana] >gi|30694251|ref|NP_851122.1| squamosa
  misc_feature (1)..(136): Homolog of NCBI NO: 25456646 NR Description: squamosa promoter binding protein 2 [imported] -
  misc_feature (1)..(131): Homolog of NCBI NO: 22329813 NR Description: squamosa-promoter binding protein 2 -related thaliana] >gi|25456667|pir||T52596 squamosa promoter binding
  misc_feature (1)..(131): Homolog of NCBI NO: 18650611 NR Description: At1g27370/F17L21_16 [Arabidopsis thaliana]
  misc_feature (1)..(131): Homolog of NCBI NO: 18396302 NR Description: squamosa-promoter binding protein 2 -related
MECNAKPPFQWELENLISFGTSTAEVPRKLKPMEWEIDGFDCTSLYSSSFAYAGSSGSDIAHAFSKSSKSTSISSSSAEVRTHNFTSETGESLPGEFAKGIDTSPSLELSFGSGDPVLGLKLGKRTYFEDFGKWRMLKVWDFQ

SEQ ID NO: 108029 - protein, 133 aa, Arabidopsis thaliana
  peptide (1)..(133): Ceres Seq. ID no. 13653051
  misc_feature: Pfam Name: SBP Pfam Description: SBP domain
  misc_feature (1)..(133): Homolog of NCBI NO: 15239820 NR Description: squamosa promoter binding protein-related 2 [Arabidopsis thaliana] >gi|30694251|ref|NP_851122.1| squamosa
  misc_feature (1)..(133): Homolog of NCBI NO: 25456646 NR Description: squamosa promoter binding protein 2 [imported] -
  misc_feature (1)..(64): Homolog of NCBI NO: 25352584 NR Description: squamosa promoter binding protein-homolog 4 - garden snapdragon (fragment) >gi|5931641|emb|CAB56569.1|
  misc_feature (1)..(104): Homolog of NCBI NO: 13877707 NR Description: similar to squamosa-promoter binding protein 1
  misc_feature (1)..(104): Homolog of NCBI NO: 30697804 NR Description: squamosa-promoter binding protein -related
  misc_feature (1)..(58): Homolog of NCBI NO: 15028115 NR Description: putative squamosa-promoter binding protein
  misc_feature (1)..(58): Homolog of NCBI NO: 25352586 NR Description: squamosa promoter binding protein homolog 9 - Arabidopsis thaliana >gi|5931675|emb|CAB56591.1| squamosa
  misc_feature (1)..(58): Homolog of NCBI NO: 30688933 NR Description: squamosa-promoter binding protein -related
  misc_feature (1)..(58): Homolog of NCBI NO: 15227896 NR Description: squamosa-promoter binding protein -related
  misc_feature (1)..(104): Homolog of NCBI NO: 6730637 NR Description: F4N2.13 [Arabidopsis thaliana]
MPQPAKTEISDTEHNRFGLLDPKTKTARAELFSKEKVTISSHMGASQDLDGALSLLSNSTTWVSSSDQPRRFTLDHHPSSNLQPVAHRSAAQLNSVSGYWQPDPPAVEGPTALHRNGVGQFNENYFSLNQFYN

SEQ ID NO: 108030 - protein, 111 aa, Arabidopsis thaliana
  peptide (1)..(111): Ceres Seq. ID no. 13653052
  misc_feature: Pfam Name: SBP Pfam Description: SBP domain
  misc_feature (1)..(104): Homolog of NCBI NO: 15239820 NR Description: squamosa promoter binding protein-related 2 [Arabidopsis thaliana] >gi|30694251|ref|NP_851122.1| squamosa
  misc_feature (1)..(104): Homolog of NCBI NO: 25456646 NR Description: squamosa promoter binding protein 2 [imported] -
  misc_feature (1)..(99): Homolog of NCBI NO: 22329813 NR Description: squamosa-promoter binding protein 2 -related thaliana] >gi|25456667|pir||T52596 squamosa promoter binding
  misc_feature (1)..(99): Homolog of NCBI NO: 18650611 NR Description: At1g27370/F17L21_16 [Arabidopsis thaliana]
  misc_feature (1)..(99): Homolog of NCBI NO: 18396302 NR Description: squamosa-promoter binding protein 2 -related
MEWEIDGFDCTSLYSSSFAYAGSSGSDIAHAFSKSSKSTSISSSSAEVRTHNFTSETGESLPGEFAKGIDTSPSLELSFGSGDPVLGLKLGKRTYFEDFGKWRMLKVWDFQ

SEQ ID NO: 108031 - DNA, 1635 bp, Arabidopsis thaliana
  misc_feature (1)..(1635): Ceres Seq. ID no. 13653063
  misc_feature: MA Experiment ID: 20000314 Result: Up-regulated in Transcription
  misc_feature: MA Experiment 20000314 PARAMETER Experiment Name: At_14day_Shoots-Roots_Sub_P Parameter: Age (day) Value: 14
  misc_feature: MA Experiment 20000314 PARAMETER Experiment Name: At_14day_Shoots-Roots_Sub_P Parameter: Organism Value: A. thaliana
  misc_feature: MA Experiment 20000314 PARAMETER Experiment Name: At_14day_Shoots-Roots_Sub_P Parameter: Plant Line Value: WS
  misc_feature: MA Experiment 20000314 PARAMETER Experiment Name: At_14day_Shoots-Roots_Sub_P Parameter: Tissue Value: Roots vs. Whole Plant
  misc_feature: MA Experiment ID: 20000440 Result: Down-regulated in Transcription
  misc_feature: MA Experiment 20000440 PARAMETER Experiment Name: At_Closed-Flower__Sub_P Parameter: Tissue Value: Closed Flower vs. Whole Plant
tgatagaacctgattctagacttatagtgggttcttgctcatttacgttctctgcaattctctgtttcttgttctgttttcaagtcctcttcaaagttctttacaaacgagtgctaatcgaaaagagataaacatggtatcgtctcgggccgttgtgatggccattatggtattggtcacagtgcagtggttggtttttgctgaaggttatccggaagaagacttggtggccaggctacctggtcaaccaaacgtcgggttcagacaatttgctggatatgtcgatgtggactcggaaaatggtcgtagtcttttttactactacgtggaggctgtaaaagaacctgacactaagcccttaaccctttggctcaatggaggtccaggttgttcttcagttggtggaggagctttcactgagttaggtccattttatcctacgggcgatggccgtggccttcgcttgaactccatgtcttggaacaaagcttcgaacttgttatttgtggagtcaccagccggagtaggatggtcatactctaacagaagttcggattacaacactggggacaagtctactgtcaatgatatgcttgtgttcttgttgagatggttcaacaagttcccagagttgaagtctcgcgacctctttctcactggcgaaagctacgcagggcattacatacctcaactggctgatgtgatactcagctacaattcacgctcaagtgggttcaaatttaacgtcaaaggcattgcaattgggaatccacttctgaagcttgacagggactttgcagctgcatacgagtacttctggtcacatgggatgatctctgatgaagtaagactcacaatcatgaaccaatgtgactttgccaatccaaagaacatgagcaatgcttgtatatatgcaatcgttgaatccagcgtcctcactgagtatatcaacagctatcacattctcctcgatgtatgttacccttctattgttcagcaagagctaaggctcaagaaaatgaatgcgcttcacgctaaccgcactcgcctaccttatgaatggactatgtgcagcaaccggttaaactacagtggcatagacgggtacattgacatgcttccgagtcttaagagaattattcagaaccaaactcctgtttggatcttcagtggagatcaagattctgtaattccacttcaaagttcaagaacactcgtacgagaacttgctgaggatctcaacttcaagaccactattccctatggagcttggttccacaaagaacaggttggtggctgggtcacagagtatgggaatctactgacctttgcaacggtgagaggagcggctcatatggtgccgtatgcggagccctcacgagctctgcacatgttcagtagctttatgaatggccggagattgcccaacaaaccagatttaaagtcttctactgatgattgaaagagaagatatctctttgagtaagttgagatagaaacatattagggtttgtgtaataatgaaccgtgaaccccacggaactatttttatatactgccaaacattgcgatgagaatatagtatttctcatagattattagagtgtgattgtatcaatattatttgttacttat

SEQ ID NO: 108032 - protein, 442 aa, Arabidopsis thaliana
  peptide (1)..(442): Ceres Seq. ID no. 13653064
  misc_feature (36)..(296): Pfam Name: Serine carboxypeptidase Pfam Description: Serine carboxypeptidase
  misc_feature (1)..(442): Homolog of NCBI NO: 28393789 NR Description: putative serine carboxypeptidase II [Arabidopsis
  misc_feature (1)..(296): Homolog of NCBI NO: 15224454 NR Description: serine carboxypeptidase -related [Arabidopsis
  misc_feature (256)..(442): Homolog of NCBI NO: 15224454 NR Description: serine carboxypeptidase -related [Arabidopsis
  misc_feature (2)..(296): Homolog of NCBI NO: 15238328 NR Description: serine carboxypeptidase -related [Arabidopsis
  misc_feature (256)..(442): Homolog of NCBI NO: 15238328 NR Description: serine carboxypeptidase -related [Arabidopsis
  misc_feature (5)..(296): Homolog of NCBI NO: 15218514 NR Description: serine carboxypeptidase -related [Arabidopsis
  misc_feature (279)..(433): Homolog of NCBI NO: 15218514 NR Description: serine carboxypeptidase -related [Arabidopsis
  misc_feature (1)..(296): Homolog of NCBI NO: 15238327 NR Description: serine carboxypeptidase -related [Arabidopsis
  misc_feature (30)..(289): Homolog of NCBI NO: 18396647 NR Description: serine carboxypeptidase -related [Arabidopsis >gi|16648969|gb|AAL24336.1| serine carboxypeptidase II, putative
  misc_feature (256)..(433): Homolog of NCBI NO: 18396647 NR Description: serine carboxypeptidase -related [Arabidopsis >gi|16648969|gb|AAL24336.1| serine carboxypeptidase II, putative
MVSSRAVVMAIMVLVTVQWLVFAEGYPEEDLVARLPGQPNVGFRQFAGYVDVDSENGRSLFYYYVEAVKEPDTKPLTLWLNGGPGCSSVGGGAFTELGPFYPTGDGRGLRLNSMSWNKASNLLFVESPAGVGWSYSNRSSDYNTGDKSTVNDMLVFLLRWFNKFPELKSRDLFLTGESYAGHYIPQLADVILSYNSRSSGFKFNVKGIAIGNPLLKLDRDFAAAYEYFWSHGMISDEVRLTIMNQCDFANPKNMSNACIYAIVESSVLTEYINSYHILLDVCYPSIVQQELRLKKMNALHANRTRLPYEWTMCSNRLNYSGIDGYIDMLPSLKRIIQNQTPVWIFSGDQDSVIPLQSSRTLVRELAEDLNFKTTIPYGAWFHKEQVGGWVTEYGNLLTFATVRGAAHMVPYAEPSRALHMFSSFMNGRRLPNKPDLKSSTDD

SEQ ID NO: 108033 - protein, 434 aa, Arabidopsis thaliana
  peptide (1)..(434): Ceres Seq. ID no. 13653065
  misc_feature (28)..(288): Pfam Name: Serine carboxypeptidase Pfam Description: Serine carboxypeptidase
  misc_feature (1)..(434): Homolog of NCBI NO: 28393789 NR Description: putative serine carboxypeptidase II [Arabidopsis
  misc_feature (1)..(288): Homolog of NCBI NO: 15224454 NR Description: serine carboxypeptidase -related [Arabidopsis
  misc_feature (248)..(434): Homolog of NCBI NO: 15224454 NR Description: serine carboxypeptidase -related [Arabidopsis
  misc_feature (1)..(288): Homolog of NCBI NO: 15238328 NR Description: serine carboxypeptidase -related [Arabidopsis
  misc_feature (248)..(434): Homolog of NCBI NO: 15238328 NR Description: serine carboxypeptidase -related [Arabidopsis
  misc_feature (1)..(288): Homolog of NCBI NO: 15218514 NR Description: serine carboxypeptidase -related [Arabidopsis
  misc_feature (271)..(425): Homolog of NCBI NO: 15218514 NR Description: serine carboxypeptidase -related [Arabidopsis
  misc_feature (1)..(288): Homolog of NCBI NO: 15238327 NR Description: serine carboxypeptidase -related [Arabidopsis
  misc_feature (22)..(281): Homolog of NCBI NO: 18396647 NR Description: serine carboxypeptidase -related [Arabidopsis >gi|16648969|gb|AAL24336.1| serine carboxypeptidase II, putative
  misc_feature (248)..(425): Homolog of NCBI NO: 18396647 NR Description: serine carboxypeptidase -related [Arabidopsis >gi|16648969|gb|AAL24336.1| serine carboxypeptidase II, putative
MAIMVLVTVQWLVFAEGYPEEDLVARLPGQPNVGFRQFAGYVDVDSENGRSLFYYYVEAVKEPDTKPLTLWLNGGPGCSSVGGGAFTELGPFYPTGDGRGLRLNSMSWNKASNLLFVESPAGVGWSYSNRSSDYNTGDKSTVNDMLVFLLRWFNKFPELKSRDLFLTGESYAGHYIPQLADVILSYNSRSSGFKFNVKGIAIGNPLLKLDRDFAAAYEYFWSHGMISDEVRLTIMNQCDFANPKNMSNACIYAIVESSVLTEYINSYHILLDVCYPSIVQQELRLKKMNALHANRTRLPYEWTMCSNRLNYSGIDGYIDMLPSLKRIIQNQTPVWIFSGDQDSVIPLQSSRTLVRELAEDLNFKTTIPYGAWFHKEQVGGWVTEYGNLLTFATVRGAAHMVPYAEPSRALHMFSSFMNGRRLPNKPDLKSSTDD

SEQ ID NO: 108034 - protein, 431 aa, Arabidopsis thaliana
  peptide (1)..(431): Ceres Seq. ID no. 13653066
  misc_feature (25)..(285): Pfam Name: Serine carboxypeptidase Pfam Description: Serine carboxypeptidase
  misc_feature (1)..(431): Homolog of NCBI NO: 28393789 NR Description: putative serine carboxypeptidase II [Arabidopsis
  misc_feature (1)..(285): Homolog of NCBI NO: 15224454 NR Description: serine carboxypeptidase -related [Arabidopsis
  misc_feature (245)..(431): Homolog of NCBI NO: 15224454 NR Description: serine carboxypeptidase -related [Arabidopsis
  misc_feature (1)..(285): Homolog of NCBI NO: 15238328 NR Description: serine carboxypeptidase -related [Arabidopsis
  misc_feature (245)..(431): Homolog of NCBI NO: 15238328 NR Description: serine carboxypeptidase -related [Arabidopsis
  misc_feature (1)..(285): Homolog of NCBI NO: 15218514 NR Description: serine carboxypeptidase -related [Arabidopsis
  misc_feature (268)..(422): Homolog of NCBI NO: 15218514 NR Description: serine carboxypeptidase -related [Arabidopsis
  misc_feature (1)..(285): Homolog of NCBI NO: 15238327 NR Description: serine carboxypeptidase -related [Arabidopsis
  misc_feature (19)..(278): Homolog of NCBI NO: 18396647 NR Description: serine carboxypeptidase -related [Arabidopsis >gi|16648969|gb|AAL24336.1| serine carboxypeptidase II, putative
  misc_feature (245)..(422): Homolog of NCBI NO: 18396647 NR Description: serine carboxypeptidase -related [Arabidopsis >gi|16648969|gb|AAL24336.1| serine carboxypeptidase II, putative
MVLVTVQWLVFAEGYPEEDLVARLPGQPNVGFRQFAGYVDVDSENGRSLFYYYVEAVKEPDTKPLTLWLNGGPGCSSVGGGAFTELGPFYPTGDGRGLRLNSMSWNKASNLLFVESPAGVGWSYSNRSSDYNTGDKSTVNDMLVFLLRWFNKFPELKSRDLFLTGESYAGHYIPQLADVILSYNSRSSGFKFNVKGIAIGNPLLKLDRDFAAAYEYFWSHGMISDEVRLTIMNQCDFANPKNMSNACIYAIVESSVLTEYINSYHILLDVCYPSIVQQELRLKKMNALHANRTRLPYEWTMCSNRLNYSGIDGYIDMLPSLKRIIQNQTPVWIFSGDQDSVIPLQSSRTLVRELAEDLNFKTTIPYGAWFHKEQVGGWVTEYGNLLTFATVRGAAHMVPYAEPSRALHMFSSFMNGRRLPNKPDLKSSTDD

SEQ ID NO: 108035 - DNA, 1340 bp, Arabidopsis thaliana
  misc_feature (1)..(1340): Ceres Seq. ID no. 13653067
  misc_feature: MA Experiment ID: 20000437 Result: Down-regulated in Transcription
  misc_feature: MA Experiment 20000437 PARAMETER Experiment Name: At_Drought_P Parameter: Age (day) Value: 8
  misc_feature: MA Experiment 20000437 PARAMETER Experiment Name: At_Drought_P Parameter: Organism Value: A. thaliana
  misc_feature: MA Experiment 20000437 PARAMETER Experiment Name: At_Drought_P Parameter: Plant Line Value: WS
  misc_feature: MA Experiment 20000437 PARAMETER Experiment Name: At_Drought_P Parameter: Timepoint (hr) Value: 24
  misc_feature: MA Experiment 20000437 PARAMETER Experiment Name: At_Drought_P Parameter: Tissue Value: Whole Plant
  misc_feature: MA Experiment 20000437 PARAMETER Experiment Name: At_Drought_P Parameter: Treatment Value: Drought vs. No Drought
  misc_feature: MA Experiment ID: 20000451 Result: Up-regulated in Transcription
  misc_feature: MA Experiment 20000451 PARAMETER Experiment Name: At_CS6879_Shoots-Roots_P Parameter: Age (day) Value: 14
  misc_feature: MA Experiment 20000451 PARAMETER Experiment Name: At_CS6879_Shoots-Roots_P Parameter: Organism Value: A. thaliana
  misc_feature: MA Experiment 20000451 PARAMETER Experiment Name: At_CS6879_Shoots-Roots_P Parameter: Plant Line Value: CS6879 vs. WS
  misc_feature: MA Experiment 20000451 PARAMETER Experiment Name: At_CS6879_Shoots-Roots_P Parameter: Tissue Value: Roots
  misc_feature: MA Experiment ID: 20000573 Result: Down-regulated in Transcription
  misc_feature: MA Experiment 20000573 PARAMETER Experiment Name: At_100uM_ABA_Mutants__P Parameter: Organism Value: A. thaliana
  misc_feature: MA Experiment 20000573 PARAMETER Experiment Name: At_100uM_ABA_Mutants__P Parameter: Plant Line Value: CS22 vs. Ler wt
  misc_feature: MA Experiment 20000573 PARAMETER Experiment Name: At_100uM_ABA_Mutants__P Parameter: Timepoint (hr) Value: N/A
  misc_feature: MA Experiment 20000573 PARAMETER Experiment Name: At_100uM_ABA_Mutants__P Parameter: Tissue Value: Whole Plant
  misc_feature: MA Experiment 20000573 PARAMETER Experiment Name: At_100uM_ABA_Mutants__P Parameter: Treatment Value: None
  misc_feature: MA Experiment ID: 20000574 Result: Down-regulated in Transcription
  misc_feature: MA Experiment 20000574 PARAMETER Experiment Name: At_100uM_ABA_Mutants__P Parameter: Organism Value: A. thaliana
  misc_feature: MA Experiment 20000574 PARAMETER Experiment Name: At_100uM_ABA_Mutants__P Parameter: Plant Line Value: CS23 vs. Ler wt
  misc_feature: MA Experiment 20000574 PARAMETER Experiment Name: At_100uM_ABA_Mutants__P Parameter: Timepoint (hr) Value: N/A
  misc_feature: MA Experiment 20000574 PARAMETER Experiment Name: At_100uM_ABA_Mutants__P Parameter: Tissue Value: Whole Plant
  misc_feature: MA Experiment 20000574 PARAMETER Experiment Name: At_100uM_ABA_Mutants__P Parameter: Treatment Value: None
  misc_feature: MA Experiment ID: 20000794 Result: Down-regulated in Transcription
  misc_feature: MA Experiment 20000794 PARAMETER Experiment Name: At_Petals_P Parameter: Age (day) Value: 23-25 days
  misc_feature: MA Experiment 20000794 PARAMETER Experiment Name: At_Petals_P Parameter: Plant Line Value: WS
  misc_feature: MA Experiment 20000794 PARAMETER Experiment Name: At_Petals_P Parameter: Tissue Value: Petals vs. Whole plant
  misc_feature: MA Experiment ID: 20001558 Result: Up-regulated in Transcription
  misc_feature: MA Experiment 20001558 PARAMETER Experiment Name: At_Drought_Soil_Dry_P Parameter: Age (day) Value: 27
  misc_feature: MA Experiment 20001558 PARAMETER Experiment Name: At_Drought_Soil_Dry_P Parameter: Organism Value: A. thaliana
  misc_feature: MA Experiment 20001558 PARAMETER Experiment Name: At_Drought_Soil_Dry_P Parameter: Plant Line Value: WS
  misc_feature: MA Experiment 20001558 PARAMETER Experiment Name: At_Drought_Soil_Dry_P Parameter: Post Timepoint (hr) Value: 6
  misc_feature: MA Experiment 20001558 PARAMETER Experiment Name: At_Drought_Soil_Dry_P Parameter: Post-Treatment Value: Re-Water vs. No Drought
  misc_feature: MA Experiment 20001558 PARAMETER Experiment Name: At_Drought_Soil_Dry_P Parameter: Timepoint (day) Value: 13
  misc_feature: MA Experiment 20001558 PARAMETER Experiment Name: At_Drought_Soil_Dry_P Parameter: Treatment Value: Drought vs. No Drought
gaatcgtgtgagaagagagactgaagaagagctacaaaaaatgagagagctcctgtgaagtgacgaagagacgaagaagaaagagaacattaatggcggctactccgtggtactttgtcgcagtacttctcaccattcttaccagctctcaggggattctaacaactctttctcaaagtgatggaggttataagtatgattatgctactgttccctttcttgctgaagtttttaagctgatcatttctggtttatttctctggagagagatgcggacatcttcctcaacaacttcaaggattactacggattggaagagtgtgcgattatttgttattccgtctcttatttatctgatacataacaatgtgcagtttgctacattgacttatgtggatacgtccacttatcagataatgggtaatttgaagattgtgaccactggcatactgtttaggttatttttgaaaaggaaactatctaaacttcagtggatggcaattggtcttttagctgttggaacaactaccagccaggttaagggttgtggagaagcttcttgtgattctttattcacggcaccaatacaaggttatttgctgggcatcctctcagctggtttgtccgcgctagctggaatctacacagagtttctgatgaagagaaacaatgacaccttatactggcaaaacttgcagttatatacgtaggtttggttcacttttcaacgtagctcgacttatagcagatgatttcagacacgggtttgaaaagggtccttggtggcaacgtatctttgatgggtacagcatcaccacttggctggtagttctgaatctcggatccactggcttactggtctcgtggttaatgaagtatgcagacaacatcgtcaaggtttattctacatcaatggcgatgctacttactatggttgcatccatatacctttttagcttcaaaccgacactgcagcttttcttgggtattgtcatatgcatcatgtcactccatatgtactttgctcctccacacacgctcgtggacttgcccgtgacaaacgaagcacatgccaagaccttaaagcaagttgtcgtagaagaaaagacagattcttgaattaaattggacgaaaaggttagttgaacacatagaaaacaatttgctaagtaaatgaacacaatgatcttcttctagcttcatttctattagagaatgagaaacttggatgtgagttcttttgaagaaatgatctgatagtttgtttattcacgtaccgattcttttctttgtaaatgtacatcgaggtgcctagaaatagtaaattcgattgttgaagc

SEQ ID NO: 108036 - protein, 205 aa, Arabidopsis thaliana; identical to SEQ ID NO: 24044
  peptide (1)..(205): Ceres Seq. ID no. 13653068
  misc_feature (61)..(205): Pfam Name: Nucleotide-sugar transporter Pfam Description: Nucleotide-sugar transporter
  misc_feature (1)..(205): Homolog of NCBI NO: 18422134 NR Description: CMP-sialic acid transporter-related protein
  misc_feature (20)..(205): Homolog of NCBI NO: 10177360 NR Description: CMP-sialic acid transporter-like protein
  misc_feature (9)..(204): Homolog of NCBI NO: 34393556 NR Description: putative CMP-sialic acid transporter [Oryza
  misc_feature (22)..(204): Homolog of NCBI NO: 34907666 NR Description: putative transporter-like protein [Oryza sativa
  misc_feature (8)..(204): Homolog of NCBI NO: 26450627 NR Description: unknown protein [Arabidopsis thaliana]
  misc_feature (15)..(204): Homolog of NCBI NO: 18411150 NR Description: transporter-related protein [Arabidopsis thaliana]
  misc_feature (15)..(204): Homolog of NCBI NO: 38345234 NR Description: OSJNBa0084K20.12 [Oryza sativa (japonica
  misc_feature (7)..(203): Homolog of NCBI NO: 39593097 NR Description: Hypothetical protein CBG09317 [Caenorhabditis
  misc_feature (7)..(204): Homolog of NCBI NO: 6755558 NR Description: solute carrier family 35 (CMP-sialic acid
  misc_feature (8)..(204): Homolog of NCBI NO: 34867231 NR Description: similar to CMP-sialic acid transporter [Rattus

SEQ ID NO: 108037 - protein, 149 aa, Arabidopsis thaliana
  peptide (1)..(149): Ceres Seq. ID no. 13653069
  misc_feature (15)..(108): Pfam Name: Nucleotide-sugar transporter Pfam Description: Nucleotide-sugar transporter
  misc_feature (15)..(149): Homolog of NCBI NO: 18422134 NR Description: CMP-sialic acid transporter-related protein
  misc_feature (15)..(149): Homolog of NCBI NO: 10177360 NR Description: CMP-sialic acid transporter-like protein
  misc_feature (15)..(117): Homolog of NCBI NO: 34393556 NR Description: putative CMP-sialic acid transporter [Oryza
  misc_feature (11)..(149): Homolog of NCBI NO: 34907666 NR Description: putative transporter-like protein [Oryza sativa
  misc_feature (11)..(120): Homolog of NCBI NO: 26450627 NR Description: unknown protein [Arabidopsis thaliana]
  misc_feature (11)..(120): Homolog of NCBI NO: 18411150 NR Description: transporter-related protein [Arabidopsis thaliana]
  misc_feature (11)..(120): Homolog of NCBI NO: 38345234 NR Description: OSJNBa0084K20.12 [Oryza sativa (japonica
  misc_feature (40)..(122): Homolog of NCBI NO: 39593097 NR Description: Hypothetical protein CBG09317 [Caenorhabditis
  misc_feature (43)..(120): Homolog of NCBI NO: 6755558 NR Description: solute carrier family 35 (CMP-sialic acid
  misc_feature (43)..(120): Homolog of NCBI NO: 34867231 NR Description: similar to CMP-sialic acid transporter [Rattus
MTPYTGKTCSYIRRFGSLFNVARLIADDFRHGFEKGPWWQRIFDGYSITTWLVVLNLGSTGLLVSWLMKYADNIVKVYSTSMAMLLTMVASIYLFSFKPTLQLFLGIVICIMSLHMYFAPPHTLVDLPVTNEAHAKTLKQVVVEEKTDS

SEQ ID NO: 108038 - protein, 146 aa, Arabidopsis thaliana; identical to SEQ ID NO: 24046
  peptide (1)..(146): Ceres Seq. ID no. 13653070
  misc_feature (2)..(146): Pfam Name: Nucleotide-sugar transporter Pfam Description: Nucleotide-sugar transporter
  misc_feature (1)..(146): Homolog of NCBI NO: 18422134 NR Description: CMP-sialic acid transporter-related protein
  misc_feature (1)..(146): Homolog of NCBI NO: 10177360 NR Description: CMP-sialic acid transporter-like protein
  misc_feature (1)..(145): Homolog of NCBI NO: 34393556 NR Description: putative CMP-sialic acid transporter [Oryza
  misc_feature (1)..(145): Homolog of NCBI NO: 34907666 NR Description: putative transporter-like protein [Oryza sativa
  misc_feature (1)..(145): Homolog of NCBI NO: 26450627 NR Description: unknown protein [Arabidopsis thaliana]
  misc_feature (1)..(145): Homolog of NCBI NO: 18411150 NR Description: transporter-related protein [Arabidopsis thaliana]
  misc_feature (1)..(145): Homolog of NCBI NO: 38345234 NR Description: OSJNBa0084K20.12 [Oryza sativa (japonica
  misc_feature (1)..(144): Homolog of NCBI NO: 39593097 NR Description: Hypothetical protein CBG09317 [Caenorhabditis
  misc_feature (1)..(145): Homolog of NCBI NO: 6755558 NR Description: solute carrier family 35 (CMP-sialic acid
  misc_feature (1)..(145): Homolog of NCBI NO: 34867231 NR Description: similar to CMP-sialic acid transporter [Rattus

SEQ ID NO: 108039 - DNA, 2064 bp, Arabidopsis thaliana
  misc_feature (1)..(2064): Ceres Seq. ID no. 13653082
  misc_feature: MA Experiment ID: 108434 Result: Down-regulated in Transcription
  misc_feature: MA Experiment 108434 PARAMETER Experiment Name: At_Root_Tips_cDNA_P Parameter: Tissue Value: Root Tips
  misc_feature: MA Experiment ID: 108462 Result: Up-regulated in Transcription
  misc_feature: MA Experiment 108462 PARAMETER Experiment Name: At_Germinating_Seeds_cDNA_P Parameter: Age (day) Value: 2 vs. 0
  misc_feature: MA Experiment 108462 PARAMETER Experiment Name: At_Germinating_Seeds_cDNA_P Parameter: Tissue Value: Germinating Seeds
  misc_feature: MA Experiment ID: 108463 Result: Up-regulated in Transcription
  misc_feature: MA Experiment 108463 PARAMETER Experiment Name: At_Germinating_Seeds_cDNA_P Parameter: Age (day) Value: 3 vs. 0
  misc_feature: MA Experiment 108463 PARAMETER Experiment Name: At_Germinating_Seeds_cDNA_P Parameter: Tissue Value: Germinating Seeds
  misc_feature: MA Experiment ID: 108464 Result: Up-regulated in Transcription
  misc_feature: MA Experiment 108464 PARAMETER Experiment Name: At_Germinating_Seeds_cDNA_P Parameter: Age (day) Value: 4 vs. 0
  misc_feature: MA Experiment 108464 PARAMETER Experiment Name: At_Germinating_Seeds_cDNA_P Parameter: Tissue Value: Germinating Seeds
  misc_feature: MA Experiment ID: 108668 Result: Up-regulated in Transcription
  misc_feature: MA Experiment 108668 PARAMETER Experiment Name: At_2mM_SA_cDNA_P Parameter: Plant Line Value: WS
  misc_feature: MA Experiment 108668 PARAMETER Experiment Name: At_2mM_SA_cDNA_P Parameter: Timepoint (hr) Value: 6
  misc_feature: MA Experiment 108668 PARAMETER Experiment Name: At_2mM_SA_cDNA_P Parameter: Treatment Value: 2mM SA vs. No Treatment
  misc_feature: MA Experiment ID: 20000182 Result: Up-regulated in Transcription
  misc_feature: MA Experiment 20000182 PARAMETER Experiment Name: At_2mM_SA_P Parameter: Age (day) Value: 14
  misc_feature: MA Experiment 20000182 PARAMETER Experiment Name: At_2mM_SA_P Parameter: Organism Value: A. thaliana
  misc_feature: MA Experiment 20000182 PARAMETER Experiment Name: At_2mM_SA_P Parameter: Plant Line Value: WS
  misc_feature: MA Experiment 20000182 PARAMETER Experiment Name: At_2mM_SA_P Parameter: Timepoint (hr) Value: 6
  misc_feature: MA Experiment 20000182 PARAMETER Experiment Name: At_2mM_SA_P Parameter: Tissue Value: Aerial
  misc_feature: MA Experiment 20000182 PARAMETER Experiment Name: At_2mM_SA_P Parameter: Treatment Value: 2mM SA vs. No Treatment
  misc_feature: MA Experiment ID: 20000184 Result: Up-regulated in Transcription
  misc_feature: MA Experiment 20000184 PARAMETER Experiment Name: At_Shoots__P Parameter: Age (day) Value: 7
  misc_feature: MA Experiment 20000184 PARAMETER Experiment Name: At_Shoots__P Parameter: Tissue Value: Shoots vs. Whole Plant
  misc_feature: MA Experiment ID: 20000185 Result: Up-regulated in Transcription
  misc_feature: MA Experiment 20000185 PARAMETER Experiment Name: At_Roots__P Parameter: Age (day) Value: 7 vs. 21
  misc_feature: MA Experiment 20000185 PARAMETER Experiment Name: At_Roots__P Parameter: Organism Value: A. thaliana
  misc_feature: MA Experiment 20000185 PARAMETER Experiment Name: At_Roots__P Parameter: Tissue Value: Roots vs. Whole Plant
  misc_feature: MA Experiment ID: 20000264 Result: Down-regulated in Transcription
  misc_feature: MA Experiment 20000264 PARAMETER Experiment Name: At_Open_Flower_P Parameter: Age (day) Value: 21
  misc_feature: MA Experiment 20000264 PARAMETER Experiment Name: At_Open_Flower_P Parameter: Plant Line Value: WS
  misc_feature: MA Experiment 20000264 PARAMETER Experiment Name: At_Open_Flower_P Parameter: Tissue Value: Open Flower vs. Whole Plant
  misc_feature: MA Experiment ID: 20000265 Result: Down-regulated in Transcription
  misc_feature: MA Experiment 20000265 PARAMETER Experiment Name: At_Open_Flower_P Parameter: Age (day) Value: 21
  misc_feature: MA Experiment 20000265 PARAMETER Experiment Name: At_Open_Flower_P Parameter: Plant Line Value: WS
  misc_feature: MA Experiment 20000265 PARAMETER Experiment Name: At_Open_Flower_P Parameter: Tissue Value: Closed Flower vs. Whole Plant
  misc_feature: MA Experiment ID: 20000286 Result: Down-regulated in Transcription
  misc_feature: MA Experiment 20000286 PARAMETER Experiment Name: At_Open_Flower_P Parameter: Age (day) Value: 21
  misc_feature: MA Experiment 20000286 PARAMETER Experiment Name: At_Open_Flower_P Parameter: Plant Line Value: WS
  misc_feature: MA Experiment 20000286 PARAMETER Experiment Name: At_Open_Flower_P Parameter: Tissue Value: Half Open vs. Whole Plant
  misc_feature: MA Experiment ID: 20000439 Result: Up-regulated in Transcription
  misc_feature: MA Experiment 20000439 PARAMETER Experiment Name: At_Roots__P Parameter: Age (day) Value: 14 vs. 21
  misc_feature: MA Experiment 20000439 PARAMETER Experiment Name: At_Roots__P Parameter: Organism Value: A. thaliana
  misc_feature: MA Experiment 20000439 PARAMETER Experiment Name: At_Roots__P Parameter: Tissue Value: Roots vs. Whole Plant
  misc_feature: MA Experiment ID: 20000527 Result: Down-regulated in Transcription
  misc_feature: MA Experiment 20000527 PARAMETER Experiment Name: At_10percent_PEG_P Parameter: Age (day) Value: 20
  misc_feature: MA Experiment 20000527 PARAMETER Experiment Name: At_10percent_PEG_P Parameter: Organism Value: A. thaliana
  misc_feature: MA Experiment 20000527 PARAMETER Experiment Name: At_10percent_PEG_P Parameter: Plant Line Value: WS
  misc_feature: MA Experiment 20000527 PARAMETER Experiment Name: At_10percent_PEG_P Parameter: Timepoint (day) Value: 20
  misc_feature: MA Experiment 20000527 PARAMETER Experiment Name: At_10percent_PEG_P Parameter: Tissue Value: Whole Plant
  misc_feature: MA Experiment 20000527 PARAMETER Experiment Name: At_10percent_PEG_P Parameter: Treatment Value: 10percent PEG vs. No Treatment
  misc_feature: MA Experiment ID: 20000794 Result: Down-regulated in Transcription
  misc_feature: MA Experiment 20000794 PARAMETER Experiment Name: At_Petals_P Parameter: Age (day) Value: 23-25 days
  misc_feature: MA Experiment 20000794 PARAMETER Experiment Name: At_Petals_P Parameter: Plant Line Value: WS
  misc_feature: MA Experiment 20000794 PARAMETER Experiment Name: At_Petals_P Parameter: Tissue Value: Petals vs. Whole plant
  misc_feature: MA Experiment ID: 20001555 Result: Down-regulated in Transcription
  misc_feature: MA Experiment 20001555 PARAMETER Experiment Name: At_Drought_Soil_Dry_P Parameter: Age (day) Value: 24
  misc_feature: MA Experiment 20001555 PARAMETER Experiment Name: At_Drought_Soil_Dry_P Parameter: Organism Value: A. thaliana
  misc_feature: MA Experiment 20001555 PARAMETER Experiment Name: At_Drought_Soil_Dry_P Parameter: Plant Line Value: WS
  misc_feature: MA Experiment 20001555 PARAMETER Experiment Name: At_Drought_Soil_Dry_P Parameter: Post Timepoint (hr) Value: None
  misc_feature: MA Experiment 20001555 PARAMETER Experiment Name: At_Drought_Soil_Dry_P Parameter: Post-Treatment Value: None
  misc_feature: MA Experiment 20001555 PARAMETER Experiment Name: At_Drought_Soil_Dry_P Parameter: Timepoint (day) Value: 10
  misc_feature: MA Experiment 20001555 PARAMETER Experiment Name: At_Drought_Soil_Dry_P Parameter: Treatment Value: Drought vs. No Drought
  misc_feature: MA Experiment ID: 20001556 Result: Down-regulated in Transcription
  misc_feature: MA Experiment 20001556 PARAMETER Experiment Name: At_Drought_Soil_Dry_P Parameter: Age (day) Value: 26
  misc_feature: MA Experiment 20001556 PARAMETER Experiment Name: At_Drought_Soil_Dry_P Parameter: Organism Value: A. thaliana
  misc_feature: MA Experiment 20001556 PARAMETER Experiment Name: At_Drought_Soil_Dry_P Parameter: Plant Line Value: WS
  misc_feature: MA Experiment 20001556 PARAMETER Experiment Name: At_Drought_Soil_Dry_P Parameter: Post Timepoint (hr) Value: None
  misc_feature: MA Experiment 20001556 PARAMETER Experiment Name: At_Drought_Soil_Dry_P Parameter: Post-Treatment Value: None
  misc_feature: MA Experiment 20001556 PARAMETER Experiment Name: At_Drought_Soil_Dry_P Parameter: Timepoint (day) Value: 12
  misc_feature: MA Experiment 20001556 PARAMETER Experiment Name: At_Drought_Soil_Dry_P Parameter: Treatment Value: Drought vs. No Drought
  misc_feature: MA Experiment ID: 20001558 Result: Down-regulated in Transcription
  misc_feature: MA Experiment 20001558 PARAMETER Experiment Name: At_Drought_Soil_Dry_P Parameter: Age (day) Value: 27
  misc_feature: MA Experiment 20001558 PARAMETER Experiment Name: At_Drought_Soil_Dry_P Parameter: Organism Value: A. thaliana
  misc_feature: MA Experiment 20001558 PARAMETER Experiment Name: At_Drought_Soil_Dry_P Parameter: Plant Line Value: WS
  misc_feature: MA Experiment 20001558 PARAMETER Experiment Name: At_Drought_Soil_Dry_P Parameter: Post Timepoint (hr) Value: 6
  misc_feature: MA Experiment 20001558 PARAMETER Experiment Name: At_Drought_Soil_Dry_P Parameter: Post-Treatment Value: Re-Water vs. No Drought
  misc_feature: MA Experiment 20001558 PARAMETER Experiment Name: At_Drought_Soil_Dry_P Parameter: Timepoint (day) Value: 13
  misc_feature: MA Experiment 20001558 PARAMETER Experiment Name: At_Drought_Soil_Dry_P Parameter: Treatment Value: Drought vs. No Drought
  misc_feature: MA Experiment ID: 20001905 Result: Down-regulated in Transcription
  misc_feature: MA Experiment 20001905 PARAMETER Experiment Name: At_Drought_Reproduction_P Parameter: Age (day) Value: 40
  misc_feature: MA Experiment 20001905 PARAMETER Experiment Name: At_Drought_Reproduction_P Parameter: Organism Value: A. thaliana
  misc_feature: MA Experiment 20001905 PARAMETER Experiment Name: At_Drought_Reproduction_P Parameter: Plant Line Value: WS
  misc_feature: MA Experiment 20001905 PARAMETER Experiment Name: At_Drought_Reproduction_P Parameter: Timepoint (day) Value: 10
  misc_feature: MA Experiment 20001905 PARAMETER Experiment Name: At_Drought_Reproduction_P Parameter: Tissue Value: Rosettes
  misc_feature: MA Experiment 20001905 PARAMETER Experiment Name: At_Drought_Reproduction_P Parameter: Treatment Value: Drought vs. No Drought
actcatcacttacttaacatactaagagagttattacaacttgaaaaacatggcatccaaggctttgattctgttgggtctcttcgcaattcttctggtggtctccgaagtttctgccgcaagacagtcgggcatggtgaagccagagagtgaggcaactgtgcaacctgaaggttatcacggaggacatggtggtcacggagggggaggccactacggaggaggaggccacgggcatggaggacacaacggaggagggggccacggacttgacggatacggaggaggacatggaggacactacggaggaggaggaggacactacggaggaggaggaggccacggtggtggtggacactacggaggtggaggacaccatggaggaggaggccacgggcttaacgaacctgttcagacgaaaccgggtgtttaaaagttaaaactataaaataaattcaccaccagtccaccatgcataattgcatctctatatacacttatgtcttataagtatgcatcaaaataaaccatggtgagtttgtaatgcagttccttcagaaaaaaaaaaaaaacaatccagggttggatccaacctggatagtttttttttttttttttatgtaaatttggtccgtcgattgcagttcaattaaacagttacagacaatagagagacagatagagagtaacaaaactcaagaagagcgtttggcatttgaacagagattgttccagagatagcgaccacttgccatgtcaacgcatgtccaaaatccagacttcattgccattcccaccttggagaatccagagactgaatcgtcgtcggcgtgttcagcgtcggtgaaggaatcatcgagaggatcgtcagaggtagagttgagcttctggaggacgaagaagccagcgagagtcgctgaaaggaatatgaggataagccttaacggacacatctgcttcttcttctcttttcttgatttgctttttccagtttttgatgaagacaatcagcggttctcgagaaccgatggaatcaacaaagaagcaagtctcgttggagctacttccatggttagttgtccacaccgatggaacggtagagagactagcgggaaccgaggtttgtcctcccggtttggatccaataaccggggttttctctaaagatatcattatcgaaccgaaaaccggtttatctgcccgaatctatcgacccttctcgattcaacccggtcagaagattcctctcatgctctattttcatggcggtgcatttctcatctcctccacttccttcccctcttaccacaccagtcttaacaaaattgtcaatcaggctaacgtcatagccgtctctgtcaattacagactagcaccagaacatccacttcctacagcgtacgaagactcatggactgcgctaaagaatatccaagccataaacgagccgtggatcaacgactacgccgacttggacagtttattcctagtgggagatagcgcgggagctaatatctcgcaccacctcgcatttcgagccaaacaatctgaccaaaccttgaaaatcaaaggcattggaatgatccacccatatttttgggggacacaacctatcggagcagagatcaaagacgaagcgaggaaacaaatggtggacggatggtgggaattcgtgtgcccatccgagaaaggatccgatgacccgtggattaatccgtttgcggacgggtcaccggatcttggagggttagggtgtgagagagtgatgattactgtggcggagaaagatatattgaatgagagagggaagatgtattacgaaagattggtgaagagtgagtggaaaggaaaggttgagattatggagacgaaagagaaagatcatgtttttcatattttcgagccagattgtgatgaagctatggagatggtacgatgcttggctctctttataaaccaagttgaagcttgatattatttgttttgccaaaatttgatggctttttttaatgtttgtataatttttacatgtttgttaatgttgttgttattgtcttttctttt

SEQ ID NO: 108040 - protein, 324 aa, Arabidopsis thaliana
  peptide (1)..(324): Ceres Seq. ID no. 13653083
  misc_feature (70)..(127): Pfam Name: Carboxylesterase Pfam Description: Carboxylesterase
  misc_feature (11)..(324): Homolog of NCBI NO: 18401743 NR Description: expressed protein [Arabidopsis thaliana]
  misc_feature (11)..(324): Homolog of NCBI NO: 21536771 NR Description: unknown [Arabidopsis thaliana]
  misc_feature (17)..(319): Homolog of NCBI NO: 15228426 NR Description: expressed protein [Arabidopsis thaliana]
  misc_feature (15)..(319): Homolog of NCBI NO: 15222795 NR Description: expressed protein [Arabidopsis thaliana]
  misc_feature (18)..(321): Homolog of NCBI NO: 15227669 NR Description: expressed protein [Arabidopsis thaliana]
  misc_feature (18)..(321): Homolog of NCBI NO: 28393060 NR Description: putative esterase [Arabidopsis thaliana]
  misc_feature (23)..(319): Homolog of NCBI NO: 15222791 NR Description: hypothetical protein [Arabidopsis thaliana]
  misc_feature (17)..(319): Homolog of NCBI NO: 15228425 NR Description: expressed protein [Arabidopsis thaliana]
  misc_feature (17)..(319): Homolog of NCBI NO: 18086341 NR Description: AT3g48690/T8P19_200 [Arabidopsis thaliana]
  misc_feature (18)..(321): Homolog of NCBI NO: 34393904 NR Description: putative cell death associated protein [Oryza
MKTISGSREPMESTKKQVSLELLPWLVVHTDGTVERLAGTEVCPPGLDPITGVFSKDIIIEPKTGLSARIYRPFSIQPGQKIPLMLYFHGGAFLISSTSFPSYHTSLNKIVNQANVIAVSVNYRLAPEHPLPTAYEDSWTALKNIQAINEPWINDYADLDSLFLVGDSAGANISHHLAFRAKQSDQTLKIKGIGMIHPYFWGTQPIGAEIKDEARKQMVDGWWEFVCPSEKGSDDPWINPFADGSPDLGGLGCERVMITVAEKDILNERGKMYYERLVKSEWKGKVEIMETKEKDHVFHIFEPDCDEAMEMVRCLALFINQVEA

SEQ ID NO: 108041 - protein, 314 aa, Arabidopsis thaliana; identical to SEQ ID NO: 102772
  peptide (1)..(314): Ceres Seq. ID no. 13653084
  misc_feature (60)..(117): Pfam Name: Carboxylesterase Pfam Description: Carboxylesterase
  misc_feature (1)..(314): Homolog of NCBI NO: 18401743 NR Description: expressed protein [Arabidopsis thaliana]
  misc_feature (1)..(314): Homolog of NCBI NO: 21536771 NR Description: unknown [Arabidopsis thaliana]
  misc_feature (7)..(309): Homolog of NCBI NO: 15228426 NR Description: expressed protein [Arabidopsis thaliana]
  misc_feature (5)..(309): Homolog of NCBI NO: 15222795 NR Description: expressed protein [Arabidopsis thaliana]
  misc_feature (8)..(311): Homolog of NCBI NO: 15227669 NR Description: expressed protein [Arabidopsis thaliana]
  misc_feature (8)..(311): Homolog of NCBI NO: 28393060 NR Description: putative esterase [Arabidopsis thaliana]
  misc_feature (13)..(309): Homolog of NCBI NO: 15222791 NR Description: hypothetical protein [Arabidopsis thaliana]
  misc_feature (7)..(309): Homolog of NCBI NO: 15228425 NR Description: expressed protein [Arabidopsis thaliana]
  misc_feature (7)..(309): Homolog of NCBI NO: 18086341 NR Description: AT3g48690/T8P19_200 [Arabidopsis thaliana]
  misc_feature (8)..(311): Homolog of NCBI NO: 34393904 NR Description: putative cell death associated protein [Oryza

SEQ ID NO: 108042 - protein, 240 aa, Arabidopsis thaliana; identical to SEQ ID NO: 102773
  peptide (1)..(240): Ceres Seq. ID no. 13653085
  misc_feature (1)..(43): Pfam Name: Carboxylesterase Pfam Description: Carboxylesterase
  misc_feature (1)..(240): Homolog of NCBI NO: 18401743 NR Description: expressed protein [Arabidopsis thaliana]
  misc_feature (1)..(240): Homolog of NCBI NO: 21536771 NR Description: unknown [Arabidopsis thaliana]
  misc_feature (1)..(235): Homolog of NCBI NO: 15228426 NR Description: expressed protein [Arabidopsis thaliana]
  misc_feature (1)..(235): Homolog of NCBI NO: 15222795 NR Description: expressed protein [Arabidopsis thaliana]
  misc_feature (1)..(237): Homolog of NCBI NO: 15227669 NR Description: expressed protein [Arabidopsis thaliana]
  misc_feature (1)..(237): Homolog of NCBI NO: 28393060 NR Description: putative esterase [Arabidopsis thaliana]
  misc_feature (1)..(235): Homolog of NCBI NO: 15222791 NR Description: hypothetical protein [Arabidopsis thaliana]
  misc_feature (1)..(235): Homolog of NCBI NO: 15228425 NR Description: expressed protein [Arabidopsis thaliana]
  misc_feature (1)..(235): Homolog of NCBI NO: 18086341 NR Description: AT3g48690/T8P19_200 [Arabidopsis thaliana]
  misc_feature (1)..(237): Homolog of NCBI NO: 34393904 NR Description: putative cell death associated protein [Oryza

SEQ ID NO: 108043 - DNA, 794 bp, Arabidopsis thaliana
  misc_feature (1)..(794): Ceres Seq. ID no. 13653094
  misc_feature: MA Experiment ID: 20000437 Result: Up-regulated in Transcription
  misc_feature: MA Experiment 20000437 PARAMETER Experiment Name: At_Drought_P Parameter: Age (day) Value: 8
  misc_feature: MA Experiment 20000437 PARAMETER Experiment Name: At_Drought_P Parameter: Organism Value: A. thaliana
  misc_feature: MA Experiment 20000437 PARAMETER Experiment Name: At_Drought_P Parameter: Plant Line Value: WS
  misc_feature: MA Experiment 20000437 PARAMETER Experiment Name: At_Drought_P Parameter: Timepoint (hr) Value: 24
  misc_feature: MA Experiment 20000437 PARAMETER Experiment Name: At_Drought_P Parameter: Tissue Value: Whole Plant
  misc_feature: MA Experiment 20000437 PARAMETER Experiment Name: At_Drought_P Parameter: Treatment Value: Drought vs. No Drought
  misc_feature: Pfam Name: CBFD_NFYB_HMF Pfam Description: Histone-like transcription factor (CBF/NF-Y) and archaeal histone
aatttctctaaagccctaaaactaaaacgactatccccaattccaagttctagggtttccatcttccccaatctagtataaatggcggatacgccttcgagcccagctggagatggcggagaaagcggcggttccgttagggagcaggatcgataccttcctatagctaatatcagcaggatcatgaagaaagcgttgcctcctaatggtaagattggaaaagatgctaaggatacagttcaggaatgcgtctctgagttcatcagcttcatcactagcgaggccagtgataagtgtcaaaaagagaaaaggaaaactgtgaatggtgatgatttgttgtgggcaatggcaacattaggatttgaggattacctggaacctctaaagatatacctagcgaggtacagggagttggagggtgataataagggatcaggaaagagtggagatggatcaaatagagatgctggtggcggtgtttctggtgaagaaatgccgagctggtaaaagaagttgcaagtagtgattaagaacaatcgccaaatgatcaagtaattcttctctctatcacacggcctcatgtacacaaatgaagagcatagtctatatgcatgggaaattagagatcagtgagttgtttatagttgagctgatcgacaactatttcgggtttactctcaatttcggttatgttagtttgaacgtttggtttattgtttccggtttagttggttgtatttaaagatttctctgttagatgttgagaacacttgaatgaaggaaaaatttgtcct

SEQ ID NO: 108044 - protein, 141 aa, Arabidopsis thaliana; identical to SEQ ID NO: 27889
  peptide (1)..(141): Ceres Seq. ID no. 13653095
  misc_feature: Pfam Name: CBFD_NFYB_HMF Pfam Description: Histone-like transcription factor (CBF/NF-Y) and archaeal histone
  misc_feature (1)..(141): Homolog of NCBI NO: 18404885 NR Description: CCAAT-binding transcription factor subunit [Arabidopsis thaliana] >gi|2398527|emb|CAA74051.1| Transcription [Arabidopsis thaliana] >gi|20197447|gb|AAC79602.2| putative
  misc_feature (1)..(139): Homolog of NCBI NO: 25299604 NR Description: hypothetical protein At2g38880 [imported] -
  misc_feature (1)..(111): Homolog of NCBI NO: 30687688 NR Description: CCAAT-binding transcription factor subunit
  misc_feature (1)..(133): Homolog of NCBI NO: 22380 NR Description: CAAT-box DNA binding protein subunit B (NF-YB)
  misc_feature (1)..(133): Homolog of NCBI NO: 115840 NR Description: CCAAT-BINDING TRANSCRIPTION FACTOR SUBUNIT A
  misc_feature (10)..(135): Homolog of NCBI NO: 30409461 NR Description: NF-YB [Oryza sativa (japonica cultivar-group)]
  misc_feature (1)..(136): Homolog of NCBI NO: 17979253 NR Description: At2g37060/T2N18.18 [Arabidopsis thaliana]
  misc_feature (1)..(128): Homolog of NCBI NO: 15231796 NR Description: transcription factor NF-Y, CCAAT-binding - like
  misc_feature (1)..(140): Homolog of NCBI NO: 30409459 NR Description: NF-YB [Oryza sativa (japonica cultivar-group)]
  misc_feature (1)..(140): Homolog of NCBI NO: 34908028 NR Description: putative CAAT-box DNA binding protein [Oryza

SEQ ID NO: 108045 - protein, 107 aa, Arabidopsis thaliana; identical to SEQ ID NO: 27890
  peptide (1)..(107): Ceres Seq. ID no. 13653096
  misc_feature: Pfam Name: CBFD_NFYB_HMF Pfam Description: Histone-like transcription factor (CBF/NF-Y) and archaeal histone
  misc_feature (1)..(107): Homolog of NCBI NO: 18404885 NR Description: CCAAT-binding transcription factor subunit [Arabidopsis thaliana] >gi|2398527|emb|CAA74051.1| Transcription [Arabidopsis thaliana] >gi|20197447|gb|AAC79602.2| putative
  misc_feature (1)..(105): Homolog of NCBI NO: 25299604 NR Description: hypothetical protein At2g38880 [imported] -
  misc_feature (1)..(77): Homolog of NCBI NO: 30687688 NR Description: CCAAT-binding transcription factor subunit
  misc_feature (1)..(99): Homolog of NCBI NO: 22380 NR Description: CAAT-box DNA binding protein subunit B (NF-YB)
  misc_feature (1)..(99): Homolog of NCBI NO: 115840 NR Description: CCAAT-BINDING TRANSCRIPTION FACTOR SUBUNIT A
  misc_feature (1)..(101): Homolog of NCBI NO: 30409461 NR Description: NF-YB [Oryza sativa (japonica cultivar-group)]
  misc_feature (1)..(102): Homolog of NCBI NO: 17979253 NR Description: At2g37060/T2N18.18 [Arabidopsis thaliana]
  misc_feature (1)..(94): Homolog of NCBI NO: 15231796 NR Description: transcription factor NF-Y, CCAAT-binding - like
  misc_feature (1)..(106): Homolog of NCBI NO: 30409459 NR Description: NF-YB [Oryza sativa (japonica cultivar-group)]
  misc_feature (1)..(106): Homolog of NCBI NO: 34908028 NR Description: putative CAAT-box DNA binding protein [Oryza

SEQ ID NO: 108046 - DNA, 1556 bp, Arabidopsis thaliana
  misc_feature (1)..(1556): Ceres Seq. ID no. 13653114
  misc_feature: MA Experiment ID: 20000306 Result: Down-regulated in Transcription
  misc_feature: MA Experiment 20000306 PARAMETER Experiment Name: At_Germinating_Seeds_Sub_P Parameter: Age (hr) Value: 6 vs. 0
  misc_feature: MA Experiment 20000306 PARAMETER Experiment Name: At_Germinating_Seeds_Sub_P Parameter: Organism Value: A. thaliana
  misc_feature: MA Experiment 20000306 PARAMETER Experiment Name: At_Germinating_Seeds_Sub_P Parameter: Plant Line Value: WS
  misc_feature: MA Experiment 20000306 PARAMETER Experiment Name: At_Germinating_Seeds_Sub_P Parameter: Tissue Value: Germinating Seeds
  misc_feature: MA Experiment ID: 20000307 Result: Down-regulated in Transcription
  misc_feature: MA Experiment 20000307 PARAMETER Experiment Name: At_Germinating_Seeds_Sub_P Parameter: Age (hr) Value: 24 vs. 0
  misc_feature: MA Experiment 20000307 PARAMETER Experiment Name: At_Germinating_Seeds_Sub_P Parameter: Organism Value: A. thaliana
  misc_feature: MA Experiment 20000307 PARAMETER Experiment Name: At_Germinating_Seeds_Sub_P Parameter: Plant Line Value: WS
  misc_feature: MA Experiment 20000307 PARAMETER Experiment Name: At_Germinating_Seeds_Sub_P Parameter: Tissue Value: Germinating Seeds
actctcttcagacaaaacccacgagatacagaaaaagaggacaagagagaatcgtccatggaagaagacactggtatcgacgaagctaagacatacacggtggagaagagcgagaaagtggagccggagaaggacggactgagtcaattcagagacgaggaaaaatcacttggtgcggatatggaagatttacatgatgagactgtgcgagaaaccctaggcaaggatcaggttcaaggtgttcgagaaaattcctctgtggaaccaaatgttgaagatgtattagaagtgaatgagactgatagcgtcaaggaaactgttgtaagtgcgattgtgccggttgatgaagtggaagagaatcgtcaggtagaaacatctccttctctggctgcatcgtcagactcattgacagtgacgccatgtctatctttggatcctgcaactgcttcaaccgcacaagatttaccactggtttcagttccaactaaacaagagcaaagatcagattcgccggtggttaacagattgtcggttactcctgttcctaggacaccggctcgtgatggttataattggagaaaatatggacagaagcaggttaagagtcccaagggctcacggagttactacaggtgtacatacactgaatgttgtgctaaaaaaattgaatgctccaatgattcaggcaatgtggtagagattgttaacaaaggtttacatactcatgaacctccccggaagactagcttctccccgagagagattagagttacaacagctatccggcctgtttcagaggatgatacagtagtagaagagctatcaattgttcctagcggttcagatccgtctgcttctactaaagaatacatctgtgagtcgcaaacactcgttgaccggaaaagacactgtgagaacgaagctgtggaggaaccagagccaaaacgaagactgaaaaaagataactcacagagttcagattctgtctccaaacctggaaagaaaaacaaattcgtagtacacgcagctggtgatgttggtatctgtggtgatggatacaggtggcgtaaatacgggcagaaaatggtgaaaggaaatcctcatccaaggaactactaccgatgcacttcagcgggatgtccagttcgtaaacacattgagacagcagtcgagaacacaaaagcagtaataatcacatacaaaggagtacacaaccacgacatgccggtgcctaagaaacgccatggtcctccaagctcaatgctcgtagctgcagccgctccaacatcaatgagaaccaggacagacgatcaggtgaacattccgacttcaagccagtgctcggtggggcgagaaagtgagaagcagagtaaagaagcattggacgttggtggagagaaagtgatggaatcagctaggactttgttgagcattggattcgaaatcaagcaatgctgattatatgtagtttatgagttttatagagttcatcgactcaattttcgcctccttgttcttgttatataataataataaaaaaccccatgaagattacc

SEQ ID NO: 108047 - protein, 485 aa, Arabidopsis thaliana
  peptide (1)..(485): Ceres Seq. ID no. 13653115
  misc_feature (20)..(485): Homolog of NCBI NO: 29839502 NR Description: Probable WRKY transcription factor 32 (WRKY protein 32) >gi|28393378|gb|AAO42113.1| putative WRKY family factor [Arabidopsis thaliana] >gi|28827598|gb|AAO50643.1|
  misc_feature (20)..(485): Homolog of NCBI NO: 22329039 NR Description: WRKY family transcription factor [Arabidopsis
  misc_feature (4)..(473): Homolog of NCBI NO: 25407696 NR Description: hypothetical protein AT4g30930 [imported] - thaliana >gi|2980773|emb|CAA18200.1| putative protein thaliana] >gi|7269995|emb|CAB79811.1| putative protein
  misc_feature (115)..(436): Homolog of NCBI NO: 3420906 NR Description: zinc finger protein; WRKY1 [Pimpinella
  misc_feature (180)..(474): Homolog of NCBI NO: 18158619 NR Description: WRKY-like drought-induced protein [Retama raetam]
  misc_feature (186)..(445): Homolog of NCBI NO: 14530685 NR Description: WRKY DNA-binding protein [Nicotiana tabacum]
  misc_feature (186)..(412): Homolog of NCBI NO: 4760692 NR Description: transcription factor NtWRKY2 [Nicotiana tabacum]
  misc_feature (188)..(450): Homolog of NCBI NO: 1076685 NR Description: SPF1 protein - sweet potato
  misc_feature (188)..(436): Homolog of NCBI NO: 5917653 NR Description: zinc-finger type transcription factor WRKY1
  misc_feature (156)..(412): Homolog of NCBI NO: 5360683 NR Description: NtWRKY1 [Nicotiana tabacum]
TLFRQNPRDTEKEDKRESSMEEDTGIDEAKTYTVEKSEKVEPEKDGLSQFRDEEKSLGADMEDLHDETVRETLGKDQVQGVRENSSVEPNVEDVLEVNETDSVKETVVSAIVPVDEVEENRQVETSPSLAASSDSLTVTPCLSLDPATASTAQDLPLVSVPTKQEQRSDSPVVNRLSVTPVPRTPARDGYNWRKYGQKQVKSPKGSRSYYRCTYTECCAKKIECSNDSGNVVEIVNKGLHTHEPPRKTSFSPREIRVTTAIRPVSEDDTVVEELSIVPSGSDPSASTKEYICESQTLVDRKRHCENEAVEEPEPKRRLKKDNSQSSDSVSKPGKKNKFVVHAAGDVGICGDGYRWRKYGQKMVKGNPHPRNYYRCTSAGCPVRKHIETAVENTKAVIITYKGVHNHDMPVPKKRHGPPSSMLVAAAAPTSMRTRTDDQVNIPTSSQCSVGRESEKQSKEALDVGGEKVMESARTLLSIGFEIKQC

SEQ ID NO: 108048 - protein, 466 aa, Arabidopsis thaliana
  peptide (1)..(466): Ceres Seq. ID no. 13653116
  misc_feature (1)..(466): Homolog of NCBI NO: 29839502 NR Description: Probable WRKY transcription factor 32 (WRKY protein 32) >gi|28393378|gb|AAO42113.1| putative WRKY family factor [Arabidopsis thaliana] >gi|28827598|gb|AAO50643.1|
  misc_feature (1)..(466): Homolog of NCBI NO: 22329039 NR Description: WRKY family transcription factor [Arabidopsis
  misc_feature (1)..(454): Homolog of NCBI NO: 25407696 NR Description: hypothetical protein AT4g30930 [imported] - thaliana >gi|2980773|emb|CAA18200.1| putative protein thaliana] >gi|7269995|emb|CAB79811.1| putative protein
  misc_feature (96)..(417): Homolog of NCBI NO: 3420906 NR Description: zinc finger protein; WRKY1 [Pimpinella
  misc_feature (161)..(455): Homolog of NCBI NO: 18158619 NR Description: WRKY-like drought-induced protein [Retama raetam]
  misc_feature (167)..(426): Homolog of NCBI NO: 14530685 NR Description: WRKY DNA-binding protein [Nicotiana tabacum]
  misc_feature (167)..(393): Homolog of NCBI NO: 4760692 NR Description: transcription factor NtWRKY2 [Nicotiana tabacum]
  misc_feature (169)..(431): Homolog of NCBI NO: 1076685 NR Description: SPF1 protein - sweet potato
  misc_feature (169)..(417): Homolog of NCBI NO: 5917653 NR Description: zinc-finger type transcription factor WRKY1
  misc_feature (137)..(393): Homolog of NCBI NO: 5360683 NR Description: NtWRKY1 [Nicotiana tabacum]
MEEDTGIDEAKTYTVEKSEKVEPEKDGLSQFRDEEKSLGADMEDLHDETVRETLGKDQVQGVRENSSVEPNVEDVLEVNETDSVKETVVSAIVPVDEVEENRQVETSPSLAASSDSLTVTPCLSLDPATASTAQDLPLVSVPTKQEQRSDSPVVNRLSVTPVPRTPARDGYNWRKYGQKQVKSPKGSRSYYRCTYTECCAKKIECSNDSGNVVEIVNKGLHTHEPPRKTSFSPREIRVTTAIRPVSEDDTVVEELSIVPSGSDPSASTKEYICESQTLVDRKRHCENEAVEEPEPKRRLKKDNSQSSDSVSKPGKKNKFVVHAAGDVGICGDGYRWRKYGQKMVKGNPHPRNYYRCTSAGCPVRKHIETAVENTKAVIITYKGVHNHDMPVPKKRHGPPSSMLVAAAAPTSMRTRTDDQVNIPTSSQCSVGRESEKQSKEALDVGGEKVMESARTLLSIGFEIKQC

SEQ ID NO: 108049 - protein, 425 aa, Arabidopsis thaliana
  peptide (1)..(425): Ceres Seq. ID no. 13653117
  misc_feature (1)..(425): Homolog of NCBI NO: 29839502 NR Description: Probable WRKY transcription factor 32 (WRKY protein 32) >gi|28393378|gb|AAO42113.1| putative WRKY family factor [Arabidopsis thaliana] >gi|28827598|gb|AAO50643.1|
  misc_feature (1)..(425): Homolog of NCBI NO: 22329039 NR Description: WRKY family transcription factor [Arabidopsis
  misc_feature (1)..(413): Homolog of NCBI NO: 25407696 NR Description: hypothetical protein AT4g30930 [imported] - thaliana >gi|2980773|emb|CAA18200.1| putative protein thaliana] >gi|7269995|emb|CAB79811.1| putative protein
  misc_feature (55)..(376): Homolog of NCBI NO: 3420906 NR Description: zinc finger protein; WRKY1 [Pimpinella
  misc_feature (120)..(414): Homolog of NCBI NO: 18158619 NR Description: WRKY-like drought-induced protein [Retama raetam]
  misc_feature (126)..(385): Homolog of NCBI NO: 14530685 NR Description: WRKY DNA-binding protein [Nicotiana tabacum]
  misc_feature (126)..(352): Homolog of NCBI NO: 4760692 NR Description: transcription factor NtWRKY2 [Nicotiana tabacum]
  misc_feature (128)..(390): Homolog of NCBI NO: 1076685 NR Description: SPF1 protein - sweet potato
  misc_feature (128)..(376): Homolog of NCBI NO: 5917653 NR Description: zinc-finger type transcription factor WRKY1
  misc_feature (96)..(352): Homolog of NCBI NO: 5360683 NR Description: NtWRKY1 [Nicotiana tabacum]
MEDLHDETVRETLGKDQVQGVRENSSVEPNVEDVLEVNETDSVKETVVSAIVPVDEVEENRQVETSPSLAASSDSLTVTPCLSLDPATASTAQDLPLVSVPTKQEQRSDSPVVNRLSVTPVPRTPARDGYNWRKYGQKQVKSPKGSRSYYRCTYTECCAKKIECSNDSGNVVEIVNKGLHTHEPPRKTSFSPREIRVTTAIRPVSEDDTVVEELSIVPSGSDPSASTKEYICESQTLVDRKRHCENEAVEEPEPKRRLKKDNSQSSDSVSKPGKKNKFVVHAAGDVGICGDGYRWRKYGQKMVKGNPHPRNYYRCTSAGCPVRKHIETAVENTKAVIITYKGVHNHDMPVPKKRHGPPSSMLVAAAAPTSMRTRTDDQVNIPTSSQCSVGRESEKQSKEALDVGGEKVMESARTLLSIGFEIKQC

SEQ ID NO: 108050 - DNA, 980 bp, Arabidopsis thaliana
  misc_feature (1)..(980): Ceres Seq. ID no. 13653118
  misc_feature: MA Experiment ID: 20000180 Result: Down-regulated in Transcription
  misc_feature: MA Experiment 20000180 PARAMETER Experiment Name: At_Germinating_Seeds_P Parameter: Age (hr) Value: 24 vs. 0
  misc_feature: MA Experiment 20000180 PARAMETER Experiment Name: At_Germinating_Seeds_P Parameter: Tissue Value: Germinating Seeds
  misc_feature: MA Experiment ID: 20000439 Result: Up-regulated in Transcription
  misc_feature: MA Experiment 20000439 PARAMETER Experiment Name: At_Roots__P Parameter: Age (day) Value: 14 vs. 21
  misc_feature: MA Experiment 20000439 PARAMETER Experiment Name: At_Roots__P Parameter: Organism Value: A. thaliana
  misc_feature: MA Experiment 20000439 PARAMETER Experiment Name: At_Roots__P Parameter: Tissue Value: Roots vs. Whole Plant
  misc_feature: MA Experiment ID: 20000794 Result: Down-regulated in Transcription
  misc_feature: MA Experiment 20000794 PARAMETER Experiment Name: At_Petals_P Parameter: Age (day) Value: 23-25 days
  misc_feature: MA Experiment 20000794 PARAMETER Experiment Name: At_Petals_P Parameter: Plant Line Value: WS
  misc_feature: MA Experiment 20000794 PARAMETER Experiment Name: At_Petals_P Parameter: Tissue Value: Petals vs. Whole plant
  misc_feature: MA Experiment ID: 20001556 Result: Up-regulated in Transcription
  misc_feature: MA Experiment 20001556 PARAMETER Experiment Name: At_Drought_Soil_Dry_P Parameter: Age (day) Value: 26
  misc_feature: MA Experiment 20001556 PARAMETER Experiment Name: At_Drought_Soil_Dry_P Parameter: Organism Value: A. thaliana
  misc_feature: MA Experiment 20001556 PARAMETER Experiment Name: At_Drought_Soil_Dry_P Parameter: Plant Line Value: WS
  misc_feature: MA Experiment 20001556 PARAMETER Experiment Name: At_Drought_Soil_Dry_P Parameter: Post Timepoint (hr) Value: None
  misc_feature: MA Experiment 20001556 PARAMETER Experiment Name: At_Drought_Soil_Dry_P Parameter: Post-Treatment Value: None
  misc_feature: MA Experiment 20001556 PARAMETER Experiment Name: At_Drought_Soil_Dry_P Parameter: Timepoint (day) Value: 12
  misc_feature: MA Experiment 20001556 PARAMETER Experiment Name: At_Drought_Soil_Dry_P Parameter: Treatment Value: Drought vs. No Drought
  misc_feature: MA Experiment ID: 20001558 Result: Up-regulated in Transcription
  misc_feature: MA Experiment 20001558 PARAMETER Experiment Name: At_Drought_Soil_Dry_P Parameter: Age (day) Value: 27
  misc_feature: MA Experiment 20001558 PARAMETER Experiment Name: At_Drought_Soil_Dry_P Parameter: Organism Value: A. thaliana
  misc_feature: MA Experiment 20001558 PARAMETER Experiment Name: At_Drought_Soil_Dry_P Parameter: Plant Line Value: WS
  misc_feature: MA Experiment 20001558 PARAMETER Experiment Name: At_Drought_Soil_Dry_P Parameter: Post Timepoint (hr) Value: 6
  misc_feature: MA Experiment 20001558 PARAMETER Experiment Name: At_Drought_Soil_Dry_P Parameter: Post-Treatment Value: Re-Water vs. No Drought
  misc_feature: MA Experiment 20001558 PARAMETER Experiment Name: At_Drought_Soil_Dry_P Parameter: Timepoint (day) Value: 13
  misc_feature: MA Experiment 20001558 PARAMETER Experiment Name: At_Drought_Soil_Dry_P Parameter: Treatment Value: Drought vs. No Drought
  misc_feature: MA Experiment ID: 20001757 Result: Up-regulated in Transcription
  misc_feature: MA Experiment 20001757 PARAMETER Experiment Name: At_50mM_NH4NO3_L-to-H_P Parameter: Timepoint (hr) Value: 6
  misc_feature: MA Experiment 20001757 PARAMETER Experiment Name: At_50mM_NH4NO3_L-to-H_P Parameter: Tissue Value: Leaf
  misc_feature: MA Experiment 20001757 PARAMETER Experiment Name: At_50mM_NH4NO3_L-to-H_P Parameter: Treatment Value: 50mM NH4NO3 vs 100mM Mannitol
gttcacatcgttttcgttttgtccccaaaaccctaaaaatcttcaacgcagggtttaacgaatcaaacctcaacgacgtcgttttactcttcttcttcttcctctctgtgttgcgttccctctttcacaaactcactgacatcacatccttagagtcgtcccagaatgaactcactcgccattagagtctccaaggttctcagatcctcttcaatatctcctttagcaataagtgctgagagaggctctaagtcgtggttctctactggtcctatcgatgaaggtgtagaagaagattttgaagaaaatgttacagaaaggcctgagcttcaacctcatggagttgatcctcgtaaaggttggggatttcgcggtgttcatagggcgattatttgtgggaaagtagggcaagcaccgttacagaagatcttaaggaacgggcggacagtaacgatctttacagtaggaacaggtgggatgtttgatcagaggcttgtaggagctactaatcagccaaaaccagctcagtggcatagaatcgctgtgcacaacgaagtgcttggctcttacgctgtccaaaaactcgctaaaaactcgtcggtttatgtggaaggtgatattgagactagagtgtataatgatagcatcagcagtgaagtgaagagtatccctgagatttgcgttcgtcgtgatggtaagattcggatgatcaaatatggtgaaagcattagcaaaatctcttttgatgagctaaaagaaggattgatttagtcggagcaagaatattccggtgaccggatgagagcaaactgaataaaacgtttttctgagtaaaatcgataaaacagtttggttttttgttctgtccattgcgactttgtgagcactgagttccttttaatggataccagggggcatatttatgtagtttctggtcagaattatttgatgtattgttcttcagtggatgtttatatggc

SEQ ID NO: 108051 - protein, 201 aa, Arabidopsis thaliana
  peptide (1)..(201): Ceres Seq. ID no. 13653119
  misc_feature (71)..(177): Pfam Name: Single-strand binding protein family Pfam Description: Single-strand binding protein family
  misc_feature (1)..(201): Homolog of NCBI NO: 30681642 NR Description: expressed protein [Arabidopsis thaliana] unknown protein [Arabidopsis thaliana]
  misc_feature (1)..(177): Homolog of NCBI NO: 7487337 NR Description: hypothetical protein T22B4.40 - Arabidopsis >gi|4850285|emb|CAB43041.1| putative protein [Arabidopsis >gi|7267804|emb|CAB81207.1| putative protein [Arabidopsis
  misc_feature (177)..(198): Homolog of NCBI NO: 7487337 NR Description: hypothetical protein T22B4.40 - Arabidopsis >gi|4850285|emb|CAB43041.1| putative protein [Arabidopsis >gi|7267804|emb|CAB81207.1| putative protein [Arabidopsis
  misc_feature (105)..(177): Homolog of NCBI NO: 3600051 NR Description: contains similarity to the single-strand binding
  misc_feature (177)..(198): Homolog of NCBI NO: 3600051 NR Description: contains similarity to the single-strand binding
  misc_feature (46)..(197): Homolog of NCBI NO: 15229675 NR Description: hypothetical protein [Arabidopsis thaliana] contains similarity to unknown
  misc_feature (8)..(179): Homolog of NCBI NO: 34911652 NR Description: P0510C12.16 [Oryza sativa (japonica
  misc_feature (69)..(192): Homolog of NCBI NO: 37525024 NR Description: hypothetical protein [Photorhabdus luminescens laumondii TTO1] >gi|36784450|emb|CAE13334.1| unnamed protein
  misc_feature (71)..(182): Homolog of NCBI NO: 23014489 NR Description: hypothetical protein [Magnetospirillum
  misc_feature (71)..(174): Homolog of NCBI NO: 22959712 NR Description: hypothetical protein [Rhodobacter sphaeroides]
MNSLAIRVSKVLRSSSISPLAISAERGSKSWFSTGPIDEGVEEDFEENVTERPELQPHGVDPRKGWGFRGVHRAIICGKVGQAPLQKILRNGRTVTIFTVGTGGMFDQRLVGATNQPKPAQWHRIAVHNEVLGSYAVQKLAKNSSVYVEGDIETRVYNDSISSEVKSIPEICVRRDGKIRMIKYGESISKISFDELKEGLI

SEQ ID NO: 108052 - DNA, 2385 bp, Arabidopsis thaliana
  misc_feature (1)..(2385): Ceres Seq. ID no. 13653120
attgaaatctccaccttcttcttcttcagtaaccgatccactctcttcgtcttcttcttcttcttcttttagtgcttcgtttttgttttccgggaggcgaagttggagtagaacgacccagttagtataaacctcgccggaaatggatacaccagataagaaccgcatctccgccgtttccttctgcaacttcgaggattctccagtttttcaatatattaatgatctctctccaatagagccagtgaagccaggacgcccagagaatatcttgcactcactggtttttacatctccatcatcatcatcatctctattttgttccccgcagttaaactcttaccgagattccagatttttcatcaaaaggcatcgttctctagatctatcgagtccagtagtcctcatcggtgagactctaaaaaactcaccagatgctttatgggaggagaagctaaagtgtaggcctgagaagttggaaaatgtttctgaacccaagccatttaaggagcagataagcttagcaattgagttggcgaattcattgaaacacggaagagatggatgtgatattcagatggtttcttgtgatgaagtacctatggatgctgatgatgaaataggaagcggtggtggatccagagagctgtctgatgagttatgtagacagtcttttgatccacttgactttgatgctgattcagatggagtacttcacactgatgaaatggaagctgagagtgggtttggtaaagaagtaataatgtttgatgttgctgatatccagaactatgagcaacagattccaaggaccacagatcctagattttattctcttgcttctgagcctcaacagttttctatctactgtaataactcaaattatgtcgaagagcgggaaggttcgtgcagtgtacaagttgcagctggagctccagacattaatctcagttgttcctccaaggtagcagctattgattcaactgccgaagctgaagacaaggaagataaagaccttcagcccagtggcaagcaacgaagtgtacgcaggcgctgcttaacttttgacatgggagggtctcacaaaaggatacctttgcgtgattctacaaatgatcttcctcttgattctacctctatcaataaagctcccagtccacaaaattgtttagacaccagtaaacaagacactgatgagattctacccattccacgaacgattggcctgcacttgaatggtttcgtgaacccctcagtctcaagtggccgaaaaaaaaaaaaaatcaaagatggtcaggcttttccttctacaacatttcattataatattgaagatgaattctcaactcctgtctccacaaaaagagatttggtggtattcagtgatgtcaaaatcatggagcctcctgagagatcagtggaaggagaatgttttgaccaactcatggcaatggaaaataggcaattgtctcaaggacttgacgaacttggcagctgtaagcgctgtaaatgtaggaaatcacaatgcttgaagctgtattgtgaatgtttttccgctggtctattctgtggtgaaccttgttcatgtcaaaattgtttcaataagcccattcatgaagacctagttatgaaaagtcgtgaagtgattaaagcccgcaacccattagcttttgctccaaaagtggtctcaacttctgatactgttatagatttatgggtcgagaacagcaagactcctgcttcagcaagacacaaaagaggatgcaactgcaggaaatcaggctgctcaaagaaatattgtgaatgctttatgatgggcgttggatgctcctctaactgcagatgcatgggatgcaagaatacttttggtcacacaaatgagcaatgtgcgggagattctgatgtggtaacaatcaatgatgaagctaaacactatggtgatcatggcgatgcttcaaggcaaaacgaagaaatcttaaccagtgagagaaaccgcttgttgctccctggttctgtagcattccgttccttaacatcactgtcaaacctgtctgaactttgagactgactactcagaagcaccatctgaagaaccaggagactcctgttatgttatcaatcacgcacgactcaatcaatcaaaaccaccgtatgaaagctctgtgtctgctgttgctcgaatgggttttgtttgatctaccttaatctcactttcatcttgttatttccaagtctagttttggtgggtatatattacaaatatatgtattggaagatttttgcttagggtgtgaatgtgtgttacctgttttgctctgctagtttataatgttttagtgtttgtttttcactgaagaaagttttgtagtggtgttgtttgtctcc

SEQ ID NO: 108053 - protein, 639 aa, Arabidopsis thaliana
  peptide (1)..(639): Ceres Seq. ID no. 13653121
  misc_feature (536)..(577): Pfam Name: Tesmin/TSO1-like CXC domain Pfam Description: Tesmin/TSO1-like CXC domain
  misc_feature (453)..(487): Homolog of NCBI NO: 30679298 NR Description: expressed protein [Arabidopsis thaliana]
  misc_feature (453)..(487): Homolog of NCBI NO: 12322849 NR Description: hypothetical protein; 69435-72676 [Arabidopsis
  misc_feature (360)..(576): Homolog of NCBI NO: 6739821 NR Description: putative DNA binding protein [Arabidopsis >gi|7767425|gb|AAF69124.1|AF204059_1 CXC domain protein TSO1
  misc_feature (1)..(168): Homolog of NCBI NO: 6739821 NR Description: putative DNA binding protein [Arabidopsis >gi|7767425|gb|AAF69124.1|AF204059_1 CXC domain protein TSO1
  misc_feature (360)..(576): Homolog of NCBI NO: 30686784 NR Description: DNA binding protein -related [Arabidopsis
  misc_feature (1)..(168): Homolog of NCBI NO: 30686784 NR Description: DNA binding protein -related [Arabidopsis
  misc_feature (356)..(611): Homolog of NCBI NO: 7767427 NR Description: CXC domain containing TSO1-like protein 1
  misc_feature (356)..(611): Homolog of NCBI NO: 18403510 NR Description: CXC domain containing TSO1-related protein 1 [Arabidopsis thaliana] >gi|20466374|gb|AAM20504.1| unknown [Arabidopsis thaliana] >gi|22136318|gb|AAM91237.1| unknown
  misc_feature (1)..(96): Homolog of NCBI NO: 7767427 NR Description: CXC domain containing TSO1-like protein 1
  misc_feature (1)..(96): Homolog of NCBI NO: 18403510 NR Description: CXC domain containing TSO1-related protein 1 [Arabidopsis thaliana] >gi|20466374|gb|AAM20504.1| unknown [Arabidopsis thaliana] >gi|22136318|gb|AAM91237.1| unknown
MDTPDKNRISAVSFCNFEDSPVFQYINDLSPIEPVKPGRPENILHSLVFTSPSSSSSLFCSPQLNSYRDSRFFIKRHRSLDLSSPVVLIGETLKNSPDALWEEKLKCRPEKLENVSEPKPFKEQISLAIELANSLKHGRDGCDIQMVSCDEVPMDADDEIGSGGGSRELSDELCRQSFDPLDFDADSDGVLHTDEMEAESGFGKEVIMFDVADIQNYEQQIPRTTDPRFYSLASEPQQFSIYCNNSNYVEEREGSCSVQVAAGAPDINLSCSSKVAAIDSTAEAEDKEDKDLQPSGKQRSVRRRCLTFDMGGSHKRIPLRDSTNDLPLDSTSINKAPSPQNCLDTSKQDTDEILPIPRTIGLHLNGFVNPSVSSGRKKKKIKDGQAFPSTTFHYNIEDEFSTPVSTKRDLVVFSDVKIMEPPERSVEGECFDQLMAMENRQLSQGLDELGSCKRCKCRKSQCLKLYCECFSAGLFCGEPCSCQNCFNKPIHEDLVMKSREVIKARNPLAFAPKVVSTSDTVIDLWVENSKTPASARHKRGCNCRKSGCSKKYCECFMMGVGCSSNCRCMGCKNTFGHTNEQCAGDSDVVTINDEAKHYGDHGDASRQNEEILTSERNRLLLPGSVAFRSLTSLSNLSEL

SEQ ID NO: 108054 - protein, 494 aa, Arabidopsis thaliana
  peptide (1)..(494): Ceres Seq. ID no. 13653122
  misc_feature (391)..(432): Pfam Name: Tesmin/TSO1-like CXC domain Pfam Description: Tesmin/TSO1-like CXC domain
  misc_feature (308)..(342): Homolog of NCBI NO: 30679298 NR Description: expressed protein [Arabidopsis thaliana]
  misc_feature (308)..(342): Homolog of NCBI NO: 12322849 NR Description: hypothetical protein; 69435-72676 [Arabidopsis
  misc_feature (215)..(431): Homolog of NCBI NO: 6739821 NR Description: putative DNA binding protein [Arabidopsis >gi|7767425|gb|AAF69124.1|AF204059_1 CXC domain protein TSO1
  misc_feature (1)..(23): Homolog of NCBI NO: 6739821 NR Description: putative DNA binding protein [Arabidopsis >gi|7767425|gb|AAF69124.1|AF204059_1 CXC domain protein TSO1
  misc_feature (215)..(431): Homolog of NCBI NO: 30686784 NR Description: DNA binding protein -related [Arabidopsis
  misc_feature (1)..(23): Homolog of NCBI NO: 30686784 NR Description: DNA binding protein -related [Arabidopsis
  misc_feature (211)..(466): Homolog of NCBI NO: 7767427 NR Description: CXC domain containing TSO1-like protein 1
  misc_feature (211)..(466): Homolog of NCBI NO: 18403510 NR Description: CXC domain containing TSO1-related protein 1 [Arabidopsis thaliana] >gi|20466374|gb|AAM20504.1| unknown [Arabidopsis thaliana] >gi|22136318|gb|AAM91237.1| unknown
  misc_feature (293)..(488): Homolog of NCBI NO: 34393829 NR Description: putative CXC domain protein TSO1 [Oryza sativa
  misc_feature (1)..(57): Homolog of NCBI NO: 15233572 NR Description: expressed protein [Arabidopsis thaliana]
MVSCDEVPMDADDEIGSGGGSRELSDELCRQSFDPLDFDADSDGVLHTDEMEAESGFGKEVIMFDVADIQNYEQQIPRTTDPRFYSLASEPQQFSIYCNNSNYVEEREGSCSVQVAAGAPDINLSCSSKVAAIDSTAEAEDKEDKDLQPSGKQRSVRRRCLTFDMGGSHKRIPLRDSTNDLPLDSTSINKAPSPQNCLDTSKQDTDEILPIPRTIGLHLNGFVNPSVSSGRKKKKIKDGQAFPSTTFHYNIEDEFSTPVSTKRDLVVFSDVKIMEPPERSVEGECFDQLMAMENRQLSQGLDELGSCKRCKCRKSQCLKLYCECFSAGLFCGEPCSCQNCFNKPIHEDLVMKSREVIKARNPLAFAPKVVSTSDTVIDLWVENSKTPASARHKRGCNCRKSGCSKKYCECFMMGVGCSSNCRCMGCKNTFGHTNEQCAGDSDVVTINDEAKHYGDHGDASRQNEEILTSERNRLLLPGSVAFRSLTSLSNLSEL

SEQ ID NO: 108055 - protein, 486 aa, Arabidopsis thaliana
  peptide (1)..(486): Ceres Seq. ID no. 13653123
  misc_feature (383)..(424): Pfam Name: Tesmin/TSO1-like CXC domain Pfam Description: Tesmin/TSO1-like CXC domain
  misc_feature (300)..(334): Homolog of NCBI NO: 30679298 NR Description: expressed protein [Arabidopsis thaliana]
  misc_feature (300)..(334): Homolog of NCBI NO: 12322849 NR Description: hypothetical protein; 69435-72676 [Arabidopsis
  misc_feature (207)..(423): Homolog of NCBI NO: 6739821 NR Description: putative DNA binding protein [Arabidopsis >gi|7767425|gb|AAF69124.1|AF204059_1 CXC domain protein TSO1
  misc_feature (1)..(15): Homolog of NCBI NO: 6739821 NR Description: putative DNA binding protein [Arabidopsis >gi|7767425|gb|AAF69124.1|AF204059_1 CXC domain protein TSO1
  misc_feature (207)..(423): Homolog of NCBI NO: 30686784 NR Description: DNA binding protein -related [Arabidopsis
  misc_feature (1)..(15): Homolog of NCBI NO: 30686784 NR Description: DNA binding protein -related [Arabidopsis
  misc_feature (203)..(458): Homolog of NCBI NO: 7767427 NR Description: CXC domain containing TSO1-like protein 1
  misc_feature (203)..(458): Homolog of NCBI NO: 18403510 NR Description: CXC domain containing TSO1-related protein 1 [Arabidopsis thaliana] >gi|20466374|gb|AAM20504.1| unknown [Arabidopsis thaliana] >gi|22136318|gb|AAM91237.1| unknown
  misc_feature (285)..(480): Homolog of NCBI NO: 34393829 NR Description: putative CXC domain protein TSO1 [Oryza sativa
  misc_feature (1)..(49): Homolog of NCBI NO: 15233572 NR Description: expressed protein [Arabidopsis thaliana]
MDADDEIGSGGGSRELSDELCRQSFDPLDFDADSDGVLHTDEMEAESGFGKEVIMFDVADIQNYEQQIPRTTDPRFYSLASEPQQFSIYCNNSNYVEEREGSCSVQVAAGAPDINLSCSSKVAAIDSTAEAEDKEDKDLQPSGKQRSVRRRCLTFDMGGSHKRIPLRDSTNDLPLDSTSINKAPSPQNCLDTSKQDTDEILPIPRTIGLHLNGFVNPSVSSGRKKKKIKDGQAFPSTTFHYNIEDEFSTPVSTKRDLVVFSDVKIMEPPERSVEGECFDQLMAMENRQLSQGLDELGSCKRCKCRKSQCLKLYCECFSAGLFCGEPCSCQNCFNKPIHEDLVMKSREVIKARNPLAFAPKVVSTSDTVIDLWVENSKTPASARHKRGCNCRKSGCSKKYCECFMMGVGCSSNCRCMGCKNTFGHTNEQCAGDSDVVTINDEAKHYGDHGDASRQNEEILTSERNRLLLPGSVAFRSLTSLSNLSEL

SEQ ID NO: 108056 - DNA, 2594 bp, Arabidopsis thaliana
  misc_feature (1)..(2594): Ceres Seq. ID no. 13653128
  misc_feature: MA Experiment ID: 20000173 Result: Up-regulated in Transcription
  misc_feature: MA Experiment 20000173 PARAMETER Experiment Name: At_42deg_Heat_P Parameter: Age (day) Value: 14
  misc_feature: MA Experiment 20000173 PARAMETER Experiment Name: At_42deg_Heat_P Parameter: Organism Value: A. thaliana
  misc_feature: MA Experiment 20000173 PARAMETER Experiment Name: At_42deg_Heat_P Parameter: Plant Line Value: WS
  misc_feature: MA Experiment 20000173 PARAMETER Experiment Name: At_42deg_Heat_P Parameter: Temperature (deg C) Value: 42 vs. 22
  misc_feature: MA Experiment 20000173 PARAMETER Experiment Name: At_42deg_Heat_P Parameter: Timepoint (hr) Value: 6
  misc_feature: MA Experiment 20000173 PARAMETER Experiment Name: At_42deg_Heat_P Parameter: Tissue Value: Aerial
  misc_feature: MA Experiment ID: 20000185 Result: Up-regulated in Transcription
  misc_feature: MA Experiment 20000185 PARAMETER Experiment Name: At_Roots__P Parameter: Age (day) Value: 7 vs. 21
  misc_feature: MA Experiment 20000185 PARAMETER Experiment Name: At_Roots__P Parameter: Organism Value: A. thaliana
  misc_feature: MA Experiment 20000185 PARAMETER Experiment Name: At_Roots__P Parameter: Tissue Value: Roots vs. Whole Plant
  misc_feature: MA Experiment ID: 20000264 Result: Up-regulated in Transcription
  misc_feature: MA Experiment 20000264 PARAMETER Experiment Name: At_Open_Flower_P Parameter: Age (day) Value: 21
  misc_feature: MA Experiment 20000264 PARAMETER Experiment Name: At_Open_Flower_P Parameter: Plant Line Value: WS
  misc_feature: MA Experiment 20000264 PARAMETER Experiment Name: At_Open_Flower_P Parameter: Tissue Value: Open Flower vs. Whole Plant
  misc_feature: MA Experiment ID: 20000265 Result: Up-regulated in Transcription
  misc_feature: MA Experiment 20000265 PARAMETER Experiment Name: At_Open_Flower_P Parameter: Age (day) Value: 21
  misc_feature: MA Experiment 20000265 PARAMETER Experiment Name: At_Open_Flower_P Parameter: Plant Line Value: WS
  misc_feature: MA Experiment 20000265 PARAMETER Experiment Name: At_Open_Flower_P Parameter: Tissue Value: Closed Flower vs. Whole Plant
  misc_feature: MA Experiment ID: 20000286 Result: Up-regulated in Transcription
  misc_feature: MA Experiment 20000286 PARAMETER Experiment Name: At_Open_Flower_P Parameter: Age (day) Value: 21
  misc_feature: MA Experiment 20000286 PARAMETER Experiment Name: At_Open_Flower_P Parameter: Plant Line Value: WS
  misc_feature: MA Experiment 20000286 PARAMETER Experiment Name: At_Open_Flower_P Parameter: Tissue Value: Half Open vs. Whole Plant
  misc_feature: MA Experiment ID: 20000436 Result: Up-regulated in Transcription
  misc_feature: MA Experiment 20000436 PARAMETER Experiment Name: At_Drought_P Parameter: Age (day) Value: 7
  misc_feature: MA Experiment 20000436 PARAMETER Experiment Name: At_Drought_P Parameter: Organism Value: A. thaliana
  misc_feature: MA Experiment 20000436 PARAMETER Experiment Name: At_Drought_P Parameter: Plant Line Value: WS
  misc_feature: MA Experiment 20000436 PARAMETER Experiment Name: At_Drought_P Parameter: Timepoint (hr) Value: 12
  misc_feature: MA Experiment 20000436 PARAMETER Experiment Name: At_Drought_P Parameter: Tissue Value: Whole Plant
  misc_feature: MA Experiment 20000436 PARAMETER Experiment Name: At_Drought_P Parameter: Treatment Value: Drought vs. No Drought
  misc_feature: MA Experiment ID: 20000437 Result: Up-regulated in Transcription
  misc_feature: MA Experiment 20000437 PARAMETER Experiment Name: At_Drought_P Parameter: Age (day) Value: 8
  misc_feature: MA Experiment 20000437 PARAMETER Experiment Name: At_Drought_P Parameter: Organism Value: A. thaliana
  misc_feature: MA Experiment 20000437 PARAMETER Experiment Name: At_Drought_P Parameter: Plant Line Value: WS
  misc_feature: MA Experiment 20000437 PARAMETER Experiment Name: At_Drought_P Parameter: Timepoint (hr) Value: 24
  misc_feature: MA Experiment 20000437 PARAMETER Experiment Name: At_Drought_P Parameter: Tissue Value: Whole Plant
  misc_feature: MA Experiment 20000437 PARAMETER Experiment Name: At_Drought_P Parameter: Treatment Value: Drought vs. No Drought
  misc_feature: MA Experiment ID: 20000438 Result: Down-regulated in Transcription
  misc_feature: MA Experiment 20000438 PARAMETER Experiment Name: At_Shoots__P Parameter: Age (day) Value: 14
  misc_feature: MA Experiment 20000438 PARAMETER Experiment Name: At_Shoots__P Parameter: Tissue Value: Shoots vs. Whole Plant
  misc_feature: MA Experiment ID: 20000439 Result: Up-regulated in Transcription
  misc_feature: MA Experiment 20000439 PARAMETER Experiment Name: At_Roots__P Parameter: Age (day) Value: 14 vs. 21
  misc_feature: MA Experiment 20000439 PARAMETER Experiment Name: At_Roots__P Parameter: Organism Value: A. thaliana
  misc_feature: MA Experiment 20000439 PARAMETER Experiment Name: At_Roots__P Parameter: Tissue Value: Roots vs. Whole Plant
  misc_feature: MA Experiment ID: 20000527 Result: Up-regulated in Transcription
  misc_feature: MA Experiment 20000527 PARAMETER Experiment Name: At_10percent_PEG_P Parameter: Age (day) Value: 20
  misc_feature: MA Experiment 20000527 PARAMETER Experiment Name: At_10percent_PEG_P Parameter: Organism Value: A. thaliana
  misc_feature: MA Experiment 20000527 PARAMETER Experiment Name: At_10percent_PEG_P Parameter: Plant Line Value: WS
  misc_feature: MA Experiment 20000527 PARAMETER Experiment Name: At_10percent_PEG_P Parameter: Timepoint (day) Value: 20
  misc_feature: MA Experiment 20000527 PARAMETER Experiment Name: At_10percent_PEG_P Parameter: Tissue Value: Whole Plant
  misc_feature: MA Experiment 20000527 PARAMETER Experiment Name: At_10percent_PEG_P Parameter: Treatment Value: 10percent PEG vs. No Treatment
ataacaacaagtgatacattctcaatctctgattcttctgattctcaaaaccctaatttccacacgctttctatcatttccacccaaaagagagagatatgacggagacgacgaaggtgatgtacatagtggtggtcgatggaacggatacggcggagacggtggaagaagacgggaccgggacttggaaagattcgtttaggtatacacgtcctgttttgcagagtactcttcagcttatgggatgcaaagcccgtcacgccttcaagattagccgcagggtgtttgagttaataagaagtgagggatctttaatcctttctccctcgctttcgccctcgcatagtaaagaatctgaatttcagaagacaggtgatgcttcagcttgtgctaatgtagaaaaggctaacaaagttaacagtttggctactgatgatgttgataagagtaaaagtaagccgtttgaggtgtacaaaaggcgaacaaccgttgttgtttctcgtgaaatatttgtaaacgttgtctgtgatgccctggctgagtacaagtatgtgggtcatgaccaaagggcagacttgattctgtcgtgcagaatccgagaaaggaaagaatctgtgactgttctactgtgcggtactagtggctgtggcaaatctacactctccgcacttctgggaagtaggcttgggattacaacggtggtctcaaccgactcaatccgtcacatgatgaggagtttcgttgatgaaaagcagaatcctttgctatgggcttcaacataccatgctggagagtaccttgaccctgtggcagttgctgagtcaaaagccagaagaagaagagccaaaaaaatggatagtattgaggacgaaaaagcgaaagcctctgaaggtgggaaggctaagaatactcaacagactgatgttggatcaacaaaaaacacccctgtattgttaagtcccaagcaaatggctgtagaaggatttaaggctcaaagtgaaatggttattgacaatctcgataggctcattaccgcatgggaagaaaggaaagagtctgttattgttgaaggtgtccatttaagcctcaactttgtgatgggactgatgaaaaagcatccttctatagttcctttcatggtatacatcgcaaacgaggagaaacatttggaacgatttgcagttagagctaagtacatgaccctggacccagagaaaaacaagtatgtaaaatatatacgtaacatcagaacaatacaggattacttgtgtaaacgagctgacaaacatctcgtccccaagataaacaataccaatgtcgacaagagtgtggctgcgatccacgctacagtcttcagttgcctgcgtaggcgagaagcaggagagcatctctatgatgctactacaaatactgtctcagtgattgacgatgagtatagaaaccagtgtacagctaattcattgagctccaaaggaatgtttcagctgatccaaagaaaaggttcttctaggcatcttatggctcttctcaatactgatggcactttcgcaagaacttggcccgttactggtaaggtcgatgagagtggaaagccagtcttttgtaatgagatgattgaagaaaatggaatggagcacccggtctatggatacctacagaaagctgaaccggtgaatcttcagtttggtctatttgggatcagtgcttggcctagtgatggagccactagccgcgctgggagtgtagatgactgtaaagctgacatggctgaaaccagcagtcggtattactcttcttgctgcagctcgcctaggatgtctgaaggaacttctaaagagcttaaggaggatcagtcagtccatgggagcgatgaagaagtcgaggatgatcctcccgagccagatacagattttagcgatgacgataacaagcgagaccatgacgaggtgggttcggttgatgagcaatcaacaaagtcagatgaggagtacgatgatcttgctatggaagacaaaagctactggacagatgaagaggaagagtcacgagatacgattgcaataatgtctgaaaaaaacaacaagcaagcaacaaaagaagacaagtacatacagaacttagacctttttctacggaccgcaaaccagcagcttgtcgagccacttcagctatgtgcatcactgctcacatgcgagaatgggaacacaagactctggttgggtaaagaaaagatgaggaaacgttctttaagcatctcggccattggcaaacatgggtcgggtttgggtgatgcgattctcttgggtgccccatgaggccatgatcttttactttagtttgatatttctctggtgtagtcttttttttatttcttgataaagtattctggttctggtctttagtttaagttttctgtgtgtgtatgtgtgactgtgtgaatagtcttaacttgcacaaatttgggggtttataaagtgcttcgttttcttttctttttttatttaaggcttttcttttcttcgacctcaaatgtaaatacttcaatattaacatctaagactccagtttaaatttctatataattgagcgtttgc

SEQ ID NO: 108057 - protein, 738 aa, Arabidopsis thaliana
  peptide (1)..(738): Ceres Seq. ID no. 13653129
  misc_feature (179)..(230): Pfam Name: Thymidine kinase from herpesvirus Pfam Description: Thymidine kinase from herpesvirus
  misc_feature (59)..(734): Homolog of NCBI NO: 11290092 NR Description: hypothetical protein T14D3.30 - Arabidopsis >gi|6911847|emb|CAB72147.1| putative protein [Arabidopsis
  misc_feature (59)..(734): Homolog of NCBI NO: 18407911 NR Description: expressed protein [Arabidopsis thaliana] unknown protein [Arabidopsis thaliana]
  misc_feature (1)..(284): Homolog of NCBI NO: 11290092 NR Description: hypothetical protein T14D3.30 - Arabidopsis >gi|6911847|emb|CAB72147.1| putative protein [Arabidopsis
  misc_feature (1)..(284): Homolog of NCBI NO: 18407911 NR Description: expressed protein [Arabidopsis thaliana] unknown protein [Arabidopsis thaliana]
  misc_feature (32)..(234): Homolog of NCBI NO: 28828411 NR Description: similar to Arabidopsis thaliana (Mouse-ear
  misc_feature (286)..(467): Homolog of NCBI NO: 28828411 NR Description: similar to Arabidopsis thaliana (Mouse-ear
  misc_feature (293)..(426): Homolog of NCBI NO: 20094304 NR Description: 2-Phosphoglycerate kinase [Methanopyrus kandleri
  misc_feature (165)..(234): Homolog of NCBI NO: 20094304 NR Description: 2-Phosphoglycerate kinase [Methanopyrus kandleri
  misc_feature (169)..(420): Homolog of NCBI NO: 23619022 NR Description: hypothetical protein [Plasmodium falciparum 3D7]
  misc_feature (293)..(422): Homolog of NCBI NO: 6855444 NR Description: hypothetical protein L2954.08 [Leishmania major]
MTETTKVMYIVVVDGTDTAETVEEDGTGTWKDSFRYTRPVLQSTLQLMGCKARHAFKISRRVFELIRSEGSLILSPSLSPSHSKESEFQKTGDASACANVEKANKVNSLATDDVDKSKSKPFEVYKRRTTVVVSREIFVNVVCDALAEYKYVGHDQRADLILSCRIRERKESVTVLLCGTSGCGKSTLSALLGSRLGITTVVSTDSIRHMMRSFVDEKQNPLLWASTYHAGEYLDPVAVAESKARRRRAKKMDSIEDEKAKASEGGKAKNTQQTDVGSTKNTPVLLSPKQMAVEGFKAQSEMVIDNLDRLITAWEERKESVIVEGVHLSLNFVMGLMKKHPSIVPFMVYIANEEKHLERFAVRAKYMTLDPEKNKYVKYIRNIRTIQDYLCKRADKHLVPKINNTNVDKSVAAIHATVFSCLRRREAGEHLYDATTNTVSVIDDEYRNQCTANSLSSKGMFQLIQRKGSSRHLMALLNTDGTFARTWPVTGKVDESGKPVFCNEMIEENGMEHPVYGYLQKAEPVNLQFGLFGISAWPSDGATSRAGSVDDCKADMAETSSRYYSSCCSSPRMSEGTSKELKEDQSVHGSDEEVEDDPPEPDTDFSDDDNKRDHDEVGSVDEQSTKSDEEYDDLAMEDKSYWTDEEEESRDTIAIMSEKNNKQATKEDKYIQNLDLFLRTANQQLVEPLQLCASLLTCENGNTRLWLGKEKMRKRSLSISAIGKHGSGLGDAILLGAP

SEQ ID NO: 108058 - protein, 731 aa, Arabidopsis thaliana
  peptide (1)..(731): Ceres Seq. ID no. 13653130
  misc_feature (172)..(223): Pfam Name: Thymidine kinase from herpesvirus Pfam Description: Thymidine kinase from herpesvirus
  misc_feature (52)..(727): Homolog of NCBI NO: 11290092 NR Description: hypothetical protein T14D3.30 - Arabidopsis >gi|6911847|emb|CAB72147.1| putative protein [Arabidopsis
  misc_feature (52)..(727): Homolog of NCBI NO: 18407911 NR Description: expressed protein [Arabidopsis thaliana] unknown protein [Arabidopsis thaliana]
  misc_feature (1)..(277): Homolog of NCBI NO: 11290092 NR Description: hypothetical protein T14D3.30 - Arabidopsis >gi|6911847|emb|CAB72147.1| putative protein [Arabidopsis
  misc_feature (1)..(277): Homolog of NCBI NO: 18407911 NR Description: expressed protein [Arabidopsis thaliana] unknown protein [Arabidopsis thaliana]
  misc_feature (25)..(227): Homolog of NCBI NO: 28828411 NR Description: similar to Arabidopsis thaliana (Mouse-ear
  misc_feature (279)..(460): Homolog of NCBI NO: 28828411 NR Description: similar to Arabidopsis thaliana (Mouse-ear
  misc_feature (286)..(419): Homolog of NCBI NO: 20094304 NR Description: 2-Phosphoglycerate kinase [Methanopyrus kandleri
  misc_feature (158)..(227): Homolog of NCBI NO: 20094304 NR Description: 2-Phosphoglycerate kinase [Methanopyrus kandleri
  misc_feature (162)..(413): Homolog of NCBI NO: 23619022 NR Description: hypothetical protein [Plasmodium falciparum 3D7]
  misc_feature (286)..(415): Homolog of NCBI NO: 6855444 NR Description: hypothetical protein L2954.08 [Leishmania major]
MYIVVVDGTDTAETVEEDGTGTWKDSFRYTRPVLQSTLQLMGCKARHAFKISRRVFELIRSEGSLILSPSLSPSHSKESEFQKTGDASACANVEKANKVNSLATDDVDKSKSKPFEVYKRRTTVVVSREIFVNVVCDALAEYKYVGHDQRADLILSCRIRERKESVTVLLCGTSGCGKSTLSALLGSRLGITTVVSTDSIRHMMRSFVDEKQNPLLWASTYHAGEYLDPVAVAESKARRRRAKKMDSIEDEKAKASEGGKAKNTQQTDVGSTKNTPVLLSPKQMAVEGFKAQSEMVIDNLDRLITAWEERKESVIVEGVHLSLNFVMGLMKKHPSIVPFMVYIANEEKHLERFAVRAKYMTLDPEKNKYVKYIRNIRTIQDYLCKRADKHLVPKINNTNVDKSVAAIHATVFSCLRRREAGEHLYDATTNTVSVIDDEYRNQCTANSLSSKGMFQLIQRKGSSRHLMALLNTDGTFARTWPVTGKVDESGKPVFCNEMIEENGMEHPVYGYLQKAEPVNLQFGLFGISAWPSDGATSRAGSVDDCKADMAETSSRYYSSCCSSPRMSEGTSKELKEDQSVHGSDEEVEDDPPEPDTDFSDDDNKRDHDEVGSVDEQSTKSDEEYDDLAMEDKSYWTDEEEESRDTIAIMSEKNNKQATKEDKYIQNLDLFLRTANQQLVEPLQLCASLLTCENGNTRLWLGKEKMRKRSLSISAIGKHGSGLGDAILLGAP

SEQ ID NO: 108059 - protein, 691 aa, Arabidopsis thaliana
  peptide (1)..(691): Ceres Seq. ID no. 13653131
  misc_feature (132)..(183): Pfam Name: Thymidine kinase from herpesvirus Pfam Description: Thymidine kinase from herpesvirus
  misc_feature (12)..(687): Homolog of NCBI NO: 11290092 NR Description: hypothetical protein T14D3.30 - Arabidopsis >gi|6911847|emb|CAB72147.1| putative protein [Arabidopsis
  misc_feature (12)..(687): Homolog of NCBI NO: 18407911 NR Description: expressed protein [Arabidopsis thaliana] unknown protein [Arabidopsis thaliana]
  misc_feature (1)..(237): Homolog of NCBI NO: 11290092 NR Description: hypothetical protein T14D3.30 - Arabidopsis >gi|6911847|emb|CAB72147.1| putative protein [Arabidopsis
  misc_feature (1)..(237): Homolog of NCBI NO: 18407911 NR Description: expressed protein [Arabidopsis thaliana] unknown protein [Arabidopsis thaliana]
  misc_feature (1)..(187): Homolog of NCBI NO: 28828411 NR Description: similar to Arabidopsis thaliana (Mouse-ear
  misc_feature (239)..(420): Homolog of NCBI NO: 28828411 NR Description: similar to Arabidopsis thaliana (Mouse-ear
  misc_feature (246)..(379): Homolog of NCBI NO: 20094304 NR Description: 2-Phosphoglycerate kinase [Methanopyrus kandleri
  misc_feature (118)..(187): Homolog of NCBI NO: 20094304 NR Description: 2-Phosphoglycerate kinase [Methanopyrus kandleri
  misc_feature (122)..(373): Homolog of NCBI NO: 23619022 NR Description: hypothetical protein [Plasmodium falciparum 3D7]
  misc_feature (246)..(375): Homolog of NCBI NO: 6855444 NR Description: hypothetical protein L2954.08 [Leishmania major]
MGCKARHAFKISRRVFELIRSEGSLILSPSLSPSHSKESEFQKTGDASACANVEKANKVNSLATDDVDKSKSKPFEVYKRRTTVVVSREIFVNVVCDALAEYKYVGHDQRADLILSCRIRERKESVTVLLCGTSGCGKSTLSALLGSRLGITTVVSTDSIRHMMRSFVDEKQNPLLWASTYHAGEYLDPVAVAESKARRRRAKKMDSIEDEKAKASEGGKAKNTQQTDVGSTKNTPVLLSPKQMAVEGFKAQSEMVIDNLDRLITAWEERKESVIVEGVHLSLNFVMGLMKKHPSIVPFMVYIANEEKHLERFAVRAKYMTLDPEKNKYVKYIRNIRTIQDYLCKRADKHLVPKINNTNVDKSVAAIHATVFSCLRRREAGEHLYDATTNTVSVIDDEYRNQCTANSLSSKGMFQLIQRKGSSRHLMALLNTDGTFARTWPVTGKVDESGKPVFCNEMIEENGMEHPVYGYLQKAEPVNLQFGLFGISAWPSDGATSRAGSVDDCKADMAETSSRYYSSCCSSPRMSEGTSKELKEDQSVHGSDEEVEDDPPEPDTDFSDDDNKRDHDEVGSVDEQSTKSDEEYDDLAMEDKSYWTDEEEESRDTIAIMSEKNNKQATKEDKYIQNLDLFLRTANQQLVEPLQLCASLLTCENGNTRLWLGKEKMRKRSLSISAIGKHGSGLGDAILLGAP

SEQ ID NO: 108060 - DNA, 1686 bp, Arabidopsis thaliana
  misc_feature (1)..(1686): Ceres Seq. ID no. 13653136
  misc_feature: MA Experiment ID: 20000235 Result: Up-regulated in Transcription
  misc_feature: MA Experiment 20000235 PARAMETER Experiment Name: At_Siliques_P Parameter: Age (day) Value: 21
  misc_feature: MA Experiment 20000235 PARAMETER Experiment Name: At_Siliques_P Parameter: Organism Value: A. thaliana
  misc_feature: MA Experiment 20000235 PARAMETER Experiment Name: At_Siliques_P Parameter: Plant Line Value: WS
  misc_feature: MA Experiment 20000235 PARAMETER Experiment Name: At_Siliques_P Parameter: Tissue Value: 5-10mm Siliques vs. Whole Plant
atcagttaagataatatatattcagtaattaagagagaagaaataaacacaaaaatgttggttaaagttttctcttttttcatccttatgataacaatggtggttattggtgttagcaaagaatattgtgatgacaaacagtcatgtcaaaactttttgttggagcttaaggcgggttcatcgtcactctcggagattagacgtcgtgacttattgatcatcgttttgaagaattccgtacggaggatcgacatggttatgattggtgtgatggatgatacaaaacaacatgaggagatggagaatgatttgcttggtgtgaaggaggacacaaaactatttgaggagatgatggagtcgacaaaagataggatgatccgttcggtggaggaactcttaggaggagaatttcctaatcgtggatcttacgagaacgtccacacttggctcagtagcgttcttactagttacatcacatgtatcgacgaaattggtgaaggtgcctataaacgccgtgtcgagccaaagcttgaagacctcatttctagggcaagaatagctttggctctctttatctccatttcaccgagagacaacaccgaacttatctcggtgattcccaatagcccttcttggttattccatgttgacaagaaagatctatatctcaatgctgaggctctaaagaagattgctgatgttgtggtcgcgaaggatgggaccggaaagtacagcacagtgaatgcggccattgcagcggcacctcaacacagccaaaagagattcgtcatctatataaagacaggcatttatgatgaaatcgtcgtcattgagaatacgaaacccaatttaactcttataggtgatggtcaagatttaaccatcatcacgagcaatttaagtgctagcaatgttagaagaacgttcaacaccgcaactgttgcttctaatggtaatggattcatcggagtagacatgtgcttccgaaacacggccgggccggcaaaaggaccagctgttgccctccgtgtgagtggtgatatgtccgtcatttatagatgccgtgtcgagggatatcaggatgccttgtatcctcacagtgaccgccagttttatagagagtgctttattaccggcactgtagatttcatttgtgggaacgcggtggcggtctttcaattctgccagattgtagcaagacaacctaagatggggcagagcaatgtcataaccgctcagtcacgcgcatttaaggacatttactcgggcttcacgattcaaaaatgcaacattactgcaagctcggatctagacacgacaaccgttaaaacgtatcttggaagaccttggaggatattttcaacagtcgcagttatgcagtctttcatcggtgatttagttgatcccgctggctggactccttgggaaggagaaactggtttgtcaactctccactaccgcgaatatcaaaacaggggtccaggagctgtgactagcagaagggtgaagtggtcaggctttaaagttatgaaagatcctaaacaggctacagaattcactgtagccaagctcttagatggagaaacttggttgaaagaaactcgaatcccatatgaaagtggattgtaataatgttgttccatgcttcacatgtataacgtactaaataaaagatattattcttct

SEQ ID NO: 108061 - protein, 524 aa, Arabidopsis thaliana
  peptide (1)..(524): Ceres Seq. ID no. 13653137
  misc_feature (215)..(299): Pfam Name: Pectinesterase Pfam Description: Pectinesterase
  misc_feature (1)..(524): Homolog of NCBI NO: 28393148 NR Description: putative pectin methylesterase [Arabidopsis >gi|28827352|gb|AAO50520.1| putative pectin methylesterase
  misc_feature (1)..(299): Homolog of NCBI NO: 6554192 NR Description: T23J18.25 [Arabidopsis thaliana]
  misc_feature (297)..(524): Homolog of NCBI NO: 6554192 NR Description: T23J18.25 [Arabidopsis thaliana]
  misc_feature (1)..(524): Homolog of NCBI NO: 30682309 NR Description: pectin methylesterase, putative [Arabidopsis
  misc_feature (1)..(524): Homolog of NCBI NO: 22328305 NR Description: pectin methylesterase, putative [Arabidopsis
  misc_feature (1)..(524): Homolog of NCBI NO: 7447391 NR Description: probable pectinesterase (EC 3.1.1.11) - thaliana >gi|3319371|gb|AAC28220.1| Similar to pectinesterase; [Arabidopsis thaliana] >gi|7267148|emb|CAB80816.1| putative
  misc_feature (60)..(524): Homolog of NCBI NO: 15232875 NR Description: pectinesterase family [Arabidopsis thaliana]
  misc_feature (27)..(524): Homolog of NCBI NO: 14334992 NR Description: At1g11580/T23J18_33 [Arabidopsis thaliana]
  misc_feature (27)..(524): Homolog of NCBI NO: 15220424 NR Description: pectin methylesterase, putative [Arabidopsis
  misc_feature (1)..(524): Homolog of NCBI NO: 6174913 NR Description: Pectinesterase 1 precursor (Pectin methylesterase
MLVKVFSFFILMITMVVIGVSKEYCDDKQSCQNFLLELKAGSSSLSEIRRRDLLIIVLKNSVRRIDMVMIGVMDDTKQHEEMENDLLGVKEDTKLFEEMMESTKDRMIRSVEELLGGEFPNRGSYENVHTWLSSVLTSYITCIDEIGEGAYKRRVEPKLEDLISRARIALALFISISPRDNTELISVIPNSPSWLFHVDKKDLYLNAEALKKIADVVVAKDGTGKYSTVNAAIAAAPQHSQKRFVIYIKTGIYDEIVVIENTKPNLTLIGDGQDLTIITSNLSASNVRRTFNTATVASNGNGFIGVDMCFRNTAGPAKGPAVALRVSGDMSVIYRCRVEGYQDALYPHSDRQFYRECFITGTVDFICGNAVAVFQFCQIVARQPKMGQSNVITAQSRAFKDIYSGFTIQKCNITASSDLDTTTVKTYLGRPWRIFSTVAVMQSFIGDLVDPAGWTPWEGETGLSTLHYREYQNRGPGAVTSRRVKWSGFKVMKDPKQATEFTVAKLLDGETWLKETRIPYESGL

SEQ ID NO: 108062 - protein, 513 aa, Arabidopsis thaliana
  peptide (1)..(513): Ceres Seq. ID no. 13653138
  misc_feature (204)..(288): Pfam Name: Pectinesterase Pfam Description: Pectinesterase
  misc_feature (1)..(513): Homolog of NCBI NO: 28393148 NR Description: putative pectin methylesterase [Arabidopsis >gi|28827352|gb|AAO50520.1| putative pectin methylesterase
  misc_feature (1)..(288): Homolog of NCBI NO: 6554192 NR Description: T23J18.25 [Arabidopsis thaliana]
  misc_feature (286)..(513): Homolog of NCBI NO: 6554192 NR Description: T23J18.25 [Arabidopsis thaliana]
  misc_feature (1)..(513): Homolog of NCBI NO: 30682309 NR Description: pectin methylesterase, putative [Arabidopsis
  misc_feature (1)..(513): Homolog of NCBI NO: 22328305 NR Description: pectin methylesterase, putative [Arabidopsis
  misc_feature (1)..(513): Homolog of NCBI NO: 7447391 NR Description: probable pectinesterase (EC 3.1.1.11) - thaliana >gi|3319371|gb|AAC28220.1| Similar to pectinesterase; [Arabidopsis thaliana] >gi|7267148|emb|CAB80816.1| putative
  misc_feature (49)..(513): Homolog of NCBI NO: 15232875 NR Description: pectinesterase family [Arabidopsis thaliana]
  misc_feature (16)..(513): Homolog of NCBI NO: 14334992 NR Description: At1g11580/T23J18_33 [Arabidopsis thaliana]
  misc_feature (16)..(513): Homolog of NCBI NO: 15220424 NR Description: pectin methylesterase, putative [Arabidopsis
  misc_feature (1)..(513): Homolog of NCBI NO: 6174913 NR Description: Pectinesterase 1 precursor (Pectin methylesterase
MITMVVIGVSKEYCDDKQSCQNFLLELKAGSSSLSEIRRRDLLIIVLKNSVRRIDMVMIGVMDDTKQHEEMENDLLGVKEDTKLFEEMMESTKDRMIRSVEELLGGEFPNRGSYENVHTWLSSVLTSYITCIDEIGEGAYKRRVEPKLEDLISRARIALALFISISPRDNTELISVIPNSPSWLFHVDKKDLYLNAEALKKIADVVVAKDGTGKYSTVNAAIAAAPQHSQKRFVIYIKTGIYDEIVVIENTKPNLTLIGDGQDLTIITSNLSASNVRRTFNTATVASNGNGFIGVDMCFRNTAGPAKGPAVALRVSGDMSVIYRCRVEGYQDALYPHSDRQFYRECFITGTVDFICGNAVAVFQFCQIVARQPKMGQSNVITAQSRAFKDIYSGFTIQKCNITASSDLDTTTVKTYLGRPWRIFSTVAVMQSFIGDLVDPAGWTPWEGETGLSTLHYREYQNRGPGAVTSRRVKWSGFKVMKDPKQATEFTVAKLLDGETWLKETRIPYESGL

SEQ ID NO: 108063 - protein, 510 aa, Arabidopsis thaliana
  peptide (1)..(510): Ceres Seq. ID no. 13653139
  misc_feature (201)..(285): Pfam Name: Pectinesterase Pfam Description: Pectinesterase
  misc_feature (1)..(510): Homolog of NCBI NO: 28393148 NR Description: putative pectin methylesterase [Arabidopsis >gi|28827352|gb|AAO50520.1| putative pectin methylesterase
  misc_feature (1)..(285): Homolog of NCBI NO: 6554192 NR Description: T23J18.25 [Arabidopsis thaliana]
  misc_feature (283)..(510): Homolog of NCBI NO: 6554192 NR Description: T23J18.25 [Arabidopsis thaliana]
  misc_feature (1)..(510): Homolog of NCBI NO: 30682309 NR Description: pectin methylesterase, putative [Arabidopsis
  misc_feature (1)..(510): Homolog of NCBI NO: 22328305 NR Description: pectin methylesterase, putative [Arabidopsis
  misc_feature (1)..(510): Homolog of NCBI NO: 7447391 NR Description: probable pectinesterase (EC 3.1.1.11) - thaliana >gi|3319371|gb|AAC28220.1| Similar to pectinesterase; [Arabidopsis thaliana] >gi|7267148|emb|CAB80816.1| putative
  misc_feature (46)..(510): Homolog of NCBI NO: 15232875 NR Description: pectinesterase family [Arabidopsis thaliana]
  misc_feature (13)..(510): Homolog of NCBI NO: 14334992 NR Description: At1g11580/T23J18_33 [Arabidopsis thaliana]
  misc_feature (13)..(510): Homolog of NCBI NO: 15220424 NR Description: pectin methylesterase, putative [Arabidopsis
  misc_feature (1)..(510): Homolog of NCBI NO: 6174913 NR Description: Pectinesterase 1 precursor (Pectin methylesterase
MVVIGVSKEYCDDKQSCQNFLLELKAGSSSLSEIRRRDLLIIVLKNSVRRIDMVMIGVMDDTKQHEEMENDLLGVKEDTKLFEEMMESTKDRMIRSVEELLGGEFPNRGSYENVHTWLSSVLTSYITCIDEIGEGAYKRRVEPKLEDLISRARIALALFISISPRDNTELISVIPNSPSWLFHVDKKDLYLNAEALKKIADVVVAKDGTGKYSTVNAAIAAAPQHSQKRFVIYIKTGIYDEIVVIENTKPNLTLIGDGQDLTIITSNLSASNVRRTFNTATVASNGNGFIGVDMCFRNTAGPAKGPAVALRVSGDMSVIYRCRVEGYQDALYPHSDRQFYRECFITGTVDFICGNAVAVFQFCQIVARQPKMGQSNVITAQSRAFKDIYSGFTIQKCNITASSDLDTTTVKTYLGRPWRIFSTVAVMQSFIGDLVDPAGWTPWEGETGLSTLHYREYQNRGPGAVTSRRVKWSGFKVMKDPKQATEFTVAKLLDGETWLKETRIPYESGL

SEQ ID NO: 108064 - DNA, 1307 bp, Arabidopsis thaliana
  misc_feature (1)..(1307): Ceres Seq. ID no. 13653140
  misc_feature: MA Experiment ID: 20000180 Result: Up-regulated in Transcription
  misc_feature: MA Experiment 20000180 PARAMETER Experiment Name: At_Germinating_Seeds_P Parameter: Age (hr) Value: 24 vs. 0
  misc_feature: MA Experiment 20000180 PARAMETER Experiment Name: At_Germinating_Seeds_P Parameter: Tissue Value: Germinating Seeds
  misc_feature: MA Experiment ID: 20000265 Result: Down-regulated in Transcription
  misc_feature: MA Experiment 20000265 PARAMETER Experiment Name: At_Open_Flower_P Parameter: Age (day) Value: 21
  misc_feature: MA Experiment 20000265 PARAMETER Experiment Name: At_Open_Flower_P Parameter: Plant Line Value: WS
  misc_feature: MA Experiment 20000265 PARAMETER Experiment Name: At_Open_Flower_P Parameter: Tissue Value: Closed Flower vs. Whole Plant
  misc_feature: MA Experiment ID: 20000439 Result: Up-regulated in Transcription
  misc_feature: MA Experiment 20000439 PARAMETER Experiment Name: At_Roots__P Parameter: Age (day) Value: 14 vs. 21
  misc_feature: MA Experiment 20000439 PARAMETER Experiment Name: At_Roots__P Parameter: Organism Value: A. thaliana
  misc_feature: MA Experiment 20000439 PARAMETER Experiment Name: At_Roots__P Parameter: Tissue Value: Roots vs. Whole Plant
  misc_feature: MA Experiment ID: 20000444 Result: Up-regulated in Transcription
  misc_feature: MA Experiment 20000444 PARAMETER Experiment Name: At_100uM_NAA__P Parameter: Age (day) Value: 14
  misc_feature: MA Experiment 20000444 PARAMETER Experiment Name: At_100uM_NAA__P Parameter: Organism Value: A. thaliana
  misc_feature: MA Experiment 20000444 PARAMETER Experiment Name: At_100uM_NAA__P Parameter: Plant Line Value: WS
  misc_feature: MA Experiment 20000444 PARAMETER Experiment Name: At_100uM_NAA__P Parameter: Timepoint (hr) Value: 1
  misc_feature: MA Experiment 20000444 PARAMETER Experiment Name: At_100uM_NAA__P Parameter: Tissue Value: Aerial
  misc_feature: MA Experiment 20000444 PARAMETER Experiment Name: At_100uM_NAA__P Parameter: Treatment Value: 100uM NAA vs. No Treatment
  misc_feature: MA Experiment ID: 20000453 Result: Up-regulated in Transcription
  misc_feature: MA Experiment 20000453 PARAMETER Experiment Name: At_100uM_ABA_P Parameter: Age (day) Value: 15
  misc_feature: MA Experiment 20000453 PARAMETER Experiment Name: At_100uM_ABA_P Parameter: Organism Value: A. thaliana
  misc_feature: MA Experiment 20000453 PARAMETER Experiment Name: At_100uM_ABA_P Parameter: Plant Line Value: WS
  misc_feature: MA Experiment 20000453 PARAMETER Experiment Name: At_100uM_ABA_P Parameter: Timepoint (hr) Value: 24
  misc_feature: MA Experiment 20000453 PARAMETER Experiment Name: At_100uM_ABA_P Parameter: Tissue Value: Aerial
  misc_feature: MA Experiment 20000453 PARAMETER Experiment Name: At_100uM_ABA_P Parameter: Treatment Value: 100uM ABA vs. No Treatment
  misc_feature: MA Experiment ID: 20001247 Result: Up-regulated in Transcription
  misc_feature: MA Experiment 20001247 PARAMETER Experiment Name: At_Far-red-induction_P Parameter: Age (day) Value: 7
  misc_feature: MA Experiment 20001247 PARAMETER Experiment Name: At_Far-red-induction_P Parameter: Light Value: Far-red vs. White
  misc_feature: MA Experiment 20001247 PARAMETER Experiment Name: At_Far-red-induction_P Parameter: Organism Value: A. thaliana
  misc_feature: MA Experiment 20001247 PARAMETER Experiment Name: At_Far-red-induction_P Parameter: Plant Line Value: Columbia
  misc_feature: MA Experiment 20001247 PARAMETER Experiment Name: At_Far-red-induction_P Parameter: Timepoint (hr) Value: 1
  misc_feature: MA Experiment 20001247 PARAMETER Experiment Name: At_Far-red-induction_P Parameter: Tissue Value: Whole Plant
  misc_feature: MA Experiment ID: 20001556 Result: Down-regulated in Transcription
  misc_feature: MA Experiment 20001556 PARAMETER Experiment Name: At_Drought_Soil_Dry_P Parameter: Age (day) Value: 26
  misc_feature: MA Experiment 20001556 PARAMETER Experiment Name: At_Drought_Soil_Dry_P Parameter: Organism Value: A. thaliana
  misc_feature: MA Experiment 20001556 PARAMETER Experiment Name: At_Drought_Soil_Dry_P Parameter: Plant Line Value: WS
  misc_feature: MA Experiment 20001556 PARAMETER Experiment Name: At_Drought_Soil_Dry_P Parameter: Post Timepoint (hr) Value: None
  misc_feature: MA Experiment 20001556 PARAMETER Experiment Name: At_Drought_Soil_Dry_P Parameter: Post-Treatment Value: None
  misc_feature: MA Experiment 20001556 PARAMETER Experiment Name: At_Drought_Soil_Dry_P Parameter: Timepoint (day) Value: 12
  misc_feature: MA Experiment 20001556 PARAMETER Experiment Name: At_Drought_Soil_Dry_P Parameter: Treatment Value: Drought vs. No Drought
gctttgctcctaaaccacaacaaatggctctcgaaacttttctaataaaactcaaaaacgctatttcctccaaaccaacttctcgtcgaccacaccgatcatctcctccgatatcaaccaccacttcctccgtcggagtattatcgttcgaagtagcacgtgtcatgaccaaactcctacatctcactcactctctcaccgattccaatctcctcactcctcgagaccactctctacgaaaacaaagtttacagattgggatcgaattcgaagaagaagaagactacgagaacaagaaagatgttatgaaagtgatagatctacagaacaagattgagagacagaaacaacatgtcaagtatctaaaagacagatctctctggaacaaaagcttcgacactgtcgtgttgattctcgccagatcggtattcacagcactcgctagactcaaatccgtcttctcctccgccgcagccactgggtacatggttccgaccgtcgtgtcttctctccctcgttctctctcttcttcttcttcctctatgaatcttgttcaccctagcccaaacgacgaagagagagacaagacgacgacgtcttctgcgtttcttgaagaaagctcaagactattgaaaccaccggagacaactctcggcggagctggcgtggcgcttcactacgcgaatctgatagtagtaatggagaagatgataaagcaacctcagcttgtaggtcttgacgcgagagacgatctgtattcaatgttaccggcaagtgtgagatcgtcacttaggtcaaggctaaaaggagttggtttcacggcgacggacggtggtttagcgacggagtggaaggcggctttaggtcggatcttacggtggttgttaccattggcgcagaatatgattaggtggcagagtgagagaagctttgagcagcaacacatggcgacggcaacgaatagtcagaacagagtgatgttagttcaaacactagtgtttgcagataaagttaagacagaagcagccataacagagcttcttgttgggttgaattacatctggagattcgaaagagagatgactgcgaaagctctgtttaatctacagtgtcctcctactaattacagctaattttgtgtagagttttttgtcttcttcttttttttttttgtttgatgggttaatgttgatttcttgtttttttttggtttagtttgataatacgaattatgaaagtgatttgggtggggtatgatgtgatgtgtaacaatgtagatattggaatgaatttgagtgattgttttc

SEQ ID NO: 108065 - protein, 376 aa, Arabidopsis thaliana
  peptide (1)..(376): Ceres Seq. ID no. 13653141
  misc_feature (216)..(303): Pfam Name: Protein of unknown function (DUF668) Pfam Description: Protein of unknown function (DUF668)
  misc_feature (8)..(376): Homolog of NCBI NO: 27754455 NR Description: unknown protein [Arabidopsis thaliana]
  misc_feature (75)..(376): Homolog of NCBI NO: 15242144 NR Description: expressed protein [Arabidopsis thaliana] contains similarity to unknown
  misc_feature (8)..(83): Homolog of NCBI NO: 15242144 NR Description: expressed protein [Arabidopsis thaliana] contains similarity to unknown
  misc_feature (52)..(361): Homolog of NCBI NO: 30102981 NR Description: hypothetical protein [Oryza sativa (japonica
  misc_feature (8)..(76): Homolog of NCBI NO: 30102981 NR Description: hypothetical protein [Oryza sativa (japonica
  misc_feature (207)..(362): Homolog of NCBI NO: 7939524 NR Description: contains similarity to unknown
  misc_feature (108)..(182): Homolog of NCBI NO: 7939524 NR Description: contains similarity to unknown
  misc_feature (8)..(70): Homolog of NCBI NO: 7939524 NR Description: contains similarity to unknown
  misc_feature (207)..(362): Homolog of NCBI NO: 15228977 NR Description: hypothetical protein [Arabidopsis thaliana]
  misc_feature (108)..(182): Homolog of NCBI NO: 15228977 NR Description: hypothetical protein [Arabidopsis thaliana]
FAPKPQQMALETFLIKLKNAISSKPTSRRPHRSSPPISTTTSSVGVLSFEVARVMTKLLHLTHSLTDSNLLTPRDHSLRKQSLQIGIEFEEEEDYENKKDVMKVIDLQNKIERQKQHVKYLKDRSLWNKSFDTVVLILARSVFTALARLKSVFSSAAATGYMVPTVVSSLPRSLSSSSSSMNLVHPSPNDEERDKTTTSSAFLEESSRLLKPPETTLGGAGVALHYANLIVVMEKMIKQPQLVGLDARDDLYSMLPASVRSSLRSRLKGVGFTATDGGLATEWKAALGRILRWLLPLAQNMIRWQSERSFEQQHMATATNSQNRVMLVQTLVFADKVKTEAAITELLVGLNYIWRFEREMTAKALFNLQCPPTNYS

SEQ ID NO: 108066 - protein, 369 aa, Arabidopsis thaliana
  peptide (1)..(369): Ceres Seq. ID no. 13653142
  misc_feature (209)..(296): Pfam Name: Protein of unknown function (DUF668) Pfam Description: Protein of unknown function (DUF668)
  misc_feature (1)..(369): Homolog of NCBI NO: 27754455 NR Description: unknown protein [Arabidopsis thaliana]
  misc_feature (68)..(369): Homolog of NCBI NO: 15242144 NR Description: expressed protein [Arabidopsis thaliana] contains similarity to unknown
  misc_feature (1)..(76): Homolog of NCBI NO: 15242144 NR Description: expressed protein [Arabidopsis thaliana] contains similarity to unknown
  misc_feature (45)..(354): Homolog of NCBI NO: 30102981 NR Description: hypothetical protein [Oryza sativa (japonica
  misc_feature (1)..(69): Homolog of NCBI NO: 30102981 NR Description: hypothetical protein [Oryza sativa (japonica
  misc_feature (200)..(355): Homolog of NCBI NO: 7939524 NR Description: contains similarity to unknown
  misc_feature (101)..(175): Homolog of NCBI NO: 7939524 NR Description: contains similarity to unknown
  misc_feature (1)..(63): Homolog of NCBI NO: 7939524 NR Description: contains similarity to unknown
  misc_feature (200)..(355): Homolog of NCBI NO: 15228977 NR Description: hypothetical protein [Arabidopsis thaliana]
  misc_feature (101)..(175): Homolog of NCBI NO: 15228977 NR Description: hypothetical protein [Arabidopsis thaliana]
MALETFLIKLKNAISSKPTSRRPHRSSPPISTTTSSVGVLSFEVARVMTKLLHLTHSLTDSNLLTPRDHSLRKQSLQIGIEFEEEEDYENKKDVMKVIDLQNKIERQKQHVKYLKDRSLWNKSFDTVVLILARSVFTALARLKSVFSSAAATGYMVPTVVSSLPRSLSSSSSSMNLVHPSPNDEERDKTTTSSAFLEESSRLLKPPETTLGGAGVALHYANLIVVMEKMIKQPQLVGLDARDDLYSMLPASVRSSLRSRLKGVGFTATDGGLATEWKAALGRILRWLLPLAQNMIRWQSERSFEQQHMATATNSQNRVMLVQTLVFADKVKTEAAITELLVGLNYIWRFEREMTAKALFNLQCPPTNYS

SEQ ID NO: 108067 - protein, 322 aa, Arabidopsis thaliana
  peptide (1)..(322): Ceres Seq. ID no. 13653143
  misc_feature (162)..(249): Pfam Name: Protein of unknown function (DUF668) Pfam Description: Protein of unknown function (DUF668)
  misc_feature (1)..(322): Homolog of NCBI NO: 27754455 NR Description: unknown protein [Arabidopsis thaliana]
  misc_feature (21)..(322): Homolog of NCBI NO: 15242144 NR Description: expressed protein [Arabidopsis thaliana] contains similarity to unknown
  misc_feature (1)..(29): Homolog of NCBI NO: 15242144 NR Description: expressed protein [Arabidopsis thaliana] contains similarity to unknown
  misc_feature (1)..(307): Homolog of NCBI NO: 30102981 NR Description: hypothetical protein [Oryza sativa (japonica
  misc_feature (1)..(22): Homolog of NCBI NO: 30102981 NR Description: hypothetical protein [Oryza sativa (japonica
  misc_feature (153)..(308): Homolog of NCBI NO: 7939524 NR Description: contains similarity to unknown
  misc_feature (54)..(128): Homolog of NCBI NO: 7939524 NR Description: contains similarity to unknown
  misc_feature (1)..(16): Homolog of NCBI NO: 7939524 NR Description: contains similarity to unknown
  misc_feature (153)..(308): Homolog of NCBI NO: 15228977 NR Description: hypothetical protein [Arabidopsis thaliana]
  misc_feature (54)..(128): Homolog of NCBI NO: 15228977 NR Description: hypothetical protein [Arabidopsis thaliana]
MTKLLHLTHSLTDSNLLTPRDHSLRKQSLQIGIEFEEEEDYENKKDVMKVIDLQNKIERQKQHVKYLKDRSLWNKSFDTVVLILARSVFTALARLKSVFSSAAATGYMVPTVVSSLPRSLSSSSSSMNLVHPSPNDEERDKTTTSSAFLEESSRLLKPPETTLGGAGVALHYANLIVVMEKMIKQPQLVGLDARDDLYSMLPASVRSSLRSRLKGVGFTATDGGLATEWKAALGRILRWLLPLAQNMIRWQSERSFEQQHMATATNSQNRVMLVQTLVFADKVKTEAAITELLVGLNYIWRFEREMTAKALFNLQCPPTNYS

SEQ ID NO: 108068 - DNA, 1053 bp, Arabidopsis thaliana
  misc_feature (1)..(1053): Ceres Seq. ID no. 13653144
  misc_feature: MA Experiment ID: 108573 Result: Down-regulated in Transcription
  misc_feature: MA Experiment 108573 PARAMETER Experiment Name: At_Drought_cDNA_P Parameter: Timepoint (hr) Value: 6
  misc_feature: MA Experiment 108573 PARAMETER Experiment Name: At_Drought_cDNA_P Parameter: Tissue Value: Aerial
  misc_feature: MA Experiment 108573 PARAMETER Experiment Name: At_Drought_cDNA_P Parameter: Treatment Value: Drought vs. No Drought
  misc_feature: MA Experiment ID: 108576 Result: Up-regulated in Transcription
  misc_feature: MA Experiment 108576 PARAMETER Experiment Name: At_42deg_Heat_cDNA_P Parameter: Temperature (deg C) Value: 42 vs. 22
  misc_feature: MA Experiment 108576 PARAMETER Experiment Name: At_42deg_Heat_cDNA_P Parameter: Timepoint (hr) Value: 1
  misc_feature: MA Experiment 108576 PARAMETER Experiment Name: At_42deg_Heat_cDNA_P Parameter: Tissue Value: Aerial
  misc_feature: MA Experiment ID: 20000180 Result: Down-regulated in Transcription
  misc_feature: MA Experiment 20000180 PARAMETER Experiment Name: At_Germinating_Seeds_P Parameter: Age (hr) Value: 24 vs. 0
  misc_feature: MA Experiment 20000180 PARAMETER Experiment Name: At_Germinating_Seeds_P Parameter: Tissue Value: Germinating Seeds
  misc_feature: MA Experiment ID: 20000495 Result: Down-regulated in Transcription
  misc_feature: MA Experiment 20000495 PARAMETER Experiment Name: At_Guard_Cells_P Parameter: Harvest Date Value: 8/2/2002
  misc_feature: MA Experiment 20000495 PARAMETER Experiment Name: At_Guard_Cells_P Parameter: Organism Value: A. thaliana
  misc_feature: MA Experiment 20000495 PARAMETER Experiment Name: At_Guard_Cells_P Parameter: Tissue Value: Guard Cells vs. Leaves
tggttgaagacgacggagacggcgacggcgagaagcaatgacgactgaggaaaataaaacaagcagaaataggaagaggaagagacagagaaaccctaaaccttctaaagaagaacctatcgagacgacaccgaagaatcaaaacgagaaaaagaatcaaagagataccaaaaaccaacaacatggaggttcttcagctccatcgaaacgacctaaaccttccaatttcctcgatgcgcttagagagagattatctggtgggcaatttaggatgctcaatgagaaactctacacttgctctggaaaagaagctttagactactttaaagaagatccacaaatgtttgatatgtatcatacagggtatcaacaacaaatgtcaaattggcctgagcttcctgttaactccattattaattggctattgtctaatagctcttctttagttgtggctgattttggctgtggtgatgcaaggattgctaaaagtgtgaagaacaaagttttctcctttgatcttgtctcaaagaacccctctgttattgcctgcgatatgtcaaatacttcacttgagtcttcatcagtggatgttgcagttttctgtctttcattaatgggaacaaactattctagttatatcaaagaagcacatcgagttcttcgtccaagtggtatgcttcttatagcggaagtaaagagcaggtttgatccaaacaatggaggagcagacccaaaagactttgtgaaagccgtttgtgatcttggatttacttcggttttaaaggacttctccaataagatgttcatcttattccatttcaagaaaaaggagcagatgaattcaaatcagaagataataaagtggcctgagttaaaagcttgtttatacaaacgtcgatgatgagtttacaatggaagattactcagaatactatttttgttctccactgttgtatcatttaggcacattgattgtcctcaaaatctcataaatttgcaccctataaacttttgtaagagaaaagcaatcacaaagatttttcaagtgtttag

SEQ ID NO: 108069 - protein, 287 aa, Arabidopsis thaliana
  peptide (1)..(287): Ceres Seq. ID no. 13653145
  misc_feature (1)..(287): Homolog of NCBI NO: 30693618 NR Description: expressed protein [Arabidopsis thaliana] unknown protein [Arabidopsis thaliana]
  misc_feature (1)..(274): Homolog of NCBI NO: 9758079 NR Description: contains similarity to unknown
  misc_feature (249)..(287): Homolog of NCBI NO: 9758079 NR Description: contains similarity to unknown
  misc_feature (1)..(287): Homolog of NCBI NO: 20270198 NR Description: RIKEN cDNA 1500003O22 [Mus musculus] unnamed protein product [Mus musculus] RIKEN cDNA 1500003O22 [Mus musculus] >gi|26337283|dbj|BAC32326.1|
  misc_feature (1)..(287): Homolog of NCBI NO: 26346719 NR Description: unnamed protein product [Mus musculus]
  misc_feature (1)..(287): Homolog of NCBI NO: 34858882 NR Description: similar to RIKEN cDNA 1500003O22 [Rattus
  misc_feature (1)..(287): Homolog of NCBI NO: 17542244 NR Description: Rrp8p like [Caenorhabditis elegans]
  misc_feature (9)..(287): Homolog of NCBI NO: 2662099 NR Description: KIAA0409 [Homo sapiens]
  misc_feature (9)..(287): Homolog of NCBI NO: 12758125 NR Description: KIAA0409 protein [Homo sapiens]
  misc_feature (12)..(287): Homolog of NCBI NO: 39587878 NR Description: Hypothetical protein CBG13492 [Caenorhabditis
MTTEENKTSRNRKRKRQRNPKPSKEEPIETTPKNQNEKKNQRDTKNQQHGGSSAPSKRPKPSNFLDALRERLSGGQFRMLNEKLYTCSGKEALDYFKEDPQMFDMYHTGYQQQMSNWPELPVNSIINWLLSNSSSLVVADFGCGDARIAKSVKNKVFSFDLVSKNPSVIACDMSNTSLESSSVDVAVFCLSLMGTNYSSYIKEAHRVLRPSGMLLIAEVKSRFDPNNGGADPKDFVKAVCDLGFTSVLKDFSNKMFILFHFKKKEQMNSNQKIIKWPELKACLYKRR

SEQ ID NO: 108070 - protein, 209 aa, Arabidopsis thaliana
  peptide (1)..(209): Ceres Seq. ID no. 13653146
  misc_feature (1)..(209): Homolog of NCBI NO: 30693618 NR Description: expressed protein [Arabidopsis thaliana] unknown protein [Arabidopsis thaliana]
  misc_feature (1)..(196): Homolog of NCBI NO: 9758079 NR Description: contains similarity to unknown
  misc_feature (171)..(209): Homolog of NCBI NO: 9758079 NR Description: contains similarity to unknown
  misc_feature (1)..(209): Homolog of NCBI NO: 20270198 NR Description: RIKEN cDNA 1500003O22 [Mus musculus] unnamed protein product [Mus musculus] RIKEN cDNA 1500003O22 [Mus musculus] >gi|26337283|dbj|BAC32326.1|
  misc_feature (1)..(209): Homolog of NCBI NO: 26346719 NR Description: unnamed protein product [Mus musculus]
  misc_feature (1)..(209): Homolog of NCBI NO: 34858882 NR Description: similar to RIKEN cDNA 1500003O22 [Rattus
  misc_feature (1)..(209): Homolog of NCBI NO: 17542244 NR Description: Rrp8p like [Caenorhabditis elegans]
  misc_feature (1)..(209): Homolog of NCBI NO: 2662099 NR Description: KIAA0409 [Homo sapiens]
  misc_feature (1)..(209): Homolog of NCBI NO: 12758125 NR Description: KIAA0409 protein [Homo sapiens]
  misc_feature (1)..(209): Homolog of NCBI NO: 39587878 NR Description: Hypothetical protein CBG13492 [Caenorhabditis
MLNEKLYTCSGKEALDYFKEDPQMFDMYHTGYQQQMSNWPELPVNSIINWLLSNSSSLVVADFGCGDARIAKSVKNKVFSFDLVSKNPSVIACDMSNTSLESSSVDVAVFCLSLMGTNYSSYIKEAHRVLRPSGMLLIAEVKSRFDPNNGGADPKDFVKAVCDLGFTSVLKDFSNKMFILFHFKKKEQMNSNQKIIKWPELKACLYKRR

SEQ ID NO: 108071 - protein, 186 aa, Arabidopsis thaliana
  peptide (1)..(186): Ceres Seq. ID no. 13653147
  misc_feature (1)..(186): Homolog of NCBI NO: 30693618 NR Description: expressed protein [Arabidopsis thaliana] unknown protein [Arabidopsis thaliana]
  misc_feature (1)..(173): Homolog of NCBI NO: 9758079 NR Description: contains similarity to unknown
  misc_feature (148)..(186): Homolog of NCBI NO: 9758079 NR Description: contains similarity to unknown
  misc_feature (1)..(186): Homolog of NCBI NO: 20270198 NR Description: RIKEN cDNA 1500003O22 [Mus musculus] unnamed protein product [Mus musculus] RIKEN cDNA 1500003O22 [Mus musculus] >gi|26337283|dbj|BAC32326.1|
  misc_feature (1)..(186): Homolog of NCBI NO: 26346719 NR Description: unnamed protein product [Mus musculus]
  misc_feature (1)..(186): Homolog of NCBI NO: 34858882 NR Description: similar to RIKEN cDNA 1500003O22 [Rattus
  misc_feature (1)..(186): Homolog of NCBI NO: 17542244 NR Description: Rrp8p like [Caenorhabditis elegans]
  misc_feature (1)..(186): Homolog of NCBI NO: 2662099 NR Description: KIAA0409 [Homo sapiens]
  misc_feature (1)..(186): Homolog of NCBI NO: 12758125 NR Description: KIAA0409 protein [Homo sapiens]
  misc_feature (1)..(186): Homolog of NCBI NO: 39587878 NR Description: Hypothetical protein CBG13492 [Caenorhabditis
MFDMYHTGYQQQMSNWPELPVNSIINWLLSNSSSLVVADFGCGDARIAKSVKNKVFSFDLVSKNPSVIACDMSNTSLESSSVDVAVFCLSLMGTNYSSYIKEAHRVLRPSGMLLIAEVKSRFDPNNGGADPKDFVKAVCDLGFTSVLKDFSNKMFILFHFKKKEQMNSNQKIIKWPELKACLYKRR

SEQ ID NO: 108072 - DNA, 1107 bp, Arabidopsis thaliana
  misc_feature (1)..(1107): Ceres Seq. ID no. 13653148
  misc_feature: MA Experiment ID: 20000180 Result: Down-regulated in Transcription
  misc_feature: MA Experiment 20000180 PARAMETER Experiment Name: At_Germinating_Seeds_P Parameter: Age (hr) Value: 24 vs. 0
  misc_feature: MA Experiment 20000180 PARAMETER Experiment Name: At_Germinating_Seeds_P Parameter: Tissue Value: Germinating Seeds
  misc_feature: MA Experiment ID: 20000184 Result: Up-regulated in Transcription
  misc_feature: MA Experiment 20000184 PARAMETER Experiment Name: At_Shoots__P Parameter: Age (day) Value: 7
  misc_feature: MA Experiment 20000184 PARAMETER Experiment Name: At_Shoots__P Parameter: Tissue Value: Shoots vs. Whole Plant
  misc_feature: MA Experiment ID: 20001557 Result: Up-regulated in Transcription
  misc_feature: MA Experiment 20001557 PARAMETER Experiment Name: At_Drought_Soil_Dry_P Parameter: Age (day) Value: 27
  misc_feature: MA Experiment 20001557 PARAMETER Experiment Name: At_Drought_Soil_Dry_P Parameter: Organism Value: A. thaliana
  misc_feature: MA Experiment 20001557 PARAMETER Experiment Name: At_Drought_Soil_Dry_P Parameter: Plant Line Value: WS
  misc_feature: MA Experiment 20001557 PARAMETER Experiment Name: At_Drought_Soil_Dry_P Parameter: Post Timepoint (hr) Value: 3
  misc_feature: MA Experiment 20001557 PARAMETER Experiment Name: At_Drought_Soil_Dry_P Parameter: Post-Treatment Value: Re-Water vs. No Drought
  misc_feature: MA Experiment 20001557 PARAMETER Experiment Name: At_Drought_Soil_Dry_P Parameter: Timepoint (day) Value: 13
  misc_feature: MA Experiment 20001557 PARAMETER Experiment Name: At_Drought_Soil_Dry_P Parameter: Treatment Value: Drought vs. No Drought
  misc_feature: MA Experiment ID: 20001558 Result: Up-regulated in Transcription
  misc_feature: MA Experiment 20001558 PARAMETER Experiment Name: At_Drought_Soil_Dry_P Parameter: Age (day) Value: 27
  misc_feature: MA Experiment 20001558 PARAMETER Experiment Name: At_Drought_Soil_Dry_P Parameter: Organism Value: A. thaliana
  misc_feature: MA Experiment 20001558 PARAMETER Experiment Name: At_Drought_Soil_Dry_P Parameter: Plant Line Value: WS
  misc_feature: MA Experiment 20001558 PARAMETER Experiment Name: At_Drought_Soil_Dry_P Parameter: Post Timepoint (hr) Value: 6
  misc_feature: MA Experiment 20001558 PARAMETER Experiment Name: At_Drought_Soil_Dry_P Parameter: Post-Treatment Value: Re-Water vs. No Drought
  misc_feature: MA Experiment 20001558 PARAMETER Experiment Name: At_Drought_Soil_Dry_P Parameter: Timepoint (day) Value: 13
  misc_feature: MA Experiment 20001558 PARAMETER Experiment Name: At_Drought_Soil_Dry_P Parameter: Treatment Value: Drought vs. No Drought
agccaaacccccccaattttggcctctcgatttagttttttgaaaccctaagctcgatttcgatcctccggcatactcggtttcgccgccgaatctctgcttgtagcgagtgttactattcaatcggcgagaatgtcgatgtcgaagagttcaaagatgcttcagttcatcaactacaggatgcgagtgacgatccaagacggaagacagctcgttgggaagttcatggcgtttgaccgtcacatgaacctcgttctcggcgattgcgaggagtttcgtaagcttccaccagctaaagggaagaagatcaacgaagagcgtgaagatcgccgtacgctaggtttagtgttgcttagaggtgaagaagttatctcaatgactgtcgaaggaccacctcctcctgaagaatctcgtgctaaagctggctctgcagctgctgttgctggtccaggaattggccgtgccgctgggcgtggagttcctactggtccgttagttcaagctcagcctggtttatctggtcctgttcgtggtgttggtggacctgctccgggaatgatgcagcctcagatctctcgtccaccacagctttcagctcctccgattattcgacctccgggacagatgttgccaccgcctccttttggtggtcaaggtcctcctatgggaagaggtcctccaccgccttatggtatgaggccaccgccacagcagttttctggaccaccaccgcctcagtatgggcaaaggccaatgattcctcctcctggtggtatgatgagaggacctcctcctccacctcatggaatgcaaggacctcctccgcctcgccctggaatgcctcctgctcctggtggttttgctccaccgcgtcctggcatgccaccacataatcagcagcagtgattaggtttacggtatcgtgctatcatgttgcctttcattgactttagccgcaatttctcatctatcttagctttcaaagtttgtagatttgttgacgagtgagttgtctttgccttatcttcttgtgttttcttttaagaacgaatccattaaactttgttatgtcttcttaaggtaaacatctatcttgaggatcgtttt

SEQ ID NO: 108073 - protein, 257 aa, Arabidopsis thaliana; identical to SEQ ID NO: 87866
  peptide (1)..(257): Ceres Seq. ID no. 13653149
  misc_feature (7)..(84): Pfam Name: LSM domain Pfam Description: LSM domain
  misc_feature (1)..(257): Homolog of NCBI NO: 15237095 NR Description: small nuclear ribonucleoprotein, putative (snRNP) thaliana] >gi|30685110|ref|NP_849414.1| small nuclear
  misc_feature (1)..(256): Homolog of NCBI NO: 15241519 NR Description: small nuclear ribonucleoprotein, putative (snRNP) thaliana] >gi|9758703|dbj|BAB09157.1| contains similarity to
  misc_feature (1)..(256): Homolog of NCBI NO: 21536707 NR Description: putative snRNP protein [Arabidopsis thaliana]
  misc_feature (1)..(256): Homolog of NCBI NO: 34900024 NR Description: putative snRNP protein [Oryza sativa (japonica
  misc_feature (1)..(256): Homolog of NCBI NO: 33146808 NR Description: putative snRNP(small nuclear ribonucleoprotein
  misc_feature (1)..(240): Homolog of NCBI NO: 7208221 NR Description: small nuclear ribonucleoprotein B' [Macropus
  misc_feature (1)..(240): Homolog of NCBI NO: 112305 NR Description: small nuclear ribonucleoprotein-associated
  misc_feature (1)..(240): Homolog of NCBI NO: 8099650 NR Description: snRNP-associated protein; SmB [Danio rerio]
  misc_feature (1)..(240): Homolog of NCBI NO: 38150007 NR Description: small nuclear ribonucleoprotein polypeptide B/B' B'; Sm protein B/B'; small nuclear ribonucleoprotein polypeptides and B' [Homo sapiens] >gi|134037|sp|P14678|RSMB_HUMAN Small
  misc_feature (1)..(240): Homolog of NCBI NO: 4507135 NR Description: small nuclear ribonucleoprotein polypeptide N; SM

SEQ ID NO: 108074 - protein, 255 aa, Arabidopsis thaliana; identical to SEQ ID NO: 87867
  peptide (1)..(255): Ceres Seq. ID no. 13653150
  misc_feature (5)..(82): Pfam Name: LSM domain Pfam Description: LSM domain
  misc_feature (1)..(255): Homolog of NCBI NO: 15237095 NR Description: small nuclear ribonucleoprotein, putative (snRNP) thaliana] >gi|30685110|ref|NP_849414.1| small nuclear
  misc_feature (1)..(254): Homolog of NCBI NO: 15241519 NR Description: small nuclear ribonucleoprotein, putative (snRNP) thaliana] >gi|9758703|dbj|BAB09157.1| contains similarity to
  misc_feature (1)..(254): Homolog of NCBI NO: 21536707 NR Description: putative snRNP protein [Arabidopsis thaliana]
  misc_feature (1)..(254): Homolog of NCBI NO: 34900024 NR Description: putative snRNP protein [Oryza sativa (japonica
  misc_feature (1)..(254): Homolog of NCBI NO: 33146808 NR Description: putative snRNP(small nuclear ribonucleoprotein
  misc_feature (1)..(238): Homolog of NCBI NO: 7208221 NR Description: small nuclear ribonucleoprotein B' [Macropus
  misc_feature (1)..(238): Homolog of NCBI NO: 112305 NR Description: small nuclear ribonucleoprotein-associated
  misc_feature (1)..(238): Homolog of NCBI NO: 8099650 NR Description: snRNP-associated protein; SmB [Danio rerio]
  misc_feature (1)..(238): Homolog of NCBI NO: 38150007 NR Description: small nuclear ribonucleoprotein polypeptide B/B' B'; Sm protein B/B'; small nuclear ribonucleoprotein polypeptides and B' [Homo sapiens] >gi|134037|sp|P14678|RSMB_HUMAN Small
  misc_feature (1)..(238): Homolog of NCBI NO: 4507135 NR Description: small nuclear ribonucleoprotein polypeptide N; SM

SEQ ID NO: 108075 - protein, 249 aa, Arabidopsis thaliana; identical to SEQ ID NO: 87868
  peptide (1)..(249): Ceres Seq. ID no. 13653151
  misc_feature (1)..(76): Pfam Name: LSM domain Pfam Description: LSM domain
  misc_feature (1)..(249): Homolog of NCBI NO: 15237095 NR Description: small nuclear ribonucleoprotein, putative (snRNP) thaliana] >gi|30685110|ref|NP_849414.1| small nuclear
  misc_feature (1)..(248): Homolog of NCBI NO: 15241519 NR Description: small nuclear ribonucleoprotein, putative (snRNP) thaliana] >gi|9758703|dbj|BAB09157.1| contains similarity to
  misc_feature (1)..(248): Homolog of NCBI NO: 21536707 NR Description: putative snRNP protein [Arabidopsis thaliana]
  misc_feature (1)..(248): Homolog of NCBI NO: 34900024 NR Description: putative snRNP protein [Oryza sativa (japonica
  misc_feature (1)..(248): Homolog of NCBI NO: 33146808 NR Description: putative snRNP(small nuclear ribonucleoprotein
  misc_feature (1)..(232): Homolog of NCBI NO: 7208221 NR Description: small nuclear ribonucleoprotein B' [Macropus
  misc_feature (1)..(232): Homolog of NCBI NO: 112305 NR Description: small nuclear ribonucleoprotein-associated
  misc_feature (1)..(232): Homolog of NCBI NO: 8099650 NR Description: snRNP-associated protein; SmB [Danio rerio]
  misc_feature (1)..(232): Homolog of NCBI NO: 38150007 NR Description: small nuclear ribonucleoprotein polypeptide B/B' B'; Sm protein B/B'; small nuclear ribonucleoprotein polypeptides and B' [Homo sapiens] >gi|134037|sp|P14678|RSMB_HUMAN Small
  misc_feature (1)..(232): Homolog of NCBI NO: 4507135 NR Description: small nuclear ribonucleoprotein polypeptide N; SM

SEQ ID NO: 108076 - DNA, 1488 bp, Arabidopsis thaliana
  misc_feature (1)..(1488): Ceres Seq. ID no. 13653156
  misc_feature: MA Experiment ID: 108461 Result: Down-regulated in Transcription
  misc_feature: MA Experiment 108461 PARAMETER Experiment Name: At_Germinating_Seeds_cDNA_P Parameter: Age (day) Value: 1 vs. 0
  misc_feature: MA Experiment 108461 PARAMETER Experiment Name: At_Germinating_Seeds_cDNA_P Parameter: Tissue Value: Germinating Seeds
  misc_feature: MA Experiment ID: 108464 Result: Down-regulated in Transcription
  misc_feature: MA Experiment 108464 PARAMETER Experiment Name: At_Germinating_Seeds_cDNA_P Parameter: Age (day) Value: 4 vs. 0
  misc_feature: MA Experiment 108464 PARAMETER Experiment Name: At_Germinating_Seeds_cDNA_P Parameter: Tissue Value: Germinating Seeds
  misc_feature: MA Experiment ID: 108473 Result: Down-regulated in Transcription
  misc_feature: MA Experiment 108473 PARAMETER Experiment Name: At_Drought_Flowers_cDNA_P Parameter: Timepoint (hr) Value: 7 d
  misc_feature: MA Experiment 108473 PARAMETER Experiment Name: At_Drought_Flowers_cDNA_P Parameter: Tissue Value: Flower
  misc_feature: MA Experiment 108473 PARAMETER Experiment Name: At_Drought_Flowers_cDNA_P Parameter: Treatment Value: Drought vs. No Drought
  misc_feature: MA Experiment ID: 108501 Result: Down-regulated in Transcription
  misc_feature: MA Experiment 108501 PARAMETER Experiment Name: At_ap2_floral_buds_cDNA_P Parameter: Plant Line Value: ap2 (Ler.)
  misc_feature: MA Experiment 108501 PARAMETER Experiment Name: At_ap2_floral_buds_cDNA_P Parameter: Tissue Value: Closed Flower
  misc_feature: MA Experiment ID: 108576 Result: Up-regulated in Transcription
  misc_feature: MA Experiment 108576 PARAMETER Experiment Name: At_42deg_Heat_cDNA_P Parameter: Temperature (deg C) Value: 42 vs. 22
  misc_feature: MA Experiment 108576 PARAMETER Experiment Name: At_42deg_Heat_cDNA_P Parameter: Timepoint (hr) Value: 1
  misc_feature: MA Experiment 108576 PARAMETER Experiment Name: At_42deg_Heat_cDNA_P Parameter: Tissue Value: Aerial
  misc_feature: MA Experiment ID: 108577 Result: Up-regulated in Transcription
  misc_feature: MA Experiment 108577 PARAMETER Experiment Name: At_42deg_Heat_cDNA_P Parameter: Temperature (deg C) Value: 42 vs. 22
  misc_feature: MA Experiment 108577 PARAMETER Experiment Name: At_42deg_Heat_cDNA_P Parameter: Timepoint (hr) Value: 6
  misc_feature: MA Experiment 108577 PARAMETER Experiment Name: At_42deg_Heat_cDNA_P Parameter: Tissue Value: Aerial
  misc_feature: MA Experiment ID: 20000093 Result: Up-regulated in Transcription
  misc_feature: MA Experiment 20000093 PARAMETER Experiment Name: At_42deg_Heat_cDNA_P Parameter: Temperature (deg C) Value: 42 vs. 22
  misc_feature: MA Experiment 20000093 PARAMETER Experiment Name: At_42deg_Heat_cDNA_P Parameter: Timepoint (hr) Value: 0.5
  misc_feature: MA Experiment 20000093 PARAMETER Experiment Name: At_42deg_Heat_cDNA_P Parameter: Tissue Value: Aerial
  misc_feature: MA Experiment ID: 20000112 Result: Up-regulated in Transcription
  misc_feature: MA Experiment 20000112 PARAMETER Experiment Name: At_42deg_Heat_cDNA_P Parameter: Temperature (deg C) Value: 42 vs. 22
  misc_feature: MA Experiment 20000112 PARAMETER Experiment Name: At_42deg_Heat_cDNA_P Parameter: Timepoint (hr) Value: 2
  misc_feature: MA Experiment 20000112 PARAMETER Experiment Name: At_42deg_Heat_cDNA_P Parameter: Tissue Value: Aerial
  misc_feature: MA Experiment ID: 20000144 Result: Up-regulated in Transcription
  misc_feature: MA Experiment 20000144 PARAMETER Experiment Name: At_42deg_Heat_cDNA_P Parameter: Temperature (deg C) Value: 42 vs. 22
  misc_feature: MA Experiment 20000144 PARAMETER Experiment Name: At_42deg_Heat_cDNA_P Parameter: Timepoint (hr) Value: 1
  misc_feature: MA Experiment 20000144 PARAMETER Experiment Name: At_42deg_Heat_cDNA_P Parameter: Tissue Value: Aerial
agatgaagttttctgcaggtctcttggactagagcagtgtcttcttttgttattagtttccatcttctgtcatttccttgttttatattccaaaaagagaaggtgaatctgatcttactttctggtccacctctaagcacttttaaatggagaagaaaggccagcatggtacatatgaatcaatgatgactcatcatccgatcctctgtatcattgctttatctgtacttttcatagcaatcgacccctttcacatgagtccaatcgggggtcgtgagttcaaacccgtgaagcatgaggttgctccatataaggaagtcatgggaagctggcctagagacaaccttagtcgactgggtaatcatgggaaactggagttcgtggaccaagtctttggtccagagtcattagagtttgatagtttaggtcgtggtccatacacagggttggctgatggaagagtggttagatggatgggtgaagcaatcggatgggagacattttcggtggtaacatcaaaatggtcagaggaagcttgtgtgagaggtgtggattcaacaacaaacaagcaatggaagcacgagaagctgtgtgggaggcctcttggactgagatttcataaagagacaggaaatttgtatattgcagacgcttactatggtctacttgtggttggtcctgaaggagggattgctacgcctttagctactcatgtggaaggaaagcctatactctttgccaatgaccttgacatccatagaaatggctccatcttcttcactgacaccagcaaaagatatgacagagcgaatcatttctttatattactggaaggagaatcaacaggaaggcttctaagatatgacccacctaccaaaacaacacacattgtgctggagggtttggcttttcccaatggaattcaactctctaaagaccaatctttcctcctcttcaccgaaacaaccaattgcagattggtgaagtactggctggagggtccaaagatgggtgaagtcgaggtggtggcagatctcccgggattcccagacaatgtaagaataaatgaagagggtcagttttgggttgcaattgattgttgcagaacaccggcacaagaggttcttacaaacaacccttggataagaagcatctactttcggttgccaataccgatgaagctgcttgcgaaaacgatggggatgagaatgtacactgtgatatcgagattcgacgaggaaggtaaagtcctggaggtgctcgaggatagacaagggaaggtaatgaagcttgtgagtgaagtgagggaagttcaagggaagctttggattggaacagtggctcataaccacattgccactctaccttatcctttgacaatgaatcaatgaaggactttgttgtgtagttcctgaactaaatcatctctctgtaacttaattatcttcgttttgattcaagttcctttggaccggtttgtcttttgtt

SEQ ID NO: 108077 - protein, 414 aa, Arabidopsis thaliana; identical to SEQ ID NO: 25219
  peptide (1)..(414): Ceres Seq. ID no. 13653157
  misc_feature (78)..(403): Pfam Name: Strictosidine synthase Pfam Description: Strictosidine synthase
  misc_feature (1)..(414): Homolog of NCBI NO: 28393615 NR Description: putative strictosidine synthase [Arabidopsis >gi|28973541|gb|AAO64095.1| putative strictosidine synthase
  misc_feature (1)..(414): Homolog of NCBI NO: 15231703 NR Description: strictosidine synthase-related [Arabidopsis
  misc_feature (17)..(410): Homolog of NCBI NO: 34902140 NR Description: putative male fertility protein [Zea mays] [Oryza
  misc_feature (1)..(410): Homolog of NCBI NO: 14028757 NR Description: male fertility protein [Zea mays]
  misc_feature (20)..(404): Homolog of NCBI NO: 22326950 NR Description: strictosidine synthase family [Arabidopsis
  misc_feature (22)..(409): Homolog of NCBI NO: 18390900 NR Description: strictosidine synthase-related [Arabidopsis >gi|16930481|gb|AAL31926.1|AF419594_1 At1g08470/T27G7_9 thaliana] >gi|17381182|gb|AAL36403.1| unknown protein
  misc_feature (23)..(408): Homolog of NCBI NO: 40538997 NR Description: putative strictosidine synthase [Oryza sativa
  misc_feature (22)..(272): Homolog of NCBI NO: 25335889 NR Description: protein T27G7.16 [imported] - Arabidopsis >gi|6664319|gb|AAF22901.1|AC006932_18 T27G7.16 [Arabidopsis
  misc_feature (277)..(409): Homolog of NCBI NO: 25335889 NR Description: protein T27G7.16 [imported] - Arabidopsis >gi|6664319|gb|AAF22901.1|AC006932_18 T27G7.16 [Arabidopsis
  misc_feature (84)..(398): Homolog of NCBI NO: 11280567 NR Description: hypothetical protein F24I3.110 - Arabidopsis >gi|6911873|emb|CAB72173.1| putative protein [Arabidopsis

SEQ ID NO: 108078 - protein, 402 aa, Arabidopsis thaliana; identical to SEQ ID NO: 25220
  peptide (1)..(402): Ceres Seq. ID no. 13653158
  misc_feature (66)..(391): Pfam Name: Strictosidine synthase Pfam Description: Strictosidine synthase
  misc_feature (1)..(402): Homolog of NCBI NO: 28393615 NR Description: putative strictosidine synthase [Arabidopsis >gi|28973541|gb|AAO64095.1| putative strictosidine synthase
  misc_feature (1)..(402): Homolog of NCBI NO: 15231703 NR Description: strictosidine synthase-related [Arabidopsis
  misc_feature (5)..(398): Homolog of NCBI NO: 34902140 NR Description: putative male fertility protein [Zea mays] [Oryza
  misc_feature (1)..(398): Homolog of NCBI NO: 14028757 NR Description: male fertility protein [Zea mays]
  misc_feature (8)..(392): Homolog of NCBI NO: 22326950 NR Description: strictosidine synthase family [Arabidopsis
  misc_feature (10)..(397): Homolog of NCBI NO: 18390900 NR Description: strictosidine synthase-related [Arabidopsis >gi|16930481|gb|AAL31926.1|AF419594_1 At1g08470/T27G7_9 thaliana] >gi|17381182|gb|AAL36403.1| unknown protein
  misc_feature (11)..(396): Homolog of NCBI NO: 40538997 NR Description: putative strictosidine synthase [Oryza sativa
  misc_feature (10)..(260): Homolog of NCBI NO: 25335889 NR Description: protein T27G7.16 [imported] - Arabidopsis >gi|6664319|gb|AAF22901.1|AC006932_18 T27G7.16 [Arabidopsis
  misc_feature (265)..(397): Homolog of NCBI NO: 25335889 NR Description: protein T27G7.16 [imported] - Arabidopsis >gi|6664319|gb|AAF22901.1|AC006932_18 T27G7.16 [Arabidopsis
  misc_feature (72)..(386): Homolog of NCBI NO: 11280567 NR Description: hypothetical protein F24I3.110 - Arabidopsis >gi|6911873|emb|CAB72173.1| putative protein [Arabidopsis

SEQ ID NO: 108079 - protein, 401 aa, Arabidopsis thaliana; identical to SEQ ID NO: 25221
  peptide (1)..(401): Ceres Seq. ID no. 13653159
  misc_feature (65)..(390): Pfam Name: Strictosidine synthase Pfam Description: Strictosidine synthase
  misc_feature (1)..(401): Homolog of NCBI NO: 28393615 NR Description: putative strictosidine synthase [Arabidopsis >gi|28973541|gb|AAO64095.1| putative strictosidine synthase
  misc_feature (1)..(401): Homolog of NCBI NO: 15231703 NR Description: strictosidine synthase-related [Arabidopsis
  misc_feature (4)..(397): Homolog of NCBI NO: 34902140 NR Description: putative male fertility protein [Zea mays] [Oryza
  misc_feature (1)..(397): Homolog of NCBI NO: 14028757 NR Description: male fertility protein [Zea mays]
  misc_feature (7)..(391): Homolog of NCBI NO: 22326950 NR Description: strictosidine synthase family [Arabidopsis
  misc_feature (9)..(396): Homolog of NCBI NO: 18390900 NR Description: strictosidine synthase-related [Arabidopsis >gi|16930481|gb|AAL31926.1|AF419594_1 At1g08470/T27G7_9 thaliana] >gi|17381182|gb|AAL36403.1| unknown protein
  misc_feature (10)..(395): Homolog of NCBI NO: 40538997 NR Description: putative strictosidine synthase [Oryza sativa
  misc_feature (9)..(259): Homolog of NCBI NO: 25335889 NR Description: protein T27G7.16 [imported] - Arabidopsis >gi|6664319|gb|AAF22901.1|AC006932_18 T27G7.16 [Arabidopsis
  misc_feature (264)..(396): Homolog of NCBI NO: 25335889 NR Description: protein T27G7.16 [imported] - Arabidopsis >gi|6664319|gb|AAF22901.1|AC006932_18 T27G7.16 [Arabidopsis
  misc_feature (71)..(385): Homolog of NCBI NO: 11280567 NR Description: hypothetical protein F24I3.110 - Arabidopsis >gi|6911873|emb|CAB72173.1| putative protein [Arabidopsis

SEQ ID NO: 108080 - DNA, 823 bp, Arabidopsis thaliana
  misc_feature (1)..(823): Ceres Seq. ID no. 13653171
  misc_feature: MA Experiment ID: 20000264 Result: Down-regulated in Transcription
  misc_feature: MA Experiment 20000264 PARAMETER Experiment Name: At_Open_Flower_P Parameter: Age (day) Value: 21
  misc_feature: MA Experiment 20000264 PARAMETER Experiment Name: At_Open_Flower_P Parameter: Plant Line Value: WS
  misc_feature: MA Experiment 20000264 PARAMETER Experiment Name: At_Open_Flower_P Parameter: Tissue Value: Open Flower vs. Whole Plant
  misc_feature: MA Experiment ID: 20000439 Result: Down-regulated in Transcription
  misc_feature: MA Experiment 20000439 PARAMETER Experiment Name: At_Roots__P Parameter: Age (day) Value: 14 vs. 21
  misc_feature: MA Experiment 20000439 PARAMETER Experiment Name: At_Roots__P Parameter: Organism Value: A. thaliana
  misc_feature: MA Experiment 20000439 PARAMETER Experiment Name: At_Roots__P Parameter: Tissue Value: Roots vs. Whole Plant
  misc_feature: MA Experiment ID: 20000794 Result: Down-regulated in Transcription
  misc_feature: MA Experiment 20000794 PARAMETER Experiment Name: At_Petals_P Parameter: Age (day) Value: 23-25 days
  misc_feature: MA Experiment 20000794 PARAMETER Experiment Name: At_Petals_P Parameter: Plant Line Value: WS
  misc_feature: MA Experiment 20000794 PARAMETER Experiment Name: At_Petals_P Parameter: Tissue Value: Petals vs. Whole plant
accgcttaccagttactaacttgagcttcagagatcatcatcatcatcacttcctctctctgaagaaaacacaatttggagttttctaatcttcattccaatggaagggaactctttacccgaagaagatgtagagatgatggagaattcagatgtaatgaagacagtcacagatgaagcttctccaatggtggagccgttcattggtatggagtttgaatcagaagaggctgcaaagtctttctatgacaattacgctacatgcatgggtttcgttatgcgagtggatgctttcaggaggtcaatgcgagatgggactgtggtgtggcgcagactcgtgtgtaataaagaaggatttcgtaggtcgagacctcggagaagcgagagtagaaagcctcgggctataacaagagaagggtgtaaagctctgattgttgtgaaaagagagaaatccggaacatggcttgttactaaatttgagaaagagcataatcatcctctcttgcctctctcccctaatgttcgccggaattttcagctccctcaaacaccggacgagaaagacgcaaagattagggagctgagtgcagagctgagccgagagagaaggcgttgtactgctttgcaacagcagcttgatatggtccttaaggagatggaagaacattccaaccatctcaccattaacatcaatagtgttatccaaagtgttagagacattgagtccaatactttcaccaaacaacaaacataatgcttcatttctgttcataaaagcttaacatcaaattctcataatccaatgttctgtatcttgtgattg

SEQ ID NO: 108081 - protein, 217 aa, Arabidopsis thaliana
  peptide (1)..(217): Ceres Seq. ID no. 13653172
  misc_feature (47)..(211): Pfam Name: FAR1 family Pfam Description: FAR1 family
  misc_feature (1)..(217): Homolog of NCBI NO: 30680320 NR Description: expressed protein [Arabidopsis thaliana] unknown protein [Arabidopsis thaliana]
  misc_feature (1)..(217): Homolog of NCBI NO: 6041845 NR Description: hypothetical protein [Arabidopsis thaliana]
  misc_feature (6)..(208): Homolog of NCBI NO: 30689328 NR Description: expressed protein [Arabidopsis thaliana] unknown protein [Arabidopsis thaliana]
  misc_feature (3)..(208): Homolog of NCBI NO: 11358055 NR Description: hypothetical protein T16L24.20 - Arabidopsis >gi|6996283|emb|CAB75444.1| putative protein [Arabidopsis
  misc_feature (3)..(208): Homolog of NCBI NO: 18411179 NR Description: expressed protein [Arabidopsis thaliana] AT3g59470/T16L24_20 [Arabidopsis thaliana]
  misc_feature (48)..(208): Homolog of NCBI NO: 25370598 NR Description: hypothetical protein At2g43280 [imported] - thaliana >gi|2289005|gb|AAB64334.1| hypothetical protein thaliana] >gi|20197151|gb|AAM14941.1| hypothetical protein
  misc_feature (31)..(136): Homolog of NCBI NO: 15233732 NR Description: expressed protein [Arabidopsis thaliana]
  misc_feature (148)..(206): Homolog of NCBI NO: 15233732 NR Description: expressed protein [Arabidopsis thaliana]
  misc_feature (32)..(214): Homolog of NCBI NO: 15235502 NR Description: hypothetical protein [Arabidopsis thaliana]
  misc_feature (32)..(143): Homolog of NCBI NO: 28301931 NR Description: putative transposase [Oryza sativa (japonica
MEGNSLPEEDVEMMENSDVMKTVTDEASPMVEPFIGMEFESEEAAKSFYDNYATCMGFVMRVDAFRRSMRDGTVVWRRLVCNKEGFRRSRPRRSESRKPRAITREGCKALIVVKREKSGTWLVTKFEKEHNHPLLPLSPNVRRNFQLPQTPDEKDAKIRELSAELSRERRRCTALQQQLDMVLKEMEEHSNHLTININSVIQSVRDIESNTFTKQQT

SEQ ID NO: 108082 - protein, 205 aa, Arabidopsis thaliana; identical to SEQ ID NO: 104385
  peptide (1)..(205): Ceres Seq. ID no. 13653173
  misc_feature (35)..(199): Pfam Name: FAR1 family Pfam Description: FAR1 family
  misc_feature (1)..(205): Homolog of NCBI NO: 30680320 NR Description: expressed protein [Arabidopsis thaliana] unknown protein [Arabidopsis thaliana]
  misc_feature (1)..(205): Homolog of NCBI NO: 6041845 NR Description: hypothetical protein [Arabidopsis thaliana]
  misc_feature (1)..(196): Homolog of NCBI NO: 30689328 NR Description: expressed protein [Arabidopsis thaliana] unknown protein [Arabidopsis thaliana]
  misc_feature (1)..(196): Homolog of NCBI NO: 11358055 NR Description: hypothetical protein T16L24.20 - Arabidopsis >gi|6996283|emb|CAB75444.1| putative protein [Arabidopsis
  misc_feature (1)..(196): Homolog of NCBI NO: 18411179 NR Description: expressed protein [Arabidopsis thaliana] AT3g59470/T16L24_20 [Arabidopsis thaliana]
  misc_feature (36)..(196): Homolog of NCBI NO: 25370598 NR Description: hypothetical protein At2g43280 [imported] - thaliana >gi|2289005|gb|AAB64334.1| hypothetical protein thaliana] >gi|20197151|gb|AAM14941.1| hypothetical protein
  misc_feature (19)..(124): Homolog of NCBI NO: 15233732 NR Description: expressed protein [Arabidopsis thaliana]
  misc_feature (136)..(194): Homolog of NCBI NO: 15233732 NR Description: expressed protein [Arabidopsis thaliana]
  misc_feature (20)..(202): Homolog of NCBI NO: 15235502 NR Description: hypothetical protein [Arabidopsis thaliana]
  misc_feature (20)..(131): Homolog of NCBI NO: 28301931 NR Description: putative transposase [Oryza sativa (japonica

SEQ ID NO: 108083 - protein, 204 aa, Arabidopsis thaliana; identical to SEQ ID NO: 104386
  peptide (1)..(204): Ceres Seq. ID no. 13653174
  misc_feature (34)..(198): Pfam Name: FAR1 family Pfam Description: FAR1 family
  misc_feature (1)..(204): Homolog of NCBI NO: 30680320 NR Description: expressed protein [Arabidopsis thaliana] unknown protein [Arabidopsis thaliana]
  misc_feature (1)..(204): Homolog of NCBI NO: 6041845 NR Description: hypothetical protein [Arabidopsis thaliana]
  misc_feature (1)..(195): Homolog of NCBI NO: 30689328 NR Description: expressed protein [Arabidopsis thaliana] unknown protein [Arabidopsis thaliana]
  misc_feature (1)..(195): Homolog of NCBI NO: 11358055 NR Description: hypothetical protein T16L24.20 - Arabidopsis >gi|6996283|emb|CAB75444.1| putative protein [Arabidopsis
  misc_feature (1)..(195): Homolog of NCBI NO: 18411179 NR Description: expressed protein [Arabidopsis thaliana] AT3g59470/T16L24_20 [Arabidopsis thaliana]
  misc_feature (35)..(195): Homolog of NCBI NO: 25370598 NR Description: hypothetical protein At2g43280 [imported] - thaliana >gi|2289005|gb|AAB64334.1| hypothetical protein thaliana] >gi|20197151|gb|AAM14941.1| hypothetical protein
  misc_feature (18)..(123): Homolog of NCBI NO: 15233732 NR Description: expressed protein [Arabidopsis thaliana]
  misc_feature (135)..(193): Homolog of NCBI NO: 15233732 NR Description: expressed protein [Arabidopsis thaliana]
  misc_feature (19)..(201): Homolog of NCBI NO: 15235502 NR Description: hypothetical protein [Arabidopsis thaliana]
  misc_feature (19)..(130): Homolog of NCBI NO: 28301931 NR Description: putative transposase [Oryza sativa (japonica

SEQ ID NO: 108084 - DNA, 1012 bp, Arabidopsis thaliana
  misc_feature (1)..(1012): Ceres Seq. ID no. 13653175
  misc_feature: MA Experiment ID: 20000347 Result: Up-regulated in Transcription
  misc_feature: MA Experiment 20000347 PARAMETER Experiment Name: At_2mM_SA_Sub_P Parameter: Age (day) Value: 14
  misc_feature: MA Experiment 20000347 PARAMETER Experiment Name: At_2mM_SA_Sub_P Parameter: Organism Value: A. thaliana
  misc_feature: MA Experiment 20000347 PARAMETER Experiment Name: At_2mM_SA_Sub_P Parameter: Plant Line Value: WS
  misc_feature: MA Experiment 20000347 PARAMETER Experiment Name: At_2mM_SA_Sub_P Parameter: Timepoint (hr) Value: 6
  misc_feature: MA Experiment 20000347 PARAMETER Experiment Name: At_2mM_SA_Sub_P Parameter: Tissue Value: Aerial
  misc_feature: MA Experiment 20000347 PARAMETER Experiment Name: At_2mM_SA_Sub_P Parameter: Treatment Value: 2mM SA vs. No Treatment
  misc_feature: MA Experiment ID: 20000348 Result: Up-regulated in Transcription
  misc_feature: MA Experiment 20000348 PARAMETER Experiment Name: At_100uM_ABA_Sub_P Parameter: Age (day) Value: 14
  misc_feature: MA Experiment 20000348 PARAMETER Experiment Name: At_100uM_ABA_Sub_P Parameter: Organism Value: A. thaliana
  misc_feature: MA Experiment 20000348 PARAMETER Experiment Name: At_100uM_ABA_Sub_P Parameter: Plant Line Value: WS
  misc_feature: MA Experiment 20000348 PARAMETER Experiment Name: At_100uM_ABA_Sub_P Parameter: Timepoint (hr) Value: 1
  misc_feature: MA Experiment 20000348 PARAMETER Experiment Name: At_100uM_ABA_Sub_P Parameter: Tissue Value: Aerial
  misc_feature: MA Experiment 20000348 PARAMETER Experiment Name: At_100uM_ABA_Sub_P Parameter: Treatment Value: 100uM ABA vs. No Treatment
  misc_feature: MA Experiment ID: 20000440 Result: Up-regulated in Transcription
  misc_feature: MA Experiment 20000440 PARAMETER Experiment Name: At_Closed-Flower__Sub_P Parameter: Tissue Value: Closed Flower vs. Whole Plant
gtcacgaaggtgttaattagcatgaaagagagagaaataatcgtcgttgaccattgaccataacttagtcagtcatatatataaaaatccaaccgcccactattgttcccctattcacaaggtccttgctttctcagacgtaaacaacaagaaattatattaacacaacaacaacaacaaaaagaccaaccctatttattcatattttctcttatatgcaactctcaaagaatccgatcaaacaaacgagaaatcgagagaagaattacaccgacgatttcaccatgaagagaagatggttgttcgatggagagtgcgataagagaaggttatatcaaaacggatgaggatttcttgaaagaaggttcgagaggtggcgcgtgttgtgtaaccgctttgatatcgaaaggcgagcttgcggtttcgaatgcaggcgactgccgggctgttatgagtcgtggtggaaccgcggaagctctcacttccgatcataatccttctcaagcaaatgagctcaaaaggattgaagcattgggtggttatgttgactgctgcaacggcgtttggagaattcaagggacattagcagtctcacgaggaattggagaccggtacctcaaggagtgggtgatagctgaaccggaaaccagaacattacggattaaaccggagttcgaattcttgatcttagcatctgatggcctgtgggacaaggtaacgaaccaagaggccgtcgatgtcgttcgaccgtactgcgtaggcgtagagaatccaatgacactttctgcttgcaagaaactggctgagctatcggttaagagaggctctttggatgatataagtctaattataattcagctacaaaactttcttccatgatatattaacacatagtacattagctaaacttaattaatttcattaggtcgtagttattaataaattttgttcggtattttacatgtaaatacataaaggtttggaaaataattaatttattgttattgttctt

SEQ ID NO: 108085 - protein, 190 aa, Arabidopsis thaliana
  peptide (1)..(190): Ceres Seq. ID no. 13653176
  misc_feature (1)..(178): Pfam Name: Protein phosphatase 2C Pfam Description: Protein phosphatase 2C
  misc_feature (1)..(190): Homolog of NCBI NO: 15225656 NR Description: protein phosphatase 2C (PP2C), putative thaliana] >gi|25352216|pir||C84826 protein phosphatase 2C
  misc_feature (1)..(190): Homolog of NCBI NO: 28393269 NR Description: putative protein phosphatase 2C (PP2C) thaliana] >gi|28827530|gb|AAO50609.1| putative protein
  misc_feature (1)..(188): Homolog of NCBI NO: 30013681 NR Description: Avr9/Cf-9 rapidly elicited protein 284 [Nicotiana
  misc_feature (1)..(189): Homolog of NCBI NO: 7488754 NR Description: protein phosphatase 2C - alfalfa
  misc_feature (1)..(189): Homolog of NCBI NO: 15227687 NR Description: protein phosphatase 2C (PP2C), putative thaliana] >gi|7486043|pir||T02483 probable protein phosphatase 2C
  misc_feature (1)..(185): Homolog of NCBI NO: 15222312 NR Description: protein phosphatase 2C (PP2C), putative thaliana] >gi|20258780|gb|AAM13912.1| putative protein
  misc_feature (1)..(188): Homolog of NCBI NO: 6478146 NR Description: putative serine/threonine phosphatase type 2c
  misc_feature (77)..(185): Homolog of NCBI NO: 25352225 NR Description: hypothetical protein [imported] - Arabidopsis >gi|8954030|gb|AAF82204.1|AC067971_12 Contains similarity to phosphatase 2C from Arabidopsis thaliana gb|AF085279. It contains
  misc_feature (1)..(75): Homolog of NCBI NO: 25352225 NR Description: hypothetical protein [imported] - Arabidopsis >gi|8954030|gb|AAF82204.1|AC067971_12 Contains similarity to phosphatase 2C from Arabidopsis thaliana gb|AF085279. It contains
  misc_feature (1)..(152): Homolog of NCBI NO: 23506609 NR Description: putative serine/threonine phosphatase [Leymus
MESAIREGYIKTDEDFLKEGSRGGACCVTALISKGELAVSNAGDCRAVMSRGGTAEALTSDHNPSQANELKRIEALGGYVDCCNGVWRIQGTLAVSRGIGDRYLKEWVIAEPETRTLRIKPEFEFLILASDGLWDKVTNQEAVDVVRPYCVGVENPMTLSACKKLAELSVKRGSLDDISLIIIQLQNFLP

SEQ ID NO: 108086 - protein, 142 aa, Arabidopsis thaliana
  peptide (1)..(142): Ceres Seq. ID no. 13653177
  misc_feature (1)..(130): Pfam Name: Protein phosphatase 2C Pfam Description: Protein phosphatase 2C
  misc_feature (1)..(142): Homolog of NCBI NO: 15225656 NR Description: protein phosphatase 2C (PP2C), putative thaliana] >gi|25352216|pir||C84826 protein phosphatase 2C
  misc_feature (1)..(142): Homolog of NCBI NO: 28393269 NR Description: putative protein phosphatase 2C (PP2C) thaliana] >gi|28827530|gb|AAO50609.1| putative protein
  misc_feature (1)..(140): Homolog of NCBI NO: 30013681 NR Description: Avr9/Cf-9 rapidly elicited protein 284 [Nicotiana
  misc_feature (1)..(141): Homolog of NCBI NO: 7488754 NR Description: protein phosphatase 2C - alfalfa
  misc_feature (1)..(141): Homolog of NCBI NO: 15227687 NR Description: protein phosphatase 2C (PP2C), putative thaliana] >gi|7486043|pir||T02483 probable protein phosphatase 2C
  misc_feature (1)..(137): Homolog of NCBI NO: 15222312 NR Description: protein phosphatase 2C (PP2C), putative thaliana] >gi|20258780|gb|AAM13912.1| putative protein
  misc_feature (1)..(140): Homolog of NCBI NO: 6478146 NR Description: putative serine/threonine phosphatase type 2c
  misc_feature (29)..(137): Homolog of NCBI NO: 25352225 NR Description: hypothetical protein [imported] - Arabidopsis >gi|8954030|gb|AAF82204.1|AC067971_12 Contains similarity to phosphatase 2C from Arabidopsis thaliana gb|AF085279. It contains
  misc_feature (1)..(27): Homolog of NCBI NO: 25352225 NR Description: hypothetical protein [imported] - Arabidopsis >gi|8954030|gb|AAF82204.1|AC067971_12 Contains similarity to phosphatase 2C from Arabidopsis thaliana gb|AF085279. It contains
  misc_feature (1)..(104): Homolog of NCBI NO: 23506609 NR Description: putative serine/threonine phosphatase [Leymus
MSRGGTAEALTSDHNPSQANELKRIEALGGYVDCCNGVWRIQGTLAVSRGIGDRYLKEWVIAEPETRTLRIKPEFEFLILASDGLWDKVTNQEAVDVVRPYCVGVENPMTLSACKKLAELSVKRGSLDDISLIIIQLQNFLP

SEQ ID NO: 108087 - DNA, 1492 bp, Arabidopsis thaliana
  misc_feature (1)..(1492): Ceres Seq. ID no. 13653178
  misc_feature: MA Experiment ID: 20000315 Result: Down-regulated in Transcription
  misc_feature: MA Experiment 20000315 PARAMETER Experiment Name: At_14day_Shoots-Roots_Sub_P Parameter: Age (day) Value: 14
  misc_feature: MA Experiment 20000315 PARAMETER Experiment Name: At_14day_Shoots-Roots_Sub_P Parameter: Organism Value: A. thaliana
  misc_feature: MA Experiment 20000315 PARAMETER Experiment Name: At_14day_Shoots-Roots_Sub_P Parameter: Plant Line Value: WS
  misc_feature: MA Experiment 20000315 PARAMETER Experiment Name: At_14day_Shoots-Roots_Sub_P Parameter: Tissue Value: Shoots vs. Whole Plant
  misc_feature: MA Experiment ID: 20000327 Result: Down-regulated in Transcription
  misc_feature: MA Experiment 20000327 PARAMETER Experiment Name: At_42deg_Heat_Sub_P Parameter: Age (day) Value: 14
  misc_feature: MA Experiment 20000327 PARAMETER Experiment Name: At_42deg_Heat_Sub_P Parameter: Organism Value: A. thaliana
  misc_feature: MA Experiment 20000327 PARAMETER Experiment Name: At_42deg_Heat_Sub_P Parameter: Plant Line Value: WS
  misc_feature: MA Experiment 20000327 PARAMETER Experiment Name: At_42deg_Heat_Sub_P Parameter: Temperature (deg C) Value: 42 vs. 22
  misc_feature: MA Experiment 20000327 PARAMETER Experiment Name: At_42deg_Heat_Sub_P Parameter: Timepoint (hr) Value: 1
  misc_feature: MA Experiment 20000327 PARAMETER Experiment Name: At_42deg_Heat_Sub_P Parameter: Tissue Value: Aerial
  misc_feature: MA Experiment ID: 20000328 Result: Down-regulated in Transcription
  misc_feature: MA Experiment 20000328 PARAMETER Experiment Name: At_42deg_Heat_Sub_P Parameter: Age (day) Value: 14
  misc_feature: MA Experiment 20000328 PARAMETER Experiment Name: At_42deg_Heat_Sub_P Parameter: Organism Value: A. thaliana
  misc_feature: MA Experiment 20000328 PARAMETER Experiment Name: At_42deg_Heat_Sub_P Parameter: Plant Line Value: WS
  misc_feature: MA Experiment 20000328 PARAMETER Experiment Name: At_42deg_Heat_Sub_P Parameter: Temperature (deg C) Value: 42 vs. 22
  misc_feature: MA Experiment 20000328 PARAMETER Experiment Name: At_42deg_Heat_Sub_P Parameter: Timepoint (hr) Value: 6
  misc_feature: MA Experiment 20000328 PARAMETER Experiment Name: At_42deg_Heat_Sub_P Parameter: Tissue Value: Aerial
  misc_feature: MA Experiment ID: 20000348 Result: Up-regulated in Transcription
  misc_feature: MA Experiment 20000348 PARAMETER Experiment Name: At_100uM_ABA_Sub_P Parameter: Age (day) Value: 14
  misc_feature: MA Experiment 20000348 PARAMETER Experiment Name: At_100uM_ABA_Sub_P Parameter: Organism Value: A. thaliana
  misc_feature: MA Experiment 20000348 PARAMETER Experiment Name: At_100uM_ABA_Sub_P Parameter: Plant Line Value: WS
  misc_feature: MA Experiment 20000348 PARAMETER Experiment Name: At_100uM_ABA_Sub_P Parameter: Timepoint (hr) Value: 1
  misc_feature: MA Experiment 20000348 PARAMETER Experiment Name: At_100uM_ABA_Sub_P Parameter: Tissue Value: Aerial
  misc_feature: MA Experiment 20000348 PARAMETER Experiment Name: At_100uM_ABA_Sub_P Parameter: Treatment Value: 100uM ABA vs. No Treatment
  misc_feature: MA Experiment ID: 20000349 Result: Up-regulated in Transcription
  misc_feature: MA Experiment 20000349 PARAMETER Experiment Name: At_100uM_ABA_Sub_P Parameter: Age (day) Value: 14
  misc_feature: MA Experiment 20000349 PARAMETER Experiment Name: At_100uM_ABA_Sub_P Parameter: Organism Value: A. thaliana
  misc_feature: MA Experiment 20000349 PARAMETER Experiment Name: At_100uM_ABA_Sub_P Parameter: Plant Line Value: WS
  misc_feature: MA Experiment 20000349 PARAMETER Experiment Name: At_100uM_ABA_Sub_P Parameter: Timepoint (hr) Value: 6
  misc_feature: MA Experiment 20000349 PARAMETER Experiment Name: At_100uM_ABA_Sub_P Parameter: Tissue Value: Aerial
  misc_feature: MA Experiment 20000349 PARAMETER Experiment Name: At_100uM_ABA_Sub_P Parameter: Treatment Value: 100uM ABA vs. No Treatment
  misc_feature: MA Experiment ID: 20000355 Result: Up-regulated in Transcription
  misc_feature: MA Experiment 20000355 PARAMETER Experiment Name: At_Siliques_Sub_P Parameter: Age (day) Value: 21
  misc_feature: MA Experiment 20000355 PARAMETER Experiment Name: At_Siliques_Sub_P Parameter: Organism Value: A. thaliana
  misc_feature: MA Experiment 20000355 PARAMETER Experiment Name: At_Siliques_Sub_P Parameter: Plant Line Value: WS
  misc_feature: MA Experiment 20000355 PARAMETER Experiment Name: At_Siliques_Sub_P Parameter: Tissue Value: Less Than 5mm Siliques vs. Whole Plant
  misc_feature: MA Experiment ID: 20001807 Result: Down-regulated in Transcription
  misc_feature: MA Experiment 20001807 PARAMETER Experiment Name: At_50mM_NH4NO3_L-to-H_Sub_P Parameter: Timepoint (hr) Value: 6
  misc_feature: MA Experiment 20001807 PARAMETER Experiment Name: At_50mM_NH4NO3_L-to-H_Sub_P Parameter: Tissue Value: Leaf
  misc_feature: MA Experiment 20001807 PARAMETER Experiment Name: At_50mM_NH4NO3_L-to-H_Sub_P Parameter: Treatment Value: 50mM NH4NO3 vs 100mM Mannitol
  misc_feature: Pfam Name: UDPGT Pfam Description: UDP-glucoronosyl and UDP-glucosyl transferase
gagagaaaaaagcagatacttctttttgtgttcttgaattacttctttacttttgtgttttcacaatttgagaaacgaaatggagccaaagtttcatgcttttatgtttccatggtttgcttttggtcatatgattccatttctacatcttgcaaacaaactagctgaaaaaggtcaccgagttactttcttgctacctaagaaagcacaaaaacagttggaacatcacaacttgttcccagacagtattgtctttcaccctctcacagttcctcctgtcaatggcctccctgctggtgccgagacaacctcggatatccccatctcgttggacaacctcttgtccaaagccttggatctcactcgcgatcaggttgaagctgcggttcgtgctttgagacctgacttgatctttttcgattttgctcaatggattccagatatggctaaagaacatatgatcaagagtgtgagttacatcattgtatctgcgacaacaatagctcatacacatgtccctggaggtaaattaggtgttcgcccaccgggttatccgtcatcaaaggtgatgttccgtgaaaacgatgttcatgccttagcaaccttatcgatattttacaagagactgtatcatcagatcactacaggtcttaagagctgtgatgtcattgcattgaggacttgcaaagaagtcgaagacacaagtaaaccactagaagaacgctggaatcattttctaagcgggttcgcgccgaagtcagtagtgttttgttcacctggcagccaagtaattcttgagaaagatcaattccaagaactctgtttagggatggagctaacaggtttaccatttcttttagcggtaaagccaccaagaggatcatcaacggtccaagaagggttaccagaagggttcgaggagcgggtgaaagatcgtggtgttgtttggggaggatgggtgcaacaacctttgatattggctcatccatcaataggttgctttgtgaaccattgtggtcccggaacaatatgggagtctttggtgagtgattgccaaatggttttgattccatttttaagtgatcaagttctcttcacaagattgatgaccgaggaattcgaggtctctgtagaagtgccgaggaaaaaaacaggatggttttcaaaggagagcttgagcaatgctatcaaatctgtgatggataaagacagtgacattgggaagttagtgaggagtaaccacaccaaattgaaggagattttagttagtcctggattattgactggttacgttgatcactttgtagagggattgcaagagaatttgatttgattatgttgaagactggtcatcatatttaagtaaggttgggacgcttttattttatttttaaataaattccgattacgataataatttgcaaagtataataaatctgaaaataattgtaattacacaatatatttctcaaatttatagtgacattatatt

SEQ ID NO: 108088 - protein, 417 aa, Arabidopsis thaliana
  peptide (1)..(417): Ceres Seq. ID no. 13653179
  misc_feature: Pfam Name: UDPGT Pfam Description: UDP-glucoronosyl and UDP-glucosyl transferase
  misc_feature (1)..(417): Homolog of NCBI NO: 28393204 NR Description: unknown protein [Arabidopsis thaliana]
  misc_feature (207)..(417): Homolog of NCBI NO: 15233903 NR Description: glycosyltransferase family [Arabidopsis thaliana]
  misc_feature (1)..(206): Homolog of NCBI NO: 15233903 NR Description: glycosyltransferase family [Arabidopsis thaliana]
  misc_feature (192)..(417): Homolog of NCBI NO: 15227766 NR Description: glycosyltransferase family [Arabidopsis thaliana]
  misc_feature (1)..(206): Homolog of NCBI NO: 15227766 NR Description: glycosyltransferase family [Arabidopsis thaliana]
  misc_feature (207)..(417): Homolog of NCBI NO: 15239523 NR Description: glycosyltransferase family [Arabidopsis thaliana]
  misc_feature (1)..(206): Homolog of NCBI NO: 15239523 NR Description: glycosyltransferase family [Arabidopsis thaliana]
  misc_feature (207)..(417): Homolog of NCBI NO: 15217796 NR Description: glycosyltransferase family [Arabidopsis thaliana]
  misc_feature (1)..(206): Homolog of NCBI NO: 15217796 NR Description: glycosyltransferase family [Arabidopsis thaliana]
  misc_feature (1)..(222): Homolog of NCBI NO: 15217773 NR Description: glycosyltransferase family [Arabidopsis thaliana]
MEPKFHAFMFPWFAFGHMIPFLHLANKLAEKGHRVTFLLPKKAQKQLEHHNLFPDSIVFHPLTVPPVNGLPAGAETTSDIPISLDNLLSKALDLTRDQVEAAVRALRPDLIFFDFAQWIPDMAKEHMIKSVSYIIVSATTIAHTHVPGGKLGVRPPGYPSSKVMFRENDVHALATLSIFYKRLYHQITTGLKSCDVIALRTCKEVEDTSKPLEERWNHFLSGFAPKSVVFCSPGSQVILEKDQFQELCLGMELTGLPFLLAVKPPRGSSTVQEGLPEGFEERVKDRGVVWGGWVQQPLILAHPSIGCFVNHCGPGTIWESLVSDCQMVLIPFLSDQVLFTRLMTEEFEVSVEVPRKKTGWFSKESLSNAIKSVMDKDSDIGKLVRSNHTKLKEILVSPGLLTGYVDHFVEGLQENLI

SEQ ID NO: 108089 - protein, 409 aa, Arabidopsis thaliana
  peptide (1)..(409): Ceres Seq. ID no. 13653180
  misc_feature: Pfam Name: UDPGT Pfam Description: UDP-glucoronosyl and UDP-glucosyl transferase
  misc_feature (1)..(409): Homolog of NCBI NO: 28393204 NR Description: unknown protein [Arabidopsis thaliana]
  misc_feature (199)..(409): Homolog of NCBI NO: 15233903 NR Description: glycosyltransferase family [Arabidopsis thaliana]
  misc_feature (1)..(198): Homolog of NCBI NO: 15233903 NR Description: glycosyltransferase family [Arabidopsis thaliana]
  misc_feature (184)..(409): Homolog of NCBI NO: 15227766 NR Description: glycosyltransferase family [Arabidopsis thaliana]
  misc_feature (1)..(198): Homolog of NCBI NO: 15227766 NR Description: glycosyltransferase family [Arabidopsis thaliana]
  misc_feature (199)..(409): Homolog of NCBI NO: 15239523 NR Description: glycosyltransferase family [Arabidopsis thaliana]
  misc_feature (1)..(198): Homolog of NCBI NO: 15239523 NR Description: glycosyltransferase family [Arabidopsis thaliana]
  misc_feature (199)..(409): Homolog of NCBI NO: 15217796 NR Description: glycosyltransferase family [Arabidopsis thaliana]
  misc_feature (1)..(198): Homolog of NCBI NO: 15217796 NR Description: glycosyltransferase family [Arabidopsis thaliana]
  misc_feature (1)..(214): Homolog of NCBI NO: 15217773 NR Description: glycosyltransferase family [Arabidopsis thaliana]
MFPWFAFGHMIPFLHLANKLAEKGHRVTFLLPKKAQKQLEHHNLFPDSIVFHPLTVPPVNGLPAGAETTSDIPISLDNLLSKALDLTRDQVEAAVRALRPDLIFFDFAQWIPDMAKEHMIKSVSYIIVSATTIAHTHVPGGKLGVRPPGYPSSKVMFRENDVHALATLSIFYKRLYHQITTGLKSCDVIALRTCKEVEDTSKPLEERWNHFLSGFAPKSVVFCSPGSQVILEKDQFQELCLGMELTGLPFLLAVKPPRGSSTVQEGLPEGFEERVKDRGVVWGGWVQQPLILAHPSIGCFVNHCGPGTIWESLVSDCQMVLIPFLSDQVLFTRLMTEEFEVSVEVPRKKTGWFSKESLSNAIKSVMDKDSDIGKLVRSNHTKLKEILVSPGLLTGYVDHFVEGLQENLI

SEQ ID NO: 108090 - protein, 400 aa, Arabidopsis thaliana
  peptide (1)..(400): Ceres Seq. ID no. 13653181
  misc_feature: Pfam Name: UDPGT Pfam Description: UDP-glucoronosyl and UDP-glucosyl transferase
  misc_feature (1)..(400): Homolog of NCBI NO: 28393204 NR Description: unknown protein [Arabidopsis thaliana]
  misc_feature (190)..(400): Homolog of NCBI NO: 15233903 NR Description: glycosyltransferase family [Arabidopsis thaliana]
  misc_feature (1)..(189): Homolog of NCBI NO: 15233903 NR Description: glycosyltransferase family [Arabidopsis thaliana]
  misc_feature (175)..(400): Homolog of NCBI NO: 15227766 NR Description: glycosyltransferase family [Arabidopsis thaliana]
  misc_feature (1)..(189): Homolog of NCBI NO: 15227766 NR Description: glycosyltransferase family [Arabidopsis thaliana]
  misc_feature (190)..(400): Homolog of NCBI NO: 15239523 NR Description: glycosyltransferase family [Arabidopsis thaliana]
  misc_feature (1)..(189): Homolog of NCBI NO: 15239523 NR Description: glycosyltransferase family [Arabidopsis thaliana]
  misc_feature (190)..(400): Homolog of NCBI NO: 15217796 NR Description: glycosyltransferase family [Arabidopsis thaliana]
  misc_feature (1)..(189): Homolog of NCBI NO: 15217796 NR Description: glycosyltransferase family [Arabidopsis thaliana]
  misc_feature (1)..(205): Homolog of NCBI NO: 15217773 NR Description: glycosyltransferase family [Arabidopsis thaliana]
MIPFLHLANKLAEKGHRVTFLLPKKAQKQLEHHNLFPDSIVFHPLTVPPVNGLPAGAETTSDIPISLDNLLSKALDLTRDQVEAAVRALRPDLIFFDFAQWIPDMAKEHMIKSVSYIIVSATTIAHTHVPGGKLGVRPPGYPSSKVMFRENDVHALATLSIFYKRLYHQITTGLKSCDVIALRTCKEVEDTSKPLEERWNHFLSGFAPKSVVFCSPGSQVILEKDQFQELCLGMELTGLPFLLAVKPPRGSSTVQEGLPEGFEERVKDRGVVWGGWVQQPLILAHPSIGCFVNHCGPGTIWESLVSDCQMVLIPFLSDQVLFTRLMTEEFEVSVEVPRKKTGWFSKESLSNAIKSVMDKDSDIGKLVRSNHTKLKEILVSPGLLTGYVDHFVEGLQENLI

SEQ ID NO: 108091 - DNA, 1620 bp, Arabidopsis thaliana
  misc_feature (1)..(1620): Ceres Seq. ID no. 13653186
  misc_feature: MA Experiment ID: 20000227 Result: Up-regulated in Transcription
  misc_feature: MA Experiment 20000227 PARAMETER Experiment Name: At_Root-Tips-vs-Tops_P Parameter: Tissue Value: Root Tips vs. Root Tops
  misc_feature: MA Experiment ID: 20000286 Result: Down-regulated in Transcription
  misc_feature: MA Experiment 20000286 PARAMETER Experiment Name: At_Open_Flower_P Parameter: Age (day) Value: 21
  misc_feature: MA Experiment 20000286 PARAMETER Experiment Name: At_Open_Flower_P Parameter: Plant Line Value: WS
  misc_feature: MA Experiment 20000286 PARAMETER Experiment Name: At_Open_Flower_P Parameter: Tissue Value: Half Open vs. Whole Plant
  misc_feature: MA Experiment ID: 20001555 Result: Down-regulated in Transcription
  misc_feature: MA Experiment 20001555 PARAMETER Experiment Name: At_Drought_Soil_Dry_P Parameter: Age (day) Value: 24
  misc_feature: MA Experiment 20001555 PARAMETER Experiment Name: At_Drought_Soil_Dry_P Parameter: Organism Value: A. thaliana
  misc_feature: MA Experiment 20001555 PARAMETER Experiment Name: At_Drought_Soil_Dry_P Parameter: Plant Line Value: WS
  misc_feature: MA Experiment 20001555 PARAMETER Experiment Name: At_Drought_Soil_Dry_P Parameter: Post Timepoint (hr) Value: None
  misc_feature: MA Experiment 20001555 PARAMETER Experiment Name: At_Drought_Soil_Dry_P Parameter: Post-Treatment Value: None
  misc_feature: MA Experiment 20001555 PARAMETER Experiment Name: At_Drought_Soil_Dry_P Parameter: Timepoint (day) Value: 10
  misc_feature: MA Experiment 20001555 PARAMETER Experiment Name: At_Drought_Soil_Dry_P Parameter: Treatment Value: Drought vs. No Drought
  misc_feature: MA Experiment ID: 20001556 Result: Down-regulated in Transcription
  misc_feature: MA Experiment 20001556 PARAMETER Experiment Name: At_Drought_Soil_Dry_P Parameter: Age (day) Value: 26
  misc_feature: MA Experiment 20001556 PARAMETER Experiment Name: At_Drought_Soil_Dry_P Parameter: Organism Value: A. thaliana
  misc_feature: MA Experiment 20001556 PARAMETER Experiment Name: At_Drought_Soil_Dry_P Parameter: Plant Line Value: WS
  misc_feature: MA Experiment 20001556 PARAMETER Experiment Name: At_Drought_Soil_Dry_P Parameter: Post Timepoint (hr) Value: None
  misc_feature: MA Experiment 20001556 PARAMETER Experiment Name: At_Drought_Soil_Dry_P Parameter: Post-Treatment Value: None
  misc_feature: MA Experiment 20001556 PARAMETER Experiment Name: At_Drought_Soil_Dry_P Parameter: Timepoint (day) Value: 12
  misc_feature: MA Experiment 20001556 PARAMETER Experiment Name: At_Drought_Soil_Dry_P Parameter: Treatment Value: Drought vs. No Drought
gtaactttttgggtttcaagattcgatctatcacttcccatggctagagaaaacccattgatgagcttctcctttagtttcagatatctctgtcactttgctctactcctctctctcctctcctttgtctcttttctcttcagacacaacacatcactctgttcttgtctttacgatcacaacacctacgttaacacattcgatcatcagcaaaacaatgaaaccatcgatcttcttcgattctcttctgcttggaaccatctcactttcccttctaaacccaagaagactctcaagatcgctgtggtggtcaagaaatggccgaggaaatcgcaagctggtgggctcgagcgacacgcgcttacattgcatctcgctctagccaatcgtggccacgagcttcatgttttcaccgctgcttctccatcgttccctgaatatcaactgaaaaatctgatgttccatctctctgagccaaccgctgctggatatcttgatcaagcttctgtctcgcaacagcttcagacgcagaacgctagtggaagaccgtttgacgtaattcacacagagagcgttgggcttctccacacaagagccaagaatctccgtaacgtggtcgcgtcttggcatggaatcgcttacgaaacttttcactctgacatcatccaagaactccttcgtcaagcagacatcgccgccgccaccgctgctggaaccgaagaagaacagccaccgccttcatcgccagctctgacggagcgagcgaagcgagtcgtcgaggaagtcaaattcttccaacgttacgctcaccacgtggcaactagcgatcactgcggtgacgtactcaagaggatttacatgattccggaggaacgtgtccatatcattctaaacggcgtcgacgagaacgttttcaaaccggacgtttcaaaacgtgagagctttagagagaaatttggcgttagaagcggcaagaacaagaaatctcctctggttttgggaattgcagggaggttagtgagagataaaggtcatcctttgatgttctcagctttgaagcgagtgtttgaagaaaacaaggaggcacgtggaaacgttgtcgttttggtagctggagatggtccatggggaaacagatataaagacctcgggtctactaatgtgattgttcttggaccgttggatcaagaaaagctaggggattctacaacgcgatcgatgtgtttgtgaatccgacccttcgagctcaagggctggatcacactctcttggaagccatggtttcaggaaaaccggtcttagctactaggctagcgagtatcactgggtcggtggttgtcggtccacatttgggatatactttctcaccaaatgttgagtctcttaccgaggcgattttgcgggttgttagcgatggaacagaggaattacagaggaaaggcaaggaagcgcgtgaacggtcgttgaggcttttcacggcgactaaaatggctgattcatatgaaaggttttttctttgcatttcggatcagaggttttgtacgttacaagcttaaaacatttgagctataacactaatatagttaaaactaatcaaggacttgattgtttgatttcatc

SEQ ID NO: 108092 - protein, 409 aa, Arabidopsis thaliana
  peptide (1)..(409): Ceres Seq. ID no. 13653187
  misc_feature (317)..(399): Pfam Name: Glycosyl transferases group 1 Pfam Description: Glycosyl transferases group 1
  misc_feature (14)..(399): Homolog of NCBI NO: 15237813 NR Description: glycosyltransferase family 1 [Arabidopsis
  misc_feature (14)..(399): Homolog of NCBI NO: 10177634 NR Description: glycosyl transferase-like [Arabidopsis thaliana]
  misc_feature (36)..(399): Homolog of NCBI NO: 34911892 NR Description: OSJNBb0032K15.23 [Oryza sativa (japonica
  misc_feature (14)..(399): Homolog of NCBI NO: 18415319 NR Description: glycosyltransferase family 1 [Arabidopsis
  misc_feature (14)..(399): Homolog of NCBI NO: 21593749 NR Description: unknown [Arabidopsis thaliana]
  misc_feature (14)..(399): Homolog of NCBI NO: 7487719 NR Description: hypothetical protein T5K18.240 - Arabidopsis
  misc_feature (14)..(399): Homolog of NCBI NO: 7486088 NR Description: hypothetical protein F24J7.20 - Arabidopsis
  misc_feature (14)..(399): Homolog of NCBI NO: 25407571 NR Description: hypothetical protein AT4g19460 [imported] - thaliana >gi|4582486|emb|CAA16923.2| putative protein thaliana] >gi|7268741|emb|CAB78948.1| putative protein
  misc_feature (37)..(399): Homolog of NCBI NO: 15219398 NR Description: glycosyltransferase family 1 [Arabidopsis
  misc_feature (37)..(399): Homolog of NCBI NO: 5903105 NR Description: Hypothetical protein [Arabidopsis thaliana]
VTFWVSRFDLSLPMARENPLMSFSFSFRYLCHFALLLSLLSFVSFLFRHNTSLCSCLYDHNTYVNTFDHQQNNETIDLLRFSSAWNHLTFPSKPKKTLKIAVVVKKWPRKSQAGGLERHALTLHLALANRGHELHVFTAASPSFPEYQLKNLMFHLSEPTAAGYLDQASVSQQLQTQNASGRPFDVIHTESVGLLHTRAKNLRNVVASWHGIAYETFHSDIIQELLRQADIAAATAAGTEEEQPPPSSPALTERAKRVVEEVKFFQRYAHHVATSDHCGDVLKRIYMIPEERVHIILNGVDENVFKPDVSKRESFREKFGVRSGKNKKSPLVLGIAGRLVRDKGHPLMFSALKRVFEENKEARGNVVVLVAGDGPWGNRYKDLGSTNVIVLGPLDQEKLGDSTTRSMCL

SEQ ID NO: 108093 - protein, 396 aa, Arabidopsis thaliana
  peptide (1)..(396): Ceres Seq. ID no. 13653188
  misc_feature (304)..(386): Pfam Name: Glycosyl transferases group 1 Pfam Description: Glycosyl transferases group 1
  misc_feature (1)..(386): Homolog of NCBI NO: 15237813 NR Description: glycosyltransferase family 1 [Arabidopsis
  misc_feature (1)..(386): Homolog of NCBI NO: 10177634 NR Description: glycosyl transferase-like [Arabidopsis thaliana]
  misc_feature (23)..(386): Homolog of NCBI NO: 34911892 NR Description: OSJNBb0032K15.23 [Oryza sativa (japonica
  misc_feature (1)..(386): Homolog of NCBI NO: 18415319 NR Description: glycosyltransferase family 1 [Arabidopsis
  misc_feature (1)..(386): Homolog of NCBI NO: 21593749 NR Description: unknown [Arabidopsis thaliana]
  misc_feature (1)..(386): Homolog of NCBI NO: 7487719 NR Description: hypothetical protein T5K18.240 - Arabidopsis
  misc_feature (1)..(386): Homolog of NCBI NO: 7486088 NR Description: hypothetical protein F24J7.20 - Arabidopsis
  misc_feature (1)..(386): Homolog of NCBI NO: 25407571 NR Description: hypothetical protein AT4g19460 [imported] - thaliana >gi|4582486|emb|CAA16923.2| putative protein thaliana] >gi|7268741|emb|CAB78948.1| putative protein
  misc_feature (24)..(386): Homolog of NCBI NO: 15219398 NR Description: glycosyltransferase family 1 [Arabidopsis
  misc_feature (24)..(386): Homolog of NCBI NO: 5903105 NR Description: Hypothetical protein [Arabidopsis thaliana]
MARENPLMSFSFSFRYLCHFALLLSLLSFVSFLFRHNTSLCSCLYDHNTYVNTFDHQQNNETIDLLRFSSAWNHLTFPSKPKKTLKIAVVVKKWPRKSQAGGLERHALTLHLALANRGHELHVFTAASPSFPEYQLKNLMFHLSEPTAAGYLDQASVSQQLQTQNASGRPFDVIHTESVGLLHTRAKNLRNVVASWHGIAYETFHSDIIQELLRQADIAAATAAGTEEEQPPPSSPALTERAKRVVEEVKFFQRYAHHVATSDHCGDVLKRIYMIPEERVHIILNGVDENVFKPDVSKRESFREKFGVRSGKNKKSPLVLGIAGRLVRDKGHPLMFSALKRVFEENKEARGNVVVLVAGDGPWGNRYKDLGSTNVIVLGPLDQEKLGDSTTRSMCL

SEQ ID NO: 108094 - protein, 389 aa, Arabidopsis thaliana
  peptide (1)..(389): Ceres Seq. ID no. 13653189
  misc_feature (297)..(379): Pfam Name: Glycosyl transferases group 1 Pfam Description: Glycosyl transferases group 1
  misc_feature (1)..(379): Homolog of NCBI NO: 15237813 NR Description: glycosyltransferase family 1 [Arabidopsis
  misc_feature (1)..(379): Homolog of NCBI NO: 10177634 NR Description: glycosyl transferase-like [Arabidopsis thaliana]
  misc_feature (16)..(379): Homolog of NCBI NO: 34911892 NR Description: OSJNBb0032K15.23 [Oryza sativa (japonica
  misc_feature (1)..(379): Homolog of NCBI NO: 18415319 NR Description: glycosyltransferase family 1 [Arabidopsis
  misc_feature (1)..(379): Homolog of NCBI NO: 21593749 NR Description: unknown [Arabidopsis thaliana]
  misc_feature (1)..(379): Homolog of NCBI NO: 7487719 NR Description: hypothetical protein T5K18.240 - Arabidopsis
  misc_feature (1)..(379): Homolog of NCBI NO: 7486088 NR Description: hypothetical protein F24J7.20 - Arabidopsis
  misc_feature (1)..(379): Homolog of NCBI NO: 25407571 NR Description: hypothetical protein AT4g19460 [imported] - thaliana >gi|4582486|emb|CAA16923.2| putative protein thaliana] >gi|7268741|emb|CAB78948.1| putative protein
  misc_feature (17)..(379): Homolog of NCBI NO: 15219398 NR Description: glycosyltransferase family 1 [Arabidopsis
  misc_feature (17)..(379): Homolog of NCBI NO: 5903105 NR Description: Hypothetical protein [Arabidopsis thaliana]
MSFSFSFRYLCHFALLLSLLSFVSFLFRHNTSLCSCLYDHNTYVNTFDHQQNNETIDLLRFSSAWNHLTFPSKPKKTLKIAVVVKKWPRKSQAGGLERHALTLHLALANRGHELHVFTAASPSFPEYQLKNLMFHLSEPTAAGYLDQASVSQQLQTQNASGRPFDVIHTESVGLLHTRAKNLRNVVASWHGIAYETFHSDIIQELLRQADIAAATAAGTEEEQPPPSSPALTERAKRVVEEVKFFQRYAHHVATSDHCGDVLKRIYMIPEERVHIILNGVDENVFKPDVSKRESFREKFGVRSGKNKKSPLVLGIAGRLVRDKGHPLMFSALKRVFEENKEARGNVVVLVAGDGPWGNRYKDLGSTNVIVLGPLDQEKLGDSTTRSMCL

SEQ ID NO: 108095 - DNA, 1633 bp, Arabidopsis thaliana
  misc_feature (1)..(1633): Ceres Seq. ID no. 13653190
  misc_feature: MA Experiment ID: 20000227 Result: Down-regulated in Transcription
  misc_feature: MA Experiment 20000227 PARAMETER Experiment Name: At_Root-Tips-vs-Tops_P Parameter: Tissue Value: Root Tips vs. Root Tops
  misc_feature: MA Experiment ID: 20001451 Result: Down-regulated in Transcription
  misc_feature: MA Experiment 20001451 PARAMETER Experiment Name: At_Far-red-induction_P Parameter: Age (day) Value: 7
  misc_feature: MA Experiment 20001451 PARAMETER Experiment Name: At_Far-red-induction_P Parameter: Light Value: Far-red vs. White
  misc_feature: MA Experiment 20001451 PARAMETER Experiment Name: At_Far-red-induction_P Parameter: Organism Value: A. thaliana
  misc_feature: MA Experiment 20001451 PARAMETER Experiment Name: At_Far-red-induction_P Parameter: Plant Line Value: Columbia
  misc_feature: MA Experiment 20001451 PARAMETER Experiment Name: At_Far-red-induction_P Parameter: Timepoint (hr) Value: 24
  misc_feature: MA Experiment 20001451 PARAMETER Experiment Name: At_Far-red-induction_P Parameter: Tissue Value: Whole Plant
cggctggaaaatgtgggaagatgaaaaaagcttattgattaacttggatgagcaagggtgacaatggctagctccaagggatcacagagtgttagaaacttgatgtacccgggaaagcatgctttgctcccaccaaaaataccgtttcctagtgtatcagcatcgtattccgagtatattcctactggtttgattggttcaagacatggtcagaagcttagtaatgagaaaacacatcaccagcgaacttcctccgagagccatttggtagaagagcttcccttttggcttgatgatcttctcaatgagcagccggaaagccctgctcgaaaatgtggtcatcggcgttcatcaagtgactcttacgcttatctagatgtggctaatgctacaaacataagtttgactctccaaaatgatttcagttataggaatactgttttatccactcaaagaggagtccaagagcttgaccggaataaaaatgctcaggatgctgccttctactctggtgctagttttctgaaacagaagagtcgtcagcgggattctttggtggcaactggggcttgtccttcttggttacctttcgctcgtgagaacggtggcggaaaaaacttgggagctttatatatgtctcaagatgcaacagtaatatcgtcagaaagaaagaactatgctgaacctttttctcatgacccaaagatgttatcttctgaggaaaacaactccaatccttcgcctgtgacttatgaagctgacaacacaaaacgagccaaacagcaatttgcacaaagatcacgggtccgtaagctccagtacatatctgagctagaaagaaatgtacagacattgcaggcagaaggctccaaagtttcagctgaacttgattttctcaaccagaggaatcttattctgagtatggaaaataaagctctcaagaagcgtctcgaaagtatagctcaggagaagcttatcaaacaattggaacaagaagtgttggaaaaggagattgggagactacgagcgttgtatcagcaacaacaacaaactcaaaaaccatcagccagtcgcggacgtgctactagcaaagatctcgactctcagttctccagtctttcactgaacaccaaagattccaactgtaggcgtgactctgtatctgtgatgggtcaattcaacttttagtaaatgtctctctacccactggttcattagagatcttaagggcctggcgactcaacaagatcagacccttatctaccgcctcaccacagacgtttttaactcccccgtcgtttctttttttttcttttcttatggttgacaagttaactcaccagtgcacctggaaatcctatattacttccaggagatggcttgcctgaggtggtttagttcgaagatcagacacctggacttcatttatctggtgattgttgtagcgacttgtgtaatatatgggacgaatatattcgaacccggactcatctctggagttgtactatgatacccactgttgtattttatgttacttgtaaaatggtgcattcccttcgagtgaatgcttcatgtaaagttgttgccattttctgtagtactatccccaagcgtcaaaatatttgattgcccc

SEQ ID NO: 108096 - protein, 374 aa, Arabidopsis thaliana
  peptide (1)..(374): Ceres Seq. ID no. 13653191
  misc_feature (243)..(291): Pfam Name: bZIP transcription factor Pfam Description: bZIP transcription factor
  misc_feature (1)..(374): Homolog of NCBI NO: 28393180 NR Description: putative bZIP family transcription factor
  misc_feature (1)..(374): Homolog of NCBI NO: 25404190 NR Description: hypothetical protein T18I24.3 [imported] - thaliana >gi|12321251|gb|AAG50695.1|AC079604_2 bZIP activator RSG, putative [Arabidopsis thaliana]
  misc_feature (1)..(368): Homolog of NCBI NO: 30696210 NR Description: bZIP family transcription factor [Arabidopsis
  misc_feature (1)..(265): Homolog of NCBI NO: 30680232 NR Description: bZIP transcriptional activator protein -related
  misc_feature (1)..(265): Homolog of NCBI NO: 27311723 NR Description: Unknown protein [Arabidopsis thaliana]
  misc_feature (192)..(374): Homolog of NCBI NO: 30696210 NR Description: bZIP family transcription factor [Arabidopsis
  misc_feature (50)..(341): Homolog of NCBI NO: 18491297 NR Description: At2g42380/MHK10.10 [Arabidopsis thaliana]
  misc_feature (50)..(341): Homolog of NCBI NO: 30689007 NR Description: bZIP protein [Arabidopsis thaliana]
  misc_feature (211)..(354): Homolog of NCBI NO: 18399693 NR Description: bZIP family transcription factor [Arabidopsis
  misc_feature (211)..(354): Homolog of NCBI NO: 25403436 NR Description: protein F15O4.49 [imported] - Arabidopsis >gi|8778353|gb|AAF79361.1|AC007887_20 F15O4.49 [Arabidopsis
MASSKGSQSVRNLMYPGKHALLPPKIPFPSVSASYSEYIPTGLIGSRHGQKLSNEKTHHQRTSSESHLVEELPFWLDDLLNEQPESPARKCGHRRSSSDSYAYLDVANATNISLTLQNDFSYRNTVLSTQRGVQELDRNKNAQDAAFYSGASFLKQKSRQRDSLVATGACPSWLPFARENGGGKNLGALYMSQDATVISSERKNYAEPFSHDPKMLSSEENNSNPSPVTYEADNTKRAKQQFAQRSRVRKLQYISELERNVQTLQAEGSKVSAELDFLNQRNLILSMENKALKKRLESIAQEKLIKQLEQEVLEKEIGRLRALYQQQQQTQKPSASRGRATSKDLDSQFSSLSLNTKDSNCRRDSVSVMGQFNF

SEQ ID NO: 108097 - protein, 361 aa, Arabidopsis thaliana
  peptide (1)..(361): Ceres Seq. ID no. 13653192
  misc_feature (230)..(278): Pfam Name: bZIP transcription factor Pfam Description: bZIP transcription factor
  misc_feature (1)..(361): Homolog of NCBI NO: 28393180 NR Description: putative bZIP family transcription factor
  misc_feature (1)..(361): Homolog of NCBI NO: 25404190 NR Description: hypothetical protein T18I24.3 [imported] - thaliana >gi|12321251|gb|AAG50695.1|AC079604_2 bZIP activator RSG, putative [Arabidopsis thaliana]
  misc_feature (1)..(355): Homolog of NCBI NO: 30696210 NR Description: bZIP family transcription factor [Arabidopsis
  misc_feature (1)..(252): Homolog of NCBI NO: 30680232 NR Description: bZIP transcriptional activator protein -related
  misc_feature (1)..(252): Homolog of NCBI NO: 27311723 NR Description: Unknown protein [Arabidopsis thaliana]
  misc_feature (179)..(361): Homolog of NCBI NO: 30696210 NR Description: bZIP family transcription factor [Arabidopsis
  misc_feature (37)..(328): Homolog of NCBI NO: 18491297 NR Description: At2g42380/MHK10.10 [Arabidopsis thaliana]
  misc_feature (37)..(328): Homolog of NCBI NO: 30689007 NR Description: bZIP protein [Arabidopsis thaliana]
  misc_feature (198)..(341): Homolog of NCBI NO: 18399693 NR Description: bZIP family transcription factor [Arabidopsis
  misc_feature (198)..(341): Homolog of NCBI NO: 25403436 NR Description: protein F15O4.49 [imported] - Arabidopsis >gi|8778353|gb|AAF79361.1|AC007887_20 F15O4.49 [Arabidopsis
MYPGKHALLPPKIPFPSVSASYSEYIPTGLIGSRHGQKLSNEKTHHQRTSSESHLVEELPFWLDDLLNEQPESPARKCGHRRSSSDSYAYLDVANATNISLTLQNDFSYRNTVLSTQRGVQELDRNKNAQDAAFYSGASFLKQKSRQRDSLVATGACPSWLPFARENGGGKNLGALYMSQDATVISSERKNYAEPFSHDPKMLSSEENNSNPSPVTYEADNTKRAKQQFAQRSRVRKLQYISELERNVQTLQAEGSKVSAELDFLNQRNLILSMENKALKKRLESIAQEKLIKQLEQEVLEKEIGRLRALYQQQQQTQKPSASRGRATSKDLDSQFSSLSLNTKDSNCRRDSVSVMGQFNF

SEQ ID NO: 108098 - DNA, 1570 bp, Arabidopsis thaliana
  misc_feature (1)..(1570): Ceres Seq. ID no. 13653201
  misc_feature: MA Experiment ID: 20000227 Result: Down-regulated in Transcription
  misc_feature: MA Experiment 20000227 PARAMETER Experiment Name: At_Root-Tips-vs-Tops_P Parameter: Tissue Value: Root Tips vs. Root Tops
  misc_feature: MA Experiment ID: 20000234 Result: Down-regulated in Transcription
  misc_feature: MA Experiment 20000234 PARAMETER Experiment Name: At_Siliques_P Parameter: Age (day) Value: 21
  misc_feature: MA Experiment 20000234 PARAMETER Experiment Name: At_Siliques_P Parameter: Organism Value: A. thaliana
  misc_feature: MA Experiment 20000234 PARAMETER Experiment Name: At_Siliques_P Parameter: Plant Line Value: WS
  misc_feature: MA Experiment 20000234 PARAMETER Experiment Name: At_Siliques_P Parameter: Tissue Value: Less Than 5mm Siliques vs. Whole Plant
  misc_feature: MA Experiment ID: 20001248 Result: Up-regulated in Transcription
  misc_feature: MA Experiment 20001248 PARAMETER Experiment Name: At_Far-red-induction_P Parameter: Age (day) Value: 7
  misc_feature: MA Experiment 20001248 PARAMETER Experiment Name: At_Far-red-induction_P Parameter: Light Value: Far-red vs. White
  misc_feature: MA Experiment 20001248 PARAMETER Experiment Name: At_Far-red-induction_P Parameter: Organism Value: A. thaliana
  misc_feature: MA Experiment 20001248 PARAMETER Experiment Name: At_Far-red-induction_P Parameter: Plant Line Value: Columbia
  misc_feature: MA Experiment 20001248 PARAMETER Experiment Name: At_Far-red-induction_P Parameter: Timepoint (hr) Value: 4
  misc_feature: MA Experiment 20001248 PARAMETER Experiment Name: At_Far-red-induction_P Parameter: Tissue Value: Whole Plant
gtccgaatcttcttcgcgtctctcaccaacaccacttctcctaccttcttcttcacaccaaatgattctctcgtataatattcatcaaacccagatcatgttttcatcatcaatcatctcttaaactcctctatagatctcaccgcatgacgttccgaagtttactccaggaaatgcggtctaggccacaccgtgtagttcacgccgccgcctcaaccgctaatagttcagaccctttcagctggtcggagctcccggaggagctgcttagagaaatcctgattagggttgagactgttgacggcggcgattggccgtcgcggcgaaacgtggtggcttgtgccggcgtttgtcgtagctggaggattctcaccaaggagattgtagctgttcctgaattctcctctaaattgactttccctatctccctcaagcagtctggtccaagagattctctagttcaatgctttataaaacgtaatcgaaatactcaatcgtatcatctctatctcggattaactacctctttgacggataacgggaagtttcttcttgctgcttctaagctgaagcgcgcaacttgcactgattacatcatctctttgcgttcagacgatatctcaaagagaagcaacgcgtatcttgggagaatgagatcgaacttccttggaacaaaattcacggtctttgatggtagtcagaccggagcagcgaagatgcagaagagccgctcttctaatttcatcaaagtttcacctagagttcctcagggaagttaccccatcgctcacatttcatacgagttaaacgtcttaggctctcggtaaacagtttttacattcaagtatgataatgcttcttctagtcttttgaccattctgattttaacagtcttttgagggtattaataacaggggaccgagaagaatgcgttgcatcatggatacaatacctatgagcatcgtggagtcgcgaggagtagtagcttcaacatccataagctctttttccagtcagtcatcaccagtctttaggtctcactcaaaaccattgcgcagtaatagtgcatcatgtagcgactcaggcaacaacctgggagatccaccattggtgctgagcaacaaagctccacggtggcatgagcagttacgttgctggtgcttaaatttccatggtcgagtcacagtggcttcggttaagaactttcagcttgtggcagttagtgactgtgaagcagggcagacatctgagaggatcatactccagtttgggaaagttgggaaggacatgtttaccatggattatggatatccgatttctgcgtttcaagcgtttgctatctgcctgagcagttttgaaaccagaattgcctgtgaataatgaagagactaaccttaaatcacctccgtgtgctcgttgttgtggtctgtagatggtgtagtacttgtccaaaatctcaggaacgttaatagctttctctggattctttctgacaattcaaatctatctgttgtatttatttgtctttcatgcaaagaagcgtaccagaaataggctacgattacgtttt

SEQ ID NO: 108099 - protein, 226 aa, Arabidopsis thaliana
  peptide (1)..(226): Ceres Seq. ID no. 13653202
  misc_feature (98)..(226): Pfam Name: Tub family Pfam Description: Tub family
  misc_feature (1)..(226): Homolog of NCBI NO: 15230707 NR Description: F-box containing tubby family protein thaliana] >gi|6437549|gb|AAF08576.1|AC011623_9 unknown protein
  misc_feature (1)..(226): Homolog of NCBI NO: 22326885 NR Description: F-box containing tubby family protein
  misc_feature (11)..(226): Homolog of NCBI NO: 30690823 NR Description: F-box containing tubby family protein thaliana] >gi|18377640|gb|AAL66970.1| putative tubby protein thaliana] >gi|20465543|gb|AAM20254.1| putative tubby protein
  misc_feature (11)..(226): Homolog of NCBI NO: 25409071 NR Description: probable Tub family protein [imported] - thaliana >gi|3738302|gb|AAC63644.1| putative tubby protein thaliana] >gi|20197552|gb|AAM15124.1| putative tubby protein
  misc_feature (11)..(226): Homolog of NCBI NO: 34899264 NR Description: contains ESTs
  misc_feature (1)..(226): Homolog of NCBI NO: 38637048 NR Description: putative chain A, C-terminal domain of mouse
  misc_feature (33)..(226): Homolog of NCBI NO: 15222543 NR Description: F-box containing tubby family protein
  misc_feature (33)..(226): Homolog of NCBI NO: 30680328 NR Description: F-box containing tubby family protein
  misc_feature (33)..(226): Homolog of NCBI NO: 15223772 NR Description: F-box containing tubby family protein
  misc_feature (33)..(226): Homolog of NCBI NO: 30793997 NR Description: putative F-box containing tubby family protein
MTFRSLLQEMRSRPHRVVHAAASTANSSDPFSWSELPEELLREILIRVETVDGGDWPSRRNVVACAGVCRSWRILTKEIVAVPEFSSKLTFPISLKQSGPRDSLVQCFIKRNRNTQSYHLYLGLTTSLTDNGKFLLAASKLKRATCTDYIISLRSDDISKRSNAYLGRMRSNFLGTKFTVFDGSQTGAAKMQKSRSSNFIKVSPRVPQGSYPIAHISYELNVLGSR

SEQ ID NO: 108100 - protein, 217 aa, Arabidopsis thaliana
  peptide (1)..(217): Ceres Seq. ID no. 13653203
  misc_feature (89)..(217): Pfam Name: Tub family Pfam Description: Tub family
  misc_feature (1)..(217): Homolog of NCBI NO: 15230707 NR Description: F-box containing tubby family protein thaliana] >gi|6437549|gb|AAF08576.1|AC011623_9 unknown protein
  misc_feature (1)..(217): Homolog of NCBI NO: 22326885 NR Description: F-box containing tubby family protein
  misc_feature (2)..(217): Homolog of NCBI NO: 30690823 NR Description: F-box containing tubby family protein thaliana] >gi|18377640|gb|AAL66970.1| putative tubby protein thaliana] >gi|20465543|gb|AAM20254.1| putative tubby protein
  misc_feature (2)..(217): Homolog of NCBI NO: 25409071 NR Description: probable Tub family protein [imported] - thaliana >gi|3738302|gb|AAC63644.1| putative tubby protein thaliana] >gi|20197552|gb|AAM15124.1| putative tubby protein
  misc_feature (2)..(217): Homolog of NCBI NO: 34899264 NR Description: contains ESTs
  misc_feature (1)..(217): Homolog of NCBI NO: 38637048 NR Description: putative chain A, C-terminal domain of mouse
  misc_feature (24)..(217): Homolog of NCBI NO: 15222543 NR Description: F-box containing tubby family protein
  misc_feature (24)..(217): Homolog of NCBI NO: 30680328 NR Description: F-box containing tubby family protein
  misc_feature (24)..(217): Homolog of NCBI NO: 15223772 NR Description: F-box containing tubby family protein
  misc_feature (24)..(217): Homolog of NCBI NO: 30793997 NR Description: putative F-box containing tubby family protein
MRSRPHRVVHAAASTANSSDPFSWSELPEELLREILIRVETVDGGDWPSRRNVVACAGVCRSWRILTKEIVAVPEFSSKLTFPISLKQSGPRDSLVQCFIKRNRNTQSYHLYLGLTTSLTDNGKFLLAASKLKRATCTDYIISLRSDDISKRSNAYLGRMRSNFLGTKFTVFDGSQTGAAKMQKSRSSNFIKVSPRVPQGSYPIAHISYELNVLGSR

SEQ ID NO: 108101 - protein, 150 aa, Arabidopsis thaliana
  peptide (1)..(150): Ceres Seq. ID no. 13653204
  misc_feature (1)..(150): Pfam Name: Tub family Pfam Description: Tub family
  misc_feature (1)..(150): Homolog of NCBI NO: 15230707 NR Description: F-box containing tubby family protein thaliana] >gi|6437549|gb|AAF08576.1|AC011623_9 unknown protein
  misc_feature (1)..(150): Homolog of NCBI NO: 22326885 NR Description: F-box containing tubby family protein
  misc_feature (1)..(150): Homolog of NCBI NO: 30690823 NR Description: F-box containing tubby family protein thaliana] >gi|18377640|gb|AAL66970.1| putative tubby protein thaliana] >gi|20465543|gb|AAM20254.1| putative tubby protein
  misc_feature (1)..(150): Homolog of NCBI NO: 25409071 NR Description: probable Tub family protein [imported] - thaliana >gi|3738302|gb|AAC63644.1| putative tubby protein thaliana] >gi|20197552|gb|AAM15124.1| putative tubby protein
  misc_feature (1)..(150): Homolog of NCBI NO: 34899264 NR Description: contains ESTs
  misc_feature (21)..(109): Homolog of NCBI NO: 38637048 NR Description: putative chain A, C-terminal domain of mouse
  misc_feature (109)..(150): Homolog of NCBI NO: 38637048 NR Description: putative chain A, C-terminal domain of mouse
  misc_feature (1)..(19): Homolog of NCBI NO: 38637048 NR Description: putative chain A, C-terminal domain of mouse
  misc_feature (9)..(150): Homolog of NCBI NO: 15222543 NR Description: F-box containing tubby family protein
  misc_feature (1)..(19): Homolog of NCBI NO: 15222543 NR Description: F-box containing tubby family protein
MRCIMDTIPMSIVESRGVVASTSISSFSSQSSPVFRSHSKPLRSNSASCSDSGNNLGDPPLVLSNKAPRWHEQLRCWCLNFHGRVTVASVKNFQLVAVSDCEAGQTSERIILQFGKVGKDMFTMDYGYPISAFQAFAICLSSFETRIACE

SEQ ID NO: 108102 - DNA, 1707 bp, Arabidopsis thaliana
  misc_feature (1)..(1707): Ceres Seq. ID no. 13653205
  misc_feature: MA Experiment ID: 108463 Result: Up-regulated in Transcription
  misc_feature: MA Experiment 108463 PARAMETER Experiment Name: At_Germinating_Seeds_cDNA_P Parameter: Age (day) Value: 3 vs. 0
  misc_feature: MA Experiment 108463 PARAMETER Experiment Name: At_Germinating_Seeds_cDNA_P Parameter: Tissue Value: Germinating Seeds
  misc_feature: MA Experiment ID: 108572 Result: Up-regulated in Transcription
  misc_feature: MA Experiment 108572 PARAMETER Experiment Name: At_Drought_cDNA_P Parameter: Timepoint (hr) Value: 1
  misc_feature: MA Experiment 108572 PARAMETER Experiment Name: At_Drought_cDNA_P Parameter: Tissue Value: Aerial
  misc_feature: MA Experiment 108572 PARAMETER Experiment Name: At_Drought_cDNA_P Parameter: Treatment Value: Drought vs. No Drought
  misc_feature: MA Experiment ID: 108573 Result: Up-regulated in Transcription
  misc_feature: MA Experiment 108573 PARAMETER Experiment Name: At_Drought_cDNA_P Parameter: Timepoint (hr) Value: 6
  misc_feature: MA Experiment 108573 PARAMETER Experiment Name: At_Drought_cDNA_P Parameter: Tissue Value: Aerial
  misc_feature: MA Experiment 108573 PARAMETER Experiment Name: At_Drought_cDNA_P Parameter: Treatment Value: Drought vs. No Drought
  misc_feature: MA Experiment ID: 108577 Result: Down-regulated in Transcription
  misc_feature: MA Experiment 108577 PARAMETER Experiment Name: At_42deg_Heat_cDNA_P Parameter: Temperature (deg C) Value: 42 vs. 22
  misc_feature: MA Experiment 108577 PARAMETER Experiment Name: At_42deg_Heat_cDNA_P Parameter: Timepoint (hr) Value: 6
  misc_feature: MA Experiment 108577 PARAMETER Experiment Name: At_42deg_Heat_cDNA_P Parameter: Tissue Value: Aerial
  misc_feature: MA Experiment ID: 108595 Result: Down-regulated in Transcription
  misc_feature: MA Experiment 108595 PARAMETER Experiment Name: At_Ler-pi_Ovule_cDNA_P Parameter: Plant Line Value: null
  misc_feature: MA Experiment ID: 108605 Result: Up-regulated in Transcription
  misc_feature: MA Experiment 108605 PARAMETER Experiment Name: At_100uM_ABA_cDNA_P Parameter: Timepoint (hr) Value: 6
  misc_feature: MA Experiment 108605 PARAMETER Experiment Name: At_100uM_ABA_cDNA_P Parameter: Tissue Value: Aerial
  misc_feature: MA Experiment 108605 PARAMETER Experiment Name: At_100uM_ABA_cDNA_P Parameter: Treatment Value: 100uM ABA vs. No Treatment
  misc_feature: MA Experiment ID: 20000072 Result: Up-regulated in Transcription
  misc_feature: MA Experiment 20000072 PARAMETER Experiment Name: At_100uM_ABA_Mutants_cDNA_P Parameter: Plant Line Value: CS8105
  misc_feature: MA Experiment 20000072 PARAMETER Experiment Name: At_100uM_ABA_Mutants_cDNA_P Parameter: Timepoint (hr) Value: 6
  misc_feature: MA Experiment 20000072 PARAMETER Experiment Name: At_100uM_ABA_Mutants_cDNA_P Parameter: Tissue Value: Aerial
  misc_feature: MA Experiment 20000072 PARAMETER Experiment Name: At_100uM_ABA_Mutants_cDNA_P Parameter: Treatment Value: 100uM ABA vs. No Treatment
  misc_feature: MA Experiment ID: 20000111 Result: Down-regulated in Transcription
  misc_feature: MA Experiment 20000111 PARAMETER Experiment Name: At_42deg_Heat_cDNA_P Parameter: Temperature (deg C) Value: 42 vs. 22
  misc_feature: MA Experiment 20000111 PARAMETER Experiment Name: At_42deg_Heat_cDNA_P Parameter: Timepoint (hr) Value: 6
  misc_feature: MA Experiment 20000111 PARAMETER Experiment Name: At_42deg_Heat_cDNA_P Parameter: Tissue Value: Aerial
  misc_feature: MA Experiment ID: 20000112 Result: Down-regulated in Transcription
  misc_feature: MA Experiment 20000112 PARAMETER Experiment Name: At_42deg_Heat_cDNA_P Parameter: Temperature (deg C) Value: 42 vs. 22
  misc_feature: MA Experiment 20000112 PARAMETER Experiment Name: At_42deg_Heat_cDNA_P Parameter: Timepoint (hr) Value: 2
  misc_feature: MA Experiment 20000112 PARAMETER Experiment Name: At_42deg_Heat_cDNA_P Parameter: Tissue Value: Aerial
  misc_feature: MA Experiment ID: 20000113 Result: Down-regulated in Transcription
  misc_feature: MA Experiment 20000113 PARAMETER Experiment Name: At_42deg_Heat_cDNA_P Parameter: Temperature (deg C) Value: 42 vs. 22
  misc_feature: MA Experiment 20000113 PARAMETER Experiment Name: At_42deg_Heat_cDNA_P Parameter: Timepoint (hr) Value: 8
  misc_feature: MA Experiment 20000113 PARAMETER Experiment Name: At_42deg_Heat_cDNA_P Parameter: Tissue Value: Aerial
  misc_feature: MA Experiment ID: 20000144 Result: Down-regulated in Transcription
  misc_feature: MA Experiment 20000144 PARAMETER Experiment Name: At_42deg_Heat_cDNA_P Parameter: Temperature (deg C) Value: 42 vs. 22
  misc_feature: MA Experiment 20000144 PARAMETER Experiment Name: At_42deg_Heat_cDNA_P Parameter: Timepoint (hr) Value: 1
  misc_feature: MA Experiment 20000144 PARAMETER Experiment Name: At_42deg_Heat_cDNA_P Parameter: Tissue Value: Aerial
  misc_feature: MA Experiment ID: 20000171 Result: Down-regulated in Transcription
  misc_feature: MA Experiment 20000171 PARAMETER Experiment Name: At_42deg_Heat_P Parameter: Age (day) Value: 14
  misc_feature: MA Experiment 20000171 PARAMETER Experiment Name: At_42deg_Heat_P Parameter: Organism Value: A. thaliana
  misc_feature: MA Experiment 20000171 PARAMETER Experiment Name: At_42deg_Heat_P Parameter: Plant Line Value: WS
  misc_feature: MA Experiment 20000171 PARAMETER Experiment Name: At_42deg_Heat_P Parameter: Temperature (deg C) Value: 42 vs. 22
  misc_feature: MA Experiment 20000171 PARAMETER Experiment Name: At_42deg_Heat_P Parameter: Timepoint (hr) Value: 1
  misc_feature: MA Experiment 20000171 PARAMETER Experiment Name: At_42deg_Heat_P Parameter: Tissue Value: Aerial
  misc_feature: MA Experiment ID: 20000173 Result: Down-regulated in Transcription
  misc_feature: MA Experiment 20000173 PARAMETER Experiment Name: At_42deg_Heat_P Parameter: Age (day) Value: 14
  misc_feature: MA Experiment 20000173 PARAMETER Experiment Name: At_42deg_Heat_P Parameter: Organism Value: A. thaliana
  misc_feature: MA Experiment 20000173 PARAMETER Experiment Name: At_42deg_Heat_P Parameter: Plant Line Value: WS
  misc_feature: MA Experiment 20000173 PARAMETER Experiment Name: At_42deg_Heat_P Parameter: Temperature (deg C) Value: 42 vs. 22
  misc_feature: MA Experiment 20000173 PARAMETER Experiment Name: At_42deg_Heat_P Parameter: Timepoint (hr) Value: 6
  misc_feature: MA Experiment 20000173 PARAMETER Experiment Name: At_42deg_Heat_P Parameter: Tissue Value: Aerial
  misc_feature: MA Experiment ID: 20000185 Result: Down-regulated in Transcription
  misc_feature: MA Experiment 20000185 PARAMETER Experiment Name: At_Roots__P Parameter: Age (day) Value: 7 vs. 21
  misc_feature: MA Experiment 20000185 PARAMETER Experiment Name: At_Roots__P Parameter: Organism Value: A. thaliana
  misc_feature: MA Experiment 20000185 PARAMETER Experiment Name: At_Roots__P Parameter: Tissue Value: Roots vs. Whole Plant
  misc_feature: MA Experiment ID: 20000234 Result: Up-regulated in Transcription
  misc_feature: MA Experiment 20000234 PARAMETER Experiment Name: At_Siliques_P Parameter: Age (day) Value: 21
  misc_feature: MA Experiment 20000234 PARAMETER Experiment Name: At_Siliques_P Parameter: Organism Value: A. thaliana
  misc_feature: MA Experiment 20000234 PARAMETER Experiment Name: At_Siliques_P Parameter: Plant Line Value: WS
  misc_feature: MA Experiment 20000234 PARAMETER Experiment Name: At_Siliques_P Parameter: Tissue Value: Less Than 5mm Siliques vs. Whole Plant
  misc_feature: MA Experiment ID: 20000286 Result: Up-regulated in Transcription
  misc_feature: MA Experiment 20000286 PARAMETER Experiment Name: At_Open_Flower_P Parameter: Age (day) Value: 21
  misc_feature: MA Experiment 20000286 PARAMETER Experiment Name: At_Open_Flower_P Parameter: Plant Line Value: WS
  misc_feature: MA Experiment 20000286 PARAMETER Experiment Name: At_Open_Flower_P Parameter: Tissue Value: Half Open vs. Whole Plant
  misc_feature: MA Experiment ID: 20000439 Result: Down-regulated in Transcription
  misc_feature: MA Experiment 20000439 PARAMETER Experiment Name: At_Roots__P Parameter: Age (day) Value: 14 vs. 21
  misc_feature: MA Experiment 20000439 PARAMETER Experiment Name: At_Roots__P Parameter: Organism Value: A. thaliana
  misc_feature: MA Experiment 20000439 PARAMETER Experiment Name: At_Roots__P Parameter: Tissue Value: Roots vs. Whole Plant
  misc_feature: MA Experiment ID: 20001451 Result: Down-regulated in Transcription
  misc_feature: MA Experiment 20001451 PARAMETER Experiment Name: At_Far-red-induction_P Parameter: Age (day) Value: 7
  misc_feature: MA Experiment 20001451 PARAMETER Experiment Name: At_Far-red-induction_P Parameter: Light Value: Far-red vs. White
  misc_feature: MA Experiment 20001451 PARAMETER Experiment Name: At_Far-red-induction_P Parameter: Organism Value: A. thaliana
  misc_feature: MA Experiment 20001451 PARAMETER Experiment Name: At_Far-red-induction_P Parameter: Plant Line Value: Columbia
  misc_feature: MA Experiment 20001451 PARAMETER Experiment Name: At_Far-red-induction_P Parameter: Timepoint (hr) Value: 24
  misc_feature: MA Experiment 20001451 PARAMETER Experiment Name: At_Far-red-induction_P Parameter: Tissue Value: Whole Plant
  misc_feature: MA Experiment ID: 20001557 Result: Up-regulated in Transcription
  misc_feature: MA Experiment 20001557 PARAMETER Experiment Name: At_Drought_Soil_Dry_P Parameter: Age (day) Value: 27
  misc_feature: MA Experiment 20001557 PARAMETER Experiment Name: At_Drought_Soil_Dry_P Parameter: Organism Value: A. thaliana
  misc_feature: MA Experiment 20001557 PARAMETER Experiment Name: At_Drought_Soil_Dry_P Parameter: Plant Line Value: WS
  misc_feature: MA Experiment 20001557 PARAMETER Experiment Name: At_Drought_Soil_Dry_P Parameter: Post Timepoint (hr) Value: 3
  misc_feature: MA Experiment 20001557 PARAMETER Experiment Name: At_Drought_Soil_Dry_P Parameter: Post-Treatment Value: Re-Water vs. No Drought
  misc_feature: MA Experiment 20001557 PARAMETER Experiment Name: At_Drought_Soil_Dry_P Parameter: Timepoint (day) Value: 13
  misc_feature: MA Experiment 20001557 PARAMETER Experiment Name: At_Drought_Soil_Dry_P Parameter: Treatment Value: Drought vs. No Drought
  misc_feature: MA Experiment ID: 20001558 Result: Up-regulated in Transcription
  misc_feature: MA Experiment 20001558 PARAMETER Experiment Name: At_Drought_Soil_Dry_P Parameter: Age (day) Value: 27
  misc_feature: MA Experiment 20001558 PARAMETER Experiment Name: At_Drought_Soil_Dry_P Parameter: Organism Value: A. thaliana
  misc_feature: MA Experiment 20001558 PARAMETER Experiment Name: At_Drought_Soil_Dry_P Parameter: Plant Line Value: WS
  misc_feature: MA Experiment 20001558 PARAMETER Experiment Name: At_Drought_Soil_Dry_P Parameter: Post Timepoint (hr) Value: 6
  misc_feature: MA Experiment 20001558 PARAMETER Experiment Name: At_Drought_Soil_Dry_P Parameter: Post-Treatment Value: Re-Water vs. No Drought
  misc_feature: MA Experiment 20001558 PARAMETER Experiment Name: At_Drought_Soil_Dry_P Parameter: Timepoint (day) Value: 13
  misc_feature: MA Experiment 20001558 PARAMETER Experiment Name: At_Drought_Soil_Dry_P Parameter: Treatment Value: Drought vs. No Drought
atcataggcatagcaaaactcttccaaaatgtctgatttctcgagctccgtgaagcttaaatatgttaaactcggttaccaataccttatcaacaacttccttactcttcttttgattccagtcatagcaaccgtcgccatcgagcttctccgaatgggtccggaagagattctcagtgtcttgaactcactccacttcgagcttcttcatatcctttgttcctctttccttattatctttgtttcaaccgtttacttcatgtccaagccacgtaccgtctaccttgtggactactcttgctacaaacctcctgtcacgtgccgtgtcccgttctcttcgttcatggaacactctcgtctcatcctcaaagacaatcccaagagtgtcgaattccaaatgagaatcctcgagcgatcaggtctaggagaagagacttgtctccctccagctattcattacatccctccaactccaaccatggaatccgcaagaaacgaggcccaaatggttatcttcaccgccatggaagatctcttcaagaatacaggtcttaaacctaaagacatcgacatcctcattgttaattgctctctgttctcaccaacgccgtctctctccgctatgattatcaacaagtacaagcttaggagtaacatcaaaagctataacctttccgggatgggatgcagcgctagtcttatctcagttgatgtagcacgtgatttgttacaagtccatcctaactccaacgcaatcataattagcactgagatcattactcctaattactataagggtaatgagagagccatgttgctcccaaactgcctcttccgtatgggaggcgccgccattctcctctctaaccgcagatccgacaggtggcgagctaagtacaagttatgccaccttgttaggacccatcgcggtgcggatgacaaatcctacaactgtgttatggaacaggaagacaaaaatggtaacgtgggaatcaacttgtctaaagatctcatgaccattgccggagaagccttgaaagctaatatcactaccataggtcctttggtccttccggcatcggagcagcttctcttcctctcatcccttatcggacgtaaaatcttcaatccaaagtggaagccgtacataccagatttcaagcaggccttcgagcatttctgcatccacgcaggaggaagagcggtgattgatgagctgcaaaagaatctacagctgtcgggagaacacgtggaagcttcaagaatgacactacataggtttggtaatacatcgtcgtcatcattatggtatgagcttagctacatagaggctcaagggagaatgaagagaaacgatagggtttggcagatcgctttcggaagtggattcaagtgtaactccgccgtttggaaatgtaaccgtacgatcaagacaccaacggatggagcgtggtcggattgtatcgaacgataccctgtctttatccctgaagttgttaaactatgaaaatactttttttttatccttgaagttgttgaactatgaaaacacttttaaaagattgggaaaatagagaaaactgcaaaagacgataagatacaacacatgttctaataactgcgtcaactttttcatttggtgtattttattctttatactttctaatgatgtgatttgtgatgtatgaaatactaaaattttattcc

SEQ ID NO: 108103 - protein, 492 aa, Arabidopsis thaliana
  peptide (1)..(492): Ceres Seq. ID no. 13653206
  misc_feature (325)..(465): Pfam Name: Chalcone and stilbene synthases, C-terminal domain Pfam Description: Chalcone and stilbene synthases, C-terminal
  misc_feature (1)..(492): Homolog of NCBI NO: 15222592 NR Description: very-long-chain fatty acid condensing enzyme putative [Arabidopsis thaliana] >gi|25403020|pir||F86384 probable
  misc_feature (1)..(492): Homolog of NCBI NO: 21618184 NR Description: fatty acid condensing enzyme CUT1, putative
  misc_feature (1)..(492): Homolog of NCBI NO: 28393607 NR Description: putative fatty acid condensing enzyme CUT1
  misc_feature (1)..(492): Homolog of NCBI NO: 17979464 NR Description: At1g68530/T26J14_10 [Arabidopsis thaliana]
  misc_feature (1)..(492): Homolog of NCBI NO: 15221431 NR Description: very-long-chain fatty acid condensing enzyme
  misc_feature (1)..(492): Homolog of NCBI NO: 21593111 NR Description: very-long-chain fatty acid condensing enzyme CUT1
  misc_feature (1)..(491): Homolog of NCBI NO: 32172502 NR Description: FAE1 [Marchantia polymorpha]
  misc_feature (1)..(484): Homolog of NCBI NO: 15226724 NR Description: very-long-chain fatty acid condensing enzyme
  misc_feature (1)..(484): Homolog of NCBI NO: 15223556 NR Description: very-long-chain fatty acid condensing enzyme putative [Arabidopsis thaliana] >gi|25402889|pir||F86327 protein
  misc_feature (1)..(487): Homolog of NCBI NO: 29417540 NR Description: beta-ketoacyl-CoA-synthase [Marchantia polymorpha]
MSDFSSSVKLKYVKLGYQYLINNFLTLLLIPVIATVAIELLRMGPEEILSVLNSLHFELLHILCSSFLIIFVSTVYFMSKPRTVYLVDYSCYKPPVTCRVPFSSFMEHSRLILKDNPKSVEFQMRILERSGLGEETCLPPAIHYIPPTPTMESARNEAQMVIFTAMEDLFKNTGLKPKDIDILIVNCSLFSPTPSLSAMIINKYKLRSNIKSYNLSGMGCSASLISVDVARDLLQVHPNSNAIIISTEIITPNYYKGNERAMLLPNCLFRMGGAAILLSNRRSDRWRAKYKLCHLVRTHRGADDKSYNCVMEQEDKNGNVGINLSKDLMTIAGEALKANITTIGPLVLPASEQLLFLSSLIGRKIFNPKWKPYIPDFKQAFEHFCIHAGGRAVIDELQKNLQLSGEHVEASRMTLHRFGNTSSSSLWYELSYIEAQGRMKRNDRVWQIAFGSGFKCNSAVWKCNRTIKTPTDGAWSDCIERYPVFIPEVVKL

SEQ ID NO: 108104 - protein, 450 aa, Arabidopsis thaliana
  peptide (1)..(450): Ceres Seq. ID no. 13653207
  misc_feature (283)..(423): Pfam Name: Chalcone and stilbene synthases, C-terminal domain Pfam Description: Chalcone and stilbene synthases, C-terminal
  misc_feature (1)..(450): Homolog of NCBI NO: 15222592 NR Description: very-long-chain fatty acid condensing enzyme putative [Arabidopsis thaliana] >gi|25403020|pir||F86384 probable
  misc_feature (1)..(450): Homolog of NCBI NO: 21618184 NR Description: fatty acid condensing enzyme CUT1, putative
  misc_feature (1)..(450): Homolog of NCBI NO: 28393607 NR Description: putative fatty acid condensing enzyme CUT1
  misc_feature (1)..(450): Homolog of NCBI NO: 17979464 NR Description: At1g68530/T26J14_10 [Arabidopsis thaliana]
  misc_feature (1)..(450): Homolog of NCBI NO: 15221431 NR Description: very-long-chain fatty acid condensing enzyme
  misc_feature (1)..(450): Homolog of NCBI NO: 21593111 NR Description: very-long-chain fatty acid condensing enzyme CUT1
  misc_feature (1)..(449): Homolog of NCBI NO: 32172502 NR Description: FAE1 [Marchantia polymorpha]
  misc_feature (1)..(442): Homolog of NCBI NO: 15226724 NR Description: very-long-chain fatty acid condensing enzyme
  misc_feature (1)..(442): Homolog of NCBI NO: 15223556 NR Description: very-long-chain fatty acid condensing enzyme putative [Arabidopsis thaliana] >gi|25402889|pir||F86327 protein
  misc_feature (1)..(445): Homolog of NCBI NO: 29417540 NR Description: beta-ketoacyl-CoA-synthase [Marchantia polymorpha]
MGPEEILSVLNSLHFELLHILCSSFLIIFVSTVYFMSKPRTVYLVDYSCYKPPVTCRVPFSSFMEHSRLILKDNPKSVEFQMRILERSGLGEETCLPPAIHYIPPTPTMESARNEAQMVIFTAMEDLFKNTGLKPKDIDILIVNCSLFSPTPSLSAMIINKYKLRSNIKSYNLSGMGCSASLISVDVARDLLQVHPNSNAIIISTEIITPNYYKGNERAMLLPNCLFRMGGAAILLSNRRSDRWRAKYKLCHLVRTHRGADDKSYNCVMEQEDKNGNVGINLSKDLMTIAGEALKANITTIGPLVLPASEQLLFLSSLIGRKIFNPKWKPYIPDFKQAFEHFCIHAGGRAVIDELQKNLQLSGEHVEASRMTLHRFGNTSSSSLWYELSYIEAQGRMKRNDRVWQIAFGSGFKCNSAVWKCNRTIKTPTDGAWSDCIERYPVFIPEVVKL

SEQ ID NO: 108105 - protein, 415 aa, Arabidopsis thaliana
  peptide (1)..(415): Ceres Seq. ID no. 13653208
  misc_feature (248)..(388): Pfam Name: Chalcone and stilbene synthases, C-terminal domain Pfam Description: Chalcone and stilbene synthases, C-terminal
  misc_feature (1)..(415): Homolog of NCBI NO: 15222592 NR Description: very-long-chain fatty acid condensing enzyme putative [Arabidopsis thaliana] >gi|25403020|pir||F86384 probable
  misc_feature (1)..(415): Homolog of NCBI NO: 21618184 NR Description: fatty acid condensing enzyme CUT1, putative
  misc_feature (1)..(415): Homolog of NCBI NO: 28393607 NR Description: putative fatty acid condensing enzyme CUT1
  misc_feature (1)..(415): Homolog of NCBI NO: 17979464 NR Description: At1g68530/T26J14_10 [Arabidopsis thaliana]
  misc_feature (1)..(415): Homolog of NCBI NO: 15221431 NR Description: very-long-chain fatty acid condensing enzyme
  misc_feature (1)..(415): Homolog of NCBI NO: 21593111 NR Description: very-long-chain fatty acid condensing enzyme CUT1
  misc_feature (1)..(414): Homolog of NCBI NO: 32172502 NR Description: FAE1 [Marchantia polymorpha]
  misc_feature (1)..(407): Homolog of NCBI NO: 15226724 NR Description: very-long-chain fatty acid condensing enzyme
  misc_feature (1)..(407): Homolog of NCBI NO: 15223556 NR Description: very-long-chain fatty acid condensing enzyme putative [Arabidopsis thaliana] >gi|25402889|pir||F86327 protein
  misc_feature (1)..(410): Homolog of NCBI NO: 29417540 NR Description: beta-ketoacyl-CoA-synthase [Marchantia polymorpha]
MSKPRTVYLVDYSCYKPPVTCRVPFSSFMEHSRLILKDNPKSVEFQMRILERSGLGEETCLPPAIHYIPPTPTMESARNEAQMVIFTAMEDLFKNTGLKPKDIDILIVNCSLFSPTPSLSAMIINKYKLRSNIKSYNLSGMGCSASLISVDVARDLLQVHPNSNAIIISTEIITPNYYKGNERAMLLPNCLFRMGGAAILLSNRRSDRWRAKYKLCHLVRTHRGADDKSYNCVMEQEDKNGNVGINLSKDLMTIAGEALKANITTIGPLVLPASEQLLFLSSLIGRKIFNPKWKPYIPDFKQAFEHFCIHAGGRAVIDELQKNLQLSGEHVEASRMTLHRFGNTSSSSLWYELSYIEAQGRMKRNDRVWQIAFGSGFKCNSAVWKCNRTIKTPTDGAWSDCIERYPVFIPEVVKL

SEQ ID NO: 108106 - DNA, 1465 bp, Arabidopsis thaliana
  misc_feature (1)..(1465): Ceres Seq. ID no. 13653213
  misc_feature: MA Experiment ID: 20000180 Result: Down-regulated in Transcription
  misc_feature: MA Experiment 20000180 PARAMETER Experiment Name: At_Germinating_Seeds_P Parameter: Age (hr) Value: 24 vs. 0
  misc_feature: MA Experiment 20000180 PARAMETER Experiment Name: At_Germinating_Seeds_P Parameter: Tissue Value: Germinating Seeds
  misc_feature: MA Experiment ID: 20000265 Result: Up-regulated in Transcription
  misc_feature: MA Experiment 20000265 PARAMETER Experiment Name: At_Open_Flower_P Parameter: Age (day) Value: 21
  misc_feature: MA Experiment 20000265 PARAMETER Experiment Name: At_Open_Flower_P Parameter: Plant Line Value: WS
  misc_feature: MA Experiment 20000265 PARAMETER Experiment Name: At_Open_Flower_P Parameter: Tissue Value: Closed Flower vs. Whole Plant
  misc_feature: MA Experiment ID: 20001451 Result: Down-regulated in Transcription
  misc_feature: MA Experiment 20001451 PARAMETER Experiment Name: At_Far-red-induction_P Parameter: Age (day) Value: 7
  misc_feature: MA Experiment 20001451 PARAMETER Experiment Name: At_Far-red-induction_P Parameter: Light Value: Far-red vs. White
  misc_feature: MA Experiment 20001451 PARAMETER Experiment Name: At_Far-red-induction_P Parameter: Organism Value: A. thaliana
  misc_feature: MA Experiment 20001451 PARAMETER Experiment Name: At_Far-red-induction_P Parameter: Plant Line Value: Columbia
  misc_feature: MA Experiment 20001451 PARAMETER Experiment Name: At_Far-red-induction_P Parameter: Timepoint (hr) Value: 24
  misc_feature: MA Experiment 20001451 PARAMETER Experiment Name: At_Far-red-induction_P Parameter: Tissue Value: Whole Plant
atggtggataccgaaatgcaagagcaagatgtgacttttggtgcccttgttgagacaaagtatttagaggaagaacctttggagccagaaaatgatcacaaccctagtgaaatcccgcagccccttcttcttggagatggtcaggctaataatggtcatggcatgaatggtggtgctgttggagttgttgaccactctgaaaggaagactcgtagggtgcaaatgttgagtcctaagactgaaggtgagaatgccaaaaagaggaagacttggctgctggattctgaggcacagggaactgatgaagcagggacaccggtagaacaagtggcgtttctaagagaagtggaggccttttacaaagagagtttcctggaatttaaacctcctaagttttatggacagcctttaaacattctcaagctttggcgagcagtcgtgaacctaggtggctatgaagtggtcaccacaaataagctgtggcggcaagttggagaatccttcaatcctcccaagacatgcacaacagtctcctacacattccgcaatttctatgagaaggcacttttggagtacgaaaagtgtttaaggaataatggtgagcttaaccttcctggttcaacattgattctgtcttccagtgtcgagaaagagccaagtagccatcaaggttcagggtcaggcagggcacgaagagattctgcagctcgtgctatgcaaggttggcatgcgcagcgccttgttggatctggagaggttactgcgcctgctgttaaggataagggcttaatttccaccccaaagcacaagaaactcaaaagcattgggctgcaaaaacacaaacaacaaactagcatggaccatgttgttacaaatgaagctgacaaacagttggctgctgaggttgttgatgttggacccgttgctgactgggtgaagataaatgtcaaagaatctaaggattccttcgagatatttgccttggtacctggacttcttcgcaaagaggttcgaattcaatcagatcctgcgggaaaggtggttataacaggccagccagagcagcttgacaatccttgggggattacacccttcaaaaagattgttgacttatcagcaagaattgatccgcttcacacatccgcggtcatgagcatgcatggacggttgttcatacgagttccgtttgagcagtaatggatttcaagagagctggtcagttgttcgtggtttcttctaggaattcatatgtttcagaaccaaattgttaggcggctgaagcagttttgtaactgtgatttgaatctgaagactgaagttaggaacatgcaacaaacatttgatcttactgtaatatttctcttttgtataatttgagattagtaggagaaactgctccaaagacatttaggatgcaaccaacaatgatgattttgatctaaaatcggaatgttatgcttttccc

SEQ ID NO: 108107 - protein, 398 aa, Arabidopsis thaliana
  peptide (1)..(398): Ceres Seq. ID no. 13653214
  misc_feature (103)..(213): Pfam Name: ARID/BRIGHT DNA binding domain Pfam Description: ARID/BRIGHT DNA binding domain
  misc_feature (1)..(398): Homolog of NCBI NO: 30687082 NR Description: expressed protein [Arabidopsis thaliana]
  misc_feature (1)..(141): Homolog of NCBI NO: 25518704 NR Description: hypothetical protein F9H16.11 - Arabidopsis >gi|4836898|gb|AAD30601.1|AC007369_11 Hypothetical protein
  misc_feature (188)..(323): Homolog of NCBI NO: 25518704 NR Description: hypothetical protein F9H16.11 - Arabidopsis >gi|4836898|gb|AAD30601.1|AC007369_11 Hypothetical protein
  misc_feature (316)..(398): Homolog of NCBI NO: 25518704 NR Description: hypothetical protein F9H16.11 - Arabidopsis >gi|4836898|gb|AAD30601.1|AC007369_11 Hypothetical protein
  misc_feature (77)..(398): Homolog of NCBI NO: 30699177 NR Description: DNA-binding protein -related [Arabidopsis
  misc_feature (77)..(276): Homolog of NCBI NO: 25406449 NR Description: probable DNA-binding protein, 48797-45229
  misc_feature (300)..(398): Homolog of NCBI NO: 25406449 NR Description: probable DNA-binding protein, 48797-45229
  misc_feature (31)..(398): Homolog of NCBI NO: 30679972 NR Description: expressed protein [Arabidopsis thaliana] At2g17400 [Arabidopsis thaliana] >gi|27363260|gb|AAO11549.1|
  misc_feature (184)..(398): Homolog of NCBI NO: 25411792 NR Description: hypothetical protein At2g17410 [imported] -
  misc_feature (291)..(398): Homolog of NCBI NO: 28393488 NR Description: unknown protein [Arabidopsis thaliana]
MVDTEMQEQDVTFGALVETKYLEEEPLEPENDHNPSEIPQPLLLGDGQANNGHGMNGGAVGVVDHSERKTRRVQMLSPKTEGENAKKRKTWLLDSEAQGTDEAGTPVEQVAFLREVEAFYKESFLEFKPPKFYGQPLNILKLWRAVVNLGGYEVVTTNKLWRQVGESFNPPKTCTTVSYTFRNFYEKALLEYEKCLRNNGELNLPGSTLILSSSVEKEPSSHQGSGSGRARRDSAARAMQGWHAQRLVGSGEVTAPAVKDKGLISTPKHKKLKSIGLQKHKQQTSMDHVVTNEADKQLAAEVVDVGPVADWVKINVKESKDSFEIFALVPGLLRKEVRIQSDPAGKVVITGQPEQLDNPWGITPFKKIVDLSARIDPLHTSAVMSMHGRLFIRVPFEQ

SEQ ID NO: 108108 - protein, 393 aa, Arabidopsis thaliana
  peptide (1)..(393): Ceres Seq. ID no. 13653215
  misc_feature (98)..(208): Pfam Name: ARID/BRIGHT DNA binding domain Pfam Description: ARID/BRIGHT DNA binding domain
  misc_feature (1)..(393): Homolog of NCBI NO: 30687082 NR Description: expressed protein [Arabidopsis thaliana]
  misc_feature (1)..(136): Homolog of NCBI NO: 25518704 NR Description: hypothetical protein F9H16.11 - Arabidopsis >gi|4836898|gb|AAD30601.1|AC007369_11 Hypothetical protein
  misc_feature (183)..(318): Homolog of NCBI NO: 25518704 NR Description: hypothetical protein F9H16.11 - Arabidopsis >gi|4836898|gb|AAD30601.1|AC007369_11 Hypothetical protein
  misc_feature (311)..(393): Homolog of NCBI NO: 25518704 NR Description: hypothetical protein F9H16.11 - Arabidopsis >gi|4836898|gb|AAD30601.1|AC007369_11 Hypothetical protein
  misc_feature (72)..(393): Homolog of NCBI NO: 30699177 NR Description: DNA-binding protein -related [Arabidopsis
  misc_feature (72)..(271): Homolog of NCBI NO: 25406449 NR Description: probable DNA-binding protein, 48797-45229
  misc_feature (295)..(393): Homolog of NCBI NO: 25406449 NR Description: probable DNA-binding protein, 48797-45229
  misc_feature (26)..(393): Homolog of NCBI NO: 30679972 NR Description: expressed protein [Arabidopsis thaliana] At2g17400 [Arabidopsis thaliana] >gi|27363260|gb|AAO11549.1|
  misc_feature (179)..(393): Homolog of NCBI NO: 25411792 NR Description: hypothetical protein At2g17410 [imported] -
  misc_feature (286)..(393): Homolog of NCBI NO: 28393488 NR Description: unknown protein [Arabidopsis thaliana]
MQEQDVTFGALVETKYLEEEPLEPENDHNPSEIPQPLLLGDGQANNGHGMNGGAVGVVDHSERKTRRVQMLSPKTEGENAKKRKTWLLDSEAQGTDEAGTPVEQVAFLREVEAFYKESFLEFKPPKFYGQPLNILKLWRAVVNLGGYEVVTTNKLWRQVGESFNPPKTCTTVSYTFRNFYEKALLEYEKCLRNNGELNLPGSTLILSSSVEKEPSSHQGSGSGRARRDSAARAMQGWHAQRLVGSGEVTAPAVKDKGLISTPKHKKLKSIGLQKHKQQTSMDHVVTNEADKQLAAEVVDVGPVADWVKINVKESKDSFEIFALVPGLLRKEVRIQSDPAGKVVITGQPEQLDNPWGITPFKKIVDLSARIDPLHTSAVMSMHGRLFIRVPFEQ

SEQ ID NO: 108109 - protein, 344 aa, Arabidopsis thaliana
  peptide (1)..(344): Ceres Seq. ID no. 13653216
  misc_feature (49)..(159): Pfam Name: ARID/BRIGHT DNA binding domain Pfam Description: ARID/BRIGHT DNA binding domain
  misc_feature (1)..(344): Homolog of NCBI NO: 30687082 NR Description: expressed protein [Arabidopsis thaliana]
  misc_feature (1)..(87): Homolog of NCBI NO: 25518704 NR Description: hypothetical protein F9H16.11 - Arabidopsis >gi|4836898|gb|AAD30601.1|AC007369_11 Hypothetical protein
  misc_feature (134)..(269): Homolog of NCBI NO: 25518704 NR Description: hypothetical protein F9H16.11 - Arabidopsis >gi|4836898|gb|AAD30601.1|AC007369_11 Hypothetical protein
  misc_feature (262)..(344): Homolog of NCBI NO: 25518704 NR Description: hypothetical protein F9H16.11 - Arabidopsis >gi|4836898|gb|AAD30601.1|AC007369_11 Hypothetical protein
  misc_feature (23)..(344): Homolog of NCBI NO: 30699177 NR Description: DNA-binding protein -related [Arabidopsis
  misc_feature (23)..(222): Homolog of NCBI NO: 25406449 NR Description: probable DNA-binding protein, 48797-45229
  misc_feature (246)..(344): Homolog of NCBI NO: 25406449 NR Description: probable DNA-binding protein, 48797-45229
  misc_feature (1)..(344): Homolog of NCBI NO: 30679972 NR Description: expressed protein [Arabidopsis thaliana] At2g17400 [Arabidopsis thaliana] >gi|27363260|gb|AAO11549.1|
  misc_feature (130)..(344): Homolog of NCBI NO: 25411792 NR Description: hypothetical protein At2g17410 [imported] -
  misc_feature (237)..(344): Homolog of NCBI NO: 28393488 NR Description: unknown protein [Arabidopsis thaliana]
MNGGAVGVVDHSERKTRRVQMLSPKTEGENAKKRKTWLLDSEAQGTDEAGTPVEQVAFLREVEAFYKESFLEFKPPKFYGQPLNILKLWRAVVNLGGYEVVTTNKLWRQVGESFNPPKTCTTVSYTFRNFYEKALLEYEKCLRNNGELNLPGSTLILSSSVEKEPSSHQGSGSGRARRDSAARAMQGWHAQRLVGSGEVTAPAVKDKGLISTPKHKKLKSIGLQKHKQQTSMDHVVTNEADKQLAAEVVDVGPVADWVKINVKESKDSFEIFALVPGLLRKEVRIQSDPAGKVVITGQPEQLDNPWGITPFKKIVDLSARIDPLHTSAVMSMHGRLFIRVPFEQ

SEQ ID NO: 108110 - DNA, 3478 bp, Arabidopsis thaliana
  misc_feature (1)..(3478): Ceres Seq. ID no. 13653217
  misc_feature: MA Experiment ID: 20000173 Result: Down-regulated in Transcription
  misc_feature: MA Experiment 20000173 PARAMETER Experiment Name: At_42deg_Heat_P Parameter: Age (day) Value: 14
  misc_feature: MA Experiment 20000173 PARAMETER Experiment Name: At_42deg_Heat_P Parameter: Organism Value: A. thaliana
  misc_feature: MA Experiment 20000173 PARAMETER Experiment Name: At_42deg_Heat_P Parameter: Plant Line Value: WS
  misc_feature: MA Experiment 20000173 PARAMETER Experiment Name: At_42deg_Heat_P Parameter: Temperature (deg C) Value: 42 vs. 22
  misc_feature: MA Experiment 20000173 PARAMETER Experiment Name: At_42deg_Heat_P Parameter: Timepoint (hr) Value: 6
  misc_feature: MA Experiment 20000173 PARAMETER Experiment Name: At_42deg_Heat_P Parameter: Tissue Value: Aerial
  misc_feature: MA Experiment ID: 20000180 Result: Up-regulated in Transcription
  misc_feature: MA Experiment 20000180 PARAMETER Experiment Name: At_Germinating_Seeds_P Parameter: Age (hr) Value: 24 vs. 0
  misc_feature: MA Experiment 20000180 PARAMETER Experiment Name: At_Germinating_Seeds_P Parameter: Tissue Value: Germinating Seeds
  misc_feature: MA Experiment ID: 20000235 Result: Up-regulated in Transcription
  misc_feature: MA Experiment 20000235 PARAMETER Experiment Name: At_Siliques_P Parameter: Age (day) Value: 21
  misc_feature: MA Experiment 20000235 PARAMETER Experiment Name: At_Siliques_P Parameter: Organism Value: A. thaliana
  misc_feature: MA Experiment 20000235 PARAMETER Experiment Name: At_Siliques_P Parameter: Plant Line Value: WS
  misc_feature: MA Experiment 20000235 PARAMETER Experiment Name: At_Siliques_P Parameter: Tissue Value: 5-10mm Siliques vs. Whole Plant
  misc_feature: MA Experiment ID: 20000286 Result: Up-regulated in Transcription
  misc_feature: MA Experiment 20000286 PARAMETER Experiment Name: At_Open_Flower_P Parameter: Age (day) Value: 21
  misc_feature: MA Experiment 20000286 PARAMETER Experiment Name: At_Open_Flower_P Parameter: Plant Line Value: WS
  misc_feature: MA Experiment 20000286 PARAMETER Experiment Name: At_Open_Flower_P Parameter: Tissue Value: Half Open vs. Whole Plant
  misc_feature: MA Experiment ID: 20000439 Result: Up-regulated in Transcription
  misc_feature: MA Experiment 20000439 PARAMETER Experiment Name: At_Roots__P Parameter: Age (day) Value: 14 vs. 21
  misc_feature: MA Experiment 20000439 PARAMETER Experiment Name: At_Roots__P Parameter: Organism Value: A. thaliana
  misc_feature: MA Experiment 20000439 PARAMETER Experiment Name: At_Roots__P Parameter: Tissue Value: Roots vs. Whole Plant
  misc_feature: MA Experiment ID: 20001451 Result: Down-regulated in Transcription
  misc_feature: MA Experiment 20001451 PARAMETER Experiment Name: At_Far-red-induction_P Parameter: Age (day) Value: 7
  misc_feature: MA Experiment 20001451 PARAMETER Experiment Name: At_Far-red-induction_P Parameter: Light Value: Far-red vs. White
  misc_feature: MA Experiment 20001451 PARAMETER Experiment Name: At_Far-red-induction_P Parameter: Organism Value: A. thaliana
  misc_feature: MA Experiment 20001451 PARAMETER Experiment Name: At_Far-red-induction_P Parameter: Plant Line Value: Columbia
  misc_feature: MA Experiment 20001451 PARAMETER Experiment Name: At_Far-red-induction_P Parameter: Timepoint (hr) Value: 24
  misc_feature: MA Experiment 20001451 PARAMETER Experiment Name: At_Far-red-induction_P Parameter: Tissue Value: Whole Plant
  misc_feature: MA Experiment ID: 20001556 Result: Down-regulated in Transcription
  misc_feature: MA Experiment 20001556 PARAMETER Experiment Name: At_Drought_Soil_Dry_P Parameter: Age (day) Value: 26
  misc_feature: MA Experiment 20001556 PARAMETER Experiment Name: At_Drought_Soil_Dry_P Parameter: Organism Value: A. thaliana
  misc_feature: MA Experiment 20001556 PARAMETER Experiment Name: At_Drought_Soil_Dry_P Parameter: Plant Line Value: WS
  misc_feature: MA Experiment 20001556 PARAMETER Experiment Name: At_Drought_Soil_Dry_P Parameter: Post Timepoint (hr) Value: None
  misc_feature: MA Experiment 20001556 PARAMETER Experiment Name: At_Drought_Soil_Dry_P Parameter: Post-Treatment Value: None
  misc_feature: MA Experiment 20001556 PARAMETER Experiment Name: At_Drought_Soil_Dry_P Parameter: Timepoint (day) Value: 12
  misc_feature: MA Experiment 20001556 PARAMETER Experiment Name: At_Drought_Soil_Dry_P Parameter: Treatment Value: Drought vs. No Drought
  misc_feature: MA Experiment ID: 20001558 Result: Down-regulated in Transcription
  misc_feature: MA Experiment 20001558 PARAMETER Experiment Name: At_Drought_Soil_Dry_P Parameter: Age (day) Value: 27
  misc_feature: MA Experiment 20001558 PARAMETER Experiment Name: At_Drought_Soil_Dry_P Parameter: Organism Value: A. thaliana
  misc_feature: MA Experiment 20001558 PARAMETER Experiment Name: At_Drought_Soil_Dry_P Parameter: Plant Line Value: WS
  misc_feature: MA Experiment 20001558 PARAMETER Experiment Name: At_Drought_Soil_Dry_P Parameter: Post Timepoint (hr) Value: 6
  misc_feature: MA Experiment 20001558 PARAMETER Experiment Name: At_Drought_Soil_Dry_P Parameter: Post-Treatment Value: Re-Water vs. No Drought
  misc_feature: MA Experiment 20001558 PARAMETER Experiment Name: At_Drought_Soil_Dry_P Parameter: Timepoint (day) Value: 13
  misc_feature: MA Experiment 20001558 PARAMETER Experiment Name: At_Drought_Soil_Dry_P Parameter: Treatment Value: Drought vs. No Drought
  misc_feature: MA Experiment ID: 20001906 Result: Down-regulated in Transcription
  misc_feature: MA Experiment 20001906 PARAMETER Experiment Name: At_Drought_Reproduction_P Parameter: Age (day) Value: 35
  misc_feature: MA Experiment 20001906 PARAMETER Experiment Name: At_Drought_Reproduction_P Parameter: Organism Value: A. thaliana
  misc_feature: MA Experiment 20001906 PARAMETER Experiment Name: At_Drought_Reproduction_P Parameter: Plant Line Value: WS
  misc_feature: MA Experiment 20001906 PARAMETER Experiment Name: At_Drought_Reproduction_P Parameter: Timepoint (day) Value: 5
  misc_feature: MA Experiment 20001906 PARAMETER Experiment Name: At_Drought_Reproduction_P Parameter: Tissue Value: Siliques
  misc_feature: MA Experiment 20001906 PARAMETER Experiment Name: At_Drought_Reproduction_P Parameter: Treatment Value: Drought vs. No Drought
  misc_feature: MA Experiment ID: 20001911 Result: Down-regulated in Transcription
  misc_feature: MA Experiment 20001911 PARAMETER Experiment Name: At_Drought_Reproduction_P Parameter: Age (day) Value: 40
  misc_feature: MA Experiment 20001911 PARAMETER Experiment Name: At_Drought_Reproduction_P Parameter: Organism Value: A. thaliana
  misc_feature: MA Experiment 20001911 PARAMETER Experiment Name: At_Drought_Reproduction_P Parameter: Plant Line Value: WS
  misc_feature: MA Experiment 20001911 PARAMETER Experiment Name: At_Drought_Reproduction_P Parameter: Timepoint (day) Value: 10
  misc_feature: MA Experiment 20001911 PARAMETER Experiment Name: At_Drought_Reproduction_P Parameter: Tissue Value: Flowers
  misc_feature: MA Experiment 20001911 PARAMETER Experiment Name: At_Drought_Reproduction_P Parameter: Treatment Value: Drought vs. No Drought
  misc_feature: Pfam Name: Kinesin Pfam Description: Kinesin motor domain
ctcaactttttttcttttctaattaaatctctcattaccttttaaatctatccccaaacttgttaaccaaaaaaaacagagaagaaatctcccaaatcctctttttttttgtttgttctaccgtttctcatatatctctctgtctccgatcttatttggatcggactagtgtcattggcagtgaagtttcattgactttggggttttcgcttttgatgctgtgagcttattattattgttattacggagttgatggcggctactgcgacggaggatggaggattaagcttcactgtggcttcagtaatggaggatgtgttgcagcaacatggaaatgggcttagagatcatgatttagtgtctcgtcgagctgaagaagctgcatcgaggagatatgaggcggctaattggctgagaaggatggttggagttgttggagctaaggatttgcctgcagagccaacagaagaagggcttaggcttggtttaagaagtggaattatcctttgtaaagtcctcaataaggttcaacctggagctgtctcaaaggttgtggaaagtccttgtgatgccattcttgttgcggatggagctccgttatcagcatttcagtattttgagaatgttaggaactttcttgttgctatacaggaaatggggtttccaacatttgaggcatctgatctcgagcaaggaggaaatgcttctcgagttgtgaattgtgttttggctatcaaatcatatgatgaatggaaacaaagtggtggaattggagtttggaaatttggtggcaacattaagcctcctgcacttgggaagtcatcttttgtcagaaaaaactcagagccattcatgaactctttatcgagaacctcctcgatcaacaatgagaaagctccctctgagaatgattctaacaagctgtccagtcccagttccttgagcacacttgttcgcgctgttctatcagataaaaagcctgaggatgtgcccaaactgattgaatctctgctgagtaaagtagtcgaagagtttgaaaatcgagttacaaatcagtatgagttggttagagcagctccaagagaatcaacttcgtcacagaacaacagatcatttcttaaacctcttggtgaaagagagagggaagagaagagtttcaaagcaataaagaaagatgatcacaatagtcagattcttgacgaaaagatgaaaactcgccaatttaaacaactgacaatcttcaaccaacaacaagaagatatagaaggactaagacagacgctctacacaacaagggctggtatgcaatttatgcagaagaaatttcaagaagagttctcttctcttggtatgcacgttcatggccttgctcatgctgcttctggctatcaccgagttcttgaagaaaaccgaaaactttataatcaagtgcaggatctcaagggtagcatccgtgtttattgtcgggtgcggccatttttgcctggacaatccagcttttctagtacaattgggaacatggaggatgataccatagggatcaatactgcatctagacatggaaaatcactcaaatccttcactttcaacaaagtctttggcccatctgcaactcaagaagaggtattttctgatatgcagccattgatccgttctgttcttgatggatacaatgtctgcatatttgcatatggtcaaactggatcaggaaaaacattcacaatgagtggaccaagagatctaacggagaagagccagggagttaattacagagcacttggtgatctgtttcttcttgctgaacaaagaaaagacacattccgctacgatattgcagttcagatgattgagatttacaatgagcaagttagagaccttttggttactgatggaagcaataaaaggttagagatcaggaatagctctcaaaagggtctaagtgtaccggatgcaagtcttgttccagtctcttcaacatttgatgttattgatctaatgaaaactgggcacaagaatcgagccgttggatcaacagccttgaatgatcgaagcagtcgttctcatagctgcttgactgttcatgttcaaggaagagacttgacttcaggagctgtgcttcgaggatgcatgcatcttgtggatctagcaggcagtgagagggtagacaaatccgaggttactggagacagactaaaagaagcacagcacatcaatagatcgctctctgctttaggagatgtgattgcttcgctagctcacaagaacccacatgttccttacagaaacagcaaactcacacaactccttcaggactctcttggaggacaagcaaagacattgatgtttgtccacattagtcctgaggcagatgcagttggggaaacaataagcactttgaagtttgcagagagagtagctacggttgagcttggggctgcacgagtgaacaatgatacttcagatgttaaggaactcaaagaacagattgctactcttaaagcagcactcgcgagaaaagaagcagagtcacagcagaacaacatcttgaaaactcctggtggctctgagaaatacaaagccaaaactggtgaagtagagattcataacaataacatcatgacaaagaaatctgagagttgtgaagtggaggagattacagtgaactcaccaccttggccaccagtagcaagtccaggacaagcctacagagaggatgaccgaagtttcgggtccagcgagtgggttgacaaggtgatggtgaataacagacaagacgagatgagaagagtggagagtctttggggaggagccacaacagagaatggtattggtattctgccggaagatttttacaggagagatttggcttcagacacttcaagaatattctctgaacattcttacaacatcttcatgggaaacaacaacagcacagacgatctagatgcagccacaagtgactcatctgagccagatttgctctggcaattcaaccagtccaccaagatacctacaagaagcaatattgagtcaaaactcaagaaacccgtctcaaaacctataagaagtcctcaatccaggaacaactcaaacaacacggtttcacgtcctttggcttcacagaaggtagggaatggtcctcgtggcatgaaacagttcggtcctgctgatatgaagcggaaagctactaacgccagacattgaaggccactcactcacacggatacatacatacacactcacatggcttcttattggttttgatttgtttatttttcatccattggtttttattgtttcttcttctctcgtttggttgtgcgagcttttatatacataacacagacaaagacaatagctagacaatgcaacaacagtttcttcttgttgctctctttcttgggttttgttttacttttctgttctatgtatattcttccactagctgaacataaaaaatatgaaagatttgtttgct

SEQ ID NO: 108111 - protein, 983 aa, Arabidopsis thaliana
  peptide (1)..(983): Ceres Seq. ID no. 13653218
  misc_feature: Pfam Name: Kinesin Pfam Description: Kinesin motor domain
  misc_feature (1)..(977): Homolog of NCBI NO: 18421069 NR Description: kinesin-related protein [Arabidopsis thaliana]
  misc_feature (1)..(977): Homolog of NCBI NO: 11358474 NR Description: kinesin-like heavy chain [validated] -
  misc_feature (373)..(755): Homolog of NCBI NO: 7485241 NR Description: hypothetical protein A_IG002P16.12 - Arabidopsis >gi|2191180|gb|AAB61066.1| Similar to kinesin; coded for by A.
  misc_feature (1)..(307): Homolog of NCBI NO: 7485241 NR Description: hypothetical protein A_IG002P16.12 - Arabidopsis >gi|2191180|gb|AAB61066.1| Similar to kinesin; coded for by A.
  misc_feature (5)..(272): Homolog of NCBI NO: 22329432 NR Description: kinesin-related protein [Arabidopsis thaliana]
  misc_feature (298)..(522): Homolog of NCBI NO: 22329432 NR Description: kinesin-related protein [Arabidopsis thaliana]
  misc_feature (553)..(768): Homolog of NCBI NO: 22329432 NR Description: kinesin-related protein [Arabidopsis thaliana]
  misc_feature (249)..(761): Homolog of NCBI NO: 30692267 NR Description: kinesin-related protein [Arabidopsis thaliana]
  misc_feature (62)..(223): Homolog of NCBI NO: 30692267 NR Description: kinesin-related protein [Arabidopsis thaliana]
  misc_feature (249)..(761): Homolog of NCBI NO: 18201934 NR Description: kinesin-like protein heavy chain [Arabidopsis
MAATATEDGGLSFTVASVMEDVLQQHGNGLRDHDLVSRRAEEAASRRYEAANWLRRMVGVVGAKDLPAEPTEEGLRLGLRSGIILCKVLNKVQPGAVSKVVESPCDAILVADGAPLSAFQYFENVRNFLVAIQEMGFPTFEASDLEQGGNASRVVNCVLAIKSYDEWKQSGGIGVWKFGGNIKPPALGKSSFVRKNSEPFMNSLSRTSSINNEKAPSENDSNKLSSPSSLSTLVRAVLSDKKPEDVPKLIESLLSKVVEEFENRVTNQYELVRAAPRESTSSQNNRSFLKPLGEREREEKSFKAIKKDDHNSQILDEKMKTRQFKQLTIFNQQQEDIEGLRQTLYTTRAGMQFMQKKFQEEFSSLGMHVHGLAHAASGYHRVLEENRKLYNQVQDLKGSIRVYCRVRPFLPGQSSFSSTIGNMEDDTIGINTASRHGKSLKSFTFNKVFGPSATQEEVFSDMQPLIRSVLDGYNVCIFAYGQTGSGKTFTMSGPRDLTEKSQGVNYRALGDLFLLAEQRKDTFRYDIAVQMIEIYNEQVRDLLVTDGSNKRLEIRNSSQKGLSVPDASLVPVSSTFDVIDLMKTGHKNRAVGSTALNDRSSRSHSCLTVHVQGRDLTSGAVLRGCMHLVDLAGSERVDKSEVTGDRLKEAQHINRSLSALGDVIASLAHKNPHVPYRNSKLTQLLQDSLGGQAKTLMFVHISPEADAVGETISTLKFAERVATVELGAARVNNDTSDVKELKEQIATLKAALARKEAESQQNNILKTPGGSEKYKAKTGEVEIHNNNIMTKKSESCEVEEITVNSPPWPPVASPGQAYREDDRSFGSSEWVDKVMVNNRQDEMRRVESLWGGATTENGIGILPEDFYRRDLASDTSRIFSEHSYNIFMGNNNSTDDLDAATSDSSEPDLLWQFNQSTKIPTRSNIESKLKKPVSKPIRSPQSRNNSNNTVSRPLASQKVGNGPRGMKQFGPADMKRKATNARH

SEQ ID NO: 108112 - protein, 965 aa, Arabidopsis thaliana
  peptide (1)..(965): Ceres Seq. ID no. 13653219
  misc_feature: Pfam Name: Kinesin Pfam Description: Kinesin motor domain
  misc_feature (1)..(959): Homolog of NCBI NO: 18421069 NR Description: kinesin-related protein [Arabidopsis thaliana]
  misc_feature (1)..(959): Homolog of NCBI NO: 11358474 NR Description: kinesin-like heavy chain [validated] -
  misc_feature (355)..(737): Homolog of NCBI NO: 7485241 NR Description: hypothetical protein A_IG002P16.12 - Arabidopsis >gi|2191180|gb|AAB61066.1| Similar to kinesin; coded for by A.
  misc_feature (1)..(289): Homolog of NCBI NO: 7485241 NR Description: hypothetical protein A_IG002P16.12 - Arabidopsis >gi|2191180|gb|AAB61066.1| Similar to kinesin; coded for by A.
  misc_feature (1)..(254): Homolog of NCBI NO: 22329432 NR Description: kinesin-related protein [Arabidopsis thaliana]
  misc_feature (280)..(504): Homolog of NCBI NO: 22329432 NR Description: kinesin-related protein [Arabidopsis thaliana]
  misc_feature (535)..(750): Homolog of NCBI NO: 22329432 NR Description: kinesin-related protein [Arabidopsis thaliana]
  misc_feature (231)..(743): Homolog of NCBI NO: 30692267 NR Description: kinesin-related protein [Arabidopsis thaliana]
  misc_feature (44)..(205): Homolog of NCBI NO: 30692267 NR Description: kinesin-related protein [Arabidopsis thaliana]
  misc_feature (231)..(743): Homolog of NCBI NO: 18201934 NR Description: kinesin-like protein heavy chain [Arabidopsis
MEDVLQQHGNGLRDHDLVSRRAEEAASRRYEAANWLRRMVGVVGAKDLPAEPTEEGLRLGLRSGIILCKVLNKVQPGAVSKVVESPCDAILVADGAPLSAFQYFENVRNFLVAIQEMGFPTFEASDLEQGGNASRVVNCVLAIKSYDEWKQSGGIGVWKFGGNIKPPALGKSSFVRKNSEPFMNSLSRTSSINNEKAPSENDSNKLSSPSSLSTLVRAVLSDKKPEDVPKLIESLLSKVVEEFENRVTNQYELVRAAPRESTSSQNNRSFLKPLGEREREEKSFKAIKKDDHNSQILDEKMKTRQFKQLTIFNQQQEDIEGLRQTLYTTRAGMQFMQKKFQEEFSSLGMHVHGLAHAASGYHRVLEENRKLYNQVQDLKGSIRVYCRVRPFLPGQSSFSSTIGNMEDDTIGINTASRHGKSLKSFTFNKVFGPSATQEEVFSDMQPLIRSVLDGYNVCIFAYGQTGSGKTFTMSGPRDLTEKSQGVNYRALGDLFLLAEQRKDTFRYDIAVQMIEIYNEQVRDLLVTDGSNKRLEIRNSSQKGLSVPDASLVPVSSTFDVIDLMKTGHKNRAVGSTALNDRSSRSHSCLTVHVQGRDLTSGAVLRGCMHLVDLAGSERVDKSEVTGDRLKEAQHINRSLSALGDVIASLAHKNPHVPYRNSKLTQLLQDSLGGQAKTLMFVHISPEADAVGETISTLKFAERVATVELGAARVNNDTSDVKELKEQIATLKAALARKEAESQQNNILKTPGGSEKYKAKTGEVEIHNNNIMTKKSESCEVEEITVNSPPWPPVASPGQAYREDDRSFGSSEWVDKVMVNNRQDEMRRVESLWGGATTENGIGILPEDFYRRDLASDTSRIFSEHSYNIFMGNNNSTDDLDAATSDSSEPDLLWQFNQSTKIPTRSNIESKLKKPVSKPIRSPQSRNNSNNTVSRPLASQKVGNGPRGMKQFGPADMKRKATNARH

SEQ ID NO: 108113 - protein, 927 aa, Arabidopsis thaliana
  peptide (1)..(927): Ceres Seq. ID no. 13653220
  misc_feature: Pfam Name: Kinesin Pfam Description: Kinesin motor domain
  misc_feature (1)..(921): Homolog of NCBI NO: 18421069 NR Description: kinesin-related protein [Arabidopsis thaliana]
  misc_feature (1)..(921): Homolog of NCBI NO: 11358474 NR Description: kinesin-like heavy chain [validated] -
  misc_feature (317)..(699): Homolog of NCBI NO: 7485241 NR Description: hypothetical protein A_IG002P16.12 - Arabidopsis >gi|2191180|gb|AAB61066.1| Similar to kinesin; coded for by A.
  misc_feature (1)..(251): Homolog of NCBI NO: 7485241 NR Description: hypothetical protein A_IG002P16.12 - Arabidopsis >gi|2191180|gb|AAB61066.1| Similar to kinesin; coded for by A.
  misc_feature (1)..(216): Homolog of NCBI NO: 22329432 NR Description: kinesin-related protein [Arabidopsis thaliana]
  misc_feature (242)..(466): Homolog of NCBI NO: 22329432 NR Description: kinesin-related protein [Arabidopsis thaliana]
  misc_feature (497)..(712): Homolog of NCBI NO: 22329432 NR Description: kinesin-related protein [Arabidopsis thaliana]
  misc_feature (193)..(705): Homolog of NCBI NO: 30692267 NR Description: kinesin-related protein [Arabidopsis thaliana]
  misc_feature (6)..(167): Homolog of NCBI NO: 30692267 NR Description: kinesin-related protein [Arabidopsis thaliana]
  misc_feature (193)..(705): Homolog of NCBI NO: 18201934 NR Description: kinesin-like protein heavy chain [Arabidopsis
MVGVVGAKDLPAEPTEEGLRLGLRSGIILCKVLNKVQPGAVSKVVESPCDAILVADGAPLSAFQYFENVRNFLVAIQEMGFPTFEASDLEQGGNASRVVNCVLAIKSYDEWKQSGGIGVWKFGGNIKPPALGKSSFVRKNSEPFMNSLSRTSSINNEKAPSENDSNKLSSPSSLSTLVRAVLSDKKPEDVPKLIESLLSKVVEEFENRVTNQYELVRAAPRESTSSQNNRSFLKPLGEREREEKSFKAIKKDDHNSQILDEKMKTRQFKQLTIFNQQQEDIEGLRQTLYTTRAGMQFMQKKFQEEFSSLGMHVHGLAHAASGYHRVLEENRKLYNQVQDLKGSIRVYCRVRPFLPGQSSFSSTIGNMEDDTIGINTASRHGKSLKSFTFNKVFGPSATQEEVFSDMQPLIRSVLDGYNVCIFAYGQTGSGKTFTMSGPRDLTEKSQGVNYRALGDLFLLAEQRKDTFRYDIAVQMIEIYNEQVRDLLVTDGSNKRLEIRNSSQKGLSVPDASLVPVSSTFDVIDLMKTGHKNRAVGSTALNDRSSRSHSCLTVHVQGRDLTSGAVLRGCMHLVDLAGSERVDKSEVTGDRLKEAQHINRSLSALGDVIASLAHKNPHVPYRNSKLTQLLQDSLGGQAKTLMFVHISPEADAVGETISTLKFAERVATVELGAARVNNDTSDVKELKEQIATLKAALARKEAESQQNNILKTPGGSEKYKAKTGEVEIHNNNIMTKKSESCEVEEITVNSPPWPPVASPGQAYREDDRSFGSSEWVDKVMVNNRQDEMRRVESLWGGATTENGIGILPEDFYRRDLASDTSRIFSEHSYNIFMGNNNSTDDLDAATSDSSEPDLLWQFNQSTKIPTRSNIESKLKKPVSKPIRSPQSRNNSNNTVSRPLASQKVGNGPRGMKQFGPADMKRKATNARH

SEQ ID NO: 108114 - DNA, 1700 bp, Arabidopsis thaliana
  misc_feature (1)..(1700): Ceres Seq. ID no. 13653229
  misc_feature: MA Experiment ID: 108434 Result: Down-regulated in Transcription
  misc_feature: MA Experiment 108434 PARAMETER Experiment Name: At_Root_Tips_cDNA_P Parameter: Tissue Value: Root Tips
  misc_feature: MA Experiment ID: 108464 Result: Up-regulated in Transcription
  misc_feature: MA Experiment 108464 PARAMETER Experiment Name: At_Germinating_Seeds_cDNA_P Parameter: Age (day) Value: 4 vs. 0
  misc_feature: MA Experiment 108464 PARAMETER Experiment Name: At_Germinating_Seeds_cDNA_P Parameter: Tissue Value: Germinating Seeds
  misc_feature: MA Experiment ID: 108501 Result: Down-regulated in Transcription
  misc_feature: MA Experiment 108501 PARAMETER Experiment Name: At_ap2_floral_buds_cDNA_P Parameter: Plant Line Value: ap2 (Ler.)
  misc_feature: MA Experiment 108501 PARAMETER Experiment Name: At_ap2_floral_buds_cDNA_P Parameter: Tissue Value: Closed Flower
  misc_feature: MA Experiment ID: 20000070 Result: Down-regulated in Transcription
  misc_feature: MA Experiment 20000070 PARAMETER Experiment Name: At_100uM_ABA_Mutants_cDNA_P Parameter: Plant Line Value: CS24
  misc_feature: MA Experiment 20000070 PARAMETER Experiment Name: At_100uM_ABA_Mutants_cDNA_P Parameter: Timepoint (hr) Value: 6
  misc_feature: MA Experiment 20000070 PARAMETER Experiment Name: At_100uM_ABA_Mutants_cDNA_P Parameter: Tissue Value: Aerial
  misc_feature: MA Experiment 20000070 PARAMETER Experiment Name: At_100uM_ABA_Mutants_cDNA_P Parameter: Treatment Value: 100uM ABA vs. No Treatment
  misc_feature: MA Experiment ID: 20000071 Result: Down-regulated in Transcription
  misc_feature: MA Experiment 20000071 PARAMETER Experiment Name: At_100uM_ABA_Mutants_cDNA_P Parameter: Plant Line Value: CS8104
  misc_feature: MA Experiment 20000071 PARAMETER Experiment Name: At_100uM_ABA_Mutants_cDNA_P Parameter: Timepoint (hr) Value: 6
  misc_feature: MA Experiment 20000071 PARAMETER Experiment Name: At_100uM_ABA_Mutants_cDNA_P Parameter: Tissue Value: Aerial
  misc_feature: MA Experiment 20000071 PARAMETER Experiment Name: At_100uM_ABA_Mutants_cDNA_P Parameter: Treatment Value: 100uM ABA vs. No Treatment
  misc_feature: MA Experiment ID: 20000087 Result: Down-regulated in Transcription
  misc_feature: MA Experiment 20000087 PARAMETER Experiment Name: At_100uM_ABA_Mutants_cDNA_P Parameter: Plant Line Value: WS
  misc_feature: MA Experiment 20000087 PARAMETER Experiment Name: At_100uM_ABA_Mutants_cDNA_P Parameter: Timepoint (hr) Value: 6
  misc_feature: MA Experiment 20000087 PARAMETER Experiment Name: At_100uM_ABA_Mutants_cDNA_P Parameter: Tissue Value: Aerial
  misc_feature: MA Experiment 20000087 PARAMETER Experiment Name: At_100uM_ABA_Mutants_cDNA_P Parameter: Treatment Value: 100uM ABA vs. No Treatment
  misc_feature: MA Experiment ID: 20000089 Result: Down-regulated in Transcription
  misc_feature: MA Experiment ID: 20000090 Result: Down-regulated in Transcription
  misc_feature: MA Experiment ID: 20000117 Result: Down-regulated in Transcription
  misc_feature: MA Experiment 20000117 PARAMETER Experiment Name: At_100uM_ABA_Mutants_cDNA_P Parameter: Plant Line Value: Columbia
  misc_feature: MA Experiment 20000117 PARAMETER Experiment Name: At_100uM_ABA_Mutants_cDNA_P Parameter: Timepoint (hr) Value: 6
  misc_feature: MA Experiment 20000117 PARAMETER Experiment Name: At_100uM_ABA_Mutants_cDNA_P Parameter: Tissue Value: Aerial
  misc_feature: MA Experiment 20000117 PARAMETER Experiment Name: At_100uM_ABA_Mutants_cDNA_P Parameter: Treatment Value: 100uM ABA vs. No Treatment
  misc_feature: MA Experiment ID: 20000180 Result: Up-regulated in Transcription
  misc_feature: MA Experiment 20000180 PARAMETER Experiment Name: At_Germinating_Seeds_P Parameter: Age (hr) Value: 24 vs. 0
  misc_feature: MA Experiment 20000180 PARAMETER Experiment Name: At_Germinating_Seeds_P Parameter: Tissue Value: Germinating Seeds
  misc_feature: MA Experiment ID: 20000184 Result: Down-regulated in Transcription
  misc_feature: MA Experiment 20000184 PARAMETER Experiment Name: At_Shoots__P Parameter: Age (day) Value: 7
  misc_feature: MA Experiment 20000184 PARAMETER Experiment Name: At_Shoots__P Parameter: Tissue Value: Shoots vs. Whole Plant
  misc_feature: MA Experiment ID: 20000227 Result: Down-regulated in Transcription
  misc_feature: MA Experiment 20000227 PARAMETER Experiment Name: At_Root-Tips-vs-Tops_P Parameter: Tissue Value: Root Tips vs. Root Tops
  misc_feature: MA Experiment ID: 20000234 Result: Down-regulated in Transcription
  misc_feature: MA Experiment 20000234 PARAMETER Experiment Name: At_Siliques_P Parameter: Age (day) Value: 21
  misc_feature: MA Experiment 20000234 PARAMETER Experiment Name: At_Siliques_P Parameter: Organism Value: A. thaliana
  misc_feature: MA Experiment 20000234 PARAMETER Experiment Name: At_Siliques_P Parameter: Plant Line Value: WS
  misc_feature: MA Experiment 20000234 PARAMETER Experiment Name: At_Siliques_P Parameter: Tissue Value: Less Than 5mm Siliques vs. Whole Plant
  misc_feature: MA Experiment ID: 20000437 Result: Down-regulated in Transcription
  misc_feature: MA Experiment 20000437 PARAMETER Experiment Name: At_Drought_P Parameter: Age (day) Value: 8
  misc_feature: MA Experiment 20000437 PARAMETER Experiment Name: At_Drought_P Parameter: Organism Value: A. thaliana
  misc_feature: MA Experiment 20000437 PARAMETER Experiment Name: At_Drought_P Parameter: Plant Line Value: WS
  misc_feature: MA Experiment 20000437 PARAMETER Experiment Name: At_Drought_P Parameter: Timepoint (hr) Value: 24
  misc_feature: MA Experiment 20000437 PARAMETER Experiment Name: At_Drought_P Parameter: Tissue Value: Whole Plant
  misc_feature: MA Experiment 20000437 PARAMETER Experiment Name: At_Drought_P Parameter: Treatment Value: Drought vs. No Drought
  misc_feature: MA Experiment ID: 20000452 Result: Up-regulated in Transcription
  misc_feature: MA Experiment 20000452 PARAMETER Experiment Name: At_CS6879_Shoots-Roots_P Parameter: Age (day) Value: 14
  misc_feature: MA Experiment 20000452 PARAMETER Experiment Name: At_CS6879_Shoots-Roots_P Parameter: Organism Value: A. thaliana
  misc_feature: MA Experiment 20000452 PARAMETER Experiment Name: At_CS6879_Shoots-Roots_P Parameter: Plant Line Value: CS6879 vs. WS
  misc_feature: MA Experiment 20000452 PARAMETER Experiment Name: At_CS6879_Shoots-Roots_P Parameter: Tissue Value: Shoots
  misc_feature: MA Experiment ID: 20000496 Result: Down-regulated in Transcription
  misc_feature: MA Experiment 20000496 PARAMETER Experiment Name: At_Guard_Cells_P Parameter: Harvest Date Value: 7/19/2002
  misc_feature: MA Experiment 20000496 PARAMETER Experiment Name: At_Guard_Cells_P Parameter: Organism Value: Canola
  misc_feature: MA Experiment 20000496 PARAMETER Experiment Name: At_Guard_Cells_P Parameter: Tissue Value: Guard Cells vs. Leaves
  misc_feature: MA Experiment ID: 20001247 Result: Up-regulated in Transcription
  misc_feature: MA Experiment 20001247 PARAMETER Experiment Name: At_Far-red-induction_P Parameter: Age (day) Value: 7
  misc_feature: MA Experiment 20001247 PARAMETER Experiment Name: At_Far-red-induction_P Parameter: Light Value: Far-red vs. White
  misc_feature: MA Experiment 20001247 PARAMETER Experiment Name: At_Far-red-induction_P Parameter: Organism Value: A. thaliana
  misc_feature: MA Experiment 20001247 PARAMETER Experiment Name: At_Far-red-induction_P Parameter: Plant Line Value: Columbia
  misc_feature: MA Experiment 20001247 PARAMETER Experiment Name: At_Far-red-induction_P Parameter: Timepoint (hr) Value: 1
  misc_feature: MA Experiment 20001247 PARAMETER Experiment Name: At_Far-red-induction_P Parameter: Tissue Value: Whole Plant
  misc_feature: MA Experiment ID: 20001459 Result: Up-regulated in Transcription
  misc_feature: MA Experiment 20001459 PARAMETER Experiment Name: At_50mM_NH4NO3_L-to-H_P Parameter: Age (day) Value: Undefined
  misc_feature: MA Experiment 20001459 PARAMETER Experiment Name: At_50mM_NH4NO3_L-to-H_P Parameter: Organism Value: Undefined
  misc_feature: MA Experiment 20001459 PARAMETER Experiment Name: At_50mM_NH4NO3_L-to-H_P Parameter: Plant Line Value: Undefined
  misc_feature: MA Experiment 20001459 PARAMETER Experiment Name: At_50mM_NH4NO3_L-to-H_P Parameter: Timepoint (hr) Value: 4
  misc_feature: MA Experiment 20001459 PARAMETER Experiment Name: At_50mM_NH4NO3_L-to-H_P Parameter: Tissue Value: Siliques
  misc_feature: MA Experiment 20001459 PARAMETER Experiment Name: At_50mM_NH4NO3_L-to-H_P Parameter: Treatment Value: 50mM NH4NO3 vs. 100mM Manitol
  misc_feature: MA Experiment ID: 20001556 Result: Down-regulated in Transcription
  misc_feature: MA Experiment 20001556 PARAMETER Experiment Name: At_Drought_Soil_Dry_P Parameter: Age (day) Value: 26
  misc_feature: MA Experiment 20001556 PARAMETER Experiment Name: At_Drought_Soil_Dry_P Parameter: Organism Value: A. thaliana
  misc_feature: MA Experiment 20001556 PARAMETER Experiment Name: At_Drought_Soil_Dry_P Parameter: Plant Line Value: WS
  misc_feature: MA Experiment 20001556 PARAMETER Experiment Name: At_Drought_Soil_Dry_P Parameter: Post Timepoint (hr) Value: None
  misc_feature: MA Experiment 20001556 PARAMETER Experiment Name: At_Drought_Soil_Dry_P Parameter: Post-Treatment Value: None
  misc_feature: MA Experiment 20001556 PARAMETER Experiment Name: At_Drought_Soil_Dry_P Parameter: Timepoint (day) Value: 12
  misc_feature: MA Experiment 20001556 PARAMETER Experiment Name: At_Drought_Soil_Dry_P Parameter: Treatment Value: Drought vs. No Drought
  misc_feature: MA Experiment ID: 20001557 Result: Down-regulated in Transcription
  misc_feature: MA Experiment 20001557 PARAMETER Experiment Name: At_Drought_Soil_Dry_P Parameter: Age (day) Value: 27
  misc_feature: MA Experiment 20001557 PARAMETER Experiment Name: At_Drought_Soil_Dry_P Parameter: Organism Value: A. thaliana
  misc_feature: MA Experiment 20001557 PARAMETER Experiment Name: At_Drought_Soil_Dry_P Parameter: Plant Line Value: WS
  misc_feature: MA Experiment 20001557 PARAMETER Experiment Name: At_Drought_Soil_Dry_P Parameter: Post Timepoint (hr) Value: 3
  misc_feature: MA Experiment 20001557 PARAMETER Experiment Name: At_Drought_Soil_Dry_P Parameter: Post-Treatment Value: Re-Water vs. No Drought
  misc_feature: MA Experiment 20001557 PARAMETER Experiment Name: At_Drought_Soil_Dry_P Parameter: Timepoint (day) Value: 13
  misc_feature: MA Experiment 20001557 PARAMETER Experiment Name: At_Drought_Soil_Dry_P Parameter: Treatment Value: Drought vs. No Drought
  misc_feature: MA Experiment ID: 20001558 Result: Down-regulated in Transcription
  misc_feature: MA Experiment 20001558 PARAMETER Experiment Name: At_Drought_Soil_Dry_P Parameter: Age (day) Value: 27
  misc_feature: MA Experiment 20001558 PARAMETER Experiment Name: At_Drought_Soil_Dry_P Parameter: Organism Value: A. thaliana
  misc_feature: MA Experiment 20001558 PARAMETER Experiment Name: At_Drought_Soil_Dry_P Parameter: Plant Line Value: WS
  misc_feature: MA Experiment 20001558 PARAMETER Experiment Name: At_Drought_Soil_Dry_P Parameter: Post Timepoint (hr) Value: 6
  misc_feature: MA Experiment 20001558 PARAMETER Experiment Name: At_Drought_Soil_Dry_P Parameter: Post-Treatment Value: Re-Water vs. No Drought
  misc_feature: MA Experiment 20001558 PARAMETER Experiment Name: At_Drought_Soil_Dry_P Parameter: Timepoint (day) Value: 13
  misc_feature: MA Experiment 20001558 PARAMETER Experiment Name: At_Drought_Soil_Dry_P Parameter: Treatment Value: Drought vs. No Drought
  misc_feature: MA Experiment ID: 20001560 Result: Down-regulated in Transcription
  misc_feature: MA Experiment 20001560 PARAMETER Experiment Name: At_Drought_Soil_Dry_P Parameter: Age (day) Value: 28
  misc_feature: MA Experiment 20001560 PARAMETER Experiment Name: At_Drought_Soil_Dry_P Parameter: Organism Value: A. thaliana
  misc_feature: MA Experiment 20001560 PARAMETER Experiment Name: At_Drought_Soil_Dry_P Parameter: Plant Line Value: WS
  misc_feature: MA Experiment 20001560 PARAMETER Experiment Name: At_Drought_Soil_Dry_P Parameter: Post Timepoint (hr) Value: None
  misc_feature: MA Experiment 20001560 PARAMETER Experiment Name: At_Drought_Soil_Dry_P Parameter: Post-Treatment Value: None
  misc_feature: MA Experiment 20001560 PARAMETER Experiment Name: At_Drought_Soil_Dry_P Parameter: Timepoint (day) Value: 14
  misc_feature: MA Experiment 20001560 PARAMETER Experiment Name: At_Drought_Soil_Dry_P Parameter: Treatment Value: Drought vs. No Drought
agcatttttcagcactcctttcctttcccccacaaactaaacaaaaaaccattaacaaaaaaaccattcacaaaaaaaatagagagaatcatctgagagagtagtagtgatgatatgatcgcttcttctcctacaatctcagaaacctccgatcacggttttagatatcttctacaacggatacaatggagagcaccgattcttccggtggtccaccaccgccacaacctaaccttcctccaggcttccggtttcaccctaccgacgaagagcttgttgttcactacctcaaacgcaaagcagcctctgctcctttacctgtcgccatcatcgccgaagtcgatctctataaatttgatccatgggaacttcccgctaaagcatcgtttggagaacaagaatggtacttctttagtccacgagatcggaagtatccaaacggagcaagaccaaacagagcggcgacttcaggttattggaaagcgaccggtacagataaaccggtacttgcttccgacggtaaccaaaaggtgggcgtgaagaaggcactagtcttctacagtggtaaaccaccaaaaggcgttaaaagtgattggatcatgcatgagtatcgtctcatcgaaaacaaaccaaacaatcgacctcctggctgtgatttcggcaacaaaaaaaactcactcagacttgatgattgggtgttatgtagaatctacaagaagaacaacgcaagtcgacatgttgataacgataaggatcatgatatgatcgattacattttcaggaagattcctccgtctttatcaatggcggctgcttctacaggacttcaccaacatcatcataatgtctcaagatcaatgaatttcttccctggcaaattctccggtggtggttacgggattttctctgacggtggtaacacgagtatatacgacggcggtggcatgatcaacaatattggtactgactcagtagatcacgacaataacgctgacgtcgttggtttaaatcatgcttcgtcgtcaggtcctatgatgatggcgaatttgaaacgaactctcccggtgccgtattggcctgtagcagatgaggagcaagatgcatctccgagcaaacggtttcacggtgtaggaggaggaggaggagattgttcgaacatgtcttcctccatgatggaagagactccaccattgatgcaacaacaaggtggtgtgttaggagatggattattcagaacgacatcgtaccaattacccggtttaaattggtactcttcttaatcaaatgtgtttcgccgccggtgtgaagaattttccggtgacagtgaagatttttttccgattggtggggtcatttgcatgcattatataatttgagatttgtgtatatgttttgggttaattaattggtcacaggggttagaggaagaagattatttagagagcggagaagaagtgaggcaacatatagaaaacataggtttaaaaaatattactgtttgttaagtttaatgattaaatgtataaatcttatacttagatgtttatatatagtttgtatagatgcatatagtttctctcaatgctattttgagattgtattttcttgtaaaggaaatgttttttaaaaaaaaaaaaaaaaagttgtgtaactatgtatttttcttcacatatgttgaaaatcactgatgtttttggact

SEQ ID NO: 108115 - protein, 364 aa, Arabidopsis thaliana; identical to SEQ ID NO: 30723
  peptide (1)..(364): Ceres Seq. ID no. 13653230
  misc_feature (17)..(145): Pfam Name: No apical meristem (NAM) protein Pfam Description: No apical meristem (NAM) protein
  misc_feature (1)..(364): Homolog of NCBI NO: 15232606 NR Description: No apical meristem (NAM) protein family thaliana] >gi|7021736|gb|AAF35417.1| putative jasmonic acid
  misc_feature (1)..(262): Homolog of NCBI NO: 15219110 NR Description: No apical meristem (NAM) protein family
  misc_feature (1)..(262): Homolog of NCBI NO: 20466640 NR Description: NAM-like protein [Arabidopsis thaliana]
  misc_feature (1)..(262): Homolog of NCBI NO: 21554226 NR Description: NAM-like protein [Arabidopsis thaliana]
  misc_feature (1)..(230): Homolog of NCBI NO: 21593425 NR Description: NAM protein, putative [Arabidopsis thaliana]
  misc_feature (1)..(230): Homolog of NCBI NO: 18407026 NR Description: No apical meristem (NAM) protein family thaliana] >gi|26450820|dbj|BAC42518.1| unknown protein thaliana] >gi|30725366|gb|AAP37705.1| At1g61110 [Arabidopsis
  misc_feature (5)..(230): Homolog of NCBI NO: 25352286 NR Description: hypothetical protein F11P17.16 [imported] - thaliana >gi|2443890|gb|AAB71483.1| similar to NAM
  misc_feature (1)..(214): Homolog of NCBI NO: 34899790 NR Description: OJ1773_H01.21 [Oryza sativa (japonica >gi|24417196|dbj|BAC22555.1| putative OsNAC5 protein [Oryza
  misc_feature (13)..(182): Homolog of NCBI NO: 30679026 NR Description: No apical meristem (NAM) protein family thaliana] >gi|29029082|gb|AAO64920.1| At3g04070 [Arabidopsis
  misc_feature (13)..(182): Homolog of NCBI NO: 6223651 NR Description: NAM-like protein (no apical meristem)

SEQ ID NO: 108116 - protein, 226 aa, Arabidopsis thaliana; identical to SEQ ID NO: 30724
  peptide (1)..(226): Ceres Seq. ID no. 13653231
  misc_feature (1)..(226): Homolog of NCBI NO: 15232606 NR Description: No apical meristem (NAM) protein family thaliana] >gi|7021736|gb|AAF35417.1| putative jasmonic acid
  misc_feature (1)..(124): Homolog of NCBI NO: 15219110 NR Description: No apical meristem (NAM) protein family
  misc_feature (1)..(124): Homolog of NCBI NO: 20466640 NR Description: NAM-like protein [Arabidopsis thaliana]
  misc_feature (1)..(124): Homolog of NCBI NO: 21554226 NR Description: NAM-like protein [Arabidopsis thaliana]
  misc_feature (1)..(92): Homolog of NCBI NO: 21593425 NR Description: NAM protein, putative [Arabidopsis thaliana]
  misc_feature (1)..(92): Homolog of NCBI NO: 18407026 NR Description: No apical meristem (NAM) protein family thaliana] >gi|26450820|dbj|BAC42518.1| unknown protein thaliana] >gi|30725366|gb|AAP37705.1| At1g61110 [Arabidopsis
  misc_feature (1)..(92): Homolog of NCBI NO: 25352286 NR Description: hypothetical protein F11P17.16 [imported] - thaliana >gi|2443890|gb|AAB71483.1| similar to NAM
  misc_feature (1)..(76): Homolog of NCBI NO: 34899790 NR Description: OJ1773_H01.21 [Oryza sativa (japonica >gi|24417196|dbj|BAC22555.1| putative OsNAC5 protein [Oryza
  misc_feature (1)..(44): Homolog of NCBI NO: 30679026 NR Description: No apical meristem (NAM) protein family thaliana] >gi|29029082|gb|AAO64920.1| At3g04070 [Arabidopsis
  misc_feature (1)..(44): Homolog of NCBI NO: 6223651 NR Description: NAM-like protein (no apical meristem)

SEQ ID NO: 108117 - DNA, 1073 bp, Arabidopsis thaliana
  misc_feature (1)..(1073): Ceres Seq. ID no. 13653232
  misc_feature: MA Experiment ID: 20000307 Result: Up-regulated in Transcription
  misc_feature: MA Experiment 20000307 PARAMETER Experiment Name: At_Germinating_Seeds_Sub_P Parameter: Age (hr) Value: 24 vs. 0
  misc_feature: MA Experiment 20000307 PARAMETER Experiment Name: At_Germinating_Seeds_Sub_P Parameter: Organism Value: A. thaliana
  misc_feature: MA Experiment 20000307 PARAMETER Experiment Name: At_Germinating_Seeds_Sub_P Parameter: Plant Line Value: WS
  misc_feature: MA Experiment 20000307 PARAMETER Experiment Name: At_Germinating_Seeds_Sub_P Parameter: Tissue Value: Germinating Seeds
  misc_feature: MA Experiment ID: 20000314 Result: Down-regulated in Transcription
  misc_feature: MA Experiment 20000314 PARAMETER Experiment Name: At_14day_Shoots-Roots_Sub_P Parameter: Age (day) Value: 14
  misc_feature: MA Experiment 20000314 PARAMETER Experiment Name: At_14day_Shoots-Roots_Sub_P Parameter: Organism Value: A. thaliana
  misc_feature: MA Experiment 20000314 PARAMETER Experiment Name: At_14day_Shoots-Roots_Sub_P Parameter: Plant Line Value: WS
  misc_feature: MA Experiment 20000314 PARAMETER Experiment Name: At_14day_Shoots-Roots_Sub_P Parameter: Tissue Value: Roots vs. Whole Plant
cgaccaaatacacatccgacggggaaaaagagttccgacaagaatcgagaactgaaagatttgtcatttgtctctcaaatatctgtggagagaagagaaattggaataaagaagacagtgttgtgagagagagagagagagagagagatgagttcgtctctacctctgaggctacttcttcctcttacaacttctctgatttctcctcctcctcctcctccagattctttccatgctccttcgtcgttcagatcgaaaaaccctaatttcaaacgccgattgtcttcttcttcctgttgttcttcccagtcgcagcttttctctgggagatgcagatcctattcgcggtgtgttaccatgtgcttaccagaacacatgagaaatcaagagaacacagaaatcttgacagataaagatgaccacaggctatcgttgaaggatctggttcagttgcagtgtcagagctaaaacccgctgctgatgtagattacatacaagagctattggcgatacagcagcaaggtcctagatcaattggcttctttgggacaagaaatatgggtttcatgcatcaagaactgattgagatacttagctacgccatggttataaccaaaaatcatatatacacatcaggtgcatctggaactaatgctgcagtcatcagaggtgcattgagagcagagagaccagagctgcttacagtaattctaccccaaagtttgaaaaaacaacctcctgagagccaagaactattgtctaaagtacaaaacgtggtagaaaagccacataatgaccatttgccattgttagaagccagcaggttgtgtaatatggacatcatatcacaagttcaacaagtgatctgcttcgcgtttcatgacagtaagcttcttatggagacatgtcaagaagccaaaaatctgcgcaagattgtcactctcttctacctcgattggttcacattcactctttattttcttctcgttacaaaacagagaagataatcctccttgtaaattatgaatcttgattaaacaaacacacacaaccacaattatattcttttgtct

SEQ ID NO: 108118 - protein, 149 aa, Arabidopsis thaliana
  peptide (1)..(149): Ceres Seq. ID no. 13653233
  misc_feature (1)..(133): Homolog of NCBI NO: 30689549 NR Description: predicted protein [Arabidopsis thaliana]
  misc_feature (1)..(109): Homolog of NCBI NO: 7486491 NR Description: hypothetical protein At2g43940 [imported] - thaliana >gi|3212851|gb|AAC23402.1| unknown protein [Arabidopsis
  misc_feature (1)..(133): Homolog of NCBI NO: 21537298 NR Description: unknown [Arabidopsis thaliana]
  misc_feature (1)..(133): Homolog of NCBI NO: 15232185 NR Description: expressed protein [Arabidopsis thaliana]
  misc_feature (1)..(133): Homolog of NCBI NO: 13812204 NR Description: hypothetical protein [Guillardia theta]
  misc_feature (1)..(69): Homolog of NCBI NO: 34894968 NR Description: B1088D01.6 [Oryza sativa (japonica
  misc_feature (1)..(133): Homolog of NCBI NO: 16331173 NR Description: unknown protein [Synechocystis sp. PCC 6803]
  misc_feature (1)..(133): Homolog of NCBI NO: 23043068 NR Description: hypothetical protein [Trichodesmium erythraeum
  misc_feature (1)..(133): Homolog of NCBI NO: 37522470 NR Description: hypothetical protein gll2901 [Gloeobacter
  misc_feature (1)..(133): Homolog of NCBI NO: 17232156 NR Description: hypothetical protein [Nostoc sp. PCC 7120]
MGFMHQELIEILSYAMVITKNHIYTSGASGTNAAVIRGALRAERPELLTVILPQSLKKQPPESQELLSKVQNVVEKPHNDHLPLLEASRLCNMDIISQVQQVICFAFHDSKLLMETCQEAKNLRKIVTLFYLDWFTFTLYFLLVTKQRR

SEQ ID NO: 108119 - protein, 146 aa, Arabidopsis thaliana
  peptide (1)..(146): Ceres Seq. ID no. 13653234
  misc_feature (1)..(130): Homolog of NCBI NO: 30689549 NR Description: predicted protein [Arabidopsis thaliana]
  misc_feature (1)..(106): Homolog of NCBI NO: 7486491 NR Description: hypothetical protein At2g43940 [imported] - thaliana >gi|3212851|gb|AAC23402.1| unknown protein [Arabidopsis
  misc_feature (1)..(130): Homolog of NCBI NO: 21537298 NR Description: unknown [Arabidopsis thaliana]
  misc_feature (1)..(130): Homolog of NCBI NO: 15232185 NR Description: expressed protein [Arabidopsis thaliana]
  misc_feature (1)..(130): Homolog of NCBI NO: 13812204 NR Description: hypothetical protein [Guillardia theta]
  misc_feature (1)..(66): Homolog of NCBI NO: 34894968 NR Description: B1088D01.6 [Oryza sativa (japonica
  misc_feature (1)..(130): Homolog of NCBI NO: 16331173 NR Description: unknown protein [Synechocystis sp. PCC 6803]
  misc_feature (1)..(130): Homolog of NCBI NO: 23043068 NR Description: hypothetical protein [Trichodesmium erythraeum
  misc_feature (1)..(130): Homolog of NCBI NO: 37522470 NR Description: hypothetical protein gll2901 [Gloeobacter
  misc_feature (1)..(130): Homolog of NCBI NO: 17232156 NR Description: hypothetical protein [Nostoc sp. PCC 7120]
MHQELIEILSYAMVITKNHIYTSGASGTNAAVIRGALRAERPELLTVILPQSLKKQPPESQELLSKVQNVVEKPHNDHLPLLEASRLCNMDIISQVQQVICFAFHDSKLLMETCQEAKNLRKIVTLFYLDWFTFTLYFLLVTKQRR

SEQ ID NO: 108120 - protein, 134 aa, Arabidopsis thaliana
  peptide (1)..(134): Ceres Seq. ID no. 13653235
  misc_feature (1)..(118): Homolog of NCBI NO: 30689549 NR Description: predicted protein [Arabidopsis thaliana]
  misc_feature (1)..(94): Homolog of NCBI NO: 7486491 NR Description: hypothetical protein At2g43940 [imported] - thaliana >gi|3212851|gb|AAC23402.1| unknown protein [Arabidopsis
  misc_feature (1)..(118): Homolog of NCBI NO: 21537298 NR Description: unknown [Arabidopsis thaliana]
  misc_feature (1)..(118): Homolog of NCBI NO: 15232185 NR Description: expressed protein [Arabidopsis thaliana]
  misc_feature (1)..(118): Homolog of NCBI NO: 13812204 NR Description: hypothetical protein [Guillardia theta]
  misc_feature (1)..(54): Homolog of NCBI NO: 34894968 NR Description: B1088D01.6 [Oryza sativa (japonica
  misc_feature (1)..(118): Homolog of NCBI NO: 16331173 NR Description: unknown protein [Synechocystis sp. PCC 6803]
  misc_feature (1)..(118): Homolog of NCBI NO: 23043068 NR Description: hypothetical protein [Trichodesmium erythraeum
  misc_feature (1)..(118): Homolog of NCBI NO: 37522470 NR Description: hypothetical protein gll2901 [Gloeobacter
  misc_feature (1)..(118): Homolog of NCBI NO: 17232156 NR Description: hypothetical protein [Nostoc sp. PCC 7120]
MVITKNHIYTSGASGTNAAVIRGALRAERPELLTVILPQSLKKQPPESQELLSKVQNVVEKPHNDHLPLLEASRLCNMDIISQVQQVICFAFHDSKLLMETCQEAKNLRKIVTLFYLDWFTFTLYFLLVTKQRR

SEQ ID NO: 108121 - DNA, 1220 bp, Arabidopsis thaliana
  misc_feature (1)..(1220): Ceres Seq. ID no. 13653252
  misc_feature: MA Experiment ID: 20000315 Result: Down-regulated in Transcription
  misc_feature: MA Experiment 20000315 PARAMETER Experiment Name: At_14day_Shoots-Roots_Sub_P Parameter: Age (day) Value: 14
  misc_feature: MA Experiment 20000315 PARAMETER Experiment Name: At_14day_Shoots-Roots_Sub_P Parameter: Organism Value: A. thaliana
  misc_feature: MA Experiment 20000315 PARAMETER Experiment Name: At_14day_Shoots-Roots_Sub_P Parameter: Plant Line Value: WS
  misc_feature: MA Experiment 20000315 PARAMETER Experiment Name: At_14day_Shoots-Roots_Sub_P Parameter: Tissue Value: Shoots vs. Whole Plant
  misc_feature: MA Experiment ID: 20000355 Result: Down-regulated in Transcription
  misc_feature: MA Experiment 20000355 PARAMETER Experiment Name: At_Siliques_Sub_P Parameter: Age (day) Value: 21
  misc_feature: MA Experiment 20000355 PARAMETER Experiment Name: At_Siliques_Sub_P Parameter: Organism Value: A. thaliana
  misc_feature: MA Experiment 20000355 PARAMETER Experiment Name: At_Siliques_Sub_P Parameter: Plant Line Value: WS
  misc_feature: MA Experiment 20000355 PARAMETER Experiment Name: At_Siliques_Sub_P Parameter: Tissue Value: Less Than 5mm Siliques vs. Whole Plant
  misc_feature: Pfam Name: Rhomboid Pfam Description: Rhomboid family
cctgaatttcgtatttgatccgtttaatccaagtttcgattttatataacaaccacatagacagagagagagagagagagaaacagagtaatggcgaacagagatgtggagagagtagggaagaaaaacagaggagctaataacaattatttctacgaggagtcttctggtgaaactcattggacttcatggctgattccggcgattgtagtggcaaatctcgctgtctttatcgctgttatgttcgttaatgattgtcctaagaaaatcaccggacctaacaaagagtgtgttgctagattcctcggaagattctcgtttcaaccacttaaagagaatcctctctttggtccttcttcttcaacattggagaaaatgggagcattggaatggaggaaagtagtacatgaacatcaaggatggagacttctctcttgtatgtggcttcacgctggtatcattcatcttcttacaaacatgttgagtttgatcttcattggtatccgccttgagcagcaatttggcttcataagagtcgggttgatatacttaatatcgggtctcggtggaagcatactttcgtcgcttttccttcaagaaagtatctctgttggtgcttcgggtgctctctttggacttcttggagcaatgttatctgaacttcttaccaattggactatctatgccaacaaggcggctgctctgatcacacttctgttcatcatcgcaatcaacttagcattaggcatgcttcctcgggttgacaactttgcacacattggagggtttttaaccggattctgcctcgggtttgtcctccttgtccgacctcagtacggttgggaagcttcgcgcaccaacacttcgcgaaccaaacgaaagtatagcatgtaccagtacgtgctgtttgtagtttcagtggtgctacttgtggttgggctaacggttgcattagtgatgcttttcaaaggagagaatgggaacaaacattgcaaatggtgtcattaccttagctgtttcccaacttctaaatggacctgctaatcatcatcatcatcatcataatcatatagtaaaagcttttatatgtgttcttgttaacatttaatctctttgatctctctagcctttgattatttatatatgtgtacattacaaaattcgtcttgtgtaaaaggggatagaaataaaagagtgtattatttttacatttgaacacc

SEQ ID NO: 108122 - protein, 317 aa, Arabidopsis thaliana; identical to SEQ ID NO: 22106
  peptide (1)..(317): Ceres Seq. ID no. 13653253
  misc_feature: Pfam Name: Rhomboid Pfam Description: Rhomboid family
  misc_feature (1)..(317): Homolog of NCBI NO: 15221690 NR Description: membrane protein, Rhomboid family [Arabidopsis
  misc_feature (1)..(317): Homolog of NCBI NO: 15222058 NR Description: membrane protein, Rhomboid family [Arabidopsis >gi|17529034|gb|AAL38727.1| putative membrane protein thaliana] >gi|20259083|gb|AAM14257.1| putative membrane protein
  misc_feature (27)..(317): Homolog of NCBI NO: 25402744 NR Description: protein T12C24.28 [imported] - Arabidopsis >gi|9502383|gb|AAF88090.1|AC025417_18 T12C24.28 [Arabidopsis
  misc_feature (22)..(317): Homolog of NCBI NO: 15240744 NR Description: membrane protein, Rhomboid family [Arabidopsis
  misc_feature (15)..(317): Homolog of NCBI NO: 294845 NR Description: membrane protein [Saccharum hybrid cultivar
  misc_feature (1)..(317): Homolog of NCBI NO: 30693911 NR Description: membrane protein, Rhomboid family [Arabidopsis
  misc_feature (20)..(317): Homolog of NCBI NO: 38344377 NR Description: OSJNBb0032E06.11 [Oryza sativa (japonica
  misc_feature (2)..(317): Homolog of NCBI NO: 37536172 NR Description: putative membrane protein [Oryza sativa (japonica group)] >gi|22122915|gb|AAM92298.1| putative membrane protein
  misc_feature (31)..(317): Homolog of NCBI NO: 11357824 NR Description: hypothetical protein F5K20.80 - Arabidopsis >gi|7629998|emb|CAB88340.1| putative protein [Arabidopsis
  misc_feature (13)..(316): Homolog of NCBI NO: 15236387 NR Description: membrane protein, Rhomboid family [Arabidopsis

SEQ ID NO: 108123 - protein, 267 aa, Arabidopsis thaliana; identical to SEQ ID NO: 22107
  peptide (1)..(267): Ceres Seq. ID no. 13653254
  misc_feature: Pfam Name: Rhomboid Pfam Description: Rhomboid family
  misc_feature (1)..(267): Homolog of NCBI NO: 15221690 NR Description: membrane protein, Rhomboid family [Arabidopsis
  misc_feature (1)..(267): Homolog of NCBI NO: 15222058 NR Description: membrane protein, Rhomboid family [Arabidopsis >gi|17529034|gb|AAL38727.1| putative membrane protein thaliana] >gi|20259083|gb|AAM14257.1| putative membrane protein
  misc_feature (1)..(267): Homolog of NCBI NO: 25402744 NR Description: protein T12C24.28 [imported] - Arabidopsis >gi|9502383|gb|AAF88090.1|AC025417_18 T12C24.28 [Arabidopsis
  misc_feature (1)..(267): Homolog of NCBI NO: 15240744 NR Description: membrane protein, Rhomboid family [Arabidopsis
  misc_feature (1)..(267): Homolog of NCBI NO: 294845 NR Description: membrane protein [Saccharum hybrid cultivar
  misc_feature (1)..(267): Homolog of NCBI NO: 30693911 NR Description: membrane protein, Rhomboid family [Arabidopsis
  misc_feature (1)..(267): Homolog of NCBI NO: 38344377 NR Description: OSJNBb0032E06.11 [Oryza sativa (japonica
  misc_feature (1)..(267): Homolog of NCBI NO: 37536172 NR Description: putative membrane protein [Oryza sativa (japonica group)] >gi|22122915|gb|AAM92298.1| putative membrane protein
  misc_feature (1)..(267): Homolog of NCBI NO: 11357824 NR Description: hypothetical protein F5K20.80 - Arabidopsis >gi|7629998|emb|CAB88340.1| putative protein [Arabidopsis
  misc_feature (1)..(266): Homolog of NCBI NO: 15236387 NR Description: membrane protein, Rhomboid family [Arabidopsis

SEQ ID NO: 108124 - protein, 222 aa, Arabidopsis thaliana; identical to SEQ ID NO: 22108
  peptide (1)..(222): Ceres Seq. ID no. 13653255
  misc_feature: Pfam Name: Rhomboid Pfam Description: Rhomboid family
  misc_feature (1)..(222): Homolog of NCBI NO: 15221690 NR Description: membrane protein, Rhomboid family [Arabidopsis
  misc_feature (1)..(222): Homolog of NCBI NO: 15222058 NR Description: membrane protein, Rhomboid family [Arabidopsis >gi|17529034|gb|AAL38727.1| putative membrane protein thaliana] >gi|20259083|gb|AAM14257.1| putative membrane protein
  misc_feature (1)..(222): Homolog of NCBI NO: 25402744 NR Description: protein T12C24.28 [imported] - Arabidopsis >gi|9502383|gb|AAF88090.1|AC025417_18 T12C24.28 [Arabidopsis
  misc_feature (1)..(222): Homolog of NCBI NO: 15240744 NR Description: membrane protein, Rhomboid family [Arabidopsis
  misc_feature (1)..(222): Homolog of NCBI NO: 294845 NR Description: membrane protein [Saccharum hybrid cultivar
  misc_feature (1)..(222): Homolog of NCBI NO: 30693911 NR Description: membrane protein, Rhomboid family [Arabidopsis
  misc_feature (1)..(222): Homolog of NCBI NO: 38344377 NR Description: OSJNBb0032E06.11 [Oryza sativa (japonica
  misc_feature (1)..(222): Homolog of NCBI NO: 37536172 NR Description: putative membrane protein [Oryza sativa (japonica group)] >gi|22122915|gb|AAM92298.1| putative membrane protein
  misc_feature (1)..(222): Homolog of NCBI NO: 11357824 NR Description: hypothetical protein F5K20.80 - Arabidopsis >gi|7629998|emb|CAB88340.1| putative protein [Arabidopsis
  misc_feature (1)..(221): Homolog of NCBI NO: 15236387 NR Description: membrane protein, Rhomboid family [Arabidopsis

SEQ ID NO: 108125 - DNA, 1880 bp, Arabidopsis thaliana
  misc_feature (1)..(1880): Ceres Seq. ID no. 13653256
  misc_feature: MA Experiment ID: 20000315 Result: Down-regulated in Transcription
  misc_feature: MA Experiment 20000315 PARAMETER Experiment Name: At_14day_Shoots-Roots_Sub_P Parameter: Age (day) Value: 14
  misc_feature: MA Experiment 20000315 PARAMETER Experiment Name: At_14day_Shoots-Roots_Sub_P Parameter: Organism Value: A. thaliana
  misc_feature: MA Experiment 20000315 PARAMETER Experiment Name: At_14day_Shoots-Roots_Sub_P Parameter: Plant Line Value: WS
  misc_feature: MA Experiment 20000315 PARAMETER Experiment Name: At_14day_Shoots-Roots_Sub_P Parameter: Tissue Value: Shoots vs. Whole Plant
  misc_feature: MA Experiment ID: 20000328 Result: Down-regulated in Transcription
  misc_feature: MA Experiment 20000328 PARAMETER Experiment Name: At_42deg_Heat_Sub_P Parameter: Age (day) Value: 14
  misc_feature: MA Experiment 20000328 PARAMETER Experiment Name: At_42deg_Heat_Sub_P Parameter: Organism Value: A. thaliana
  misc_feature: MA Experiment 20000328 PARAMETER Experiment Name: At_42deg_Heat_Sub_P Parameter: Plant Line Value: WS
  misc_feature: MA Experiment 20000328 PARAMETER Experiment Name: At_42deg_Heat_Sub_P Parameter: Temperature (deg C) Value: 42 vs. 22
  misc_feature: MA Experiment 20000328 PARAMETER Experiment Name: At_42deg_Heat_Sub_P Parameter: Timepoint (hr) Value: 6
  misc_feature: MA Experiment 20000328 PARAMETER Experiment Name: At_42deg_Heat_Sub_P Parameter: Tissue Value: Aerial
  misc_feature: MA Experiment ID: 20000347 Result: Up-regulated in Transcription
  misc_feature: MA Experiment 20000347 PARAMETER Experiment Name: At_2mM_SA_Sub_P Parameter: Age (day) Value: 14
  misc_feature: MA Experiment 20000347 PARAMETER Experiment Name: At_2mM_SA_Sub_P Parameter: Organism Value: A. thaliana
  misc_feature: MA Experiment 20000347 PARAMETER Experiment Name: At_2mM_SA_Sub_P Parameter: Plant Line Value: WS
  misc_feature: MA Experiment 20000347 PARAMETER Experiment Name: At_2mM_SA_Sub_P Parameter: Timepoint (hr) Value: 6
  misc_feature: MA Experiment 20000347 PARAMETER Experiment Name: At_2mM_SA_Sub_P Parameter: Tissue Value: Aerial
  misc_feature: MA Experiment 20000347 PARAMETER Experiment Name: At_2mM_SA_Sub_P Parameter: Treatment Value: 2mM SA vs. No Treatment
  misc_feature: MA Experiment ID: 20000355 Result: Down-regulated in Transcription
  misc_feature: MA Experiment 20000355 PARAMETER Experiment Name: At_Siliques_Sub_P Parameter: Age (day) Value: 21
  misc_feature: MA Experiment 20000355 PARAMETER Experiment Name: At_Siliques_Sub_P Parameter: Organism Value: A. thaliana
  misc_feature: MA Experiment 20000355 PARAMETER Experiment Name: At_Siliques_Sub_P Parameter: Plant Line Value: WS
  misc_feature: MA Experiment 20000355 PARAMETER Experiment Name: At_Siliques_Sub_P Parameter: Tissue Value: Less Than 5mm Siliques vs. Whole Plant
  misc_feature: Pfam Name: TRAP_alpha Pfam Description: Translocon-associated protein (TRAP), alpha subunit
gagatatcttcatctgcttcaaatacgccaatttcacggcagattgcttccgctgtgctcttgttgtctccggtgataaccatgacccgaatacctgctgttctgcagtctgcaatggctttacgcacctctttccttggaggatcccttaaaccaacaaatccaacaaatactagattggactcaattgatgaataattggatgggttgagaagttgctgatgagcaggatggtcttcactgccatcataagtggcaaaatctgatggaacatctgagtatgcaaatccgagacatcttaatgcactcaaggacatatcatgtaggctttgtaaaataagatcccttgagtattggtcaagctctcgagtggaaccatcaagtagctgaatatgggtactcctttccaatacattttctacggcacccttgaccagtagcagtttctttcctgagctggaatccaccataactcccattgatttccggtcacggtcaaactcaagggtggcaatccgttgttctagttcactccatagccgacaacaacgtaagacattgccatcggatgaagcttcattcaacccttcgggaaatcccattttctcaaccaaaaccttcaaagctgcctcagtaggcatgcccctagacacaaattgctgatcagatttctcaacattagcatcgttgcaaatggcagcaatttttgcaatcatctgaagatttgcatccatccgacccgttggccaatcttcaatctttccatctcgagaaccgatgtcgttcttcgtcaacgtcggtgaagaaagcataaacacgtcaaaagacaaaagcacctctgtcttcttgctttcttcgcccttttacttcaacccacgaagatcaattcaactaaaccaatctcaaaaccatcatgaggacaagttttagacttctcttcttcgctttccttctacttgtctcaccttttctcaaagttgctttgtgccaatcggattcggaagattctggcttcgaagtttctgatgttggtgaagaagagagtgatgcagaggaagtttttggtttggaacttacctcagctcctggaattgaaaccctttgcgttttccccaagaacagtgcaaaaataataaaagctggagttgagactgagctgcttgttggaatgaaaaatgatggtcaatccaatgtagatattgttgctgttaaaggcagtttacatcttccttttgatcaaaatgctgttcagaatctcactgctctgagtttcagcaacgcgtctgtgccaacttccgctcaagctaccttgccatatgcttttgctgtcagcaagttcctgcaggcgggtgcttttgattttgttggcaccatcatctatgagatagatggtaagccataccaaagcatcttttataatggaactattgaagttgttgaagatggtcctctcttcagaatggagtcagtcttccttagtggtcttttaatctttgttatcgcttttctcgccatctatatccaaaatgttttgaagcatatgaccaagaaaacaaagagagcaccaaaagttgaagttggaaccgcaactaaagatgcttcgcatgatgaatggcttgagggtacttcgtacactcaatcttcgagtaagtcaaagaagaagaagtagatctcacacgctttgttagggggcttgagataagaaaccgaaaacacacgaacgatagtaacgttgcagttgttggtagagataacttcacagaatctgtaatgctttctttactctctctagctatagatgttgcaaggaaacaattttctttaacttttgtaatttgtcaagattattttcttttgtttaaaatgataattctctttcg

SEQ ID NO: 108126 - protein, 251 aa, Arabidopsis thaliana
  peptide (1)..(251): Ceres Seq. ID no. 13653257
  misc_feature: Pfam Name: TRAP_alpha Pfam Description: Translocon-associated protein (TRAP), alpha subunit
  misc_feature (4)..(251): Homolog of NCBI NO: 21555380 NR Description: putative signal sequence receptor, alpha subunit
  misc_feature (4)..(251): Homolog of NCBI NO: 18399609 NR Description: signal sequence receptor, alpha subunit
  misc_feature (4)..(251): Homolog of NCBI NO: 25335776 NR Description: hypothetical protein At2g21160 [imported] -
  misc_feature (7)..(251): Homolog of NCBI NO: 547391 NR Description: alpha-subunit; putative
  misc_feature (119)..(251): Homolog of NCBI NO: 15227250 NR Description: TRAP protein -related [Arabidopsis thaliana] putative TRAP protein [Arabidopsis thaliana]
MRTSFRLLFFAFLLLVSPFLKVALCQSDSEDSGFEVSDVGEEESDAEEVFGLELTSAPGIETLCVFPKNSAKIIKAGVETELLVGMKNDGQSNVDIVAVKGSLHLPFDQNAVQNLTALSFSNASVPTSAQATLPYAFAVSKFLQAGAFDFVGTIIYEIDGKPYQSIFYNGTIEVVEDGPLFRMESVFLSGLLIFVIAFLAIYIQNVLKHMTKKTKRAPKVEVGTATKDASHDEWLEGTSYTQSSSKSKKKK

SEQ ID NO: 108127 - protein, 166 aa, Arabidopsis thaliana
  peptide (1)..(166): Ceres Seq. ID no. 13653258
  misc_feature: Pfam Name: TRAP_alpha Pfam Description: Translocon-associated protein (TRAP), alpha subunit
  misc_feature (1)..(166): Homolog of NCBI NO: 21555380 NR Description: putative signal sequence receptor, alpha subunit
  misc_feature (1)..(166): Homolog of NCBI NO: 18399609 NR Description: signal sequence receptor, alpha subunit
  misc_feature (1)..(166): Homolog of NCBI NO: 25335776 NR Description: hypothetical protein At2g21160 [imported] -
  misc_feature (1)..(166): Homolog of NCBI NO: 547391 NR Description: alpha-subunit; putative
  misc_feature (34)..(166): Homolog of NCBI NO: 15227250 NR Description: TRAP protein -related [Arabidopsis thaliana] putative TRAP protein [Arabidopsis thaliana]
MKNDGQSNVDIVAVKGSLHLPFDQNAVQNLTALSFSNASVPTSAQATLPYAFAVSKFLQAGAFDFVGTIIYEIDGKPYQSIFYNGTIEVVEDGPLFRMESVFLSGLLIFVIAFLAIYIQNVLKHMTKKTKRAPKVEVGTATKDASHDEWLEGTSYTQSSSKSKKKK

SEQ ID NO: 108128 - DNA, 3064 bp, Arabidopsis thaliana
  misc_feature (1)..(3064): Ceres Seq. ID no. 13653281
  misc_feature: MA Experiment ID: 20000171 Result: Down-regulated in Transcription
  misc_feature: MA Experiment 20000171 PARAMETER Experiment Name: At_42deg_Heat_P Parameter: Age (day) Value: 14
  misc_feature: MA Experiment 20000171 PARAMETER Experiment Name: At_42deg_Heat_P Parameter: Organism Value: A. thaliana
  misc_feature: MA Experiment 20000171 PARAMETER Experiment Name: At_42deg_Heat_P Parameter: Plant Line Value: WS
  misc_feature: MA Experiment 20000171 PARAMETER Experiment Name: At_42deg_Heat_P Parameter: Temperature (deg C) Value: 42 vs. 22
  misc_feature: MA Experiment 20000171 PARAMETER Experiment Name: At_42deg_Heat_P Parameter: Timepoint (hr) Value: 1
  misc_feature: MA Experiment 20000171 PARAMETER Experiment Name: At_42deg_Heat_P Parameter: Tissue Value: Aerial
  misc_feature: MA Experiment ID: 20000173 Result: Down-regulated in Transcription
  misc_feature: MA Experiment 20000173 PARAMETER Experiment Name: At_42deg_Heat_P Parameter: Age (day) Value: 14
  misc_feature: MA Experiment 20000173 PARAMETER Experiment Name: At_42deg_Heat_P Parameter: Organism Value: A. thaliana
  misc_feature: MA Experiment 20000173 PARAMETER Experiment Name: At_42deg_Heat_P Parameter: Plant Line Value: WS
  misc_feature: MA Experiment 20000173 PARAMETER Experiment Name: At_42deg_Heat_P Parameter: Temperature (deg C) Value: 42 vs. 22
  misc_feature: MA Experiment 20000173 PARAMETER Experiment Name: At_42deg_Heat_P Parameter: Timepoint (hr) Value: 6
  misc_feature: MA Experiment 20000173 PARAMETER Experiment Name: At_42deg_Heat_P Parameter: Tissue Value: Aerial
  misc_feature: MA Experiment ID: 20000182 Result: Up-regulated in Transcription
  misc_feature: MA Experiment 20000182 PARAMETER Experiment Name: At_2mM_SA_P Parameter: Age (day) Value: 14
  misc_feature: MA Experiment 20000182 PARAMETER Experiment Name: At_2mM_SA_P Parameter: Organism Value: A. thaliana
  misc_feature: MA Experiment 20000182 PARAMETER Experiment Name: At_2mM_SA_P Parameter: Plant Line Value: WS
  misc_feature: MA Experiment 20000182 PARAMETER Experiment Name: At_2mM_SA_P Parameter: Timepoint (hr) Value: 6
  misc_feature: MA Experiment 20000182 PARAMETER Experiment Name: At_2mM_SA_P Parameter: Tissue Value: Aerial
  misc_feature: MA Experiment 20000182 PARAMETER Experiment Name: At_2mM_SA_P Parameter: Treatment Value: 2mM SA vs. No Treatment
  misc_feature: MA Experiment ID: 20000527 Result: Down-regulated in Transcription
  misc_feature: MA Experiment 20000527 PARAMETER Experiment Name: At_10percent_PEG_P Parameter: Age (day) Value: 20
  misc_feature: MA Experiment 20000527 PARAMETER Experiment Name: At_10percent_PEG_P Parameter: Organism Value: A. thaliana
  misc_feature: MA Experiment 20000527 PARAMETER Experiment Name: At_10percent_PEG_P Parameter: Plant Line Value: WS
  misc_feature: MA Experiment 20000527 PARAMETER Experiment Name: At_10percent_PEG_P Parameter: Timepoint (day) Value: 20
  misc_feature: MA Experiment 20000527 PARAMETER Experiment Name: At_10percent_PEG_P Parameter: Tissue Value: Whole Plant
  misc_feature: MA Experiment 20000527 PARAMETER Experiment Name: At_10percent_PEG_P Parameter: Treatment Value: 10percent PEG vs. No Treatment
  misc_feature: MA Experiment ID: 20001560 Result: Down-regulated in Transcription
  misc_feature: MA Experiment 20001560 PARAMETER Experiment Name: At_Drought_Soil_Dry_P Parameter: Age (day) Value: 28
  misc_feature: MA Experiment 20001560 PARAMETER Experiment Name: At_Drought_Soil_Dry_P Parameter: Organism Value: A. thaliana
  misc_feature: MA Experiment 20001560 PARAMETER Experiment Name: At_Drought_Soil_Dry_P Parameter: Plant Line Value: WS
  misc_feature: MA Experiment 20001560 PARAMETER Experiment Name: At_Drought_Soil_Dry_P Parameter: Post Timepoint (hr) Value: None
  misc_feature: MA Experiment 20001560 PARAMETER Experiment Name: At_Drought_Soil_Dry_P Parameter: Post-Treatment Value: None
  misc_feature: MA Experiment 20001560 PARAMETER Experiment Name: At_Drought_Soil_Dry_P Parameter: Timepoint (day) Value: 14
  misc_feature: MA Experiment 20001560 PARAMETER Experiment Name: At_Drought_Soil_Dry_P Parameter: Treatment Value: Drought vs. No Drought
ctggaatttgagtaaaagcaagaaaaaaagtcaaccgttgcaacaaactcttaaaaagaagcaaagtagtagcagaagaagaagaagaagaagaagaaaagaaaatggcaggagggtcgtttggtccgaccggtgtggctaaggagagagcagaacaataccaagggaaagtcactagttatgttataatcgcttgccttgttgcagctattggtggatccatctttggatatgacattggaatctcaggaggagttacatcgatggatgagtttcttgaggagtttttccacacggtttatgagaagaagaagcaagctcatgaaagtaattactgcaaatatgataatcaaggcttagctctgatgaatcccctaatgattttggtaaaaatcattaagttaaggtggatacacatcttgtcatatgatcaaatggtttcgcgaaaaatcaataatcagacaacaagatgtgcgaactcgatattttacacgactctctttaccaattctgccccgaattacacttaaaacgactcaacagcttaacgttggcttgccacgcattacttgactgtaaaactctcactcttaccgaacttggccgtaacctgccaaccaaagcgagaacaaaacataacatcaaacgaatcgaccgattgttaggtaatcgtcacctccacaaagagcgactcgctgtataccgttggcatgctagctttatctgttcgggcaatacgatgcccattgtacttgttgactggtctgatattcgtgagcaaaaacgacttatggtattgcgagcttcagtcgcactacacggtcgttctgttactctttatgagaaagcgttcccgctttcagagcaatgttcaaagaaagctcatgaccaatttctagccgaccttgcgagcattctaccgagtaacaccacaccgctcattgtcagtgatgctggctttaaagtgccatggtataaatccgttgagaagctgggttggtactggttaagtcgagtaagaggaaaagtacaatatgcagacctaggagcggaaaactggaaacctatcagcaacttacatgatatgtcatctagtcactcaaagactttaggctataagaggctgactaaaagcaatccaatctcatgccaaattctattgtataaatctcgctctaaaggccgaaaaaatcagcgctcgacacggactcattgtcaccacccgtcacctaaaatctactcagcgtcggcaaaggagccatgggttctagcaactaacttacctgttgaaattcgaacacccaaacaacttgttaatatctattcgaagcgaatgcagattgaagaaaccttccgagacttgaaaagtcctgcctacggactaggcctacgccatagccgaacgagcagctcagagcgttttgatatcatgctgctaatcgccctgatgcttcaactaacatgttggcttgcgggcgttcatgctcagaaacaaggttgggacaagcacttccaggctaacacagtcagaaatcgaaacgtactctcaacagttcgcttaggcatggaagttttgcggcattctggctacacaataacaagggaagacttactcgtggctgcaaccctactagctcaaaatttattcacacatggttacgctttggggaaattatgaggggatctctcagggcttagctgctttcacttcttcactctacttagctggtttggtttcgactctcgtggcttcacccatcactaggaactacggtaggcgtgcgagtattgtttgtggtggaatcagctttcttattggatctggtttgaatgctggagctgtgaacttagctatgcttcttgccggacggatcatgcttggtgttggtattggatttggaaatcaggcggttcctttgtatttatcagaagtggcaccaactcatctacgaggtggtttaaacatgatgtttcagctagctacaactatcgggatctttacagcgaacatggttaattacggtactcaacagcttaagccttggggatggagactctctcttggtttagctgcttttccagctctgcttatgacgcttggcgggtatttcttacccgagacaccaaacagtttggtcgaaagaggattaacagagagaggtcgacgagtcttagtgaagctaagaggaacagaaaacgtcaacgccgagcttcaagacatggtagatgcgagtgagcttgcgaattccatcaaacatccattcagaaacatcttgcagaaacgacacaggcctcagctagttatggctatttgcatgccaatgtttcagatactcacagggataaactccattctcttctacgcacctgttctgttccagacaatggggtttggaggaaacgcatctctctattcatcagctttaacaggagctgttcttgtcctatcaacatttatttccataggattagtagacagattgggacgaagagctcttctcataactggaggaatacaaatgataatctgtcaagtcatagtagcagtgatcttaggagtgaaatttggagacaaccaagagctatcaaaagggtactcagtgatcgtagtcatcttcatctgcctctttgttgtagcgttcggatggtcatggggtcctctaggttggaccatacctagcgaaatctttccgttagagactcgttcagcggggcagagtatcacagtagctgtaaatctcctcttcactttcatcatagctcaagctttccttggtctcctctgtgcattcaagtttggaatcttcctcttctttgctggttgggtgacagtaatgactatctttgtgtatttcctgttgcctgaaaccaaaggagttccaatagaagagatgacactcttatggagtaaacattggttctggaaaaaagtattacctgatgcaacaaatcttgaagatgagagcaagaatgtatctgtttaaagagaatataaactgattcaagaaacttatgtttgtattactataaggttttttattgcataaggagagatttgaatccc

SEQ ID NO: 108129 - protein, 443 aa, Arabidopsis thaliana
  peptide (1)..(443): Ceres Seq. ID no. 13653282
  misc_feature (12)..(418): Pfam Name: Sugar (and other) transporter Pfam Description: Sugar (and other) transporter
  misc_feature (12)..(443): Homolog of NCBI NO: 15235215 NR Description: sugar transporter, putative [Arabidopsis thaliana]
  misc_feature (13)..(443): Homolog of NCBI NO: 1723182 NR Description: Sugar carrier protein A >gi|7446730|pir||T10150
  misc_feature (12)..(436): Homolog of NCBI NO: 347855 NR Description: glucose transporter [Saccharum hybrid cultivar
  misc_feature (10)..(414): Homolog of NCBI NO: 23336284 NR Description: hypothetical protein [Bifidobacterium longum
  misc_feature (10)..(414): Homolog of NCBI NO: 23466180 NR Description: D-xylose-proton symporter [Bifidobacterium longum
  misc_feature (20)..(414): Homolog of NCBI NO: 27467165 NR Description: bicyclomycin resistance protein TcaB epidermidis ATCC 12228] >gi|27314707|gb|AAO03844.1|AE016744_247
  misc_feature (20)..(299): Homolog of NCBI NO: 16418395 NR Description: solute carrier family 2 (facilitated glucose
  misc_feature (315)..(418): Homolog of NCBI NO: 16418395 NR Description: solute carrier family 2 (facilitated glucose
  misc_feature (21)..(436): Homolog of NCBI NO: 6321888 NR Description: Member of superfamily of monosaccharide Hxt5p [Saccharomyces cerevisiae] >gi|729781|sp|P38695|HXT5_YEAST
  misc_feature (21)..(425): Homolog of NCBI NO: 1730047 NR Description: Hexose transporter 2 >gi|1076967|pir||S51081
MVTLWGNYEGISQGLAAFTSSLYLAGLVSTLVASPITRNYGRRASIVCGGISFLIGSGLNAGAVNLAMLLAGRIMLGVGIGFGNQAVPLYLSEVAPTHLRGGLNMMFQLATTIGIFTANMVNYGTQQLKPWGWRLSLGLAAFPALLMTLGGYFLPETPNSLVERGLTERGRRVLVKLRGTENVNAELQDMVDASELANSIKHPFRNILQKRHRPQLVMAICMPMFQILTGINSILFYAPVLFQTMGFGGNASLYSSALTGAVLVLSTFISIGLVDRLGRRALLITGGIQMIICQVIVAVILGVKFGDNQELSKGYSVIVVIFICLFVVAFGWSWGPLGWTIPSEIFPLETRSAGQSITVAVNLLFTFIIAQAFLGLLCAFKFGIFLFFAGWVTVMTIFVYFLLPETKGVPIEEMTLLWSKHWFWKKVLPDATNLEDESKNVSV

SEQ ID NO: 108130 - protein, 402 aa, Arabidopsis thaliana
  peptide (1)..(402): Ceres Seq. ID no. 13653283
  misc_feature (1)..(402): Homolog of NCBI NO: 9507603 NR Description: transposase of Tn10 [Plasmid R100]
  misc_feature (1)..(402): Homolog of NCBI NO: 10957274 NR Description: IS10 transposase [Salmonella typhi]
  misc_feature (1)..(402): Homolog of NCBI NO: 11545514 NR Description: transposase [Tn10 delivery vector pHV1248]
  misc_feature (1)..(402): Homolog of NCBI NO: 11545516 NR Description: transposase [Tn10 delivery vector pHV1249]
  misc_feature (1)..(402): Homolog of NCBI NO: 10957265 NR Description: putative IS10 transposase [Salmonella typhi] putative IS10 transposase [Salmonella typhi]
  misc_feature (1)..(402): Homolog of NCBI NO: 9507594 NR Description: transposase of Tn10 [Plasmid R100] putative transposase [Salmonella enterica subsp. enterica serovar >gi|18466588|ref|NP_569396.1| transposase [Salmonella enterica
  misc_feature (1)..(402): Homolog of NCBI NO: 24111918 NR Description: transposase of Tn10 [Shigella flexneri 2a str. >gi|24050722|gb|AAN42135.1|AE015080_3 transposase of Tn10
  misc_feature (1)..(342): Homolog of NCBI NO: 15230813 NR Description: bacterial IS-element [Arabidopsis thaliana]
  misc_feature (1)..(111): Homolog of NCBI NO: 6685159 NR Description: gastric cancer-related protein GCYS-20 [Homo
MCELDILHDSLYQFCPELHLKRLNSLTLACHALLDCKTLTLTELGRNLPTKARTKHNIKRIDRLLGNRHLHKERLAVYRWHASFICSGNTMPIVLVDWSDIREQKRLMVLRASVALHGRSVTLYEKAFPLSEQCSKKAHDQFLADLASILPSNTTPLIVSDAGFKVPWYKSVEKLGWYWLSRVRGKVQYADLGAENWKPISNLHDMSSSHSKTLGYKRLTKSNPISCQILLYKSRSKGRKNQRSTRTHCHHPSPKIYSASAKEPWVLATNLPVEIRTPKQLVNIYSKRMQIEETFRDLKSPAYGLGLRHSRTSSSERFDIMLLIALMLQLTCWLAGVHAQKQGWDKHFQANTVRNRNVLSTVRLGMEVLRHSGYTITREDLLVAATLLAQNLFTHGYALGKL

SEQ ID NO: 108131 - protein, 376 aa, Arabidopsis thaliana; identical to SEQ ID NO: 48003
  peptide (1)..(376): Ceres Seq. ID no. 13653284
  misc_feature (1)..(351): Pfam Name: Sugar (and other) transporter Pfam Description: Sugar (and other) transporter
  misc_feature (1)..(376): Homolog of NCBI NO: 15235215 NR Description: sugar transporter, putative [Arabidopsis thaliana]
  misc_feature (1)..(376): Homolog of NCBI NO: 1723182 NR Description: Sugar carrier protein A >gi|7446730|pir||T10150
  misc_feature (1)..(369): Homolog of NCBI NO: 347855 NR Description: glucose transporter [Saccharum hybrid cultivar
  misc_feature (1)..(347): Homolog of NCBI NO: 23336284 NR Description: hypothetical protein [Bifidobacterium longum
  misc_feature (1)..(347): Homolog of NCBI NO: 23466180 NR Description: D-xylose-proton symporter [Bifidobacterium longum
  misc_feature (1)..(347): Homolog of NCBI NO: 27467165 NR Description: bicyclomycin resistance protein TcaB epidermidis ATCC 12228] >gi|27314707|gb|AAO03844.1|AE016744_247
  misc_feature (1)..(232): Homolog of NCBI NO: 16418395 NR Description: solute carrier family 2 (facilitated glucose
  misc_feature (248)..(351): Homolog of NCBI NO: 16418395 NR Description: solute carrier family 2 (facilitated glucose
  misc_feature (1)..(369): Homolog of NCBI NO: 6321888 NR Description: Member of superfamily of monosaccharide Hxt5p [Saccharomyces cerevisiae] >gi|729781|sp|P38695|HXT5_YEAST
  misc_feature (1)..(358): Homolog of NCBI NO: 1730047 NR Description: Hexose transporter 2 >gi|1076967|pir||S51081

SEQ ID NO: 108132 - DNA, 1695 bp, Arabidopsis thaliana
  misc_feature (1)..(1695): Ceres Seq. ID no. 13653297
  misc_feature: MA Experiment ID: 108462 Result: Down-regulated in Transcription
  misc_feature: MA Experiment 108462 PARAMETER Experiment Name: At_Germinating_Seeds_cDNA_P Parameter: Age (day) Value: 2 vs. 0
  misc_feature: MA Experiment 108462 PARAMETER Experiment Name: At_Germinating_Seeds_cDNA_P Parameter: Tissue Value: Germinating Seeds
  misc_feature: MA Experiment ID: 108463 Result: Down-regulated in Transcription
  misc_feature: MA Experiment 108463 PARAMETER Experiment Name: At_Germinating_Seeds_cDNA_P Parameter: Age (day) Value: 3 vs. 0
  misc_feature: MA Experiment 108463 PARAMETER Experiment Name: At_Germinating_Seeds_cDNA_P Parameter: Tissue Value: Germinating Seeds
  misc_feature: MA Experiment ID: 108464 Result: Down-regulated in Transcription
  misc_feature: MA Experiment 108464 PARAMETER Experiment Name: At_Germinating_Seeds_cDNA_P Parameter: Age (day) Value: 4 vs. 0
  misc_feature: MA Experiment 108464 PARAMETER Experiment Name: At_Germinating_Seeds_cDNA_P Parameter: Tissue Value: Germinating Seeds
  misc_feature: MA Experiment ID: 108585 Result: Down-regulated in Transcription
  misc_feature: MA Experiment 108585 PARAMETER Experiment Name: At_5mM_NaNP_cDNA_P Parameter: Timepoint (hr) Value: 6
  misc_feature: MA Experiment 108585 PARAMETER Experiment Name: At_5mM_NaNP_cDNA_P Parameter: Tissue Value: Aerial
  misc_feature: MA Experiment 108585 PARAMETER Experiment Name: At_5mM_NaNP_cDNA_P Parameter: Treatment Value: null
  misc_feature: MA Experiment ID: 108595 Result: Down-regulated in Transcription
  misc_feature: MA Experiment 108595 PARAMETER Experiment Name: At_Ler-pi_Ovule_cDNA_P Parameter: Plant Line Value: null
  misc_feature: MA Experiment ID: 108668 Result: Down-regulated in Transcription
  misc_feature: MA Experiment 108668 PARAMETER Experiment Name: At_2mM_SA_cDNA_P Parameter: Plant Line Value: WS
  misc_feature: MA Experiment 108668 PARAMETER Experiment Name: At_2mM_SA_cDNA_P Parameter: Timepoint (hr) Value: 6
  misc_feature: MA Experiment 108668 PARAMETER Experiment Name: At_2mM_SA_cDNA_P Parameter: Treatment Value: 2mM SA vs. No Treatment
  misc_feature: MA Experiment ID: 20000185 Result: Down-regulated in Transcription
  misc_feature: MA Experiment 20000185 PARAMETER Experiment Name: At_Roots__P Parameter: Age (day) Value: 7 vs. 21
  misc_feature: MA Experiment 20000185 PARAMETER Experiment Name: At_Roots__P Parameter: Organism Value: A. thaliana
  misc_feature: MA Experiment 20000185 PARAMETER Experiment Name: At_Roots__P Parameter: Tissue Value: Roots vs. Whole Plant
  misc_feature: MA Experiment ID: 20000224 Result: Up-regulated in Transcription
  misc_feature: MA Experiment ID: 20000234 Result: Up-regulated in Transcription
  misc_feature: MA Experiment 20000234 PARAMETER Experiment Name: At_Siliques_P Parameter: Age (day) Value: 21
  misc_feature: MA Experiment 20000234 PARAMETER Experiment Name: At_Siliques_P Parameter: Organism Value: A. thaliana
  misc_feature: MA Experiment 20000234 PARAMETER Experiment Name: At_Siliques_P Parameter: Plant Line Value: WS
  misc_feature: MA Experiment 20000234 PARAMETER Experiment Name: At_Siliques_P Parameter: Tissue Value: Less Than 5mm Siliques vs. Whole Plant
  misc_feature: MA Experiment ID: 20000437 Result: Down-regulated in Transcription
  misc_feature: MA Experiment 20000437 PARAMETER Experiment Name: At_Drought_P Parameter: Age (day) Value: 8
  misc_feature: MA Experiment 20000437 PARAMETER Experiment Name: At_Drought_P Parameter: Organism Value: A. thaliana
  misc_feature: MA Experiment 20000437 PARAMETER Experiment Name: At_Drought_P Parameter: Plant Line Value: WS
  misc_feature: MA Experiment 20000437 PARAMETER Experiment Name: At_Drought_P Parameter: Timepoint (hr) Value: 24
  misc_feature: MA Experiment 20000437 PARAMETER Experiment Name: At_Drought_P Parameter: Tissue Value: Whole Plant
  misc_feature: MA Experiment 20000437 PARAMETER Experiment Name: At_Drought_P Parameter: Treatment Value: Drought vs. No Drought
  misc_feature: MA Experiment ID: 20000439 Result: Down-regulated in Transcription
  misc_feature: MA Experiment 20000439 PARAMETER Experiment Name: At_Roots__P Parameter: Age (day) Value: 14 vs. 21
  misc_feature: MA Experiment 20000439 PARAMETER Experiment Name: At_Roots__P Parameter: Organism Value: A. thaliana
  misc_feature: MA Experiment 20000439 PARAMETER Experiment Name: At_Roots__P Parameter: Tissue Value: Roots vs. Whole Plant
  misc_feature: MA Experiment ID: 20001556 Result: Up-regulated in Transcription
  misc_feature: MA Experiment 20001556 PARAMETER Experiment Name: At_Drought_Soil_Dry_P Parameter: Age (day) Value: 26
  misc_feature: MA Experiment 20001556 PARAMETER Experiment Name: At_Drought_Soil_Dry_P Parameter: Organism Value: A. thaliana
  misc_feature: MA Experiment 20001556 PARAMETER Experiment Name: At_Drought_Soil_Dry_P Parameter: Plant Line Value: WS
  misc_feature: MA Experiment 20001556 PARAMETER Experiment Name: At_Drought_Soil_Dry_P Parameter: Post Timepoint (hr) Value: None
  misc_feature: MA Experiment 20001556 PARAMETER Experiment Name: At_Drought_Soil_Dry_P Parameter: Post-Treatment Value: None
  misc_feature: MA Experiment 20001556 PARAMETER Experiment Name: At_Drought_Soil_Dry_P Parameter: Timepoint (day) Value: 12
  misc_feature: MA Experiment 20001556 PARAMETER Experiment Name: At_Drought_Soil_Dry_P Parameter: Treatment Value: Drought vs. No Drought
  misc_feature: MA Experiment ID: 20001558 Result: Up-regulated in Transcription
  misc_feature: MA Experiment 20001558 PARAMETER Experiment Name: At_Drought_Soil_Dry_P Parameter: Age (day) Value: 27
  misc_feature: MA Experiment 20001558 PARAMETER Experiment Name: At_Drought_Soil_Dry_P Parameter: Organism Value: A. thaliana
  misc_feature: MA Experiment 20001558 PARAMETER Experiment Name: At_Drought_Soil_Dry_P Parameter: Plant Line Value: WS
  misc_feature: MA Experiment 20001558 PARAMETER Experiment Name: At_Drought_Soil_Dry_P Parameter: Post Timepoint (hr) Value: 6
  misc_feature: MA Experiment 20001558 PARAMETER Experiment Name: At_Drought_Soil_Dry_P Parameter: Post-Treatment Value: Re-Water vs. No Drought
  misc_feature: MA Experiment 20001558 PARAMETER Experiment Name: At_Drought_Soil_Dry_P Parameter: Timepoint (day) Value: 13
  misc_feature: MA Experiment 20001558 PARAMETER Experiment Name: At_Drought_Soil_Dry_P Parameter: Treatment Value: Drought vs. No Drought
ttggttgaggaatggcttcttcagtctctcttcagttcctgaccaacacctttatctccaaacctcagggtttctgcaacggaattgtgtcagcaccaagacccagaagcaatttattaagagacagacaaaatggtgtacgacccatcaaagttgcgtctattgagacacaacctttccctctgtttcaatctcctgcttccgaagaatcttcctcgtccgagctggagacagcagatccggatttctacaaaattggctatgttcgaagtgtgagagcttatggagttgagtttaaagaaggtccagatggttttggtgtctatgcttctaaggatatcgaacctcgccgtcgagctagagtgattatggagattcctcttgaactgatgataaccattagacagaagcacccttggatgtttttccctgatattgtaccaattggtcatcctattttcgatatcattaactcgactgatcctgagattgattgggatatcagattagcgtgtcttctgttattctcttttgatcgagatgatcacttctggcggctctatggcgatttcctgccggctgctgatgagtgcagcagcttgcttttagctacagaggaagaccttgcggagcttcaagatcctgatcttgtttcaactatcagacaacaacagaaacgaatcctagatttttgggaaaagaattggcattcaggtgttcctctcaaaatcaaaaggcttgccgaggatccagaaagattcatatgggcggttagtatggcacagacacgatgcatcagtatgcaaactagggtcggtgctttggttcaggaattaaatatgatgattccttatgctgacatgctaaaccactcatttgaaccaaactgtttcctacattggcgtcctaaagatcgcatgctggaggttatgtcaaatgctggtcaagacattaagaaaggcgaagagatgacgattaattacatgccaggccagaaaaacaacatgcttatggaaagatacggcttctcaactcctgtgaatccgtgggatgctataaagttctctggagattctcgcatccatttaaattcctttttatcggtcttcaatatttatggtcttcctgaagaatattaccatgacagcgagttatcgaggggcgatacttttgttgatggagcagttatcgctgcagcaagaacattacctacttggtcagacatagatcttcctccaataccgagtgcggaaagaaaagcagttaaagaattgcaagatgaatgtcgaaagatgcttgcggaatatcccacaacagcagagcaagaccagaagttgctagattcaatgtcagaagcaaggacaacatttgcaacagcggttaagtatagaatgcacagaaagatgttcatcggaaaaattatcaaggcacttgacatctatcaagaacggttactctattgattcaagcaaaaaataattatgagctgagtgagattcatacttggtgctcactcccttgagctacttagaaactgcaccatgtaattgaaaggttcctgtttttttttttgtttagtgtaaggttatgtatttgtatggaacagttagactaagtgtgttagtttgttttaatcgcaatcacaaacaaatcataacctcttcttttcttggctgctttaatgagtttgattag

SEQ ID NO: 108133 - protein, 483 aa, Arabidopsis thaliana
  peptide (1)..(483): Ceres Seq. ID no. 13653298
  misc_feature (1)..(483): Homolog of NCBI NO: 28393566 NR Description: unknown protein [Arabidopsis thaliana]
  misc_feature (1)..(287): Homolog of NCBI NO: 30684996 NR Description: expressed protein [Arabidopsis thaliana]
  misc_feature (1)..(232): Homolog of NCBI NO: 7485732 NR Description: hypothetical protein F18F4.220 - Arabidopsis >gi|2827666|emb|CAA16620.1| hypothetical protein [Arabidopsis >gi|7268807|emb|CAB79012.1| hypothetical protein [Arabidopsis
  misc_feature (284)..(483): Homolog of NCBI NO: 30685001 NR Description: expressed protein [Arabidopsis thaliana]
  misc_feature (284)..(443): Homolog of NCBI NO: 7485733 NR Description: hypothetical protein F18F4.230 - Arabidopsis >gi|2827667|emb|CAA16621.1| hypothetical protein [Arabidopsis >gi|7268808|emb|CAB79013.1| hypothetical protein [Arabidopsis
  misc_feature (150)..(287): Homolog of NCBI NO: 7485732 NR Description: hypothetical protein F18F4.220 - Arabidopsis >gi|2827666|emb|CAA16620.1| hypothetical protein [Arabidopsis >gi|7268807|emb|CAB79012.1| hypothetical protein [Arabidopsis
  misc_feature (46)..(482): Homolog of NCBI NO: 8778402 NR Description: F16A14.25 [Arabidopsis thaliana]
MASSVSLQFLTNTFISKPQGFCNGIVSAPRPRSNLLRDRQNGVRPIKVASIETQPFPLFQSPASEESSSSELETADPDFYKIGYVRSVRAYGVEFKEGPDGFGVYASKDIEPRRRARVIMEIPLELMITIRQKHPWMFFPDIVPIGHPIFDIINSTDPEIDWDIRLACLLLFSFDRDDHFWRLYGDFLPAADECSSLLLATEEDLAELQDPDLVSTIRQQQKRILDFWEKNWHSGVPLKIKRLAEDPERFIWAVSMAQTRCISMQTRVGALVQELNMMIPYADMLNHSFEPNCFLHWRPKDRMLEVMSNAGQDIKKGEEMTINYMPGQKNNMLMERYGFSTPVNPWDAIKFSGDSRIHLNSFLSVFNIYGLPEEYYHDSELSRGDTFVDGAVIAAARTLPTWSDIDLPPIPSAERKAVKELQDECRKMLAEYPTTAEQDQKLLDSMSEARTTFATAVKYRMHRKMFIGKIIKALDIYQERLLY

SEQ ID NO: 108134 - protein, 364 aa, Arabidopsis thaliana
  peptide (1)..(364): Ceres Seq. ID no. 13653299
  misc_feature (1)..(364): Homolog of NCBI NO: 28393566 NR Description: unknown protein [Arabidopsis thaliana]
  misc_feature (1)..(168): Homolog of NCBI NO: 30684996 NR Description: expressed protein [Arabidopsis thaliana]
  misc_feature (1)..(113): Homolog of NCBI NO: 7485732 NR Description: hypothetical protein F18F4.220 - Arabidopsis >gi|2827666|emb|CAA16620.1| hypothetical protein [Arabidopsis >gi|7268807|emb|CAB79012.1| hypothetical protein [Arabidopsis
  misc_feature (165)..(364): Homolog of NCBI NO: 30685001 NR Description: expressed protein [Arabidopsis thaliana]
  misc_feature (165)..(324): Homolog of NCBI NO: 7485733 NR Description: hypothetical protein F18F4.230 - Arabidopsis >gi|2827667|emb|CAA16621.1| hypothetical protein [Arabidopsis >gi|7268808|emb|CAB79013.1| hypothetical protein [Arabidopsis
  misc_feature (31)..(168): Homolog of NCBI NO: 7485732 NR Description: hypothetical protein F18F4.220 - Arabidopsis >gi|2827666|emb|CAA16620.1| hypothetical protein [Arabidopsis >gi|7268807|emb|CAB79012.1| hypothetical protein [Arabidopsis
  misc_feature (1)..(363): Homolog of NCBI NO: 8778402 NR Description: F16A14.25 [Arabidopsis thaliana]
MEIPLELMITIRQKHPWMFFPDIVPIGHPIFDIINSTDPEIDWDIRLACLLLFSFDRDDHFWRLYGDFLPAADECSSLLLATEEDLAELQDPDLVSTIRQQQKRILDFWEKNWHSGVPLKIKRLAEDPERFIWAVSMAQTRCISMQTRVGALVQELNMMIPYADMLNHSFEPNCFLHWRPKDRMLEVMSNAGQDIKKGEEMTINYMPGQKNNMLMERYGFSTPVNPWDAIKFSGDSRIHLNSFLSVFNIYGLPEEYYHDSELSRGDTFVDGAVIAAARTLPTWSDIDLPPIPSAERKAVKELQDECRKMLAEYPTTAEQDQKLLDSMSEARTTFATAVKYRMHRKMFIGKIIKALDIYQERLLY

SEQ ID NO: 108135 - protein, 357 aa, Arabidopsis thaliana
  peptide (1)..(357): Ceres Seq. ID no. 13653300
  misc_feature (1)..(357): Homolog of NCBI NO: 28393566 NR Description: unknown protein [Arabidopsis thaliana]
  misc_feature (1)..(161): Homolog of NCBI NO: 30684996 NR Description: expressed protein [Arabidopsis thaliana]
  misc_feature (1)..(106): Homolog of NCBI NO: 7485732 NR Description: hypothetical protein F18F4.220 - Arabidopsis >gi|2827666|emb|CAA16620.1| hypothetical protein [Arabidopsis >gi|7268807|emb|CAB79012.1| hypothetical protein [Arabidopsis
  misc_feature (158)..(357): Homolog of NCBI NO: 30685001 NR Description: expressed protein [Arabidopsis thaliana]
  misc_feature (158)..(317): Homolog of NCBI NO: 7485733 NR Description: hypothetical protein F18F4.230 - Arabidopsis >gi|2827667|emb|CAA16621.1| hypothetical protein [Arabidopsis >gi|7268808|emb|CAB79013.1| hypothetical protein [Arabidopsis
  misc_feature (24)..(161): Homolog of NCBI NO: 7485732 NR Description: hypothetical protein F18F4.220 - Arabidopsis >gi|2827666|emb|CAA16620.1| hypothetical protein [Arabidopsis >gi|7268807|emb|CAB79012.1| hypothetical protein [Arabidopsis
  misc_feature (1)..(356): Homolog of NCBI NO: 8778402 NR Description: F16A14.25 [Arabidopsis thaliana]
MITIRQKHPWMFFPDIVPIGHPIFDIINSTDPEIDWDIRLACLLLFSFDRDDHFWRLYGDFLPAADECSSLLLATEEDLAELQDPDLVSTIRQQQKRILDFWEKNWHSGVPLKIKRLAEDPERFIWAVSMAQTRCISMQTRVGALVQELNMMIPYADMLNHSFEPNCFLHWRPKDRMLEVMSNAGQDIKKGEEMTINYMPGQKNNMLMERYGFSTPVNPWDAIKFSGDSRIHLNSFLSVFNIYGLPEEYYHDSELSRGDTFVDGAVIAAARTLPTWSDIDLPPIPSAERKAVKELQDECRKMLAEYPTTAEQDQKLLDSMSEARTTFATAVKYRMHRKMFIGKIIKALDIYQERLLY

SEQ ID NO: 108136 - DNA, 1027 bp, Arabidopsis thaliana
  misc_feature (1)..(1027): Ceres Seq. ID no. 13653301
  misc_feature: MA Experiment ID: 20001906 Result: Up-regulated in Transcription
  misc_feature: MA Experiment 20001906 PARAMETER Experiment Name: At_Drought_Reproduction_P Parameter: Age (day) Value: 35
  misc_feature: MA Experiment 20001906 PARAMETER Experiment Name: At_Drought_Reproduction_P Parameter: Organism Value: A. thaliana
  misc_feature: MA Experiment 20001906 PARAMETER Experiment Name: At_Drought_Reproduction_P Parameter: Plant Line Value: WS
  misc_feature: MA Experiment 20001906 PARAMETER Experiment Name: At_Drought_Reproduction_P Parameter: Timepoint (day) Value: 5
  misc_feature: MA Experiment 20001906 PARAMETER Experiment Name: At_Drought_Reproduction_P Parameter: Tissue Value: Siliques
  misc_feature: MA Experiment 20001906 PARAMETER Experiment Name: At_Drought_Reproduction_P Parameter: Treatment Value: Drought vs. No Drought
  misc_feature: MA Experiment ID: 20001908 Result: Up-regulated in Transcription
  misc_feature: MA Experiment 20001908 PARAMETER Experiment Name: At_Drought_Reproduction_P Parameter: Age (day) Value: 40
  misc_feature: MA Experiment 20001908 PARAMETER Experiment Name: At_Drought_Reproduction_P Parameter: Organism Value: A. thaliana
  misc_feature: MA Experiment 20001908 PARAMETER Experiment Name: At_Drought_Reproduction_P Parameter: Plant Line Value: WS
  misc_feature: MA Experiment 20001908 PARAMETER Experiment Name: At_Drought_Reproduction_P Parameter: Timepoint (day) Value: 10
  misc_feature: MA Experiment 20001908 PARAMETER Experiment Name: At_Drought_Reproduction_P Parameter: Tissue Value: Siliques
  misc_feature: MA Experiment 20001908 PARAMETER Experiment Name: At_Drought_Reproduction_P Parameter: Treatment Value: Drought vs. No Drought
  misc_feature: Pfam Name: CBFD_NFYB_HMF Pfam Description: Histone-like transcription factor (CBF/NF-Y) and archaeal histone
ataccccctcttttcacaggctctcttcatttcagttgcatgcgaaaccattctctgcaatccctccattgtcatgtctgtactcttttcatgacgaacagttaatgaaatagcttttcaatcttataaaccgcgcatgcagacgtcatcgaagccattatgcactaaaacttccatttttcttatttttgttaggattagcagcgaattttctgatggcagagggcagtatgcgtcctccagaattcaaccagcctaacaaaaccagtaatggtggtgaggaggagtgcacggtgagggagcaagacaggttcatgcctattgccaacgtgatacggatcatgcggaggatcttacctgctcacgccaggatctcagatgactccaaggagacgatccaagagtgtgtttcggagtacatcagcttcataacaggggaggctaatgagcggtgccagcgggaacagcgcaagaccatcactgctgaggacgtcttgtgggcaatgagcaagctcggttttgatgactacatcgaacccctcacgttgtacctccaccgctacagagagttggaaggtgaaagaggggttagctgcagtgctgggtccgttagtatgaccaacggcttggtggtcaagaggcctaatgggaccatgaccgagtatggagcctacgggcctgtgccagggattcacatggcgcagtaccattatcgtcatcagaacgggtttgttttcagtggtaacgaacctaattctaagatgagtggttcatcttcaggagcaagtggcgccagagttgaagtatttccgactcaacaacataagtactgagaacaatggctaataacatagacagctgacagagtcataactgttagtaggtgcaagctgtagcttatgaattcaagtttaagcgaaaacaatgctgctttttctttgtttattatctatctagttgaaagaacattgtgtttttcatctgatctgtcttgtggtaaagtatgtcaataaagcattagttttgc

SEQ ID NO: 108137 - protein, 205 aa, Arabidopsis thaliana
  peptide (1)..(205): Ceres Seq. ID no. 13653302
  misc_feature: Pfam Name: CBFD_NFYB_HMF Pfam Description: Histone-like transcription factor (CBF/NF-Y) and archaeal histone
  misc_feature (1)..(205): Homolog of NCBI NO: 30695265 NR Description: leafy cotyledon 1-related L1L protein
  misc_feature (1)..(205): Homolog of NCBI NO: 28393564 NR Description: unknown protein [Arabidopsis thaliana]
  misc_feature (1)..(205): Homolog of NCBI NO: 9758795 NR Description: contains similarity to CCAAT-box-binding
  misc_feature (15)..(182): Homolog of NCBI NO: 22536010 NR Description: LEC1-like protein [Phaseolus coccineus]
  misc_feature (1)..(170): Homolog of NCBI NO: 15321716 NR Description: leafy cotyledon1 [Zea mays]
  misc_feature (19)..(150): Homolog of NCBI NO: 30349365 NR Description: leafy cotyledon 1 [Oryza sativa (indica
  misc_feature (25)..(192): Homolog of NCBI NO: 3282674 NR Description: CCAAT-box binding factor HAP3 homolog
  misc_feature (25)..(192): Homolog of NCBI NO: 15219151 NR Description: CCAAT-box binding factor HAP3 homolog
MAEGSMRPPEFNQPNKTSNGGEEECTVREQDRFMPIANVIRIMRRILPAHARISDDSKETIQECVSEYISFITGEANERCQREQRKTITAEDVLWAMSKLGFDDYIEPLTLYLHRYRELEGERGVSCSAGSVSMTNGLVVKRPNGTMTEYGAYGPVPGIHMAQYHYRHQNGFVFSGNEPNSKMSGSSSGASGARVEVFPTQQHKY

SEQ ID NO: 108138 - protein, 200 aa, Arabidopsis thaliana
  peptide (1)..(200): Ceres Seq. ID no. 13653303
  misc_feature: Pfam Name: CBFD_NFYB_HMF Pfam Description: Histone-like transcription factor (CBF/NF-Y) and archaeal histone
  misc_feature (1)..(200): Homolog of NCBI NO: 30695265 NR Description: leafy cotyledon 1-related L1L protein
  misc_feature (1)..(200): Homolog of NCBI NO: 28393564 NR Description: unknown protein [Arabidopsis thaliana]
  misc_feature (1)..(200): Homolog of NCBI NO: 9758795 NR Description: contains similarity to CCAAT-box-binding
  misc_feature (10)..(177): Homolog of NCBI NO: 22536010 NR Description: LEC1-like protein [Phaseolus coccineus]
  misc_feature (1)..(165): Homolog of NCBI NO: 15321716 NR Description: leafy cotyledon1 [Zea mays]
  misc_feature (14)..(145): Homolog of NCBI NO: 30349365 NR Description: leafy cotyledon 1 [Oryza sativa (indica
  misc_feature (20)..(187): Homolog of NCBI NO: 3282674 NR Description: CCAAT-box binding factor HAP3 homolog
  misc_feature (20)..(187): Homolog of NCBI NO: 15219151 NR Description: CCAAT-box binding factor HAP3 homolog
MRPPEFNQPNKTSNGGEEECTVREQDRFMPIANVIRIMRRILPAHARISDDSKETIQECVSEYISFITGEANERCQREQRKTITAEDVLWAMSKLGFDDYIEPLTLYLHRYRELEGERGVSCSAGSVSMTNGLVVKRPNGTMTEYGAYGPVPGIHMAQYHYRHQNGFVFSGNEPNSKMSGSSSGASGARVEVFPTQQHKY

SEQ ID NO: 108139 - protein, 172 aa, Arabidopsis thaliana
  peptide (1)..(172): Ceres Seq. ID no. 13653304
  misc_feature: Pfam Name: CBFD_NFYB_HMF Pfam Description: Histone-like transcription factor (CBF/NF-Y) and archaeal histone
  misc_feature (1)..(172): Homolog of NCBI NO: 30695265 NR Description: leafy cotyledon 1-related L1L protein
  misc_feature (1)..(172): Homolog of NCBI NO: 28393564 NR Description: unknown protein [Arabidopsis thaliana]
  misc_feature (1)..(172): Homolog of NCBI NO: 9758795 NR Description: contains similarity to CCAAT-box-binding
  misc_feature (1)..(149): Homolog of NCBI NO: 22536010 NR Description: LEC1-like protein [Phaseolus coccineus]
  misc_feature (1)..(137): Homolog of NCBI NO: 15321716 NR Description: leafy cotyledon1 [Zea mays]
  misc_feature (1)..(117): Homolog of NCBI NO: 30349365 NR Description: leafy cotyledon 1 [Oryza sativa (indica
  misc_feature (1)..(159): Homolog of NCBI NO: 3282674 NR Description: CCAAT-box binding factor HAP3 homolog
  misc_feature (1)..(159): Homolog of NCBI NO: 15219151 NR Description: CCAAT-box binding factor HAP3 homolog
MPIANVIRIMRRILPAHARISDDSKETIQECVSEYISFITGEANERCQREQRKTITAEDVLWAMSKLGFDDYIEPLTLYLHRYRELEGERGVSCSAGSVSMTNGLVVKRPNGTMTEYGAYGPVPGIHMAQYHYRHQNGFVFSGNEPNSKMSGSSSGASGARVEVFPTQQHKY

SEQ ID NO: 108140 - DNA, 3642 bp, Arabidopsis thaliana
  misc_feature (1)..(3642): Ceres Seq. ID no. 13653313
  misc_feature: MA Experiment ID: 20000171 Result: Down-regulated in Transcription
  misc_feature: MA Experiment 20000171 PARAMETER Experiment Name: At_42deg_Heat_P Parameter: Age (day) Value: 14
  misc_feature: MA Experiment 20000171 PARAMETER Experiment Name: At_42deg_Heat_P Parameter: Organism Value: A. thaliana
  misc_feature: MA Experiment 20000171 PARAMETER Experiment Name: At_42deg_Heat_P Parameter: Plant Line Value: WS
  misc_feature: MA Experiment 20000171 PARAMETER Experiment Name: At_42deg_Heat_P Parameter: Temperature (deg C) Value: 42 vs. 22
  misc_feature: MA Experiment 20000171 PARAMETER Experiment Name: At_42deg_Heat_P Parameter: Timepoint (hr) Value: 1
  misc_feature: MA Experiment 20000171 PARAMETER Experiment Name: At_42deg_Heat_P Parameter: Tissue Value: Aerial
  misc_feature: MA Experiment ID: 20000173 Result: Down-regulated in Transcription
  misc_feature: MA Experiment 20000173 PARAMETER Experiment Name: At_42deg_Heat_P Parameter: Age (day) Value: 14
  misc_feature: MA Experiment 20000173 PARAMETER Experiment Name: At_42deg_Heat_P Parameter: Organism Value: A. thaliana
  misc_feature: MA Experiment 20000173 PARAMETER Experiment Name: At_42deg_Heat_P Parameter: Plant Line Value: WS
  misc_feature: MA Experiment 20000173 PARAMETER Experiment Name: At_42deg_Heat_P Parameter: Temperature (deg C) Value: 42 vs. 22
  misc_feature: MA Experiment 20000173 PARAMETER Experiment Name: At_42deg_Heat_P Parameter: Timepoint (hr) Value: 6
  misc_feature: MA Experiment 20000173 PARAMETER Experiment Name: At_42deg_Heat_P Parameter: Tissue Value: Aerial
  misc_feature: MA Experiment ID: 20000227 Result: Up-regulated in Transcription
  misc_feature: MA Experiment 20000227 PARAMETER Experiment Name: At_Root-Tips-vs-Tops_P Parameter: Tissue Value: Root Tips vs. Root Tops
  misc_feature: MA Experiment ID: 20000234 Result: Up-regulated in Transcription
  misc_feature: MA Experiment 20000234 PARAMETER Experiment Name: At_Siliques_P Parameter: Age (day) Value: 21
  misc_feature: MA Experiment 20000234 PARAMETER Experiment Name: At_Siliques_P Parameter: Organism Value: A. thaliana
  misc_feature: MA Experiment 20000234 PARAMETER Experiment Name: At_Siliques_P Parameter: Plant Line Value: WS
  misc_feature: MA Experiment 20000234 PARAMETER Experiment Name: At_Siliques_P Parameter: Tissue Value: Less Than 5mm Siliques vs. Whole Plant
  misc_feature: MA Experiment ID: 20000235 Result: Up-regulated in Transcription
  misc_feature: MA Experiment 20000235 PARAMETER Experiment Name: At_Siliques_P Parameter: Age (day) Value: 21
  misc_feature: MA Experiment 20000235 PARAMETER Experiment Name: At_Siliques_P Parameter: Organism Value: A. thaliana
  misc_feature: MA Experiment 20000235 PARAMETER Experiment Name: At_Siliques_P Parameter: Plant Line Value: WS
  misc_feature: MA Experiment 20000235 PARAMETER Experiment Name: At_Siliques_P Parameter: Tissue Value: 5-10mm Siliques vs. Whole Plant
  misc_feature: MA Experiment ID: 20000439 Result: Up-regulated in Transcription
  misc_feature: MA Experiment 20000439 PARAMETER Experiment Name: At_Roots__P Parameter: Age (day) Value: 14 vs. 21
  misc_feature: MA Experiment 20000439 PARAMETER Experiment Name: At_Roots__P Parameter: Organism Value: A. thaliana
  misc_feature: MA Experiment 20000439 PARAMETER Experiment Name: At_Roots__P Parameter: Tissue Value: Roots vs. Whole Plant
  misc_feature: MA Experiment ID: 20000496 Result: Up-regulated in Transcription
  misc_feature: MA Experiment 20000496 PARAMETER Experiment Name: At_Guard_Cells_P Parameter: Harvest Date Value: 7/19/2002
  misc_feature: MA Experiment 20000496 PARAMETER Experiment Name: At_Guard_Cells_P Parameter: Organism Value: Canola
  misc_feature: MA Experiment 20000496 PARAMETER Experiment Name: At_Guard_Cells_P Parameter: Tissue Value: Guard Cells vs. Leaves
  misc_feature: MA Experiment ID: 20000794 Result: Up-regulated in Transcription
  misc_feature: MA Experiment 20000794 PARAMETER Experiment Name: At_Petals_P Parameter: Age (day) Value: 23-25 days
  misc_feature: MA Experiment 20000794 PARAMETER Experiment Name: At_Petals_P Parameter: Plant Line Value: WS
  misc_feature: MA Experiment 20000794 PARAMETER Experiment Name: At_Petals_P Parameter: Tissue Value: Petals vs. Whole plant
gatttacacatccttcttcttccagttccatgtcgcatacgtacacagattgacagcgaagctagttagctcagattttggatctcgaatttcagttaattcgatccggttatggacattctttttgctcagatccaggcggacctccgttcaaatgacgcgcttcgccagtcatcggcgcttcttcaggcgctgcagcaatccgccgccggaagagatatctctgtgatcgctaagtctgctgtggaggagattgttgcttctccggcttcagctgtttgtaagaagctggcattcgatctcatccgatctacccgcctcactccggatctttgggacaccgtttgctcaggtgtcaaaacggatcttcattttccggacccggatgttaccgccgctgccgtctccatccttgcggctctccctgccttctcgcttcctaaactcatctctgattgcagctctgagattgcttcctgcttcgattctccatctgacaaccttcgtttttccatcaccgagacacttggctgcatcctcgcgcgtgatgatctcgttactttgtgcgagaacaatgtgggtctcctcgacaaggtctccaactggtgggctcggatcggccagaacatgctcgacaaatccgacgccgtctccaaggttgcctttgagtccgtcggcagactcttccaggagttcgactccaagcggatgagccgtcttgctggcgataagctcgttgacagcgagaactccctcgccatcaggtccaagtgggtctcttccatggttgacattgtatggagaaagaggagcgctttgatggctaggtctttagtccttcctgtcgaaaccttcagagccactgttttccctcttgtctttgctgtcaaagctgttgcttccggtagtgtcgaagtgattagacagctttccaaggcttcctctgctgctgctgcagctaatgccaccgttgtggactccaacgccgagaagctggttggcgtctcagatttggttacccatttggcgccattcttggcttcctctttggatccagctttgatttttgaagtgggaattaacatgctctacctggcagatgttgccggaggcaagccagagtgggcttcacagtccattattgcaattttaacactctgggaccgccaagaattttcctctgctagagagagtatagtcagggccgttgttacgaacctgcacttgcttgatctgcatatgcaggtttcgttgtttagaagactgctgcttatggtgagaaacttgagagcagaatcggacaggatgcacgcattagcctgtatctgtcggacagctctctgtgttcacctttttgccagagaaagtgcccgaagaggtcagaagcctctgcctgggacagatattatttctctctttgaagatgcaaggattaaagatgatctcaatagtgttaccagtaagagcttatttcgggaagagctggtggcaatgcttgtggaaagctgcttccagttgtctctacctttgcctgaacaaaaaaactcgggtatggagagcagagtgattggtgcgttagcatatggtactggttatggtgctctgaactggacagaaccagcccttgaggttgtggaagtttgtaggccttgtgtcaaatgggattgtgatggcaggacgtacgctgtagattgctatttgaaattgcttgttaggctgtgccatatctatgatacccgtggaggagtgaagaggctgaaagatggtgcttcccaggatcaaatattaaatgagacacgattgcagaacttgcaacgtgagcttgttaaggatctccaagaggtaaataccccaagaatcctcgggcgtcttatatggacaatcgcagaacatattgatctagaaggtctagatccacttttagctgatgaccccgatgatccattgaatattatcatagcaaacatacataaggttctcttcaacttggatgccgctgctactacatcgaataggctacaagatgttcaggcagtcttattatgcgcccagaggatgggatcgcgtcatgcaagagctggccagttattaaccaaagagcttgaagagtataggaaccatgctgctgcagatacagttagcaaacatcaaacccgtttaatattgcagaggatcaaatatgtttcaaatcttcctgaaagaaagtgggctggagttagtgagacaagaggagattacccgtttagccaccataagcttactgttcagttttacgaaccatcagctgctcaagacaggaaattagaaggtctaattcacaaggccattctcgagctttggaggccaaagcccactgaattaactctcttccttacaaaaggggtcgactcaacttctatcaaggttcctcccacagcatatcctttgaccggaagcagtgatccttgctatatagaagcttaccatttagcagatacaaatgatggaagggtcactttgcacttgaagattattaatttgacagaacttgaactgaatcgtgtggatatacgggttggattatctggtgccctatacttcatggatggctctcctcaagcagtgcggcagttgcgtaatcttgtctcacaggatcctgtacaatgcagtgtcaccgttggtgtgtcccaatttgaaagatgtggtttctgggttcaagtcctctactatccattccgtggtgctaggggagaatatgacggtgactacatagaagaggatccacagatcatgaagcagaagagaggttcaaaagcagaactcggagagcctgtgatcttaagatgtcagccttacaagatcccactgactgagcttcttctaccgcacaaaatctcaccagtcgagttctttcgtttgtggcctagcttgccagctgttgcagagtacactggcacatatatgtatgaaggaagcggcttcatggcgaccgccgcacaacagtatggggcttcaccatttttaagcggactcaaatcattatcctcgaagccattccacagagtctgttcccacattatacgcacagttgctggctttcagctttgttacgctgcaaaaacgtggcatggaggttttgtgggtatgatgatctttggcgctagtgaagtgagcaggaacatggatctgggtgacgagactaccaccatgatgtgcaagtttgtggttagagcatcagaagcatcaatcacaaagcaaatagagtcggatattcagggatggtgtgatgatctaactgacgggggcgttgagtacatgccagaggacgaagtgaaggcaaccgcggccgagaagctgaagatctctatggagaggatagctttgttgaaggcagctcagccgaagaagacttcaaagatagaggaggaatcagaaaacgaagaagaagaagaaggagaagaagaagatgatgatgaagaagtaaaagagaaaaaggagaaagaagagggaaaggacaaggaagagaagaagaaaaaagagaaggaaaaaggaacattttctaagctgacagcagaagaaacagagcacatggcgcttcaggcagcagtgctccaagaatggcacatcttgtgcaaagatagaaaatataccaaagttaactaa

SEQ ID NO: 108141 - protein, 1176 aa, Arabidopsis thaliana
  peptide (1)..(1176): Ceres Seq. ID no. 13653314
  misc_feature (1060)..(1139): Pfam Name: Hsp90 protein Pfam Description: Hsp90 protein
  misc_feature (1057)..(1151): Homolog of NCBI NO: 20089413 NR Description: conserved hypothetical protein [Methanosarcina str. C2A] >gi|19914312|gb|AAM03968.1| conserved hypothetical
MDILFAQIQADLRSNDALRQSSALLQALQQSAAGRDISVIAKSAVEEIVASPASAVCKKLAFDLIRSTRLTPDLWDTVCSGVKTDLHFPDPDVTAAAVSILAALPAFSLPKLISDCSSEIASCFDSPSDNLRFSITETLGCILARDDLVTLCENNVGLLDKVSNWWARIGQNMLDKSDAVSKVAFESVGRLFQEFDSKRMSRLAGDKLVDSENSLAIRSKWVSSMVDIVWRKRSALMARSLVLPVETFRATVFPLVFAVKAVASGSVEVIRQLSKASSAAAAANATVVDSNAEKLVGVSDLVTHLAPFLASSLDPALIFEVGINMLYLADVAGGKPEWASQSIIAILTLWDRQEFSSARESIVRAVVTNLHLLDLHMQVSLFRRLLLMVRNLRAESDRMHALACICRTALCVHLFARESARRGQKPLPGTDIISLFEDARIKDDLNSVTSKSLFREELVAMLVESCFQLSLPLPEQKNSGMESRVIGALAYGTGYGALNWTEPALEVVEVCRPCVKWDCDGRTYAVDCYLKLLVRLCHIYDTRGGVKRLKDGASQDQILNETRLQNLQRELVKDLQEVNTPRILGRLIWTIAEHIDLEGLDPLLADDPDDPLNIIIANIHKVLFNLDAAATTSNRLQDVQAVLLCAQRMGSRHARAGQLLTKELEEYRNHAAADTVSKHQTRLILQRIKYVSNLPERKWAGVSETRGDYPFSHHKLTVQFYEPSAAQDRKLEGLIHKAILELWRPKPTELTLFLTKGVDSTSIKVPPTAYPLTGSSDPCYIEAYHLADTNDGRVTLHLKIINLTELELNRVDIRVGLSGALYFMDGSPQAVRQLRNLVSQDPVQCSVTVGVSQFERCGFWVQVLYYPFRGARGEYDGDYIEEDPQIMKQKRGSKAELGEPVILRCQPYKIPLTELLLPHKISPVEFFRLWPSLPAVAEYTGTYMYEGSGFMATAAQQYGASPFLSGLKSLSSKPFHRVCSHIIRTVAGFQLCYAAKTWHGGFVGMMIFGASEVSRNMDLGDETTTMMCKFVVRASEASITKQIESDIQGWCDDLTDGGVEYMPEDEVKATAAEKLKISMERIALLKAAQPKKTSKIEEESENEEEEEGEEEDDDEEVKEKKEKEEGKDKEEKKKKEKEKGTFSKLTAEETEHMALQAAVLQEWHILCKDRKYTKVN

SEQ ID NO: 108142 - protein, 1004 aa, Arabidopsis thaliana
  peptide (1)..(1004): Ceres Seq. ID no. 13653315
  misc_feature (888)..(967): Pfam Name: Hsp90 protein Pfam Description: Hsp90 protein
  misc_feature (885)..(979): Homolog of NCBI NO: 20089413 NR Description: conserved hypothetical protein [Methanosarcina str. C2A] >gi|19914312|gb|AAM03968.1| conserved hypothetical
MLDKSDAVSKVAFESVGRLFQEFDSKRMSRLAGDKLVDSENSLAIRSKWVSSMVDIVWRKRSALMARSLVLPVETFRATVFPLVFAVKAVASGSVEVIRQLSKASSAAAAANATVVDSNAEKLVGVSDLVTHLAPFLASSLDPALIFEVGINMLYLADVAGGKPEWASQSIIAILTLWDRQEFSSARESIVRAVVTNLHLLDLHMQVSLFRRLLLMVRNLRAESDRMHALACICRTALCVHLFARESARRGQKPLPGTDIISLFEDARIKDDLNSVTSKSLFREELVAMLVESCFQLSLPLPEQKNSGMESRVIGALAYGTGYGALNWTEPALEVVEVCRPCVKWDCDGRTYAVDCYLKLLVRLCHIYDTRGGVKRLKDGASQDQILNETRLQNLQRELVKDLQEVNTPRILGRLIWTIAEHIDLEGLDPLLADDPDDPLNIIIANIHKVLFNLDAAATTSNRLQDVQAVLLCAQRMGSRHARAGQLLTKELEEYRNHAAADTVSKHQTRLILQRIKYVSNLPERKWAGVSETRGDYPFSHHKLTVQFYEPSAAQDRKLEGLIHKAILELWRPKPTELTLFLTKGVDSTSIKVPPTAYPLTGSSDPCYIEAYHLADTNDGRVTLHLKIINLTELELNRVDIRVGLSGALYFMDGSPQAVRQLRNLVSQDPVQCSVTVGVSQFERCGFWVQVLYYPFRGARGEYDGDYIEEDPQIMKQKRGSKAELGEPVILRCQPYKIPLTELLLPHKISPVEFFRLWPSLPAVAEYTGTYMYEGSGFMATAAQQYGASPFLSGLKSLSSKPFHRVCSHIIRTVAGFQLCYAAKTWHGGFVGMMIFGASEVSRNMDLGDETTTMMCKFVVRASEASITKQIESDIQGWCDDLTDGGVEYMPEDEVKATAAEKLKISMERIALLKAAQPKKTSKIEEESENEEEEEGEEEDDDEEVKEKKEKEEGKDKEEKKKKEKEKGTFSKLTAEETEHMALQAAVLQEWHILCKDRKYTKVN

SEQ ID NO: 108143 - protein, 977 aa, Arabidopsis thaliana
  peptide (1)..(977): Ceres Seq. ID no. 13653316
  misc_feature (861)..(940): Pfam Name: Hsp90 protein Pfam Description: Hsp90 protein
  misc_feature (858)..(952): Homolog of NCBI NO: 20089413 NR Description: conserved hypothetical protein [Methanosarcina str. C2A] >gi|19914312|gb|AAM03968.1| conserved hypothetical
MSRLAGDKLVDSENSLAIRSKWVSSMVDIVWRKRSALMARSLVLPVETFRATVFPLVFAVKAVASGSVEVIRQLSKASSAAAAANATVVDSNAEKLVGVSDLVTHLAPFLASSLDPALIFEVGINMLYLADVAGGKPEWASQSIIAILTLWDRQEFSSARESIVRAVVTNLHLLDLHMQVSLFRRLLLMVRNLRAESDRMHALACICRTALCVHLFARESARRGQKPLPGTDIISLFEDARIKDDLNSVTSKSLFREELVAMLVESCFQLSLPLPEQKNSGMESRVIGALAYGTGYGALNWTEPALEVVEVCRPCVKWDCDGRTYAVDCYLKLLVRLCHIYDTRGGVKRLKDGASQDQILNETRLQNLQRELVKDLQEVNTPRILGRLIWTIAEHIDLEGLDPLLADDPDDPLNIIIANIHKVLFNLDAAATTSNRLQDVQAVLLCAQRMGSRHARAGQLLTKELEEYRNHAAADTVSKHQTRLILQRIKYVSNLPERKWAGVSETRGDYPFSHHKLTVQFYEPSAAQDRKLEGLIHKAILELWRPKPTELTLFLTKGVDSTSIKVPPTAYPLTGSSDPCYIEAYHLADTNDGRVTLHLKIINLTELELNRVDIRVGLSGALYFMDGSPQAVRQLRNLVSQDPVQCSVTVGVSQFERCGFWVQVLYYPFRGARGEYDGDYIEEDPQIMKQKRGSKAELGEPVILRCQPYKIPLTELLLPHKISPVEFFRLWPSLPAVAEYTGTYMYEGSGFMATAAQQYGASPFLSGLKSLSSKPFHRVCSHIIRTVAGFQLCYAAKTWHGGFVGMMIFGASEVSRNMDLGDETTTMMCKFVVRASEASITKQIESDIQGWCDDLTDGGVEYMPEDEVKATAAEKLKISMERIALLKAAQPKKTSKIEEESENEEEEEGEEEDDDEEVKEKKEKEEGKDKEEKKKKEKEKGTFSKLTAEETEHMALQAAVLQEWHILCKDRKYTKVN

SEQ ID NO: 108144 - DNA, 1780 bp, Arabidopsis thaliana
  misc_feature (1)..(1780): Ceres Seq. ID no. 13653325
  misc_feature: MA Experiment ID: 20000307 Result: Up-regulated in Transcription
  misc_feature: MA Experiment 20000307 PARAMETER Experiment Name: At_Germinating_Seeds_Sub_P Parameter: Age (hr) Value: 24 vs. 0
  misc_feature: MA Experiment 20000307 PARAMETER Experiment Name: At_Germinating_Seeds_Sub_P Parameter: Organism Value: A. thaliana
  misc_feature: MA Experiment 20000307 PARAMETER Experiment Name: At_Germinating_Seeds_Sub_P Parameter: Plant Line Value: WS
  misc_feature: MA Experiment 20000307 PARAMETER Experiment Name: At_Germinating_Seeds_Sub_P Parameter: Tissue Value: Germinating Seeds
  misc_feature: MA Experiment ID: 20000327 Result: Down-regulated in Transcription
  misc_feature: MA Experiment 20000327 PARAMETER Experiment Name: At_42deg_Heat_Sub_P Parameter: Age (day) Value: 14
  misc_feature: MA Experiment 20000327 PARAMETER Experiment Name: At_42deg_Heat_Sub_P Parameter: Organism Value: A. thaliana
  misc_feature: MA Experiment 20000327 PARAMETER Experiment Name: At_42deg_Heat_Sub_P Parameter: Plant Line Value: WS
  misc_feature: MA Experiment 20000327 PARAMETER Experiment Name: At_42deg_Heat_Sub_P Parameter: Temperature (deg C) Value: 42 vs. 22
  misc_feature: MA Experiment 20000327 PARAMETER Experiment Name: At_42deg_Heat_Sub_P Parameter: Timepoint (hr) Value: 1
  misc_feature: MA Experiment 20000327 PARAMETER Experiment Name: At_42deg_Heat_Sub_P Parameter: Tissue Value: Aerial
  misc_feature: MA Experiment ID: 20000328 Result: Down-regulated in Transcription
  misc_feature: MA Experiment 20000328 PARAMETER Experiment Name: At_42deg_Heat_Sub_P Parameter: Age (day) Value: 14
  misc_feature: MA Experiment 20000328 PARAMETER Experiment Name: At_42deg_Heat_Sub_P Parameter: Organism Value: A. thaliana
  misc_feature: MA Experiment 20000328 PARAMETER Experiment Name: At_42deg_Heat_Sub_P Parameter: Plant Line Value: WS
  misc_feature: MA Experiment 20000328 PARAMETER Experiment Name: At_42deg_Heat_Sub_P Parameter: Temperature (deg C) Value: 42 vs. 22
  misc_feature: MA Experiment 20000328 PARAMETER Experiment Name: At_42deg_Heat_Sub_P Parameter: Timepoint (hr) Value: 6
  misc_feature: MA Experiment 20000328 PARAMETER Experiment Name: At_42deg_Heat_Sub_P Parameter: Tissue Value: Aerial
  misc_feature: MA Experiment ID: 20000355 Result: Up-regulated in Transcription
  misc_feature: MA Experiment 20000355 PARAMETER Experiment Name: At_Siliques_Sub_P Parameter: Age (day) Value: 21
  misc_feature: MA Experiment 20000355 PARAMETER Experiment Name: At_Siliques_Sub_P Parameter: Organism Value: A. thaliana
  misc_feature: MA Experiment 20000355 PARAMETER Experiment Name: At_Siliques_Sub_P Parameter: Plant Line Value: WS
  misc_feature: MA Experiment 20000355 PARAMETER Experiment Name: At_Siliques_Sub_P Parameter: Tissue Value: Less Than 5mm Siliques vs. Whole Plant
  misc_feature: MA Experiment ID: 20000440 Result: Up-regulated in Transcription
  misc_feature: MA Experiment 20000440 PARAMETER Experiment Name: At_Closed-Flower__Sub_P Parameter: Tissue Value: Closed Flower vs. Whole Plant
ttggacaacaaatctttagaagagtcaacaaatttttacagtaatttttttgactctcttcttcttcttcttcttcttcttcttcttcttcttcttcttcttcttcttcatattttccctatgatttggatctctaaaatcttcaatccccatgttctaatttaaaaaatcacaacactctctttatcatataccctattataaaccaaactttgatcctcgaatatattttattaaaaagataatattcgtgtttctcatgttggagtcataataaagaaacctttgtgttttaatttaatcccctccaagaaacctgaagattctaagaagctgccattaaaactaataaaggaagagagtccaaagaagaagaagaagaagagaaaatgtcacgtcttgacgacataccttcaagcccaggcaaattcaagatggagaaatcttcctacttgcatcgtctcagattccaatcttctctcacaaagtttgcatttttctccttcttcctcctctgtctcatctctctactcttcctccgatctccaccgtccattaacccttcttcaccgtccgatccatctcgccgttcactccgaaccaacacctacggaggaccagcttgggaaaaacgtctcagatcctcagctcgaatccgaacctcaacaaacaacggaatcacagttttagtaaccggagcagctggtttcgtcggaacacacgtctccgccgcattaaaacgccgcggagacggcgtaatcggcctcgacaacttcaacgattactacgatccatctctgaaacgagcaagacgagctttactcgagagaagtgggatcttcatcgtagaaggagacataaacgacgtcgaattactccgtaagctattcaagatcgtctccttcacacacgttatgcatttagcagctcaagctggtgtacggtacgcaatggaaaaccctagctcgtacgttcatagcaacatcgccggattcgtcaatctcctcgagatctgcaaatctgtgaatccacaacctgctatagtctgggcttcgtctagctccgtctacggactcaacaccaaagttccgttctcggagaaagataaaacagatcaaccggcgagtttatacgccgccactaaaaaagccggcgaagagatcgcacatacctacaaccacatctatggattatctctaaccggattaagatttttcaccgtgtatggaccttggggaagaccagacatggcgtatttcttcttcactaaagatattctaaaaggcaaatcgatttcgatattcgaatcggcgaatcacggaacggtggctagggatttcacttacatagacgatatagtgaagggatgtttagcggcgctagatacggcggagaagagtacagggagtggagggaagaagagaggtccggcgcaattgagagtgtttaacctcggaaacacgtcgccggtgccggtttcagatctggtgaggatattggagagacaattgaaagtgaaggcgaagaagaatttgattaagatgccacgaaacggtgacgttccgtttactcatgctaatattagtttagctcaacgtgagcttggttataaaccgactacggatttgcaaaccggtttgaagaagtttgtcagatggtatttgagttattactccggcgacaaaaaagccgccgctagatgatctttttttctggttgatgatgatcttttgatttcttgttttttaattgatttgagtaatttttgggaatttgttgt

SEQ ID NO: 108145 - protein, 437 aa, Arabidopsis thaliana; identical to SEQ ID NO: 50096
  peptide (1)..(437): Ceres Seq. ID no. 13653326
  misc_feature (99)..(428): Pfam Name: NAD dependent epimerase/dehydratase family Pfam Description: NAD dependent epimerase/dehydratase family
  misc_feature (1)..(437): Homolog of NCBI NO: 15225451 NR Description: nucleotide sugar epimerase family [Arabidopsis
  misc_feature (1)..(436): Homolog of NCBI NO: 15236712 NR Description: nucleotide sugar epimerase family [Arabidopsis
  misc_feature (1)..(436): Homolog of NCBI NO: 15217591 NR Description: nucleotide sugar epimerase family [Arabidopsis
  misc_feature (16)..(436): Homolog of NCBI NO: 21536982 NR Description: nucleotide sugar epimerase, putative [Arabidopsis
  misc_feature (1)..(436): Homolog of NCBI NO: 15234486 NR Description: nucleotide sugar epimerase family [Arabidopsis
  misc_feature (1)..(436): Homolog of NCBI NO: 15293119 NR Description: putative nucleotide sugar epimerase [Arabidopsis
  misc_feature (1)..(434): Homolog of NCBI NO: 15234745 NR Description: nucleotide sugar epimerase family [Arabidopsis
  misc_feature (15)..(428): Homolog of NCBI NO: 15229524 NR Description: NAD-dependent epimerase/dehydratase family
  misc_feature (15)..(428): Homolog of NCBI NO: 24417280 NR Description: unknown [Arabidopsis thaliana]
  misc_feature (12)..(437): Homolog of NCBI NO: 29647497 NR Description: OJ1191_A10.21 [Oryza sativa (japonica

SEQ ID NO: 108146 - protein, 422 aa, Arabidopsis thaliana; identical to SEQ ID NO: 50097
  peptide (1)..(422): Ceres Seq. ID no. 13653327
  misc_feature (84)..(413): Pfam Name: NAD dependent epimerase/dehydratase family Pfam Description: NAD dependent epimerase/dehydratase family
  misc_feature (1)..(422): Homolog of NCBI NO: 15225451 NR Description: nucleotide sugar epimerase family [Arabidopsis
  misc_feature (1)..(421): Homolog of NCBI NO: 15236712 NR Description: nucleotide sugar epimerase family [Arabidopsis
  misc_feature (1)..(421): Homolog of NCBI NO: 15217591 NR Description: nucleotide sugar epimerase family [Arabidopsis
  misc_feature (1)..(421): Homolog of NCBI NO: 21536982 NR Description: nucleotide sugar epimerase, putative [Arabidopsis
  misc_feature (1)..(421): Homolog of NCBI NO: 15234486 NR Description: nucleotide sugar epimerase family [Arabidopsis
  misc_feature (1)..(421): Homolog of NCBI NO: 15293119 NR Description: putative nucleotide sugar epimerase [Arabidopsis
  misc_feature (1)..(419): Homolog of NCBI NO: 15234745 NR Description: nucleotide sugar epimerase family [Arabidopsis
  misc_feature (1)..(413): Homolog of NCBI NO: 15229524 NR Description: NAD-dependent epimerase/dehydratase family
  misc_feature (1)..(413): Homolog of NCBI NO: 24417280 NR Description: unknown [Arabidopsis thaliana]
  misc_feature (1)..(422): Homolog of NCBI NO: 29647497 NR Description: OJ1191_A10.21 [Oryza sativa (japonica

SEQ ID NO: 108147 - protein, 262 aa, Arabidopsis thaliana; identical to SEQ ID NO: 50098
  peptide (1)..(262): Ceres Seq. ID no. 13653328
  misc_feature (1)..(253): Pfam Name: NAD dependent epimerase/dehydratase family Pfam Description: NAD dependent epimerase/dehydratase family
  misc_feature (1)..(262): Homolog of NCBI NO: 15225451 NR Description: nucleotide sugar epimerase family [Arabidopsis
  misc_feature (1)..(261): Homolog of NCBI NO: 15236712 NR Description: nucleotide sugar epimerase family [Arabidopsis
  misc_feature (1)..(261): Homolog of NCBI NO: 15217591 NR Description: nucleotide sugar epimerase family [Arabidopsis
  misc_feature (1)..(261): Homolog of NCBI NO: 21536982 NR Description: nucleotide sugar epimerase, putative [Arabidopsis
  misc_feature (1)..(261): Homolog of NCBI NO: 15234486 NR Description: nucleotide sugar epimerase family [Arabidopsis
  misc_feature (1)..(261): Homolog of NCBI NO: 15293119 NR Description: putative nucleotide sugar epimerase [Arabidopsis
  misc_feature (1)..(259): Homolog of NCBI NO: 15234745 NR Description: nucleotide sugar epimerase family [Arabidopsis
  misc_feature (1)..(253): Homolog of NCBI NO: 15229524 NR Description: NAD-dependent epimerase/dehydratase family
  misc_feature (1)..(253): Homolog of NCBI NO: 24417280 NR Description: unknown [Arabidopsis thaliana]
  misc_feature (1)..(262): Homolog of NCBI NO: 29647497 NR Description: OJ1191_A10.21 [Oryza sativa (japonica

SEQ ID NO: 108148 - DNA, 1646 bp, Arabidopsis thaliana
  misc_feature (1)..(1646): Ceres Seq. ID no. 13653340
  misc_feature: MA Experiment ID: 20000315 Result: Down-regulated in Transcription
  misc_feature: MA Experiment 20000315 PARAMETER Experiment Name: At_14day_Shoots-Roots_Sub_P Parameter: Age (day) Value: 14
  misc_feature: MA Experiment 20000315 PARAMETER Experiment Name: At_14day_Shoots-Roots_Sub_P Parameter: Organism Value: A. thaliana
  misc_feature: MA Experiment 20000315 PARAMETER Experiment Name: At_14day_Shoots-Roots_Sub_P Parameter: Plant Line Value: WS
  misc_feature: MA Experiment 20000315 PARAMETER Experiment Name: At_14day_Shoots-Roots_Sub_P Parameter: Tissue Value: Shoots vs. Whole Plant
  misc_feature: MA Experiment ID: 20000328 Result: Down-regulated in Transcription
  misc_feature: MA Experiment 20000328 PARAMETER Experiment Name: At_42deg_Heat_Sub_P Parameter: Age (day) Value: 14
  misc_feature: MA Experiment 20000328 PARAMETER Experiment Name: At_42deg_Heat_Sub_P Parameter: Organism Value: A. thaliana
  misc_feature: MA Experiment 20000328 PARAMETER Experiment Name: At_42deg_Heat_Sub_P Parameter: Plant Line Value: WS
  misc_feature: MA Experiment 20000328 PARAMETER Experiment Name: At_42deg_Heat_Sub_P Parameter: Temperature (deg C) Value: 42 vs. 22
  misc_feature: MA Experiment 20000328 PARAMETER Experiment Name: At_42deg_Heat_Sub_P Parameter: Timepoint (hr) Value: 6
  misc_feature: MA Experiment 20000328 PARAMETER Experiment Name: At_42deg_Heat_Sub_P Parameter: Tissue Value: Aerial
  misc_feature: MA Experiment ID: 20000347 Result: Up-regulated in Transcription
  misc_feature: MA Experiment 20000347 PARAMETER Experiment Name: At_2mM_SA_Sub_P Parameter: Age (day) Value: 14
  misc_feature: MA Experiment 20000347 PARAMETER Experiment Name: At_2mM_SA_Sub_P Parameter: Organism Value: A. thaliana
  misc_feature: MA Experiment 20000347 PARAMETER Experiment Name: At_2mM_SA_Sub_P Parameter: Plant Line Value: WS
  misc_feature: MA Experiment 20000347 PARAMETER Experiment Name: At_2mM_SA_Sub_P Parameter: Timepoint (hr) Value: 6
  misc_feature: MA Experiment 20000347 PARAMETER Experiment Name: At_2mM_SA_Sub_P Parameter: Tissue Value: Aerial
  misc_feature: MA Experiment 20000347 PARAMETER Experiment Name: At_2mM_SA_Sub_P Parameter: Treatment Value: 2mM SA vs. No Treatment
  misc_feature: MA Experiment ID: 20000355 Result: Down-regulated in Transcription
  misc_feature: MA Experiment 20000355 PARAMETER Experiment Name: At_Siliques_Sub_P Parameter: Age (day) Value: 21
  misc_feature: MA Experiment 20000355 PARAMETER Experiment Name: At_Siliques_Sub_P Parameter: Organism Value: A. thaliana
  misc_feature: MA Experiment 20000355 PARAMETER Experiment Name: At_Siliques_Sub_P Parameter: Plant Line Value: WS
  misc_feature: MA Experiment 20000355 PARAMETER Experiment Name: At_Siliques_Sub_P Parameter: Tissue Value: Less Than 5mm Siliques vs. Whole Plant
  misc_feature: MA Experiment ID: 20000440 Result: Down-regulated in Transcription
  misc_feature: MA Experiment 20000440 PARAMETER Experiment Name: At_Closed-Flower__Sub_P Parameter: Tissue Value: Closed Flower vs. Whole Plant
attcttccacaatggattcttcatcttcagtaaaaatcgtctcgaaaagcttcgtgaaacccaaaaccttaccagaagaatcaaagcaaccatactatttatctccatgggactacgcaatgctctctgttcagtacatccaaaaaggtcttctctttcacaagccaccacttgactccattgacactcttcttgagaagctaaaagattctctggccgtcacactagtccatttctaccctctcgcgggtcgcctctcatcgttaacaacggaaaaaccgaaatcttactctgttttcgttgattgtaacgatagccctggcgcggggtttatctacgcgacctcagatttatgtataaaagatattgtgggtgctaagtatgtcccttcaattgttcaatctttctttgaccatcacaaagctgtgaatcatgatggacacaccatgagcctcttatctgtccaggtttgttatttttccatttttggaggacttttaggtttatagacttatataaatttaccatatattgaaactaaatcaagtacttcggtcaatttctagacatacatttgcattatcgaacaattagtattttcaacgaagaagacattcagtcacttgtgtttgtgtaggtgacagaattggtagatggaattttcataggactgtctatgaaccatgcgatgggagacggtactgcgttctggaagttctttaccgcatggtccgaaatcttccaaggacaagagagcaaccaaaacgatgacttgtgtcttaagaatccacccgtgttgaagcgttacatccctgaaggatacggtcctctattcagccttccatatagtcatccagatgaatttatcagaacctacgaatctccaattctcaaggagagaatgttctgtttctcatcagaaaccataagaatgcttaaaacaagggtcaaccaaatatgcggaacaacctccatctcatctttccaatcgctaaccgcggttatatggagatgcataacaagggcgaggagattacctctcgatcgaaaaacaagttgtagagttgctgctgacaacagaggaagaatgtatccaccgcttcacaaggattacttcggaaactgcctctctgctttgagaacggctgcaaaagctggtgaactattggagaatgatcttggatttgctgctttgaaagtgcatcaagcagtagctgaacatacgagcgaaaaggtatctcaaatgattgatcaatggctaaagtctccttatatttaccatattgatcggctatttgaaccgatgagcgttatgatgggaagctcgccgaggtttaataagtatggttgtgaatttgggttgggaaaaggagtgacgcttagaagtggctatgcgcataagttcgatggaaaggtatctgcttacccgggaagagaaggagggggaagtatagatttggaggtatgtcttgttccagagtttatggaagctttggaatcagatgaagagttcatgtcacttgtttctctttgaaaatttaccaatttcttccaagtttctcaacatttttattttgcacctgatttttcaaaaagaaaagttggaaggtaaagttacaaccctataatccatatatattatttcg

SEQ ID NO: 108149 - protein, 285 aa, Arabidopsis thaliana
  peptide (1)..(285): Ceres Seq. ID no. 13653341
  misc_feature (1)..(280): Pfam Name: Transferase family Pfam Description: Transferase family
  misc_feature (1)..(285): Homolog of NCBI NO: 15239072 NR Description: hydroxycinnamoyl benzoyltransferase-related
  misc_feature (1)..(284): Homolog of NCBI NO: 15240871 NR Description: hydroxycinnamoyl benzoyltransferase-related
  misc_feature (1)..(284): Homolog of NCBI NO: 15241431 NR Description: hydroxycinnamoyl benzoyltransferase-related
  misc_feature (1)..(284): Homolog of NCBI NO: 15241433 NR Description: hydroxycinnamoyl benzoyltransferase-related
  misc_feature (1)..(284): Homolog of NCBI NO: 24413968 NR Description: N-hydroxycinnamoyl/benzoyltransferase-like
  misc_feature (100)..(284): Homolog of NCBI NO: 15225603 NR Description: transferase family [Arabidopsis thaliana]
  misc_feature (1)..(93): Homolog of NCBI NO: 15225603 NR Description: transferase family [Arabidopsis thaliana]
  misc_feature (1)..(284): Homolog of NCBI NO: 34899602 NR Description: N-hydroxycinnamoyl benzoyltransferase-like
  misc_feature (1)..(283): Homolog of NCBI NO: 15240227 NR Description: hydroxycinnamoyl/benzoyltransferase-related
  misc_feature (1)..(282): Homolog of NCBI NO: 21636163 NR Description: HCBT-like putative defense response protein
MNHAMGDGTAFWKFFTAWSEIFQGQESNQNDDLCLKNPPVLKRYIPEGYGPLFSLPYSHPDEFIRTYESPILKERMFCFSSETIRMLKTRVNQICGTTSISSFQSLTAVIWRCITRARRLPLDRKTSCRVAADNRGRMYPPLHKDYFGNCLSALRTAAKAGELLENDLGFAALKVHQAVAEHTSEKVSQMIDQWLKSPYIYHIDRLFEPMSVMMGSSPRFNKYGCEFGLGKGVTLRSGYAHKFDGKVSAYPGREGGGSIDLEVCLVPEFMEALESDEEFMSLVSL

SEQ ID NO: 108150 - protein, 281 aa, Arabidopsis thaliana
  peptide (1)..(281): Ceres Seq. ID no. 13653342
  misc_feature (1)..(276): Pfam Name: Transferase family Pfam Description: Transferase family
  misc_feature (1)..(281): Homolog of NCBI NO: 15239072 NR Description: hydroxycinnamoyl benzoyltransferase-related
  misc_feature (1)..(280): Homolog of NCBI NO: 15240871 NR Description: hydroxycinnamoyl benzoyltransferase-related
  misc_feature (1)..(280): Homolog of NCBI NO: 15241431 NR Description: hydroxycinnamoyl benzoyltransferase-related
  misc_feature (1)..(280): Homolog of NCBI NO: 15241433 NR Description: hydroxycinnamoyl benzoyltransferase-related
  misc_feature (1)..(280): Homolog of NCBI NO: 24413968 NR Description: N-hydroxycinnamoyl/benzoyltransferase-like
  misc_feature (96)..(280): Homolog of NCBI NO: 15225603 NR Description: transferase family [Arabidopsis thaliana]
  misc_feature (1)..(89): Homolog of NCBI NO: 15225603 NR Description: transferase family [Arabidopsis thaliana]
  misc_feature (1)..(280): Homolog of NCBI NO: 34899602 NR Description: N-hydroxycinnamoyl benzoyltransferase-like
  misc_feature (1)..(279): Homolog of NCBI NO: 15240227 NR Description: hydroxycinnamoyl/benzoyltransferase-related
  misc_feature (1)..(278): Homolog of NCBI NO: 21636163 NR Description: HCBT-like putative defense response protein
MGDGTAFWKFFTAWSEIFQGQESNQNDDLCLKNPPVLKRYIPEGYGPLFSLPYSHPDEFIRTYESPILKERMFCFSSETIRMLKTRVNQICGTTSISSFQSLTAVIWRCITRARRLPLDRKTSCRVAADNRGRMYPPLHKDYFGNCLSALRTAAKAGELLENDLGFAALKVHQAVAEHTSEKVSQMIDQWLKSPYIYHIDRLFEPMSVMMGSSPRFNKYGCEFGLGKGVTLRSGYAHKFDGKVSAYPGREGGGSIDLEVCLVPEFMEALESDEEFMSLVSL

SEQ ID NO: 108151 - protein, 210 aa, Arabidopsis thaliana
  peptide (1)..(210): Ceres Seq. ID no. 13653343
  misc_feature (1)..(205): Pfam Name: Transferase family Pfam Description: Transferase family
  misc_feature (1)..(210): Homolog of NCBI NO: 15239072 NR Description: hydroxycinnamoyl benzoyltransferase-related
  misc_feature (1)..(209): Homolog of NCBI NO: 15240871 NR Description: hydroxycinnamoyl benzoyltransferase-related
  misc_feature (1)..(209): Homolog of NCBI NO: 15241431 NR Description: hydroxycinnamoyl benzoyltransferase-related
  misc_feature (1)..(209): Homolog of NCBI NO: 15241433 NR Description: hydroxycinnamoyl benzoyltransferase-related
  misc_feature (1)..(209): Homolog of NCBI NO: 24413968 NR Description: N-hydroxycinnamoyl/benzoyltransferase-like
  misc_feature (25)..(209): Homolog of NCBI NO: 15225603 NR Description: transferase family [Arabidopsis thaliana]
  misc_feature (1)..(18): Homolog of NCBI NO: 15225603 NR Description: transferase family [Arabidopsis thaliana]
  misc_feature (1)..(209): Homolog of NCBI NO: 34899602 NR Description: N-hydroxycinnamoyl benzoyltransferase-like
  misc_feature (1)..(208): Homolog of NCBI NO: 15240227 NR Description: hydroxycinnamoyl/benzoyltransferase-related
  misc_feature (1)..(207): Homolog of NCBI NO: 21636163 NR Description: HCBT-like putative defense response protein
MFCFSSETIRMLKTRVNQICGTTSISSFQSLTAVIWRCITRARRLPLDRKTSCRVAADNRGRMYPPLHKDYFGNCLSALRTAAKAGELLENDLGFAALKVHQAVAEHTSEKVSQMIDQWLKSPYIYHIDRLFEPMSVMMGSSPRFNKYGCEFGLGKGVTLRSGYAHKFDGKVSAYPGREGGGSIDLEVCLVPEFMEALESDEEFMSLVSL

SEQ ID NO: 108152 - DNA, 735 bp, Arabidopsis thaliana
  misc_feature (1)..(735): Ceres Seq. ID no. 13653364
  misc_feature: MA Experiment ID: 20000184 Result: Down-regulated in Transcription
  misc_feature: MA Experiment 20000184 PARAMETER Experiment Name: At_Shoots__P Parameter: Age (day) Value: 7
  misc_feature: MA Experiment 20000184 PARAMETER Experiment Name: At_Shoots__P Parameter: Tissue Value: Shoots vs. Whole Plant
  misc_feature: Pfam Name: HMG_box Pfam Description: HMG (high mobility group) box
gttgtctctccccaattcaaaaaaagaaataacctaaacgtgttcacacagagatctcgagatgaaagataaccaaacggaagttgaatcgaggagcactgatgatagattgaaagttagagggaacaaagttggaaagaaaacaaaggatccaaacaggcctaagaaaccaccaagtcctttcttcgtcttcctgtaaataaaaatcactaatctctcttcttcttttttcttcactaatttgattacagtaattaatatgctctaaataattaccctctcggttgatttaaagggacgatttccgaaaggagtttaatctggctaaccctgacaacaaatccgtcggtaatgttggtagagcagctggaaagaaatggaaaaccatgactgaagaagaaagagcaccttttgtagcaaaatcacagagcaaaaagactgagtatgctgtgactatgcaacagtataacatggaactggctaatggaaacaagacaactggagatgatgagaaacaagagaaagctgctgatgattaggaagttggatcagtgatttgtgtatcaactatatctgttgttttatgtcaacttttagctagcttttagggagaacaattgttacattcctgttttatcctttctgtcaactgtgggattattcagatgtaactttggatttagctttgagcttcaattccaccttttatgagatcatatcatatgtttgcaatct

SEQ ID NO: 108153 - protein, 50 aa, Arabidopsis thaliana
  peptide (1)..(50): Ceres Seq. ID no. 13653365
  misc_feature: Pfam Name: HMG_box Pfam Description: HMG (high mobility group) box
  misc_feature (1)..(50): Homolog of NCBI NO: 15237040 NR Description: HMG delta protein [Arabidopsis thaliana]
  misc_feature (1)..(50): Homolog of NCBI NO: 15227862 NR Description: HMG protein -related [Arabidopsis thaliana]
  misc_feature (1)..(50): Homolog of NCBI NO: 21592453 NR Description: putative HMG protein [Arabidopsis thaliana]
  misc_feature (1)..(50): Homolog of NCBI NO: 13877775 NR Description: putative HMG protein [Arabidopsis thaliana]
  misc_feature (1)..(50): Homolog of NCBI NO: 11346367 NR Description: high mobility group protein HMG-gamma [validated] Arabidopsis thaliana >gi|2832355|emb|CAA74403.1| HMG protein
MTEEERAPFVAKSQSKKTEYAVTMQQYNMELANGNKTTGDDEKQEKAADD

SEQ ID NO: 108154 - protein, 45 aa, Arabidopsis thaliana
  peptide (1)..(45): Ceres Seq. ID no. 13653366
  misc_feature: Pfam Name: HMG_box Pfam Description: HMG (high mobility group) box
  misc_feature (1)..(45): Homolog of NCBI NO: 15237040 NR Description: HMG delta protein [Arabidopsis thaliana]
  misc_feature (1)..(45): Homolog of NCBI NO: 15227862 NR Description: HMG protein -related [Arabidopsis thaliana]
  misc_feature (1)..(45): Homolog of NCBI NO: 21592453 NR Description: putative HMG protein [Arabidopsis thaliana]
  misc_feature (1)..(45): Homolog of NCBI NO: 13877775 NR Description: putative HMG protein [Arabidopsis thaliana]
  misc_feature (1)..(45): Homolog of NCBI NO: 11346367 NR Description: high mobility group protein HMG-gamma [validated] Arabidopsis thaliana >gi|2832355|emb|CAA74403.1| HMG protein
MKDNQTEVESRSTDDRLKVRGNKVGKKTKDPNRPKKPPSPFFVFL

SEQ ID NO: 108155 - DNA, 1729 bp, Arabidopsis thaliana
  misc_feature (1)..(1729): Ceres Seq. ID no. 13653367
  misc_feature: MA Experiment ID: 20000315 Result: Down-regulated in Transcription
  misc_feature: MA Experiment 20000315 PARAMETER Experiment Name: At_14day_Shoots-Roots_Sub_P Parameter: Age (day) Value: 14
  misc_feature: MA Experiment 20000315 PARAMETER Experiment Name: At_14day_Shoots-Roots_Sub_P Parameter: Organism Value: A. thaliana
  misc_feature: MA Experiment 20000315 PARAMETER Experiment Name: At_14day_Shoots-Roots_Sub_P Parameter: Plant Line Value: WS
  misc_feature: MA Experiment 20000315 PARAMETER Experiment Name: At_14day_Shoots-Roots_Sub_P Parameter: Tissue Value: Shoots vs. Whole Plant
atctcactacaattcttgatcttcttcttaacttatacctcaaataatggataattatcagaccaagaatatatctaatctattaacttctttgtgttttaccactctcttaatattagctccggtggttatatgcactagacaacaccggttcgatagcccgaaaagaagcttgttggccaacgagcaagatttagtgacaggtttgcctggacagcctgatgtgagtttcagacattatgccggatatgtccctgtcgatgaatccaacggaagagcttttttactggttctttgaggccatggatctcccgaaagagaaacctctagtcctctggcttaatggaggtccaggttgttcttctgtgggatatggggcaacacaagaaattggtccttttctcgtggacaccaacggaaacggacttaactttaatccatacgcatggaataaagaggccaacatgctgtttttagaatctcccgtcggtgttggcttttcgtattcaaacacaagtagcgattatcaaaaacttggagatgactttacagcaagagacgcatacacttttctttgcaactggttcgagaaattcccagagcacaaagaaaatacgttctatatcgcgggtgaaagttatgcaggaaaatacgtacctgagctagcagaggttgtatacgataacaataacaataacaagaagaatggttcaccgtttcacatcaatcttaagggtattttgttggggaatcatgagacatcagatgcagaagattggagaggttgggtggattatgcatggagccatgcagtaatatcagatgagactcataggatcataaccaggacgtgcaatttcagcagcgataatacttggagcaacgatgagtgcaatgaggccgtagcggaagttctcaagcagtatcacgagatagatatctatagcatctatacctcagtttgcataggagattctgcgcgatcgtcttactttgattcagcgcaattcaaaacaaattctcgcattagctccaagaggatgccaccgaggctcatgggtggatatgatccatgcttagatgattacgcgagagtattttacaacagagcagatgttcagaagtctcttcatgcgagtgatggagttaatctcaagaactggagcatttgcaacatggagatctttaataattggactggttcaaacccgtcggttttgcctatttacgagaaactcatcgccggaggattaagaatatgggtttacagtggtgacacagacggaagagttccagtacttgcgactcgttatagcttaaacgcactcgaattacccatcaagacagcttggaggccatggtaccatgaaaaacaggtaagtgggtggcttcaagaatacgaaggtttaacgtttgctacgttcagaggagctggacatgcggtgccttgcttcaaaccaagcagctctctcgcctttttctcggcgtttctcagcggagttcctcctccgccatcgcggtagagaagaaattcaatgattaaaaagatgatttagtacgtaatctaattatgagtatttttgaaagatttttgggttttgtttcgttaacttgtcagacacacgagataggggaaaacaaggattgtaacttgtaagagagaatatgtgatttatgttacgttttatgtcatgatcataatgatcaaaagaaaaccttcaccgctttg

SEQ ID NO: 108156 - protein, 427 aa, Arabidopsis thaliana
  peptide (1)..(427): Ceres Seq. ID no. 13653368
  misc_feature (14)..(241): Pfam Name: Serine carboxypeptidase Pfam Description: Serine carboxypeptidase
  misc_feature (14)..(241): Homolog of NCBI NO: 15220282 NR Description: serine carboxypeptidase -related [Arabidopsis
  misc_feature (268)..(427): Homolog of NCBI NO: 15220282 NR Description: serine carboxypeptidase -related [Arabidopsis
  misc_feature (14)..(427): Homolog of NCBI NO: 15219869 NR Description: serine carboxypeptidase -related [Arabidopsis
  misc_feature (39)..(427): Homolog of NCBI NO: 15233683 NR Description: serine carboxypeptidase -related [Arabidopsis
  misc_feature (14)..(427): Homolog of NCBI NO: 25289786 NR Description: hypothetical protein F11P17.14 [imported] - thaliana >gi|2443888|gb|AAB71481.1| similar to serine
  misc_feature (14)..(427): Homolog of NCBI NO: 15241571 NR Description: serine carboxypeptidase II -related [Arabidopsis
  misc_feature (14)..(426): Homolog of NCBI NO: 13877871 NR Description: putative serine carboxypeptidase II [Arabidopsis
  misc_feature (14)..(426): Homolog of NCBI NO: 15234795 NR Description: serine carboxypeptidase -related [Arabidopsis
  misc_feature (6)..(424): Homolog of NCBI NO: 10177810 NR Description: serine carboxypeptidase II-like protein
  misc_feature (14)..(424): Homolog of NCBI NO: 15232847 NR Description: serine carboxypeptidase -related [Arabidopsis >gi|6513922|gb|AAF14826.1|AC011664_8 putative serine II [Arabidopsis thaliana] >gi|14335062|gb|AAK59795.1|
MPDMSLSMNPTEELFYWFFEAMDLPKEKPLVLWLNGGPGCSSVGYGATQEIGPFLVDTNGNGLNFNPYAWNKEANMLFLESPVGVGFSYSNTSSDYQKLGDDFTARDAYTFLCNWFEKFPEHKENTFYIAGESYAGKYVPELAEVVYDNNNNNKKNGSPFHINLKGILLGNHETSDAEDWRGWVDYAWSHAVISDETHRIITRTCNFSSDNTWSNDECNEAVAEVLKQYHEIDIYSIYTSVCIGDSARSSYFDSAQFKTNSRISSKRMPPRLMGGYDPCLDDYARVFYNRADVQKSLHASDGVNLKNWSICNMEIFNNWTGSNPSVLPIYEKLIAGGLRIWVYSGDTDGRVPVLATRYSLNALELPIKTAWRPWYHEKQVSGWLQEYEGLTFATFRGAGHAVPCFKPSSSLAFFSAFLSGVPPPPSR

SEQ ID NO: 108157 - protein, 424 aa, Arabidopsis thaliana
  peptide (1)..(424): Ceres Seq. ID no. 13653369
  misc_feature (11)..(238): Pfam Name: Serine carboxypeptidase Pfam Description: Serine carboxypeptidase
  misc_feature (11)..(238): Homolog of NCBI NO: 15220282 NR Description: serine carboxypeptidase -related [Arabidopsis
  misc_feature (265)..(424): Homolog of NCBI NO: 15220282 NR Description: serine carboxypeptidase -related [Arabidopsis
  misc_feature (11)..(424): Homolog of NCBI NO: 15219869 NR Description: serine carboxypeptidase -related [Arabidopsis
  misc_feature (36)..(424): Homolog of NCBI NO: 15233683 NR Description: serine carboxypeptidase -related [Arabidopsis
  misc_feature (11)..(424): Homolog of NCBI NO: 25289786 NR Description: hypothetical protein F11P17.14 [imported] - thaliana >gi|2443888|gb|AAB71481.1| similar to serine
  misc_feature (11)..(424): Homolog of NCBI NO: 15241571 NR Description: serine carboxypeptidase II -related [Arabidopsis
  misc_feature (11)..(423): Homolog of NCBI NO: 13877871 NR Description: putative serine carboxypeptidase II [Arabidopsis
  misc_feature (11)..(423): Homolog of NCBI NO: 15234795 NR Description: serine carboxypeptidase -related [Arabidopsis
  misc_feature (3)..(421): Homolog of NCBI NO: 10177810 NR Description: serine carboxypeptidase II-like protein
  misc_feature (11)..(421): Homolog of NCBI NO: 15232847 NR Description: serine carboxypeptidase -related [Arabidopsis >gi|6513922|gb|AAF14826.1|AC011664_8 putative serine II [Arabidopsis thaliana] >gi|14335062|gb|AAK59795.1|
MSLSMNPTEELFYWFFEAMDLPKEKPLVLWLNGGPGCSSVGYGATQEIGPFLVDTNGNGLNFNPYAWNKEANMLFLESPVGVGFSYSNTSSDYQKLGDDFTARDAYTFLCNWFEKFPEHKENTFYIAGESYAGKYVPELAEVVYDNNNNNKKNGSPFHINLKGILLGNHETSDAEDWRGWVDYAWSHAVISDETHRIITRTCNFSSDNTWSNDECNEAVAEVLKQYHEIDIYSIYTSVCIGDSARSSYFDSAQFKTNSRISSKRMPPRLMGGYDPCLDDYARVFYNRADVQKSLHASDGVNLKNWSICNMEIFNNWTGSNPSVLPIYEKLIAGGLRIWVYSGDTDGRVPVLATRYSLNALELPIKTAWRPWYHEKQVSGWLQEYEGLTFATFRGAGHAVPCFKPSSSLAFFSAFLSGVPPPPSR

SEQ ID NO: 108158 - protein, 420 aa, Arabidopsis thaliana
  peptide (1)..(420): Ceres Seq. ID no. 13653370
  misc_feature (7)..(234): Pfam Name: Serine carboxypeptidase Pfam Description: Serine carboxypeptidase
  misc_feature (7)..(234): Homolog of NCBI NO: 15220282 NR Description: serine carboxypeptidase -related [Arabidopsis
  misc_feature (261)..(420): Homolog of NCBI NO: 15220282 NR Description: serine carboxypeptidase -related [Arabidopsis
  misc_feature (7)..(420): Homolog of NCBI NO: 15219869 NR Description: serine carboxypeptidase -related [Arabidopsis
  misc_feature (32)..(420): Homolog of NCBI NO: 15233683 NR Description: serine carboxypeptidase -related [Arabidopsis
  misc_feature (7)..(420): Homolog of NCBI NO: 25289786 NR Description: hypothetical protein F11P17.14 [imported] - thaliana >gi|2443888|gb|AAB71481.1| similar to serine
  misc_feature (7)..(420): Homolog of NCBI NO: 15241571 NR Description: serine carboxypeptidase II -related [Arabidopsis
  misc_feature (7)..(419): Homolog of NCBI NO: 13877871 NR Description: putative serine carboxypeptidase II [Arabidopsis
  misc_feature (7)..(419): Homolog of NCBI NO: 15234795 NR Description: serine carboxypeptidase -related [Arabidopsis
  misc_feature (1)..(417): Homolog of NCBI NO: 10177810 NR Description: serine carboxypeptidase II-like protein
  misc_feature (7)..(417): Homolog of NCBI NO: 15232847 NR Description: serine carboxypeptidase -related [Arabidopsis >gi|6513922|gb|AAF14826.1|AC011664_8 putative serine II [Arabidopsis thaliana] >gi|14335062|gb|AAK59795.1|
MNPTEELFYWFFEAMDLPKEKPLVLWLNGGPGCSSVGYGATQEIGPFLVDTNGNGLNFNPYAWNKEANMLFLESPVGVGFSYSNTSSDYQKLGDDFTARDAYTFLCNWFEKFPEHKENTFYIAGESYAGKYVPELAEVVYDNNNNNKKNGSPFHINLKGILLGNHETSDAEDWRGWVDYAWSHAVISDETHRIITRTCNFSSDNTWSNDECNEAVAEVLKQYHEIDIYSIYTSVCIGDSARSSYFDSAQFKTNSRISSKRMPPRLMGGYDPCLDDYARVFYNRADVQKSLHASDGVNLKNWSICNMEIFNNWTGSNPSVLPIYEKLIAGGLRIWVYSGDTDGRVPVLATRYSLNALELPIKTAWRPWYHEKQVSGWLQEYEGLTFATFRGAGHAVPCFKPSSSLAFFSAFLSGVPPPPSR

SEQ ID NO: 108159 - DNA, 1151 bp, Arabidopsis thaliana
  misc_feature (1)..(1151): Ceres Seq. ID no. 13653371
  misc_feature: MA Experiment ID: 108463 Result: Down-regulated in Transcription
  misc_feature: MA Experiment 108463 PARAMETER Experiment Name: At_Germinating_Seeds_cDNA_P Parameter: Age (day) Value: 3 vs. 0
  misc_feature: MA Experiment 108463 PARAMETER Experiment Name: At_Germinating_Seeds_cDNA_P Parameter: Tissue Value: Germinating Seeds
  misc_feature: MA Experiment ID: 108464 Result: Down-regulated in Transcription
  misc_feature: MA Experiment 108464 PARAMETER Experiment Name: At_Germinating_Seeds_cDNA_P Parameter: Age (day) Value: 4 vs. 0
  misc_feature: MA Experiment 108464 PARAMETER Experiment Name: At_Germinating_Seeds_cDNA_P Parameter: Tissue Value: Germinating Seeds
  misc_feature: MA Experiment ID: 108488 Result: Down-regulated in Transcription
  misc_feature: MA Experiment ID: 20000111 Result: Down-regulated in Transcription
  misc_feature: MA Experiment 20000111 PARAMETER Experiment Name: At_42deg_Heat_cDNA_P Parameter: Temperature (deg C) Value: 42 vs. 22
  misc_feature: MA Experiment 20000111 PARAMETER Experiment Name: At_42deg_Heat_cDNA_P Parameter: Timepoint (hr) Value: 6
  misc_feature: MA Experiment 20000111 PARAMETER Experiment Name: At_42deg_Heat_cDNA_P Parameter: Tissue Value: Aerial
  misc_feature: MA Experiment ID: 20000113 Result: Down-regulated in Transcription
  misc_feature: MA Experiment 20000113 PARAMETER Experiment Name: At_42deg_Heat_cDNA_P Parameter: Temperature (deg C) Value: 42 vs. 22
  misc_feature: MA Experiment 20000113 PARAMETER Experiment Name: At_42deg_Heat_cDNA_P Parameter: Timepoint (hr) Value: 8
  misc_feature: MA Experiment 20000113 PARAMETER Experiment Name: At_42deg_Heat_cDNA_P Parameter: Tissue Value: Aerial
  misc_feature: MA Experiment ID: 20000179 Result: Up-regulated in Transcription
  misc_feature: MA Experiment 20000179 PARAMETER Experiment Name: At_Germinating_Seeds_P Parameter: Age (hr) Value: 6 vs. 0
  misc_feature: MA Experiment 20000179 PARAMETER Experiment Name: At_Germinating_Seeds_P Parameter: Tissue Value: Germinating Seeds
  misc_feature: MA Experiment ID: 20000438 Result: Down-regulated in Transcription
  misc_feature: MA Experiment 20000438 PARAMETER Experiment Name: At_Shoots__P Parameter: Age (day) Value: 14
  misc_feature: MA Experiment 20000438 PARAMETER Experiment Name: At_Shoots__P Parameter: Tissue Value: Shoots vs. Whole Plant
  misc_feature: MA Experiment ID: 20000439 Result: Down-regulated in Transcription
  misc_feature: MA Experiment 20000439 PARAMETER Experiment Name: At_Roots__P Parameter: Age (day) Value: 14 vs. 21
  misc_feature: MA Experiment 20000439 PARAMETER Experiment Name: At_Roots__P Parameter: Organism Value: A. thaliana
  misc_feature: MA Experiment 20000439 PARAMETER Experiment Name: At_Roots__P Parameter: Tissue Value: Roots vs. Whole Plant
  misc_feature: MA Experiment ID: 20001904 Result: Up-regulated in Transcription
  misc_feature: MA Experiment 20001904 PARAMETER Experiment Name: At_Drought_Reproduction_P Parameter: Age (day) Value: 37
  misc_feature: MA Experiment 20001904 PARAMETER Experiment Name: At_Drought_Reproduction_P Parameter: Organism Value: A. thaliana
  misc_feature: MA Experiment 20001904 PARAMETER Experiment Name: At_Drought_Reproduction_P Parameter: Plant Line Value: WS
  misc_feature: MA Experiment 20001904 PARAMETER Experiment Name: At_Drought_Reproduction_P Parameter: Timepoint (day) Value: 7
  misc_feature: MA Experiment 20001904 PARAMETER Experiment Name: At_Drought_Reproduction_P Parameter: Tissue Value: Rosettes
  misc_feature: MA Experiment 20001904 PARAMETER Experiment Name: At_Drought_Reproduction_P Parameter: Treatment Value: Drought vs. No Drought
agctagaaagacaccagtcttaccctaacttttttcaaagtctgtgtctttctgtagaaatctgaggaataaatatttgaatctaaagagaataaagaagaaagtaaaaaagcaaaatcgaagttttgttcaattttctgggatcatagagcaattttcgtttctttattcgttgaaagtgtgaagcttttttgattcagtgagaagtgttaatggcgggttacagagcagatgatgattacgattacctattcaaggtggttctgatcggtgattcaggtgttggaaagtccaatttgctttctcgattcaccaggaacgagtttagtctcgagtctaaatcaacgatcggggtcgagttcgcgactcgtagcttgaatgttaatgaaaaagtcatcaaagcccagatttgggacactgctggtcaagaaagataccgagcaatcactagtgcttactatcgaggagctgttggggcgcttcttgtttacgacgtaacccgacactcaacattcgaaaacgttgagagatggctaagggaactccgtgaccacactgacccaaacatagttgtgatgcttgtgggaaacaaatccgatcttcgccatcttgtagcagtccaaaccgaagatgcaaaatcttttgcagagaatgaatcactctacttcatggaaacctcagctcttgaatctaccaatgttgagaacgcgttttctgaagtactcactcagatttaccatgttgtgagcaagaaagcaatggaggctggtgaagattccggtaatgttccttcgaaaggagagaagatcgatgttgatgtttccgcagtgaagaaaactggttgctgctccaactaaatggtcttatgtcctaaagctgaaatcggtttttaaattttacattcaaattttgtttttgaagatgtttgcttttttttaggaaaacaaactatgttatggcttttgatttgcttgtttgaaaattgcttagctttggtctgattctgtaccggttaagggattttgtaatttaaccggttctggtctatggtttgtttttaattcaatccgcaaatatctctaaaccaatatttattgtgctaatccttgaacacaactaatttttgttataccaatttagaaaattttcgt

SEQ ID NO: 108160 - protein, 214 aa, Arabidopsis thaliana; identical to SEQ ID NO: 27745
  peptide (1)..(214): Ceres Seq. ID no. 13653372
  misc_feature (15)..(176): Pfam Name: Ras family Pfam Description: Ras family
  misc_feature (1)..(214): Homolog of NCBI NO: 15234020 NR Description: Ras family GTP-binding protein [Arabidopsis
  misc_feature (1)..(214): Homolog of NCBI NO: 15242483 NR Description: GTP-binding protein, putative [Arabidopsis
  misc_feature (1)..(214): Homolog of NCBI NO: 21536533 NR Description: Rab-type small GTP-binding protein-like
  misc_feature (1)..(213): Homolog of NCBI NO: 13195452 NR Description: GTP-binding protein [Oryza sativa]
  misc_feature (1)..(213): Homolog of NCBI NO: 730512 NR Description: RAS-RELATED PROTEIN RIC2 >gi|481506|pir||S38741
  misc_feature (1)..(214): Homolog of NCBI NO: 541979 NR Description: GTP-binding protein, ras-like - fava bean

SEQ ID NO: 108161 - DNA, 834 bp, Arabidopsis thaliana
  misc_feature (1)..(834): Ceres Seq. ID no. 13653389
  misc_feature: MA Experiment ID: 20000184 Result: Down-regulated in Transcription
  misc_feature: MA Experiment 20000184 PARAMETER Experiment Name: At_Shoots__P Parameter: Age (day) Value: 7
  misc_feature: MA Experiment 20000184 PARAMETER Experiment Name: At_Shoots__P Parameter: Tissue Value: Shoots vs. Whole Plant
  misc_feature: MA Experiment ID: 20000234 Result: Up-regulated in Transcription
  misc_feature: MA Experiment 20000234 PARAMETER Experiment Name: At_Siliques_P Parameter: Age (day) Value: 21
  misc_feature: MA Experiment 20000234 PARAMETER Experiment Name: At_Siliques_P Parameter: Organism Value: A. thaliana
  misc_feature: MA Experiment 20000234 PARAMETER Experiment Name: At_Siliques_P Parameter: Plant Line Value: WS
  misc_feature: MA Experiment 20000234 PARAMETER Experiment Name: At_Siliques_P Parameter: Tissue Value: Less Than 5mm Siliques vs. Whole Plant
  misc_feature: MA Experiment ID: 20000264 Result: Up-regulated in Transcription
  misc_feature: MA Experiment 20000264 PARAMETER Experiment Name: At_Open_Flower_P Parameter: Age (day) Value: 21
  misc_feature: MA Experiment 20000264 PARAMETER Experiment Name: At_Open_Flower_P Parameter: Plant Line Value: WS
  misc_feature: MA Experiment 20000264 PARAMETER Experiment Name: At_Open_Flower_P Parameter: Tissue Value: Open Flower vs. Whole Plant
  misc_feature: MA Experiment ID: 20000265 Result: Up-regulated in Transcription
  misc_feature: MA Experiment 20000265 PARAMETER Experiment Name: At_Open_Flower_P Parameter: Age (day) Value: 21
  misc_feature: MA Experiment 20000265 PARAMETER Experiment Name: At_Open_Flower_P Parameter: Plant Line Value: WS
  misc_feature: MA Experiment 20000265 PARAMETER Experiment Name: At_Open_Flower_P Parameter: Tissue Value: Closed Flower vs. Whole Plant
  misc_feature: MA Experiment ID: 20000286 Result: Up-regulated in Transcription
  misc_feature: MA Experiment 20000286 PARAMETER Experiment Name: At_Open_Flower_P Parameter: Age (day) Value: 21
  misc_feature: MA Experiment 20000286 PARAMETER Experiment Name: At_Open_Flower_P Parameter: Plant Line Value: WS
  misc_feature: MA Experiment 20000286 PARAMETER Experiment Name: At_Open_Flower_P Parameter: Tissue Value: Half Open vs. Whole Plant
  misc_feature: MA Experiment ID: 20000794 Result: Up-regulated in Transcription
  misc_feature: MA Experiment 20000794 PARAMETER Experiment Name: At_Petals_P Parameter: Age (day) Value: 23-25 days
  misc_feature: MA Experiment 20000794 PARAMETER Experiment Name: At_Petals_P Parameter: Plant Line Value: WS
  misc_feature: MA Experiment 20000794 PARAMETER Experiment Name: At_Petals_P Parameter: Tissue Value: Petals vs. Whole plant
  misc_feature: MA Experiment ID: 20001757 Result: Down-regulated in Transcription
  misc_feature: MA Experiment 20001757 PARAMETER Experiment Name: At_50mM_NH4NO3_L-to-H_P Parameter: Timepoint (hr) Value: 6
  misc_feature: MA Experiment 20001757 PARAMETER Experiment Name: At_50mM_NH4NO3_L-to-H_P Parameter: Tissue Value: Leaf
  misc_feature: MA Experiment 20001757 PARAMETER Experiment Name: At_50mM_NH4NO3_L-to-H_P Parameter: Treatment Value: 50mM NH4NO3 vs 100mM Mannitol
  misc_feature: MA Experiment ID: 20001904 Result: Up-regulated in Transcription
  misc_feature: MA Experiment 20001904 PARAMETER Experiment Name: At_Drought_Reproduction_P Parameter: Age (day) Value: 37
  misc_feature: MA Experiment 20001904 PARAMETER Experiment Name: At_Drought_Reproduction_P Parameter: Organism Value: A. thaliana
  misc_feature: MA Experiment 20001904 PARAMETER Experiment Name: At_Drought_Reproduction_P Parameter: Plant Line Value: WS
  misc_feature: MA Experiment 20001904 PARAMETER Experiment Name: At_Drought_Reproduction_P Parameter: Timepoint (day) Value: 7
  misc_feature: MA Experiment 20001904 PARAMETER Experiment Name: At_Drought_Reproduction_P Parameter: Tissue Value: Rosettes
  misc_feature: MA Experiment 20001904 PARAMETER Experiment Name: At_Drought_Reproduction_P Parameter: Treatment Value: Drought vs. No Drought
  misc_feature: MA Experiment ID: 20001905 Result: Up-regulated in Transcription
  misc_feature: MA Experiment 20001905 PARAMETER Experiment Name: At_Drought_Reproduction_P Parameter: Age (day) Value: 40
  misc_feature: MA Experiment 20001905 PARAMETER Experiment Name: At_Drought_Reproduction_P Parameter: Organism Value: A. thaliana
  misc_feature: MA Experiment 20001905 PARAMETER Experiment Name: At_Drought_Reproduction_P Parameter: Plant Line Value: WS
  misc_feature: MA Experiment 20001905 PARAMETER Experiment Name: At_Drought_Reproduction_P Parameter: Timepoint (day) Value: 10
  misc_feature: MA Experiment 20001905 PARAMETER Experiment Name: At_Drought_Reproduction_P Parameter: Tissue Value: Rosettes
  misc_feature: MA Experiment 20001905 PARAMETER Experiment Name: At_Drought_Reproduction_P Parameter: Treatment Value: Drought vs. No Drought
  misc_feature: MA Experiment ID: 20001910 Result: Up-regulated in Transcription
  misc_feature: MA Experiment 20001910 PARAMETER Experiment Name: At_Drought_Reproduction_P Parameter: Age (day) Value: 37
  misc_feature: MA Experiment 20001910 PARAMETER Experiment Name: At_Drought_Reproduction_P Parameter: Organism Value: A. thaliana
  misc_feature: MA Experiment 20001910 PARAMETER Experiment Name: At_Drought_Reproduction_P Parameter: Plant Line Value: WS
  misc_feature: MA Experiment 20001910 PARAMETER Experiment Name: At_Drought_Reproduction_P Parameter: Timepoint (day) Value: 7
  misc_feature: MA Experiment 20001910 PARAMETER Experiment Name: At_Drought_Reproduction_P Parameter: Tissue Value: Flowers
  misc_feature: MA Experiment 20001910 PARAMETER Experiment Name: At_Drought_Reproduction_P Parameter: Treatment Value: Drought vs. No Drought
ccaccaattctctttaacattctccttgatttctgacactaccctcatcgggtctccaagaggccaagaaagacctctttctcggcttctaggagtctcatcattctcttttttcacatttgcttcctccacacgcaacctccaaaaagccctaaatttattaaaacaaatggattccacggagctgaaccgtgtgttccaaatgttcgacaaggacggagacgggaagatcactacgaaggagctgaacgagtcattcaagaacctcggtatcataatacccgaagacgaactaacacaaattatccaaaagatcgatgttaatggtgacggttgtgttgacattgaagagtttggagagctctacaagacgataatggtagaagatgaggacgaggtaggagaagaagatatgaaggaagcgttcaacgtatttgatcggaacggagatgggtttataacggtggatgaattgaaagcggttttatcttccttgggactcaagcaaggtaagaccttggaggaatgtaggaagatgataatgcaagtggatgttgatggtgatggtagggttaattacatggagtttagacaaatgatgaaaaagggtcgcttttttagctctttgagctgataataactttttttcttctttttttaccttctcttgtttttaattttggttatttgcttaaccattttctcttgcggtctaaatggaaaatacatgatcatagactaattattttatcttcaagacatgcgagagcacattgtaaaaaactgtaggtgttttatgtttaaaatgtgatgagtgatgctttgtttacatcc

SEQ ID NO: 108162 - protein, 210 aa, Arabidopsis thaliana
  peptide (1)..(210): Ceres Seq. ID no. 13653390
  misc_feature (175)..(203): Pfam Name: EF hand Pfam Description: EF hand
  misc_feature (57)..(210): Homolog of NCBI NO: 15236276 NR Description: calcium-binding protein, putative [Arabidopsis
  misc_feature (57)..(207): Homolog of NCBI NO: 15221358 NR Description: calcium-binding protein, putative [Arabidopsis
  misc_feature (52)..(210): Homolog of NCBI NO: 28301674 NR Description: calcium-binding protein [Lotus japonicus]
  misc_feature (55)..(208): Homolog of NCBI NO: 18406202 NR Description: calmodulin-like protein (MSS3) [Arabidopsis
  misc_feature (55)..(208): Homolog of NCBI NO: 25295758 NR Description: probable calcium binding protein [imported] -
  misc_feature (57)..(205): Homolog of NCBI NO: 15231470 NR Description: calcium-binding protein, putative [Arabidopsis >gi|6041859|gb|AAF02168.1|AC009853_28 putative calmodulin
  misc_feature (57)..(210): Homolog of NCBI NO: 15235516 NR Description: calcium-binding protein, putative [Arabidopsis
  misc_feature (61)..(205): Homolog of NCBI NO: 15231685 NR Description: calcium-binding protein, putative [Arabidopsis
  misc_feature (55)..(205): Homolog of NCBI NO: 21740787 NR Description: OSJNBb0091E11.1 [Oryza sativa (japonica
  misc_feature (61)..(200): Homolog of NCBI NO: 4959165 NR Description: calmodulin mutant SYNCAM57D [synthetic construct]
HQFSLTFSLISDTTLIGSPRGQERPLSRLLGVSSFSFFTFASSTRNLQKALNLLKQMDSTELNRVFQMFDKDGDGKITTKELNESFKNLGIIIPEDELTQIIQKIDVNGDGCVDIEEFGELYKTIMVEDEDEVGEEDMKEAFNVFDRNGDGFITVDELKAVLSSLGLKQGKTLEECRKMIMQVDVDGDGRVNYMEFRQMMKKGRFFSSLS

SEQ ID NO: 108163 - protein, 154 aa, Arabidopsis thaliana; identical to SEQ ID NO: 36976
  peptide (1)..(154): Ceres Seq. ID no. 13653391
  misc_feature (119)..(147): Pfam Name: EF hand Pfam Description: EF hand
  misc_feature (1)..(154): Homolog of NCBI NO: 15236276 NR Description: calcium-binding protein, putative [Arabidopsis
  misc_feature (1)..(151): Homolog of NCBI NO: 15221358 NR Description: calcium-binding protein, putative [Arabidopsis
  misc_feature (1)..(154): Homolog of NCBI NO: 28301674 NR Description: calcium-binding protein [Lotus japonicus]
  misc_feature (1)..(152): Homolog of NCBI NO: 18406202 NR Description: calmodulin-like protein (MSS3) [Arabidopsis
  misc_feature (1)..(152): Homolog of NCBI NO: 25295758 NR Description: probable calcium binding protein [imported] -
  misc_feature (1)..(149): Homolog of NCBI NO: 15231470 NR Description: calcium-binding protein, putative [Arabidopsis >gi|6041859|gb|AAF02168.1|AC009853_28 putative calmodulin
  misc_feature (1)..(154): Homolog of NCBI NO: 15235516 NR Description: calcium-binding protein, putative [Arabidopsis
  misc_feature (5)..(149): Homolog of NCBI NO: 15231685 NR Description: calcium-binding protein, putative [Arabidopsis
  misc_feature (1)..(149): Homolog of NCBI NO: 21740787 NR Description: OSJNBb0091E11.1 [Oryza sativa (japonica
  misc_feature (5)..(144): Homolog of NCBI NO: 4959165 NR Description: calmodulin mutant SYNCAM57D [synthetic construct]

SEQ ID NO: 108164 - protein, 143 aa, Arabidopsis thaliana; identical to SEQ ID NO: 36977
  peptide (1)..(143): Ceres Seq. ID no. 13653392
  misc_feature (108)..(136): Pfam Name: EF hand Pfam Description: EF hand
  misc_feature (1)..(143): Homolog of NCBI NO: 15236276 NR Description: calcium-binding protein, putative [Arabidopsis
  misc_feature (1)..(140): Homolog of NCBI NO: 15221358 NR Description: calcium-binding protein, putative [Arabidopsis
  misc_feature (1)..(143): Homolog of NCBI NO: 28301674 NR Description: calcium-binding protein [Lotus japonicus]
  misc_feature (1)..(141): Homolog of NCBI NO: 18406202 NR Description: calmodulin-like protein (MSS3) [Arabidopsis
  misc_feature (1)..(141): Homolog of NCBI NO: 25295758 NR Description: probable calcium binding protein [imported] -
  misc_feature (1)..(138): Homolog of NCBI NO: 15231470 NR Description: calcium-binding protein, putative [Arabidopsis >gi|6041859|gb|AAF02168.1|AC009853_28 putative calmodulin
  misc_feature (1)..(143): Homolog of NCBI NO: 15235516 NR Description: calcium-binding protein, putative [Arabidopsis
  misc_feature (1)..(138): Homolog of NCBI NO: 15231685 NR Description: calcium-binding protein, putative [Arabidopsis
  misc_feature (1)..(138): Homolog of NCBI NO: 21740787 NR Description: OSJNBb0091E11.1 [Oryza sativa (japonica
  misc_feature (1)..(133): Homolog of NCBI NO: 4959165 NR Description: calmodulin mutant SYNCAM57D [synthetic construct]

SEQ ID NO: 108165 - DNA, 1042 bp, Arabidopsis thaliana
  misc_feature (1)..(1042): Ceres Seq. ID no. 13653397
  misc_feature: MA Experiment ID: 108576 Result: Up-regulated in Transcription
  misc_feature: MA Experiment 108576 PARAMETER Experiment Name: At_42deg_Heat_cDNA_P Parameter: Temperature (deg C) Value: 42 vs. 22
  misc_feature: MA Experiment 108576 PARAMETER Experiment Name: At_42deg_Heat_cDNA_P Parameter: Timepoint (hr) Value: 1
  misc_feature: MA Experiment 108576 PARAMETER Experiment Name: At_42deg_Heat_cDNA_P Parameter: Tissue Value: Aerial
  misc_feature: MA Experiment ID: 20000182 Result: Down-regulated in Transcription
  misc_feature: MA Experiment 20000182 PARAMETER Experiment Name: At_2mM_SA_P Parameter: Age (day) Value: 14
  misc_feature: MA Experiment 20000182 PARAMETER Experiment Name: At_2mM_SA_P Parameter: Organism Value: A. thaliana
  misc_feature: MA Experiment 20000182 PARAMETER Experiment Name: At_2mM_SA_P Parameter: Plant Line Value: WS
  misc_feature: MA Experiment 20000182 PARAMETER Experiment Name: At_2mM_SA_P Parameter: Timepoint (hr) Value: 6
  misc_feature: MA Experiment 20000182 PARAMETER Experiment Name: At_2mM_SA_P Parameter: Tissue Value: Aerial
  misc_feature: MA Experiment 20000182 PARAMETER Experiment Name: At_2mM_SA_P Parameter: Treatment Value: 2mM SA vs. No Treatment
  misc_feature: MA Experiment ID: 20000184 Result: Up-regulated in Transcription
  misc_feature: MA Experiment 20000184 PARAMETER Experiment Name: At_Shoots__P Parameter: Age (day) Value: 7
  misc_feature: MA Experiment 20000184 PARAMETER Experiment Name: At_Shoots__P Parameter: Tissue Value: Shoots vs. Whole Plant
  misc_feature: MA Experiment ID: 20000264 Result: Up-regulated in Transcription
  misc_feature: MA Experiment 20000264 PARAMETER Experiment Name: At_Open_Flower_P Parameter: Age (day) Value: 21
  misc_feature: MA Experiment 20000264 PARAMETER Experiment Name: At_Open_Flower_P Parameter: Plant Line Value: WS
  misc_feature: MA Experiment 20000264 PARAMETER Experiment Name: At_Open_Flower_P Parameter: Tissue Value: Open Flower vs. Whole Plant
  misc_feature: MA Experiment ID: 20000265 Result: Up-regulated in Transcription
  misc_feature: MA Experiment 20000265 PARAMETER Experiment Name: At_Open_Flower_P Parameter: Age (day) Value: 21
  misc_feature: MA Experiment 20000265 PARAMETER Experiment Name: At_Open_Flower_P Parameter: Plant Line Value: WS
  misc_feature: MA Experiment 20000265 PARAMETER Experiment Name: At_Open_Flower_P Parameter: Tissue Value: Closed Flower vs. Whole Plant
  misc_feature: MA Experiment ID: 20000286 Result: Up-regulated in Transcription
  misc_feature: MA Experiment 20000286 PARAMETER Experiment Name: At_Open_Flower_P Parameter: Age (day) Value: 21
  misc_feature: MA Experiment 20000286 PARAMETER Experiment Name: At_Open_Flower_P Parameter: Plant Line Value: WS
  misc_feature: MA Experiment 20000286 PARAMETER Experiment Name: At_Open_Flower_P Parameter: Tissue Value: Half Open vs. Whole Plant
  misc_feature: MA Experiment ID: 20000436 Result: Down-regulated in Transcription
  misc_feature: MA Experiment 20000436 PARAMETER Experiment Name: At_Drought_P Parameter: Age (day) Value: 7
  misc_feature: MA Experiment 20000436 PARAMETER Experiment Name: At_Drought_P Parameter: Organism Value: A. thaliana
  misc_feature: MA Experiment 20000436 PARAMETER Experiment Name: At_Drought_P Parameter: Plant Line Value: WS
  misc_feature: MA Experiment 20000436 PARAMETER Experiment Name: At_Drought_P Parameter: Timepoint (hr) Value: 12
  misc_feature: MA Experiment 20000436 PARAMETER Experiment Name: At_Drought_P Parameter: Tissue Value: Whole Plant
  misc_feature: MA Experiment 20000436 PARAMETER Experiment Name: At_Drought_P Parameter: Treatment Value: Drought vs. No Drought
  misc_feature: MA Experiment ID: 20000437 Result: Down-regulated in Transcription
  misc_feature: MA Experiment 20000437 PARAMETER Experiment Name: At_Drought_P Parameter: Age (day) Value: 8
  misc_feature: MA Experiment 20000437 PARAMETER Experiment Name: At_Drought_P Parameter: Organism Value: A. thaliana
  misc_feature: MA Experiment 20000437 PARAMETER Experiment Name: At_Drought_P Parameter: Plant Line Value: WS
  misc_feature: MA Experiment 20000437 PARAMETER Experiment Name: At_Drought_P Parameter: Timepoint (hr) Value: 24
  misc_feature: MA Experiment 20000437 PARAMETER Experiment Name: At_Drought_P Parameter: Tissue Value: Whole Plant
  misc_feature: MA Experiment 20000437 PARAMETER Experiment Name: At_Drought_P Parameter: Treatment Value: Drought vs. No Drought
  misc_feature: MA Experiment ID: 20000794 Result: Down-regulated in Transcription
  misc_feature: MA Experiment 20000794 PARAMETER Experiment Name: At_Petals_P Parameter: Age (day) Value: 23-25 days
  misc_feature: MA Experiment 20000794 PARAMETER Experiment Name: At_Petals_P Parameter: Plant Line Value: WS
  misc_feature: MA Experiment 20000794 PARAMETER Experiment Name: At_Petals_P Parameter: Tissue Value: Petals vs. Whole plant
  misc_feature: MA Experiment ID: 20001450 Result: Down-regulated in Transcription
  misc_feature: MA Experiment 20001450 PARAMETER Experiment Name: At_Far-red-induction_P Parameter: Age (day) Value: 7
  misc_feature: MA Experiment 20001450 PARAMETER Experiment Name: At_Far-red-induction_P Parameter: Light Value: Far-red vs. White
  misc_feature: MA Experiment 20001450 PARAMETER Experiment Name: At_Far-red-induction_P Parameter: Organism Value: A. thaliana
  misc_feature: MA Experiment 20001450 PARAMETER Experiment Name: At_Far-red-induction_P Parameter: Plant Line Value: Columbia
  misc_feature: MA Experiment 20001450 PARAMETER Experiment Name: At_Far-red-induction_P Parameter: Timepoint (hr) Value: 8
  misc_feature: MA Experiment 20001450 PARAMETER Experiment Name: At_Far-red-induction_P Parameter: Tissue Value: Whole Plant
  misc_feature: MA Experiment ID: 20001557 Result: Up-regulated in Transcription
  misc_feature: MA Experiment 20001557 PARAMETER Experiment Name: At_Drought_Soil_Dry_P Parameter: Age (day) Value: 27
  misc_feature: MA Experiment 20001557 PARAMETER Experiment Name: At_Drought_Soil_Dry_P Parameter: Organism Value: A. thaliana
  misc_feature: MA Experiment 20001557 PARAMETER Experiment Name: At_Drought_Soil_Dry_P Parameter: Plant Line Value: WS
  misc_feature: MA Experiment 20001557 PARAMETER Experiment Name: At_Drought_Soil_Dry_P Parameter: Post Timepoint (hr) Value: 3
  misc_feature: MA Experiment 20001557 PARAMETER Experiment Name: At_Drought_Soil_Dry_P Parameter: Post-Treatment Value: Re-Water vs. No Drought
  misc_feature: MA Experiment 20001557 PARAMETER Experiment Name: At_Drought_Soil_Dry_P Parameter: Timepoint (day) Value: 13
  misc_feature: MA Experiment 20001557 PARAMETER Experiment Name: At_Drought_Soil_Dry_P Parameter: Treatment Value: Drought vs. No Drought
  misc_feature: MA Experiment ID: 20001558 Result: Up-regulated in Transcription
  misc_feature: MA Experiment 20001558 PARAMETER Experiment Name: At_Drought_Soil_Dry_P Parameter: Age (day) Value: 27
  misc_feature: MA Experiment 20001558 PARAMETER Experiment Name: At_Drought_Soil_Dry_P Parameter: Organism Value: A. thaliana
  misc_feature: MA Experiment 20001558 PARAMETER Experiment Name: At_Drought_Soil_Dry_P Parameter: Plant Line Value: WS
  misc_feature: MA Experiment 20001558 PARAMETER Experiment Name: At_Drought_Soil_Dry_P Parameter: Post Timepoint (hr) Value: 6
  misc_feature: MA Experiment 20001558 PARAMETER Experiment Name: At_Drought_Soil_Dry_P Parameter: Post-Treatment Value: Re-Water vs. No Drought
  misc_feature: MA Experiment 20001558 PARAMETER Experiment Name: At_Drought_Soil_Dry_P Parameter: Timepoint (day) Value: 13
  misc_feature: MA Experiment 20001558 PARAMETER Experiment Name: At_Drought_Soil_Dry_P Parameter: Treatment Value: Drought vs. No Drought
  misc_feature: MA Experiment ID: 20001560 Result: Up-regulated in Transcription
  misc_feature: MA Experiment 20001560 PARAMETER Experiment Name: At_Drought_Soil_Dry_P Parameter: Age (day) Value: 28
  misc_feature: MA Experiment 20001560 PARAMETER Experiment Name: At_Drought_Soil_Dry_P Parameter: Organism Value: A. thaliana
  misc_feature: MA Experiment 20001560 PARAMETER Experiment Name: At_Drought_Soil_Dry_P Parameter: Plant Line Value: WS
  misc_feature: MA Experiment 20001560 PARAMETER Experiment Name: At_Drought_Soil_Dry_P Parameter: Post Timepoint (hr) Value: None
  misc_feature: MA Experiment 20001560 PARAMETER Experiment Name: At_Drought_Soil_Dry_P Parameter: Post-Treatment Value: None
  misc_feature: MA Experiment 20001560 PARAMETER Experiment Name: At_Drought_Soil_Dry_P Parameter: Timepoint (day) Value: 14
  misc_feature: MA Experiment 20001560 PARAMETER Experiment Name: At_Drought_Soil_Dry_P Parameter: Treatment Value: Drought vs. No Drought
  misc_feature: MA Experiment ID: 20001757 Result: Up-regulated in Transcription
  misc_feature: MA Experiment 20001757 PARAMETER Experiment Name: At_50mM_NH4NO3_L-to-H_P Parameter: Timepoint (hr) Value: 6
  misc_feature: MA Experiment 20001757 PARAMETER Experiment Name: At_50mM_NH4NO3_L-to-H_P Parameter: Tissue Value: Leaf
  misc_feature: MA Experiment 20001757 PARAMETER Experiment Name: At_50mM_NH4NO3_L-to-H_P Parameter: Treatment Value: 50mM NH4NO3 vs 100mM Mannitol
  misc_feature: MA Experiment ID: 20001911 Result: Down-regulated in Transcription
  misc_feature: MA Experiment 20001911 PARAMETER Experiment Name: At_Drought_Reproduction_P Parameter: Age (day) Value: 40
  misc_feature: MA Experiment 20001911 PARAMETER Experiment Name: At_Drought_Reproduction_P Parameter: Organism Value: A. thaliana
  misc_feature: MA Experiment 20001911 PARAMETER Experiment Name: At_Drought_Reproduction_P Parameter: Plant Line Value: WS
  misc_feature: MA Experiment 20001911 PARAMETER Experiment Name: At_Drought_Reproduction_P Parameter: Timepoint (day) Value: 10
  misc_feature: MA Experiment 20001911 PARAMETER Experiment Name: At_Drought_Reproduction_P Parameter: Tissue Value: Flowers
  misc_feature: MA Experiment 20001911 PARAMETER Experiment Name: At_Drought_Reproduction_P Parameter: Treatment Value: Drought vs. No Drought
gagaagagacaagaagacacagaacaagtagccactctctcatctcaccacccctctttctctctacttgctctctatctctctctgtgtctctccactttctcttcttcttcttcttcttcttcttcttgctctagagatctctctatctccattcttttctctctctgtttctagaaagacaacagtgacattttgtctgaacgcatctatggctgctctggtgctttcacttctccttctatccttggctggacattctagtgcctcatggtgtgtgtgtaagacagggctgagtgatacagtgctacaggcaaccctagactatgcttgtggaaatggagcagattgtaatcctactaaaccaaaacaatcttgcttcaaccctgacaatgttaggtctcattgcaactatgcagtcaatagcttcttccaaaagaagggtcaatctcctggctcttgtaatttcgatggaactgccactcccactaactccgatcccagttatacaggttgtgcctttcctactagtgccagtggctctagcggcagcacaactgtgacacctggcacaaccaatccaaaaggcagcccaacgaccaccacacttcctggtagtggtaccaacagtccttattcagggaacccaaccaatggagtttttgggggaaatagcacaggaggcaccactgggacagggattaacccggattacacgacagacagcagcgcgtttgctctcaagaactcaagcaaattgttcatctgccttctcttgatcgcttcgagtggattctgctctttcctgatgctctaaggatgttaatggtctctggttctgtgggtgcacttagttatcgtttcgaggacattttggtctagtttagtggtaatctctgtctctgtgttatgggtctatgttatgtttttgtttgtaagaagatttcagctcttgcagttactcttaattacctctttgactgttctggtagatttgatgccagtgaaaaaaaatcttaatatataattacattatctcgtc

SEQ ID NO: 108166 - protein, 201 aa, Arabidopsis thaliana; identical to SEQ ID NO: 23283
  peptide (1)..(201): Ceres Seq. ID no. 13653398
  misc_feature (1)..(201): Homolog of NCBI NO: 30697478 NR Description: glycosyl hydrolase family 17 [Arabidopsis >gi|9759459|dbj|BAB10375.1| to unknown protein [Arabidopsis thaliana]
  misc_feature (1)..(201): Homolog of NCBI NO: 21592859 NR Description: unknown [Arabidopsis thaliana]
  misc_feature (1)..(201): Homolog of NCBI NO: 15241485 NR Description: glycosyl hydrolase family 17 [Arabidopsis
  misc_feature (1)..(190): Homolog of NCBI NO: 18394637 NR Description: glycosyl hydrolase family 17 [Arabidopsis
  misc_feature (1)..(191): Homolog of NCBI NO: 30683485 NR Description: expressed protein [Arabidopsis thaliana] unknown protein [Arabidopsis thaliana]
  misc_feature (1)..(184): Homolog of NCBI NO: 18409239 NR Description: expressed protein [Arabidopsis thaliana] unknown protein [Arabidopsis thaliana] At1g69290/F23O10_12 [Arabidopsis thaliana]
  misc_feature (1)..(184): Homolog of NCBI NO: 21553768 NR Description: unknown [Arabidopsis thaliana]
  misc_feature (1)..(191): Homolog of NCBI NO: 22775658 NR Description: contains ESTs
  misc_feature (1)..(184): Homolog of NCBI NO: 25404810 NR Description: unknown protein, 45065-49536 [imported] -
  misc_feature (12)..(191): Homolog of NCBI NO: 8778409 NR Description: F16A14.5 [Arabidopsis thaliana]

SEQ ID NO: 108167 - DNA, 1257 bp, Arabidopsis thaliana
  misc_feature (1)..(1257): Ceres Seq. ID no. 13653399
  misc_feature: MA Experiment ID: 20000173 Result: Down-regulated in Transcription
  misc_feature: MA Experiment 20000173 PARAMETER Experiment Name: At_42deg_Heat_P Parameter: Age (day) Value: 14
  misc_feature: MA Experiment 20000173 PARAMETER Experiment Name: At_42deg_Heat_P Parameter: Organism Value: A. thaliana
  misc_feature: MA Experiment 20000173 PARAMETER Experiment Name: At_42deg_Heat_P Parameter: Plant Line Value: WS
  misc_feature: MA Experiment 20000173 PARAMETER Experiment Name: At_42deg_Heat_P Parameter: Temperature (deg C) Value: 42 vs. 22
  misc_feature: MA Experiment 20000173 PARAMETER Experiment Name: At_42deg_Heat_P Parameter: Timepoint (hr) Value: 6
  misc_feature: MA Experiment 20000173 PARAMETER Experiment Name: At_42deg_Heat_P Parameter: Tissue Value: Aerial
  misc_feature: MA Experiment ID: 20000179 Result: Down-regulated in Transcription
  misc_feature: MA Experiment 20000179 PARAMETER Experiment Name: At_Germinating_Seeds_P Parameter: Age (hr) Value: 6 vs. 0
  misc_feature: MA Experiment 20000179 PARAMETER Experiment Name: At_Germinating_Seeds_P Parameter: Tissue Value: Germinating Seeds
  misc_feature: MA Experiment ID: 20000180 Result: Down-regulated in Transcription
  misc_feature: MA Experiment 20000180 PARAMETER Experiment Name: At_Germinating_Seeds_P Parameter: Age (hr) Value: 24 vs. 0
  misc_feature: MA Experiment 20000180 PARAMETER Experiment Name: At_Germinating_Seeds_P Parameter: Tissue Value: Germinating Seeds
  misc_feature: MA Experiment ID: 20000185 Result: Up-regulated in Transcription
  misc_feature: MA Experiment 20000185 PARAMETER Experiment Name: At_Roots__P Parameter: Age (day) Value: 7 vs. 21
  misc_feature: MA Experiment 20000185 PARAMETER Experiment Name: At_Roots__P Parameter: Organism Value: A. thaliana
  misc_feature: MA Experiment 20000185 PARAMETER Experiment Name: At_Roots__P Parameter: Tissue Value: Roots vs. Whole Plant
  misc_feature: MA Experiment ID: 20000234 Result: Up-regulated in Transcription
  misc_feature: MA Experiment 20000234 PARAMETER Experiment Name: At_Siliques_P Parameter: Age (day) Value: 21
  misc_feature: MA Experiment 20000234 PARAMETER Experiment Name: At_Siliques_P Parameter: Organism Value: A. thaliana
  misc_feature: MA Experiment 20000234 PARAMETER Experiment Name: At_Siliques_P Parameter: Plant Line Value: WS
  misc_feature: MA Experiment 20000234 PARAMETER Experiment Name: At_Siliques_P Parameter: Tissue Value: Less Than 5mm Siliques vs. Whole Plant
  misc_feature: MA Experiment ID: 20000235 Result: Up-regulated in Transcription
  misc_feature: MA Experiment 20000235 PARAMETER Experiment Name: At_Siliques_P Parameter: Age (day) Value: 21
  misc_feature: MA Experiment 20000235 PARAMETER Experiment Name: At_Siliques_P Parameter: Organism Value: A. thaliana
  misc_feature: MA Experiment 20000235 PARAMETER Experiment Name: At_Siliques_P Parameter: Plant Line Value: WS
  misc_feature: MA Experiment 20000235 PARAMETER Experiment Name: At_Siliques_P Parameter: Tissue Value: 5-10mm Siliques vs. Whole Plant
  misc_feature: MA Experiment ID: 20000264 Result: Up-regulated in Transcription
  misc_feature: MA Experiment 20000264 PARAMETER Experiment Name: At_Open_Flower_P Parameter: Age (day) Value: 21
  misc_feature: MA Experiment 20000264 PARAMETER Experiment Name: At_Open_Flower_P Parameter: Plant Line Value: WS
  misc_feature: MA Experiment 20000264 PARAMETER Experiment Name: At_Open_Flower_P Parameter: Tissue Value: Open Flower vs. Whole Plant
  misc_feature: MA Experiment ID: 20000265 Result: Up-regulated in Transcription
  misc_feature: MA Experiment 20000265 PARAMETER Experiment Name: At_Open_Flower_P Parameter: Age (day) Value: 21
  misc_feature: MA Experiment 20000265 PARAMETER Experiment Name: At_Open_Flower_P Parameter: Plant Line Value: WS
  misc_feature: MA Experiment 20000265 PARAMETER Experiment Name: At_Open_Flower_P Parameter: Tissue Value: Closed Flower vs. Whole Plant
  misc_feature: MA Experiment ID: 20000286 Result: Up-regulated in Transcription
  misc_feature: MA Experiment 20000286 PARAMETER Experiment Name: At_Open_Flower_P Parameter: Age (day) Value: 21
  misc_feature: MA Experiment 20000286 PARAMETER Experiment Name: At_Open_Flower_P Parameter: Plant Line Value: WS
  misc_feature: MA Experiment 20000286 PARAMETER Experiment Name: At_Open_Flower_P Parameter: Tissue Value: Half Open vs. Whole Plant
  misc_feature: MA Experiment ID: 20000794 Result: Up-regulated in Transcription
  misc_feature: MA Experiment 20000794 PARAMETER Experiment Name: At_Petals_P Parameter: Age (day) Value: 23-25 days
  misc_feature: MA Experiment 20000794 PARAMETER Experiment Name: At_Petals_P Parameter: Plant Line Value: WS
  misc_feature: MA Experiment 20000794 PARAMETER Experiment Name: At_Petals_P Parameter: Tissue Value: Petals vs. Whole plant
tcatcgctgtggggaacagcgatgagagaaagagaaacactttctgtcctctttttttttcctctctttttctctctcgctggaaaccttttcatattcaagtgtaattttaatatttcaagcaattttctagctaattatggccttggaggctgtagtttacccgcaagatccgttctcctacatctcttgcaaagattttccgttttacgacttatactttcaagaagaagaagatcaagatccacaagatactaagaacaacattaagctagggcaaggacaaggacatggttttgcgagtaataattacaacggtagaaccggagattatagtgatgattataattacaacgaagaggatctccaatggccacgagaccttccttatggatctgccgtcgacaccgagagccagcctccaccgtcggatgtggcggcgggaggagggaggaggaaaaggaggaggacgaggagtagcaagaacaaagaagagatcgagaaccagaggatgactcacatcgccgttgaaagaaatcgccggaaacagatgaacgagtacctcgccgttctccggtctctcatgccaccttattatgctcaaaggggagatcaagcatcgatagtaggcggagccattaactacttaaaggagcttgagcatcatttacaatcaatggaacctccggttaagaccgccacagaagacaccggagccggccacgaccagaccaaaacaacctcggctagttcgtcgggaccattctcggatttctttgcatttcctcagtactcgaaccggcctacctctgcggcggcggctgaggggatggcggagatagaggtaacgatggtagagagccatgcgagtctgaaaatacttgcgaaaaagagaccgagacagcttcttaaactggtctcatcgatacagagcctaaggctcactcttctccatctaaacgtcacaactcgagacgactccgtcctctattccatcagcgtcaaggttgaagaagggagccaattgaatacagtagaagatattgcagcagctgtgaatcaaatcctaaggaggatcgaagaagagtcatcctttagctagtattgttgaattttagttatggcacatttagaggagctctaatttttcatgtgtgatcttttgctctctctttttcatatattaaataatataaatttcctttttctttttgttaacgttaattctaatgcattatatattggagtttttgtgtg

SEQ ID NO: 108168 - protein, 320 aa, Arabidopsis thaliana; identical to SEQ ID NO: 36403
  peptide (1)..(320): Ceres Seq. ID no. 13653400
  misc_feature (123)..(174): Pfam Name: Helix-loop-helix DNA-binding domain Pfam Description: Helix-loop-helix DNA-binding domain
  misc_feature (1)..(320): Homolog of NCBI NO: 15218391 NR Description: bHLH protein family [Arabidopsis thaliana]
  misc_feature (1)..(320): Homolog of NCBI NO: 21593808 NR Description: unknown [Arabidopsis thaliana]
  misc_feature (1)..(317): Homolog of NCBI NO: 18395124 NR Description: bHLH protein family [Arabidopsis thaliana]
  misc_feature (117)..(317): Homolog of NCBI NO: 25513460 NR Description: F12K8.16 protein - Arabidopsis thaliana
  misc_feature (1)..(49): Homolog of NCBI NO: 25513460 NR Description: F12K8.16 protein - Arabidopsis thaliana
  misc_feature (77)..(320): Homolog of NCBI NO: 37533680 NR Description: putative helix-loop-helix DNA-binding protein
  misc_feature (1)..(290): Homolog of NCBI NO: 28558779 NR Description: helix-loop-helix-like protein [Cucumis melo]
  misc_feature (85)..(320): Homolog of NCBI NO: 15234187 NR Description: bHLH protein family [Arabidopsis thaliana]
  misc_feature (22)..(320): Homolog of NCBI NO: 30687365 NR Description: bHLH protein family [Arabidopsis thaliana]
  misc_feature (106)..(316): Homolog of NCBI NO: 15238424 NR Description: bHLH protein family [Arabidopsis thaliana]

SEQ ID NO: 108169 - protein, 196 aa, Arabidopsis thaliana; identical to SEQ ID NO: 36404
  peptide (1)..(196): Ceres Seq. ID no. 13653401
  misc_feature (1)..(50): Pfam Name: Helix-loop-helix DNA-binding domain Pfam Description: Helix-loop-helix DNA-binding domain
  misc_feature (1)..(196): Homolog of NCBI NO: 15218391 NR Description: bHLH protein family [Arabidopsis thaliana]
  misc_feature (1)..(196): Homolog of NCBI NO: 21593808 NR Description: unknown [Arabidopsis thaliana]
  misc_feature (1)..(193): Homolog of NCBI NO: 18395124 NR Description: bHLH protein family [Arabidopsis thaliana]
  misc_feature (1)..(193): Homolog of NCBI NO: 25513460 NR Description: F12K8.16 protein - Arabidopsis thaliana
  misc_feature (1)..(196): Homolog of NCBI NO: 37533680 NR Description: putative helix-loop-helix DNA-binding protein
  misc_feature (1)..(166): Homolog of NCBI NO: 28558779 NR Description: helix-loop-helix-like protein [Cucumis melo]
  misc_feature (1)..(196): Homolog of NCBI NO: 15234187 NR Description: bHLH protein family [Arabidopsis thaliana]
  misc_feature (1)..(196): Homolog of NCBI NO: 30687365 NR Description: bHLH protein family [Arabidopsis thaliana]
  misc_feature (1)..(192): Homolog of NCBI NO: 15238424 NR Description: bHLH protein family [Arabidopsis thaliana]
  misc_feature (18)..(193): Homolog of NCBI NO: 3641870 NR Description: hypothetical protein [Cicer arietinum]

SEQ ID NO: 108170 - protein, 183 aa, Arabidopsis thaliana; identical to SEQ ID NO: 36405
  peptide (1)..(183): Ceres Seq. ID no. 13653402
  misc_feature (1)..(37): Pfam Name: Helix-loop-helix DNA-binding domain Pfam Description: Helix-loop-helix DNA-binding domain
  misc_feature (1)..(183): Homolog of NCBI NO: 15218391 NR Description: bHLH protein family [Arabidopsis thaliana]
  misc_feature (1)..(183): Homolog of NCBI NO: 21593808 NR Description: unknown [Arabidopsis thaliana]
  misc_feature (1)..(180): Homolog of NCBI NO: 18395124 NR Description: bHLH protein family [Arabidopsis thaliana]
  misc_feature (1)..(180): Homolog of NCBI NO: 25513460 NR Description: F12K8.16 protein - Arabidopsis thaliana
  misc_feature (1)..(183): Homolog of NCBI NO: 37533680 NR Description: putative helix-loop-helix DNA-binding protein
  misc_feature (1)..(153): Homolog of NCBI NO: 28558779 NR Description: helix-loop-helix-like protein [Cucumis melo]
  misc_feature (1)..(183): Homolog of NCBI NO: 15234187 NR Description: bHLH protein family [Arabidopsis thaliana]
  misc_feature (1)..(183): Homolog of NCBI NO: 30687365 NR Description: bHLH protein family [Arabidopsis thaliana]
  misc_feature (1)..(179): Homolog of NCBI NO: 15238424 NR Description: bHLH protein family [Arabidopsis thaliana]
  misc_feature (5)..(180): Homolog of NCBI NO: 3641870 NR Description: hypothetical protein [Cicer arietinum]

SEQ ID NO: 108171 - DNA, 1534 bp, Arabidopsis thaliana
  misc_feature (1)..(1534): Ceres Seq. ID no. 13653403
  misc_feature: MA Experiment ID: 20000306 Result: Up-regulated in Transcription
  misc_feature: MA Experiment 20000306 PARAMETER Experiment Name: At_Germinating_Seeds_Sub_P Parameter: Age (hr) Value: 6 vs. 0
  misc_feature: MA Experiment 20000306 PARAMETER Experiment Name: At_Germinating_Seeds_Sub_P Parameter: Organism Value: A. thaliana
  misc_feature: MA Experiment 20000306 PARAMETER Experiment Name: At_Germinating_Seeds_Sub_P Parameter: Plant Line Value: WS
  misc_feature: MA Experiment 20000306 PARAMETER Experiment Name: At_Germinating_Seeds_Sub_P Parameter: Tissue Value: Germinating Seeds
  misc_feature: MA Experiment ID: 20000307 Result: Up-regulated in Transcription
  misc_feature: MA Experiment 20000307 PARAMETER Experiment Name: At_Germinating_Seeds_Sub_P Parameter: Age (hr) Value: 24 vs. 0
  misc_feature: MA Experiment 20000307 PARAMETER Experiment Name: At_Germinating_Seeds_Sub_P Parameter: Organism Value: A. thaliana
  misc_feature: MA Experiment 20000307 PARAMETER Experiment Name: At_Germinating_Seeds_Sub_P Parameter: Plant Line Value: WS
  misc_feature: MA Experiment 20000307 PARAMETER Experiment Name: At_Germinating_Seeds_Sub_P Parameter: Tissue Value: Germinating Seeds
  misc_feature: MA Experiment ID: 20000328 Result: Down-regulated in Transcription
  misc_feature: MA Experiment 20000328 PARAMETER Experiment Name: At_42deg_Heat_Sub_P Parameter: Age (day) Value: 14
  misc_feature: MA Experiment 20000328 PARAMETER Experiment Name: At_42deg_Heat_Sub_P Parameter: Organism Value: A. thaliana
  misc_feature: MA Experiment 20000328 PARAMETER Experiment Name: At_42deg_Heat_Sub_P Parameter: Plant Line Value: WS
  misc_feature: MA Experiment 20000328 PARAMETER Experiment Name: At_42deg_Heat_Sub_P Parameter: Temperature (deg C) Value: 42 vs. 22
  misc_feature: MA Experiment 20000328 PARAMETER Experiment Name: At_42deg_Heat_Sub_P Parameter: Timepoint (hr) Value: 6
  misc_feature: MA Experiment 20000328 PARAMETER Experiment Name: At_42deg_Heat_Sub_P Parameter: Tissue Value: Aerial
  misc_feature: MA Experiment ID: 20000355 Result: Up-regulated in Transcription
  misc_feature: MA Experiment 20000355 PARAMETER Experiment Name: At_Siliques_Sub_P Parameter: Age (day) Value: 21
  misc_feature: MA Experiment 20000355 PARAMETER Experiment Name: At_Siliques_Sub_P Parameter: Organism Value: A. thaliana
  misc_feature: MA Experiment 20000355 PARAMETER Experiment Name: At_Siliques_Sub_P Parameter: Plant Line Value: WS
  misc_feature: MA Experiment 20000355 PARAMETER Experiment Name: At_Siliques_Sub_P Parameter: Tissue Value: Less Than 5mm Siliques vs. Whole Plant
aaattttcgcgctcgattcgtcttttctgtatctcccggagctccgggacttgggcggaagaggagatgaggagcttgttgttgtggattgcggtggtcgtgtgcttgctatgttcagtcgcggcggtggttcaaagcggatctagcgacggatttgggaaacccagagatactgagactgcgatatcttttctggagtataaattgatggcgccttcggttccaatgatacctctcaccttgattcacggagctgactctaaaggagctgtgtgcttagatgggacgctacctggttatcatctagatcgtggttttggatcaggtgctaacagttggcttatccagcttgagggtggaggatggtgtaacaaccataggagctgtgtgtatcgcaaaacaagtcgacgtggttcctctaaattcatggaaaaagctttggccttcactggaattttgagcaatagatctgaagagaatcctgacttctttaattggaacaggatcaagttgcgttactgcgatggtgcgtctttctctggtgatagtcaggacgagagttcgcaacttttctatcgaggacaacgaatctggcaagtggctatggaagaattcctgtctttaggcatgaagcaagcaaaccaggctctgctctctggatgttcagctggaggattagcttctattttgcactgtgatgagttcagggaactattacctagttccacgaaagtaaaatgcttaagtgatgctggaatgtttctggactcagtggatgtctctgggggccactcgcttaggaatatgttccaaggtgttgttacagtgcagaacctccaaaaggacttgtccagtacttgtacaaaccatttggatcctacttcgtgcttttttccccagaacttggtttcagacattaaaaccccaatgtttcttctcaacacagcatatgactcttggcagatccaagagagcttagctcctcctactgctgatccaggcggtatctggaaggcatgcaaatcagatcactcgcgatgtaattcatcacagatccaattcttccaagaattcaggaatcaaatgctgtttgctgtaaactcattctcaaactctgaccagaacggtctttatataaactcttgcttcgcgcattgtcagactgaaagacaggacacttggtttgctcaagattctcctcaactaaacggaaagagagtcgcagagtctgtaggtgactggtacttcgaccgagcaaaaaatgtcaaagctatcgattgtccttacccttgtgacacaacatgtcacaatctgattttcgagtgagtaaatcgttgaaccccatttctctgattctttcaaacttataagttataccattattgccttaaattccttccatatttatcctaacttccaaatgtgcaacatttgtgtatctcaaatgagaatcatttagtttgtcgattcagatcataatttatatttgcatgaccttgatttttcgattgaaataagctttctttcgatgttt

SEQ ID NO: 108172 - protein, 441 aa, Arabidopsis thaliana
  peptide (1)..(441): Ceres Seq. ID no. 13653404
  misc_feature (60)..(425): Pfam Name: Pectinacetylesterase Pfam Description: Pectinacetylesterase
  misc_feature (23)..(441): Homolog of NCBI NO: 28392968 NR Description: putative pectinacetylesterase [Arabidopsis >gi|28827554|gb|AAO50621.1| putative pectinacetylesterase
  misc_feature (23)..(441): Homolog of NCBI NO: 15228677 NR Description: pectinacetylesterase family [Arabidopsis thaliana]
  misc_feature (51)..(441): Homolog of NCBI NO: 15226462 NR Description: pectinacetylesterase, putative [Arabidopsis
  misc_feature (76)..(440): Homolog of NCBI NO: 18397406 NR Description: pectinacetylesterase, putative [Arabidopsis >gi|6671966|gb|AAF23225.1|AC013454_12 putative [Arabidopsis thaliana] >gi|15292827|gb|AAK92782.1| putative
  misc_feature (75)..(440): Homolog of NCBI NO: 25347293 NR Description: probable pectinacetylesterase precursor T8L23.6 - Arabidopsis thaliana >gi|12321351|gb|AAG50747.1|AC079733_15
  misc_feature (75)..(440): Homolog of NCBI NO: 30696158 NR Description: pectinacetylesterase, putative [Arabidopsis
  misc_feature (75)..(440): Homolog of NCBI NO: 21703105 NR Description: At1g57590/T8L23_6 [Arabidopsis thaliana]
  misc_feature (40)..(440): Homolog of NCBI NO: 7487997 NR Description: pectin acetylesterase homolog F21E10.11 - thaliana >gi|3047082|gb|AAC13595.1| similar to Vigna radiata
  misc_feature (77)..(440): Homolog of NCBI NO: 34913332 NR Description: putative pectin acetylesterase precursor [Oryza
  misc_feature (76)..(439): Homolog of NCBI NO: 34894654 NR Description: P0028G04.28 [Oryza sativa (japonica
KFSRSIRLFCISRSSGTWAEEEMRSLLLWIAVVVCLLCSVAAVVQSGSSDGFGKPRDTETAISFLEYKLMAPSVPMIPLTLIHGADSKGAVCLDGTLPGYHLDRGFGSGANSWLIQLEGGGWCNNHRSCVYRKTSRRGSSKFMEKALAFTGILSNRSEENPDFFNWNRIKLRYCDGASFSGDSQDESSQLFYRGQRIWQVAMEEFLSLGMKQANQALLSGCSAGGLASILHCDEFRELLPSSTKVKCLSDAGMFLDSVDVSGGHSLRNMFQGVVTVQNLQKDLSSTCTNHLDPTSCFFPQNLVSDIKTPMFLLNTAYDSWQIQESLAPPTADPGGIWKACKSDHSRCNSSQIQFFQEFRNQMLFAVNSFSNSDQNGLYINSCFAHCQTERQDTWFAQDSPQLNGKRVAESVGDWYFDRAKNVKAIDCPYPCDTTCHNLIFE

SEQ ID NO: 108173 - protein, 419 aa, Arabidopsis thaliana
  peptide (1)..(419): Ceres Seq. ID no. 13653405
  misc_feature (38)..(403): Pfam Name: Pectinacetylesterase Pfam Description: Pectinacetylesterase
  misc_feature (1)..(419): Homolog of NCBI NO: 28392968 NR Description: putative pectinacetylesterase [Arabidopsis >gi|28827554|gb|AAO50621.1| putative pectinacetylesterase
  misc_feature (1)..(419): Homolog of NCBI NO: 15228677 NR Description: pectinacetylesterase family [Arabidopsis thaliana]
  misc_feature (29)..(419): Homolog of NCBI NO: 15226462 NR Description: pectinacetylesterase, putative [Arabidopsis
  misc_feature (54)..(418): Homolog of NCBI NO: 18397406 NR Description: pectinacetylesterase, putative [Arabidopsis >gi|6671966|gb|AAF23225.1|AC013454_12 putative [Arabidopsis thaliana] >gi|15292827|gb|AAK92782.1| putative
  misc_feature (53)..(418): Homolog of NCBI NO: 25347293 NR Description: probable pectinacetylesterase precursor T8L23.6 - Arabidopsis thaliana >gi|12321351|gb|AAG50747.1|AC079733_15
  misc_feature (53)..(418): Homolog of NCBI NO: 30696158 NR Description: pectinacetylesterase, putative [Arabidopsis
  misc_feature (53)..(418): Homolog of NCBI NO: 21703105 NR Description: At1g57590/T8L23_6 [Arabidopsis thaliana]
  misc_feature (18)..(418): Homolog of NCBI NO: 7487997 NR Description: pectin acetylesterase homolog F21E10.11 - thaliana >gi|3047082|gb|AAC13595.1| similar to Vigna radiata
  misc_feature (55)..(418): Homolog of NCBI NO: 34913332 NR Description: putative pectin acetylesterase precursor [Oryza
  misc_feature (54)..(417): Homolog of NCBI NO: 34894654 NR Description: P0028G04.28 [Oryza sativa (japonica
MRSLLLWIAVVVCLLCSVAAVVQSGSSDGFGKPRDTETAISFLEYKLMAPSVPMIPLTLIHGADSKGAVCLDGTLPGYHLDRGFGSGANSWLIQLEGGGWCNNHRSCVYRKTSRRGSSKFMEKALAFTGILSNRSEENPDFFNWNRIKLRYCDGASFSGDSQDESSQLFYRGQRIWQVAMEEFLSLGMKQANQALLSGCSAGGLASILHCDEFRELLPSSTKVKCLSDAGMFLDSVDVSGGHSLRNMFQGVVTVQNLQKDLSSTCTNHLDPTSCFFPQNLVSDIKTPMFLLNTAYDSWQIQESLAPPTADPGGIWKACKSDHSRCNSSQIQFFQEFRNQMLFAVNSFSNSDQNGLYINSCFAHCQTERQDTWFAQDSPQLNGKRVAESVGDWYFDRAKNVKAIDCPYPCDTTCHNLIFE

SEQ ID NO: 108174 - protein, 372 aa, Arabidopsis thaliana
  peptide (1)..(372): Ceres Seq. ID no. 13653406
  misc_feature (1)..(356): Pfam Name: Pectinacetylesterase Pfam Description: Pectinacetylesterase
  misc_feature (1)..(372): Homolog of NCBI NO: 28392968 NR Description: putative pectinacetylesterase [Arabidopsis >gi|28827554|gb|AAO50621.1| putative pectinacetylesterase
  misc_feature (1)..(372): Homolog of NCBI NO: 15228677 NR Description: pectinacetylesterase family [Arabidopsis thaliana]
  misc_feature (1)..(372): Homolog of NCBI NO: 15226462 NR Description: pectinacetylesterase, putative [Arabidopsis
  misc_feature (7)..(371): Homolog of NCBI NO: 18397406 NR Description: pectinacetylesterase, putative [Arabidopsis >gi|6671966|gb|AAF23225.1|AC013454_12 putative [Arabidopsis thaliana] >gi|15292827|gb|AAK92782.1| putative
  misc_feature (6)..(371): Homolog of NCBI NO: 25347293 NR Description: probable pectinacetylesterase precursor T8L23.6 - Arabidopsis thaliana >gi|12321351|gb|AAG50747.1|AC079733_15
  misc_feature (6)..(371): Homolog of NCBI NO: 30696158 NR Description: pectinacetylesterase, putative [Arabidopsis
  misc_feature (6)..(371): Homolog of NCBI NO: 21703105 NR Description: At1g57590/T8L23_6 [Arabidopsis thaliana]
  misc_feature (1)..(371): Homolog of NCBI NO: 7487997 NR Description: pectin acetylesterase homolog F21E10.11 - thaliana >gi|3047082|gb|AAC13595.1| similar to Vigna radiata
  misc_feature (8)..(371): Homolog of NCBI NO: 34913332 NR Description: putative pectin acetylesterase precursor [Oryza
  misc_feature (7)..(370): Homolog of NCBI NO: 34894654 NR Description: P0028G04.28 [Oryza sativa (japonica
MAPSVPMIPLTLIHGADSKGAVCLDGTLPGYHLDRGFGSGANSWLIQLEGGGWCNNHRSCVYRKTSRRGSSKFMEKALAFTGILSNRSEENPDFFNWNRIKLRYCDGASFSGDSQDESSQLFYRGQRIWQVAMEEFLSLGMKQANQALLSGCSAGGLASILHCDEFRELLPSSTKVKCLSDAGMFLDSVDVSGGHSLRNMFQGVVTVQNLQKDLSSTCTNHLDPTSCFFPQNLVSDIKTPMFLLNTAYDSWQIQESLAPPTADPGGIWKACKSDHSRCNSSQIQFFQEFRNQMLFAVNSFSNSDQNGLYINSCFAHCQTERQDTWFAQDSPQLNGKRVAESVGDWYFDRAKNVKAIDCPYPCDTTCHNLIFE

SEQ ID NO: 108175 - DNA, 1347 bp, Arabidopsis thaliana
  misc_feature (1)..(1347): Ceres Seq. ID no. 13653407
  misc_feature: MA Experiment ID: 20000307 Result: Down-regulated in Transcription
  misc_feature: MA Experiment 20000307 PARAMETER Experiment Name: At_Germinating_Seeds_Sub_P Parameter: Age (hr) Value: 24 vs. 0
  misc_feature: MA Experiment 20000307 PARAMETER Experiment Name: At_Germinating_Seeds_Sub_P Parameter: Organism Value: A. thaliana
  misc_feature: MA Experiment 20000307 PARAMETER Experiment Name: At_Germinating_Seeds_Sub_P Parameter: Plant Line Value: WS
  misc_feature: MA Experiment 20000307 PARAMETER Experiment Name: At_Germinating_Seeds_Sub_P Parameter: Tissue Value: Germinating Seeds
  misc_feature: MA Experiment ID: 20000329 Result: Up-regulated in Transcription
  misc_feature: MA Experiment 20000329 PARAMETER Experiment Name: At_4deg_Cold_Sub_P Parameter: Age (day) Value: 14
  misc_feature: MA Experiment 20000329 PARAMETER Experiment Name: At_4deg_Cold_Sub_P Parameter: Organism Value: A. thaliana
  misc_feature: MA Experiment 20000329 PARAMETER Experiment Name: At_4deg_Cold_Sub_P Parameter: Plant Line Value: WS
  misc_feature: MA Experiment 20000329 PARAMETER Experiment Name: At_4deg_Cold_Sub_P Parameter: Temperature (deg C) Value: 4 vs. 22
  misc_feature: MA Experiment 20000329 PARAMETER Experiment Name: At_4deg_Cold_Sub_P Parameter: Timepoint (hr) Value: 6
  misc_feature: MA Experiment 20000329 PARAMETER Experiment Name: At_4deg_Cold_Sub_P Parameter: Tissue Value: Aerial
tcaatgaaacattaatatctctactcatatcgccgacttaaagaatgtctcacagaaagtttgagcatccaagacatggttctttgggtttccttccaaggaaaagagctagccgacaccgtgggaaagtgaaggccttccctaaggatgatccaactaagccttgcagactcacctccttcttgggatacaaagctgggatgactcacattgtgagagatgttgaaaaacctggatcaaaactacacaagaaggaaacatgtgaagctgtgacgatcattgagacacctccaatggtggttgtaggtgtggttggttatgtaaagacacctcgtggtctgcggtctctatgcactgtgtgggctcagcatctgagcgaagaattgagaaggaggttctacaagaactgggccaagtcaaagaagaaggctttcactagatattctaagaaacatgaaactgaagaagggaaaaaagatattcaaagtcaattggagaagatgaagaagtactgctctgtcatcagagttcttgctcacactcagataaggaaaatgaaagggctgaagcagaagaaggcacatctgaatgagattcagatcaatggtggagatatagcaaagaaagttgactatgcctgcagtttatttgaaaaacaagtcccagttgatgccatcttccagaaagatgaaatgattgatatcattggtgtcaccaaaggaaaaggttatgaaggtgtggttacaagatggggagtgacccgacttccaagaaagactcatcgtggtcttcgcaaggttgcttgtatcggtgcttggcatccagctagagtctcctacacggtggctagagctggacaaaacggttaccatcaccgtactgaaatgaacaagaaggtataccgggttgggaaagttggccaggagactcactcagccatgaccgagtatgacagaaccgagaaggatatcacaccaatgggaggatttccccactatgggatagtgaaggaagattatttgatgatcaagggatgttgcgtggggcctaagaaacgtgtggtgactttaagacagactttgcttaagcagacgtctaggcttgctatggaggagatcaagcttaagttcattgacgctgcttccaatgggggacacggtcgtttccagacttctcaagagaaggccaagttctatggtagaaccatcaaagcttagatttctaagtattttgttgttttttgagtttctttctttggtgtttgtcggatttttcttgacagttgatatcaactatcttctcttttttttcttctggatattatcaaagtttctttggtttaagatt

SEQ ID NO: 108176 - protein, 390 aa, Arabidopsis thaliana; identical to SEQ ID NO: 23529
  peptide (1)..(390): Ceres Seq. ID no. 13653408
  misc_feature (50)..(343): Pfam Name: Ribosomal protein L3 Pfam Description: Ribosomal protein L3
  misc_feature (1)..(390): Homolog of NCBI NO: 15220533 NR Description: 60S ribosomal protein L3 (RPL3B) [Arabidopsis
  misc_feature (1)..(390): Homolog of NCBI NO: 81658 NR Description: ribosomal protein L3.e (clone ARP2), cytosolic -
  misc_feature (1)..(389): Homolog of NCBI NO: 15218306 NR Description: 60S ribosomal protein L3 (RPL3A) [Arabidopsis
  misc_feature (1)..(389): Homolog of NCBI NO: 23397228 NR Description: putative ribosomal protein [Arabidopsis thaliana]
  misc_feature (1)..(389): Homolog of NCBI NO: 81657 NR Description: ribosomal protein L3.e (clone ARP1), cytosolic -
  misc_feature (1)..(390): Homolog of NCBI NO: 548770 NR Description: 60S RIBOSOMAL PROTEIN L3 >gi|481228|pir||S38359
  misc_feature (1)..(390): Homolog of NCBI NO: 33526877 NR Description: ribosomal protein L3 [Triticum aestivum]
  misc_feature (1)..(390): Homolog of NCBI NO: 33526886 NR Description: ribosomal protein L3 [Triticum aestivum]
  misc_feature (1)..(384): Homolog of NCBI NO: 6688812 NR Description: L3 Ribosomal protein [Medicago sativa subsp. x
  misc_feature (1)..(390): Homolog of NCBI NO: 4506649 NR Description: ribosomal protein L3; 60S ribosomal protein L3;

SEQ ID NO: 108177 - protein, 338 aa, Arabidopsis thaliana; identical to SEQ ID NO: 23530
  peptide (1)..(338): Ceres Seq. ID no. 13653409
  misc_feature (1)..(291): Pfam Name: Ribosomal protein L3 Pfam Description: Ribosomal protein L3
  misc_feature (1)..(338): Homolog of NCBI NO: 15220533 NR Description: 60S ribosomal protein L3 (RPL3B) [Arabidopsis
  misc_feature (1)..(338): Homolog of NCBI NO: 81658 NR Description: ribosomal protein L3.e (clone ARP2), cytosolic -
  misc_feature (1)..(337): Homolog of NCBI NO: 15218306 NR Description: 60S ribosomal protein L3 (RPL3A) [Arabidopsis
  misc_feature (1)..(337): Homolog of NCBI NO: 23397228 NR Description: putative ribosomal protein [Arabidopsis thaliana]
  misc_feature (1)..(337): Homolog of NCBI NO: 81657 NR Description: ribosomal protein L3.e (clone ARP1), cytosolic -
  misc_feature (1)..(338): Homolog of NCBI NO: 548770 NR Description: 60S RIBOSOMAL PROTEIN L3 >gi|481228|pir||S38359
  misc_feature (1)..(338): Homolog of NCBI NO: 33526877 NR Description: ribosomal protein L3 [Triticum aestivum]
  misc_feature (1)..(338): Homolog of NCBI NO: 33526886 NR Description: ribosomal protein L3 [Triticum aestivum]
  misc_feature (1)..(332): Homolog of NCBI NO: 6688812 NR Description: L3 Ribosomal protein [Medicago sativa subsp. x
  misc_feature (1)..(338): Homolog of NCBI NO: 4506649 NR Description: ribosomal protein L3; 60S ribosomal protein L3;

SEQ ID NO: 108178 - protein, 307 aa, Arabidopsis thaliana; identical to SEQ ID NO: 85900
  peptide (1)..(307): Ceres Seq. ID no. 13653410
  misc_feature (1)..(260): Pfam Name: Ribosomal protein L3 Pfam Description: Ribosomal protein L3
  misc_feature (1)..(307): Homolog of NCBI NO: 15220533 NR Description: 60S ribosomal protein L3 (RPL3B) [Arabidopsis
  misc_feature (1)..(307): Homolog of NCBI NO: 81658 NR Description: ribosomal protein L3.e (clone ARP2), cytosolic -
  misc_feature (1)..(306): Homolog of NCBI NO: 15218306 NR Description: 60S ribosomal protein L3 (RPL3A) [Arabidopsis
  misc_feature (1)..(306): Homolog of NCBI NO: 23397228 NR Description: putative ribosomal protein [Arabidopsis thaliana]
  misc_feature (1)..(306): Homolog of NCBI NO: 81657 NR Description: ribosomal protein L3.e (clone ARP1), cytosolic -
  misc_feature (1)..(307): Homolog of NCBI NO: 548770 NR Description: 60S RIBOSOMAL PROTEIN L3 >gi|481228|pir||S38359
  misc_feature (1)..(307): Homolog of NCBI NO: 33526877 NR Description: ribosomal protein L3 [Triticum aestivum]
  misc_feature (1)..(307): Homolog of NCBI NO: 33526886 NR Description: ribosomal protein L3 [Triticum aestivum]
  misc_feature (1)..(301): Homolog of NCBI NO: 6688812 NR Description: L3 Ribosomal protein [Medicago sativa subsp. x
  misc_feature (1)..(307): Homolog of NCBI NO: 4506649 NR Description: ribosomal protein L3; 60S ribosomal protein L3;

SEQ ID NO: 108179 - DNA, 1240 bp, Arabidopsis thaliana
  misc_feature (1)..(1240): Ceres Seq. ID no. 13653414
  misc_feature: MA Experiment ID: 20000180 Result: Up-regulated in Transcription
  misc_feature: MA Experiment 20000180 PARAMETER Experiment Name: At_Germinating_Seeds_P Parameter: Age (hr) Value: 24 vs. 0
  misc_feature: MA Experiment 20000180 PARAMETER Experiment Name: At_Germinating_Seeds_P Parameter: Tissue Value: Germinating Seeds
  misc_feature: MA Experiment ID: 20000182 Result: Up-regulated in Transcription
  misc_feature: MA Experiment 20000182 PARAMETER Experiment Name: At_2mM_SA_P Parameter: Age (day) Value: 14
  misc_feature: MA Experiment 20000182 PARAMETER Experiment Name: At_2mM_SA_P Parameter: Organism Value: A. thaliana
  misc_feature: MA Experiment 20000182 PARAMETER Experiment Name: At_2mM_SA_P Parameter: Plant Line Value: WS
  misc_feature: MA Experiment 20000182 PARAMETER Experiment Name: At_2mM_SA_P Parameter: Timepoint (hr) Value: 6
  misc_feature: MA Experiment 20000182 PARAMETER Experiment Name: At_2mM_SA_P Parameter: Tissue Value: Aerial
  misc_feature: MA Experiment 20000182 PARAMETER Experiment Name: At_2mM_SA_P Parameter: Treatment Value: 2mM SA vs. No Treatment
  misc_feature: MA Experiment ID: 20000184 Result: Down-regulated in Transcription
  misc_feature: MA Experiment 20000184 PARAMETER Experiment Name: At_Shoots__P Parameter: Age (day) Value: 7
  misc_feature: MA Experiment 20000184 PARAMETER Experiment Name: At_Shoots__P Parameter: Tissue Value: Shoots vs. Whole Plant
  misc_feature: MA Experiment ID: 20000185 Result: Down-regulated in Transcription
  misc_feature: MA Experiment 20000185 PARAMETER Experiment Name: At_Roots__P Parameter: Age (day) Value: 7 vs. 21
  misc_feature: MA Experiment 20000185 PARAMETER Experiment Name: At_Roots__P Parameter: Organism Value: A. thaliana
  misc_feature: MA Experiment 20000185 PARAMETER Experiment Name: At_Roots__P Parameter: Tissue Value: Roots vs. Whole Plant
  misc_feature: MA Experiment ID: 20000234 Result: Down-regulated in Transcription
  misc_feature: MA Experiment 20000234 PARAMETER Experiment Name: At_Siliques_P Parameter: Age (day) Value: 21
  misc_feature: MA Experiment 20000234 PARAMETER Experiment Name: At_Siliques_P Parameter: Organism Value: A. thaliana
  misc_feature: MA Experiment 20000234 PARAMETER Experiment Name: At_Siliques_P Parameter: Plant Line Value: WS
  misc_feature: MA Experiment 20000234 PARAMETER Experiment Name: At_Siliques_P Parameter: Tissue Value: Less Than 5mm Siliques vs. Whole Plant
  misc_feature: MA Experiment ID: 20000235 Result: Down-regulated in Transcription
  misc_feature: MA Experiment 20000235 PARAMETER Experiment Name: At_Siliques_P Parameter: Age (day) Value: 21
  misc_feature: MA Experiment 20000235 PARAMETER Experiment Name: At_Siliques_P Parameter: Organism Value: A. thaliana
  misc_feature: MA Experiment 20000235 PARAMETER Experiment Name: At_Siliques_P Parameter: Plant Line Value: WS
  misc_feature: MA Experiment 20000235 PARAMETER Experiment Name: At_Siliques_P Parameter: Tissue Value: 5-10mm Siliques vs. Whole Plant
  misc_feature: MA Experiment ID: 20000264 Result: Down-regulated in Transcription
  misc_feature: MA Experiment 20000264 PARAMETER Experiment Name: At_Open_Flower_P Parameter: Age (day) Value: 21
  misc_feature: MA Experiment 20000264 PARAMETER Experiment Name: At_Open_Flower_P Parameter: Plant Line Value: WS
  misc_feature: MA Experiment 20000264 PARAMETER Experiment Name: At_Open_Flower_P Parameter: Tissue Value: Open Flower vs. Whole Plant
  misc_feature: MA Experiment ID: 20000265 Result: Down-regulated in Transcription
  misc_feature: MA Experiment 20000265 PARAMETER Experiment Name: At_Open_Flower_P Parameter: Age (day) Value: 21
  misc_feature: MA Experiment 20000265 PARAMETER Experiment Name: At_Open_Flower_P Parameter: Plant Line Value: WS
  misc_feature: MA Experiment 20000265 PARAMETER Experiment Name: At_Open_Flower_P Parameter: Tissue Value: Closed Flower vs. Whole Plant
  misc_feature: MA Experiment ID: 20000267 Result: Up-regulated in Transcription
  misc_feature: MA Experiment 20000267 PARAMETER Experiment Name: At_Drought_P Parameter: Age (day) Value: 7
  misc_feature: MA Experiment 20000267 PARAMETER Experiment Name: At_Drought_P Parameter: Organism Value: A. thaliana
  misc_feature: MA Experiment 20000267 PARAMETER Experiment Name: At_Drought_P Parameter: Plant Line Value: WS
  misc_feature: MA Experiment 20000267 PARAMETER Experiment Name: At_Drought_P Parameter: Timepoint (hr) Value: 6
  misc_feature: MA Experiment 20000267 PARAMETER Experiment Name: At_Drought_P Parameter: Tissue Value: Whole Plant
  misc_feature: MA Experiment 20000267 PARAMETER Experiment Name: At_Drought_P Parameter: Treatment Value: Drought vs. No Drought
  misc_feature: MA Experiment ID: 20000286 Result: Down-regulated in Transcription
  misc_feature: MA Experiment 20000286 PARAMETER Experiment Name: At_Open_Flower_P Parameter: Age (day) Value: 21
  misc_feature: MA Experiment 20000286 PARAMETER Experiment Name: At_Open_Flower_P Parameter: Plant Line Value: WS
  misc_feature: MA Experiment 20000286 PARAMETER Experiment Name: At_Open_Flower_P Parameter: Tissue Value: Half Open vs. Whole Plant
  misc_feature: MA Experiment ID: 20000436 Result: Up-regulated in Transcription
  misc_feature: MA Experiment 20000436 PARAMETER Experiment Name: At_Drought_P Parameter: Age (day) Value: 7
  misc_feature: MA Experiment 20000436 PARAMETER Experiment Name: At_Drought_P Parameter: Organism Value: A. thaliana
  misc_feature: MA Experiment 20000436 PARAMETER Experiment Name: At_Drought_P Parameter: Plant Line Value: WS
  misc_feature: MA Experiment 20000436 PARAMETER Experiment Name: At_Drought_P Parameter: Timepoint (hr) Value: 12
  misc_feature: MA Experiment 20000436 PARAMETER Experiment Name: At_Drought_P Parameter: Tissue Value: Whole Plant
  misc_feature: MA Experiment 20000436 PARAMETER Experiment Name: At_Drought_P Parameter: Treatment Value: Drought vs. No Drought
  misc_feature: MA Experiment ID: 20000437 Result: Up-regulated in Transcription
  misc_feature: MA Experiment 20000437 PARAMETER Experiment Name: At_Drought_P Parameter: Age (day) Value: 8
  misc_feature: MA Experiment 20000437 PARAMETER Experiment Name: At_Drought_P Parameter: Organism Value: A. thaliana
  misc_feature: MA Experiment 20000437 PARAMETER Experiment Name: At_Drought_P Parameter: Plant Line Value: WS
  misc_feature: MA Experiment 20000437 PARAMETER Experiment Name: At_Drought_P Parameter: Timepoint (hr) Value: 24
  misc_feature: MA Experiment 20000437 PARAMETER Experiment Name: At_Drought_P Parameter: Tissue Value: Whole Plant
  misc_feature: MA Experiment 20000437 PARAMETER Experiment Name: At_Drought_P Parameter: Treatment Value: Drought vs. No Drought
  misc_feature: MA Experiment ID: 20000438 Result: Down-regulated in Transcription
  misc_feature: MA Experiment 20000438 PARAMETER Experiment Name: At_Shoots__P Parameter: Age (day) Value: 14
  misc_feature: MA Experiment 20000438 PARAMETER Experiment Name: At_Shoots__P Parameter: Tissue Value: Shoots vs. Whole Plant
  misc_feature: MA Experiment ID: 20000439 Result: Down-regulated in Transcription
  misc_feature: MA Experiment 20000439 PARAMETER Experiment Name: At_Roots__P Parameter: Age (day) Value: 14 vs. 21
  misc_feature: MA Experiment 20000439 PARAMETER Experiment Name: At_Roots__P Parameter: Organism Value: A. thaliana
  misc_feature: MA Experiment 20000439 PARAMETER Experiment Name: At_Roots__P Parameter: Tissue Value: Roots vs. Whole Plant
  misc_feature: MA Experiment ID: 20000453 Result: Up-regulated in Transcription
  misc_feature: MA Experiment 20000453 PARAMETER Experiment Name: At_100uM_ABA_P Parameter: Age (day) Value: 15
  misc_feature: MA Experiment 20000453 PARAMETER Experiment Name: At_100uM_ABA_P Parameter: Organism Value: A. thaliana
  misc_feature: MA Experiment 20000453 PARAMETER Experiment Name: At_100uM_ABA_P Parameter: Plant Line Value: WS
  misc_feature: MA Experiment 20000453 PARAMETER Experiment Name: At_100uM_ABA_P Parameter: Timepoint (hr) Value: 24
  misc_feature: MA Experiment 20000453 PARAMETER Experiment Name: At_100uM_ABA_P Parameter: Tissue Value: Aerial
  misc_feature: MA Experiment 20000453 PARAMETER Experiment Name: At_100uM_ABA_P Parameter: Treatment Value: 100uM ABA vs. No Treatment
  misc_feature: MA Experiment ID: 20000460 Result: Up-regulated in Transcription
  misc_feature: MA Experiment 20000460 PARAMETER Experiment Name: At_10percent_PEG_P Parameter: Age (day) Value: 12
  misc_feature: MA Experiment 20000460 PARAMETER Experiment Name: At_10percent_PEG_P Parameter: Organism Value: A. thaliana
  misc_feature: MA Experiment 20000460 PARAMETER Experiment Name: At_10percent_PEG_P Parameter: Plant Line Value: WS
  misc_feature: MA Experiment 20000460 PARAMETER Experiment Name: At_10percent_PEG_P Parameter: Timepoint (day) Value: 12
  misc_feature: MA Experiment 20000460 PARAMETER Experiment Name: At_10percent_PEG_P Parameter: Tissue Value: Whole Plant
  misc_feature: MA Experiment 20000460 PARAMETER Experiment Name: At_10percent_PEG_P Parameter: Treatment Value: 10percent PEG vs. No Treatment
  misc_feature: MA Experiment ID: 20000495 Result: Down-regulated in Transcription
  misc_feature: MA Experiment 20000495 PARAMETER Experiment Name: At_Guard_Cells_P Parameter: Harvest Date Value: 8/2/2002
  misc_feature: MA Experiment 20000495 PARAMETER Experiment Name: At_Guard_Cells_P Parameter: Organism Value: A. thaliana
  misc_feature: MA Experiment 20000495 PARAMETER Experiment Name: At_Guard_Cells_P Parameter: Tissue Value: Guard Cells vs. Leaves
  misc_feature: MA Experiment ID: 20000527 Result: Up-regulated in Transcription
  misc_feature: MA Experiment 20000527 PARAMETER Experiment Name: At_10percent_PEG_P Parameter: Age (day) Value: 20
  misc_feature: MA Experiment 20000527 PARAMETER Experiment Name: At_10percent_PEG_P Parameter: Organism Value: A. thaliana
  misc_feature: MA Experiment 20000527 PARAMETER Experiment Name: At_10percent_PEG_P Parameter: Plant Line Value: WS
  misc_feature: MA Experiment 20000527 PARAMETER Experiment Name: At_10percent_PEG_P Parameter: Timepoint (day) Value: 20
  misc_feature: MA Experiment 20000527 PARAMETER Experiment Name: At_10percent_PEG_P Parameter: Tissue Value: Whole Plant
  misc_feature: MA Experiment 20000527 PARAMETER Experiment Name: At_10percent_PEG_P Parameter: Treatment Value: 10percent PEG vs. No Treatment
  misc_feature: MA Experiment ID: 20000709 Result: Up-regulated in Transcription
  misc_feature: MA Experiment 20000709 PARAMETER Experiment Name: At_15mM_NH4NO3_L-to-H_P Parameter: Age (hr) Value: 14
  misc_feature: MA Experiment 20000709 PARAMETER Experiment Name: At_15mM_NH4NO3_L-to-H_P Parameter: Organism Value: A. thaliana
  misc_feature: MA Experiment 20000709 PARAMETER Experiment Name: At_15mM_NH4NO3_L-to-H_P Parameter: Plant Line Value: WS
  misc_feature: MA Experiment 20000709 PARAMETER Experiment Name: At_15mM_NH4NO3_L-to-H_P Parameter: Timepoint (hr) Value: 4
  misc_feature: MA Experiment 20000709 PARAMETER Experiment Name: At_15mM_NH4NO3_L-to-H_P Parameter: Tissue Value: Aerial
  misc_feature: MA Experiment 20000709 PARAMETER Experiment Name: At_15mM_NH4NO3_L-to-H_P Parameter: Treatment Value: 15mM NH4NO3 vs. 30mM Mannitol
  misc_feature: MA Experiment ID: 20000794 Result: Down-regulated in Transcription
  misc_feature: MA Experiment 20000794 PARAMETER Experiment Name: At_Petals_P Parameter: Age (day) Value: 23-25 days
  misc_feature: MA Experiment 20000794 PARAMETER Experiment Name: At_Petals_P Parameter: Plant Line Value: WS
  misc_feature: MA Experiment 20000794 PARAMETER Experiment Name: At_Petals_P Parameter: Tissue Value: Petals vs. Whole plant
  misc_feature: MA Experiment ID: 20001557 Result: Up-regulated in Transcription
  misc_feature: MA Experiment 20001557 PARAMETER Experiment Name: At_Drought_Soil_Dry_P Parameter: Age (day) Value: 27
  misc_feature: MA Experiment 20001557 PARAMETER Experiment Name: At_Drought_Soil_Dry_P Parameter: Organism Value: A. thaliana
  misc_feature: MA Experiment 20001557 PARAMETER Experiment Name: At_Drought_Soil_Dry_P Parameter: Plant Line Value: WS
  misc_feature: MA Experiment 20001557 PARAMETER Experiment Name: At_Drought_Soil_Dry_P Parameter: Post Timepoint (hr) Value: 3
  misc_feature: MA Experiment 20001557 PARAMETER Experiment Name: At_Drought_Soil_Dry_P Parameter: Post-Treatment Value: Re-Water vs. No Drought
  misc_feature: MA Experiment 20001557 PARAMETER Experiment Name: At_Drought_Soil_Dry_P Parameter: Timepoint (day) Value: 13
  misc_feature: MA Experiment 20001557 PARAMETER Experiment Name: At_Drought_Soil_Dry_P Parameter: Treatment Value: Drought vs. No Drought
  misc_feature: MA Experiment ID: 20001558 Result: Up-regulated in Transcription
  misc_feature: MA Experiment 20001558 PARAMETER Experiment Name: At_Drought_Soil_Dry_P Parameter: Age (day) Value: 27
  misc_feature: MA Experiment 20001558 PARAMETER Experiment Name: At_Drought_Soil_Dry_P Parameter: Organism Value: A. thaliana
  misc_feature: MA Experiment 20001558 PARAMETER Experiment Name: At_Drought_Soil_Dry_P Parameter: Plant Line Value: WS
  misc_feature: MA Experiment 20001558 PARAMETER Experiment Name: At_Drought_Soil_Dry_P Parameter: Post Timepoint (hr) Value: 6
  misc_feature: MA Experiment 20001558 PARAMETER Experiment Name: At_Drought_Soil_Dry_P Parameter: Post-Treatment Value: Re-Water vs. No Drought
  misc_feature: MA Experiment 20001558 PARAMETER Experiment Name: At_Drought_Soil_Dry_P Parameter: Timepoint (day) Value: 13
  misc_feature: MA Experiment 20001558 PARAMETER Experiment Name: At_Drought_Soil_Dry_P Parameter: Treatment Value: Drought vs. No Drought
  misc_feature: MA Experiment ID: 20001759 Result: Down-regulated in Transcription
  misc_feature: MA Experiment 20001759 PARAMETER Experiment Name: At_50mM_NH4NO3_L-to-H_P Parameter: Timepoint (hr) Value: 1
  misc_feature: MA Experiment 20001759 PARAMETER Experiment Name: At_50mM_NH4NO3_L-to-H_P Parameter: Tissue Value: Siliques
  misc_feature: MA Experiment 20001759 PARAMETER Experiment Name: At_50mM_NH4NO3_L-to-H_P Parameter: Treatment Value: 50mM NH4NO3 vs 100mM Mannitol
  misc_feature: MA Experiment ID: 20001761 Result: Down-regulated in Transcription
  misc_feature: MA Experiment 20001761 PARAMETER Experiment Name: At_50mM_NH4NO3_L-to-H_P Parameter: Timepoint (hr) Value: 4
  misc_feature: MA Experiment 20001761 PARAMETER Experiment Name: At_50mM_NH4NO3_L-to-H_P Parameter: Tissue Value: Siliques
  misc_feature: MA Experiment 20001761 PARAMETER Experiment Name: At_50mM_NH4NO3_L-to-H_P Parameter: Treatment Value: 50mM NH4NO3 vs 100mM Mannitol
  misc_feature: MA Experiment ID: 20001904 Result: Up-regulated in Transcription
  misc_feature: MA Experiment 20001904 PARAMETER Experiment Name: At_Drought_Reproduction_P Parameter: Age (day) Value: 37
  misc_feature: MA Experiment 20001904 PARAMETER Experiment Name: At_Drought_Reproduction_P Parameter: Organism Value: A. thaliana
  misc_feature: MA Experiment 20001904 PARAMETER Experiment Name: At_Drought_Reproduction_P Parameter: Plant Line Value: WS
  misc_feature: MA Experiment 20001904 PARAMETER Experiment Name: At_Drought_Reproduction_P Parameter: Timepoint (day) Value: 7
  misc_feature: MA Experiment 20001904 PARAMETER Experiment Name: At_Drought_Reproduction_P Parameter: Tissue Value: Rosettes
  misc_feature: MA Experiment 20001904 PARAMETER Experiment Name: At_Drought_Reproduction_P Parameter: Treatment Value: Drought vs. No Drought
  misc_feature: MA Experiment ID: 20001905 Result: Up-regulated in Transcription
  misc_feature: MA Experiment 20001905 PARAMETER Experiment Name: At_Drought_Reproduction_P Parameter: Age (day) Value: 40
  misc_feature: MA Experiment 20001905 PARAMETER Experiment Name: At_Drought_Reproduction_P Parameter: Organism Value: A. thaliana
  misc_feature: MA Experiment 20001905 PARAMETER Experiment Name: At_Drought_Reproduction_P Parameter: Plant Line Value: WS
  misc_feature: MA Experiment 20001905 PARAMETER Experiment Name: At_Drought_Reproduction_P Parameter: Timepoint (day) Value: 10
  misc_feature: MA Experiment 20001905 PARAMETER Experiment Name: At_Drought_Reproduction_P Parameter: Tissue Value: Rosettes
  misc_feature: MA Experiment 20001905 PARAMETER Experiment Name: At_Drought_Reproduction_P Parameter: Treatment Value: Drought vs. No Drought
  misc_feature: MA Experiment ID: 20001906 Result: Up-regulated in Transcription
  misc_feature: MA Experiment 20001906 PARAMETER Experiment Name: At_Drought_Reproduction_P Parameter: Age (day) Value: 35
  misc_feature: MA Experiment 20001906 PARAMETER Experiment Name: At_Drought_Reproduction_P Parameter: Organism Value: A. thaliana
  misc_feature: MA Experiment 20001906 PARAMETER Experiment Name: At_Drought_Reproduction_P Parameter: Plant Line Value: WS
  misc_feature: MA Experiment 20001906 PARAMETER Experiment Name: At_Drought_Reproduction_P Parameter: Timepoint (day) Value: 5
  misc_feature: MA Experiment 20001906 PARAMETER Experiment Name: At_Drought_Reproduction_P Parameter: Tissue Value: Siliques
  misc_feature: MA Experiment 20001906 PARAMETER Experiment Name: At_Drought_Reproduction_P Parameter: Treatment Value: Drought vs. No Drought
  misc_feature: MA Experiment ID: 20001910 Result: Up-regulated in Transcription
  misc_feature: MA Experiment 20001910 PARAMETER Experiment Name: At_Drought_Reproduction_P Parameter: Age (day) Value: 37
  misc_feature: MA Experiment 20001910 PARAMETER Experiment Name: At_Drought_Reproduction_P Parameter: Organism Value: A. thaliana
  misc_feature: MA Experiment 20001910 PARAMETER Experiment Name: At_Drought_Reproduction_P Parameter: Plant Line Value: WS
  misc_feature: MA Experiment 20001910 PARAMETER Experiment Name: At_Drought_Reproduction_P Parameter: Timepoint (day) Value: 7
  misc_feature: MA Experiment 20001910 PARAMETER Experiment Name: At_Drought_Reproduction_P Parameter: Tissue Value: Flowers
  misc_feature: MA Experiment 20001910 PARAMETER Experiment Name: At_Drought_Reproduction_P Parameter: Treatment Value: Drought vs. No Drought
  misc_feature: MA Experiment ID: 20001911 Result: Up-regulated in Transcription
  misc_feature: MA Experiment 20001911 PARAMETER Experiment Name: At_Drought_Reproduction_P Parameter: Age (day) Value: 40
  misc_feature: MA Experiment 20001911 PARAMETER Experiment Name: At_Drought_Reproduction_P Parameter: Organism Value: A. thaliana
  misc_feature: MA Experiment 20001911 PARAMETER Experiment Name: At_Drought_Reproduction_P Parameter: Plant Line Value: WS
  misc_feature: MA Experiment 20001911 PARAMETER Experiment Name: At_Drought_Reproduction_P Parameter: Timepoint (day) Value: 10
  misc_feature: MA Experiment 20001911 PARAMETER Experiment Name: At_Drought_Reproduction_P Parameter: Tissue Value: Flowers
  misc_feature: MA Experiment 20001911 PARAMETER Experiment Name: At_Drought_Reproduction_P Parameter: Treatment Value: Drought vs. No Drought
  misc_feature: Pfam Name: DUF677 Pfam Description: Protein of unknown function (DUF677)
actaaacccatctcctatttatactttcttttgggtttttttctctccttcattgaagtagcgtaacattgaagtaagcggtaacatttcggaagaatctctttctttagttgatatgagccaacaacgtacacgctctcggaacccgttcaagattctgtttacgaagaagaacaatgctcgattatcgccaaagcttctctcactgttgaacaatttcgagactaacttgacggtatcgattagagaacttgtaccaaaggataagaatgatatcgttagtgtttcttggatgatacaagccatgcagtctctttgtgagacacacaagagtatcaggacgctcgtgaaggatttagaggttccagtatcggatttggaggaggatttcatttatatcttctctgactttagcttgaagcgggaactctgcaacgcctttacctcagagatatatcatttggaacatggcaatctattactaaagtttgcttttagtaagctggagacaaacagtggcaatattcttcagcgttggaatcagcacatggtttccaagaacccgagtatcgaaaactggggcgcggttttgagtaggctggttgaatcgatggatcatcatcatcatatctccaagaaggggaagaagaaatactctgcggaaggaaaagttctcttacgagttttatacggtgtaaaggtcaagactttatacatattcagcgtgtttgatgcatcgttctcgggttcttccaagaatctcttctatctaaccattccaaaggagatggaggagcttccatgggttcaagctttcatggaactgcagaacactattaacccggagatcaaaaacacatttttatcaggcggattcacggttataaaagatctcgaggctgttgaaaccggtgtgaagaagctttacacagcggtacaagaagggtcggttcctattttgttagtggaaccattggagaagtcagtgatagaactttcggaaaggtttgagctagtctccaaggaaacacgttgcttgtcgaagatggtgatctctgcccgagacgcattgttggagagcctgtggacgaaatgcgcagaagagctaggagtgacattgccaacgatggttaaaagtgttaatatagaggaaaagagctaagacttgtttgtgaatatagaggaaacatgtaattatggtatcgttgatgttaagtaataacaaatgcagataaaaatg

SEQ ID NO: 108180 - protein, 348 aa, Arabidopsis thaliana
  peptide (1)..(348): Ceres Seq. ID no. 13653415
  misc_feature: Pfam Name: DUF677 Pfam Description: Protein of unknown function (DUF677)
  misc_feature (1)..(348): Homolog of NCBI NO: 7485228 NR Description: hypothetical protein A_IG002N01.26 - Arabidopsis >gi|2191147|gb|AAB61034.1| A_IG002N01.26 gene product thaliana] >gi|7267633|emb|CAB80945.1| hypothetical protein
  misc_feature (1)..(348): Homolog of NCBI NO: 28392962 NR Description: unknown protein [Arabidopsis thaliana]
  misc_feature (1)..(348): Homolog of NCBI NO: 30678866 NR Description: expressed protein [Arabidopsis thaliana]
  misc_feature (10)..(343): Homolog of NCBI NO: 18378853 NR Description: expressed protein [Arabidopsis thaliana]
  misc_feature (10)..(323): Homolog of NCBI NO: 18406969 NR Description: expressed protein [Arabidopsis thaliana]
  misc_feature (10)..(323): Homolog of NCBI NO: 16604342 NR Description: At2g46080/T3F17.27 [Arabidopsis thaliana]
  misc_feature (10)..(271): Homolog of NCBI NO: 37536014 NR Description: unknown protein [Oryza sativa (japonica
  misc_feature (64)..(331): Homolog of NCBI NO: 15233126 NR Description: hypothetical protein [Arabidopsis thaliana]
MSQQRTRSRNPFKILFTKKNNARLSPKLLSLLNNFETNLTVSIRELVPKDKNDIVSVSWMIQAMQSLCETHKSIRTLVKDLEVPVSDLEEDFIYIFSDFSLKRELCNAFTSEIYHLEHGNLLLKFAFSKLETNSGNILQRWNQHMVSKNPSIENWGAVLSRLVESMDHHHHISKKGKKKYSAEGKVLLRVLYGVKVKTLYIFSVFDASFSGSSKNLFYLTIPKEMEELPWVQAFMELQNTINPEIKNTFLSGGFTVIKDLEAVETGVKKLYTAVQEGSVPILLVEPLEKSVIELSERFELVSKETRCLSKMVISARDALLESLWTKCAEELGVTLPTMVKSVNIEEKS

SEQ ID NO: 108181 - protein, 289 aa, Arabidopsis thaliana
  peptide (1)..(289): Ceres Seq. ID no. 13653416
  misc_feature: Pfam Name: DUF677 Pfam Description: Protein of unknown function (DUF677)
  misc_feature (1)..(289): Homolog of NCBI NO: 7485228 NR Description: hypothetical protein A_IG002N01.26 - Arabidopsis >gi|2191147|gb|AAB61034.1| A_IG002N01.26 gene product thaliana] >gi|7267633|emb|CAB80945.1| hypothetical protein
  misc_feature (1)..(289): Homolog of NCBI NO: 28392962 NR Description: unknown protein [Arabidopsis thaliana]
  misc_feature (1)..(289): Homolog of NCBI NO: 30678866 NR Description: expressed protein [Arabidopsis thaliana]
  misc_feature (1)..(284): Homolog of NCBI NO: 18378853 NR Description: expressed protein [Arabidopsis thaliana]
  misc_feature (1)..(264): Homolog of NCBI NO: 18406969 NR Description: expressed protein [Arabidopsis thaliana]
  misc_feature (1)..(264): Homolog of NCBI NO: 16604342 NR Description: At2g46080/T3F17.27 [Arabidopsis thaliana]
  misc_feature (1)..(212): Homolog of NCBI NO: 37536014 NR Description: unknown protein [Oryza sativa (japonica
  misc_feature (5)..(272): Homolog of NCBI NO: 15233126 NR Description: hypothetical protein [Arabidopsis thaliana]
MIQAMQSLCETHKSIRTLVKDLEVPVSDLEEDFIYIFSDFSLKRELCNAFTSEIYHLEHGNLLLKFAFSKLETNSGNILQRWNQHMVSKNPSIENWGAVLSRLVESMDHHHHISKKGKKKYSAEGKVLLRVLYGVKVKTLYIFSVFDASFSGSSKNLFYLTIPKEMEELPWVQAFMELQNTINPEIKNTFLSGGFTVIKDLEAVETGVKKLYTAVQEGSVPILLVEPLEKSVIELSERFELVSKETRCLSKMVISARDALLESLWTKCAEELGVTLPTMVKSVNIEEKS

SEQ ID NO: 108182 - protein, 285 aa, Arabidopsis thaliana
  peptide (1)..(285): Ceres Seq. ID no. 13653417
  misc_feature: Pfam Name: DUF677 Pfam Description: Protein of unknown function (DUF677)
  misc_feature (1)..(285): Homolog of NCBI NO: 7485228 NR Description: hypothetical protein A_IG002N01.26 - Arabidopsis >gi|2191147|gb|AAB61034.1| A_IG002N01.26 gene product thaliana] >gi|7267633|emb|CAB80945.1| hypothetical protein
  misc_feature (1)..(285): Homolog of NCBI NO: 28392962 NR Description: unknown protein [Arabidopsis thaliana]
  misc_feature (1)..(285): Homolog of NCBI NO: 30678866 NR Description: expressed protein [Arabidopsis thaliana]
  misc_feature (1)..(280): Homolog of NCBI NO: 18378853 NR Description: expressed protein [Arabidopsis thaliana]
  misc_feature (1)..(260): Homolog of NCBI NO: 18406969 NR Description: expressed protein [Arabidopsis thaliana]
  misc_feature (1)..(260): Homolog of NCBI NO: 16604342 NR Description: At2g46080/T3F17.27 [Arabidopsis thaliana]
  misc_feature (1)..(208): Homolog of NCBI NO: 37536014 NR Description: unknown protein [Oryza sativa (japonica
  misc_feature (1)..(268): Homolog of NCBI NO: 15233126 NR Description: hypothetical protein [Arabidopsis thaliana]
MQSLCETHKSIRTLVKDLEVPVSDLEEDFIYIFSDFSLKRELCNAFTSEIYHLEHGNLLLKFAFSKLETNSGNILQRWNQHMVSKNPSIENWGAVLSRLVESMDHHHHISKKGKKKYSAEGKVLLRVLYGVKVKTLYIFSVFDASFSGSSKNLFYLTIPKEMEELPWVQAFMELQNTINPEIKNTFLSGGFTVIKDLEAVETGVKKLYTAVQEGSVPILLVEPLEKSVIELSERFELVSKETRCLSKMVISARDALLESLWTKCAEELGVTLPTMVKSVNIEEKS

SEQ ID NO: 108183 - DNA, 1393 bp, Arabidopsis thaliana
  misc_feature (1)..(1393): Ceres Seq. ID no. 13653422
  misc_feature: MA Experiment ID: 108577 Result: Down-regulated in Transcription
  misc_feature: MA Experiment 108577 PARAMETER Experiment Name: At_42deg_Heat_cDNA_P Parameter: Temperature (deg C) Value: 42 vs. 22
  misc_feature: MA Experiment 108577 PARAMETER Experiment Name: At_42deg_Heat_cDNA_P Parameter: Timepoint (hr) Value: 6
  misc_feature: MA Experiment 108577 PARAMETER Experiment Name: At_42deg_Heat_cDNA_P Parameter: Tissue Value: Aerial
  misc_feature: MA Experiment ID: 108595 Result: Down-regulated in Transcription
  misc_feature: MA Experiment 108595 PARAMETER Experiment Name: At_Ler-pi_Ovule_cDNA_P Parameter: Plant Line Value: null
  misc_feature: MA Experiment ID: 20000173 Result: Down-regulated in Transcription
  misc_feature: MA Experiment 20000173 PARAMETER Experiment Name: At_42deg_Heat_P Parameter: Age (day) Value: 14
  misc_feature: MA Experiment 20000173 PARAMETER Experiment Name: At_42deg_Heat_P Parameter: Organism Value: A. thaliana
  misc_feature: MA Experiment 20000173 PARAMETER Experiment Name: At_42deg_Heat_P Parameter: Plant Line Value: WS
  misc_feature: MA Experiment 20000173 PARAMETER Experiment Name: At_42deg_Heat_P Parameter: Temperature (deg C) Value: 42 vs. 22
  misc_feature: MA Experiment 20000173 PARAMETER Experiment Name: At_42deg_Heat_P Parameter: Timepoint (hr) Value: 6
  misc_feature: MA Experiment 20000173 PARAMETER Experiment Name: At_42deg_Heat_P Parameter: Tissue Value: Aerial
  misc_feature: MA Experiment ID: 20000179 Result: Up-regulated in Transcription
  misc_feature: MA Experiment 20000179 PARAMETER Experiment Name: At_Germinating_Seeds_P Parameter: Age (hr) Value: 6 vs. 0
  misc_feature: MA Experiment 20000179 PARAMETER Experiment Name: At_Germinating_Seeds_P Parameter: Tissue Value: Germinating Seeds
  misc_feature: MA Experiment ID: 20000180 Result: Up-regulated in Transcription
  misc_feature: MA Experiment 20000180 PARAMETER Experiment Name: At_Germinating_Seeds_P Parameter: Age (hr) Value: 24 vs. 0
  misc_feature: MA Experiment 20000180 PARAMETER Experiment Name: At_Germinating_Seeds_P Parameter: Tissue Value: Germinating Seeds
  misc_feature: MA Experiment ID: 20000185 Result: Down-regulated in Transcription
  misc_feature: MA Experiment 20000185 PARAMETER Experiment Name: At_Roots__P Parameter: Age (day) Value: 7 vs. 21
  misc_feature: MA Experiment 20000185 PARAMETER Experiment Name: At_Roots__P Parameter: Organism Value: A. thaliana
  misc_feature: MA Experiment 20000185 PARAMETER Experiment Name: At_Roots__P Parameter: Tissue Value: Roots vs. Whole Plant
  misc_feature: MA Experiment ID: 20000227 Result: Down-regulated in Transcription
  misc_feature: MA Experiment 20000227 PARAMETER Experiment Name: At_Root-Tips-vs-Tops_P Parameter: Tissue Value: Root Tips vs. Root Tops
  misc_feature: MA Experiment ID: 20000234 Result: Up-regulated in Transcription
  misc_feature: MA Experiment 20000234 PARAMETER Experiment Name: At_Siliques_P Parameter: Age (day) Value: 21
  misc_feature: MA Experiment 20000234 PARAMETER Experiment Name: At_Siliques_P Parameter: Organism Value: A. thaliana
  misc_feature: MA Experiment 20000234 PARAMETER Experiment Name: At_Siliques_P Parameter: Plant Line Value: WS
  misc_feature: MA Experiment 20000234 PARAMETER Experiment Name: At_Siliques_P Parameter: Tissue Value: Less Than 5mm Siliques vs. Whole Plant
  misc_feature: MA Experiment ID: 20000235 Result: Up-regulated in Transcription
  misc_feature: MA Experiment 20000235 PARAMETER Experiment Name: At_Siliques_P Parameter: Age (day) Value: 21
  misc_feature: MA Experiment 20000235 PARAMETER Experiment Name: At_Siliques_P Parameter: Organism Value: A. thaliana
  misc_feature: MA Experiment 20000235 PARAMETER Experiment Name: At_Siliques_P Parameter: Plant Line Value: WS
  misc_feature: MA Experiment 20000235 PARAMETER Experiment Name: At_Siliques_P Parameter: Tissue Value: 5-10mm Siliques vs. Whole Plant
  misc_feature: MA Experiment ID: 20000437 Result: Down-regulated in Transcription
  misc_feature: MA Experiment 20000437 PARAMETER Experiment Name: At_Drought_P Parameter: Age (day) Value: 8
  misc_feature: MA Experiment 20000437 PARAMETER Experiment Name: At_Drought_P Parameter: Organism Value: A. thaliana
  misc_feature: MA Experiment 20000437 PARAMETER Experiment Name: At_Drought_P Parameter: Plant Line Value: WS
  misc_feature: MA Experiment 20000437 PARAMETER Experiment Name: At_Drought_P Parameter: Timepoint (hr) Value: 24
  misc_feature: MA Experiment 20000437 PARAMETER Experiment Name: At_Drought_P Parameter: Tissue Value: Whole Plant
  misc_feature: MA Experiment 20000437 PARAMETER Experiment Name: At_Drought_P Parameter: Treatment Value: Drought vs. No Drought
  misc_feature: MA Experiment ID: 20000439 Result: Down-regulated in Transcription
  misc_feature: MA Experiment 20000439 PARAMETER Experiment Name: At_Roots__P Parameter: Age (day) Value: 14 vs. 21
  misc_feature: MA Experiment 20000439 PARAMETER Experiment Name: At_Roots__P Parameter: Organism Value: A. thaliana
  misc_feature: MA Experiment 20000439 PARAMETER Experiment Name: At_Roots__P Parameter: Tissue Value: Roots vs. Whole Plant
  misc_feature: MA Experiment ID: 20001248 Result: Down-regulated in Transcription
  misc_feature: MA Experiment 20001248 PARAMETER Experiment Name: At_Far-red-induction_P Parameter: Age (day) Value: 7
  misc_feature: MA Experiment 20001248 PARAMETER Experiment Name: At_Far-red-induction_P Parameter: Light Value: Far-red vs. White
  misc_feature: MA Experiment 20001248 PARAMETER Experiment Name: At_Far-red-induction_P Parameter: Organism Value: A. thaliana
  misc_feature: MA Experiment 20001248 PARAMETER Experiment Name: At_Far-red-induction_P Parameter: Plant Line Value: Columbia
  misc_feature: MA Experiment 20001248 PARAMETER Experiment Name: At_Far-red-induction_P Parameter: Timepoint (hr) Value: 4
  misc_feature: MA Experiment 20001248 PARAMETER Experiment Name: At_Far-red-induction_P Parameter: Tissue Value: Whole Plant
  misc_feature: MA Experiment ID: 20001450 Result: Down-regulated in Transcription
  misc_feature: MA Experiment 20001450 PARAMETER Experiment Name: At_Far-red-induction_P Parameter: Age (day) Value: 7
  misc_feature: MA Experiment 20001450 PARAMETER Experiment Name: At_Far-red-induction_P Parameter: Light Value: Far-red vs. White
  misc_feature: MA Experiment 20001450 PARAMETER Experiment Name: At_Far-red-induction_P Parameter: Organism Value: A. thaliana
  misc_feature: MA Experiment 20001450 PARAMETER Experiment Name: At_Far-red-induction_P Parameter: Plant Line Value: Columbia
  misc_feature: MA Experiment 20001450 PARAMETER Experiment Name: At_Far-red-induction_P Parameter: Timepoint (hr) Value: 8
  misc_feature: MA Experiment 20001450 PARAMETER Experiment Name: At_Far-red-induction_P Parameter: Tissue Value: Whole Plant
  misc_feature: MA Experiment ID: 20001757 Result: Up-regulated in Transcription
  misc_feature: MA Experiment 20001757 PARAMETER Experiment Name: At_50mM_NH4NO3_L-to-H_P Parameter: Timepoint (hr) Value: 6
  misc_feature: MA Experiment 20001757 PARAMETER Experiment Name: At_50mM_NH4NO3_L-to-H_P Parameter: Tissue Value: Leaf
  misc_feature: MA Experiment 20001757 PARAMETER Experiment Name: At_50mM_NH4NO3_L-to-H_P Parameter: Treatment Value: 50mM NH4NO3 vs 100mM Mannitol
  misc_feature: MA Experiment ID: 20001905 Result: Down-regulated in Transcription
  misc_feature: MA Experiment 20001905 PARAMETER Experiment Name: At_Drought_Reproduction_P Parameter: Age (day) Value: 40
  misc_feature: MA Experiment 20001905 PARAMETER Experiment Name: At_Drought_Reproduction_P Parameter: Organism Value: A. thaliana
  misc_feature: MA Experiment 20001905 PARAMETER Experiment Name: At_Drought_Reproduction_P Parameter: Plant Line Value: WS
  misc_feature: MA Experiment 20001905 PARAMETER Experiment Name: At_Drought_Reproduction_P Parameter: Timepoint (day) Value: 10
  misc_feature: MA Experiment 20001905 PARAMETER Experiment Name: At_Drought_Reproduction_P Parameter: Tissue Value: Rosettes
  misc_feature: MA Experiment 20001905 PARAMETER Experiment Name: At_Drought_Reproduction_P Parameter: Treatment Value: Drought vs. No Drought
  misc_feature: MA Experiment ID: 20001911 Result: Down-regulated in Transcription
  misc_feature: MA Experiment 20001911 PARAMETER Experiment Name: At_Drought_Reproduction_P Parameter: Age (day) Value: 40
  misc_feature: MA Experiment 20001911 PARAMETER Experiment Name: At_Drought_Reproduction_P Parameter: Organism Value: A. thaliana
  misc_feature: MA Experiment 20001911 PARAMETER Experiment Name: At_Drought_Reproduction_P Parameter: Plant Line Value: WS
  misc_feature: MA Experiment 20001911 PARAMETER Experiment Name: At_Drought_Reproduction_P Parameter: Timepoint (day) Value: 10
  misc_feature: MA Experiment 20001911 PARAMETER Experiment Name: At_Drought_Reproduction_P Parameter: Tissue Value: Flowers
  misc_feature: MA Experiment 20001911 PARAMETER Experiment Name: At_Drought_Reproduction_P Parameter: Treatment Value: Drought vs. No Drought
atcctttatacttctctggtttcagatttctaagagtcaatttgctgaatcatatatttttcttcagattttcccaagttagtttctgttagtaactctgggataagtttgaggattcagaatagtaaacctattagccctgtctttgctcttgaagcaacttcctccaggagggttgtttgcaaagctgctgctggtgtgtcaggtgacttacctgagagtactcctaaggaacttagtcagtatgagaagattattgagcttttgacaaccctttttccactttgggttattttgggaacacttgttggcatcttcaagccatccttggttacatggttggaaacagatctctttactctaggtcttggatttcttatgctttccatgggtttgactcttacgtttgaagatttcagaagatgtttacgtaatccatggacggtgggtgttggttttcttgctcaatatatgatcaagccaattctaggttttctcattgcaatgactcttaagctttcggcacctcttgcgactggccttatcctagtctcatgctgccctggaggacaggcgtcaaacgttgctacttacatttccaaggggaatgtagcgctctctgtactcatgacaacgtgttcaaccattggggctattataatgactcctcttcttactaagcttcttgctggtcagcttgttcccgttgacgctgctggacttgctcttagtacgttccaagtagtgttggttcctaccataattggagttctggcaaatgagttctttcctaaatttacgtctaagatcataacagtgacgcctctaatcggagtcattctgactactctgctctgtgccagccctattggacaagttgcagatgttttgaaaacccaaggagctcaacttatactcccggtggcactccttcatgctgcagcctttgctattggctattggatttcaaagttttctttcggcgagtccacttcgcgtaccatttctatagaatgtggaatgcaaagttcagcgctcgggttcttgcttgcacaaaagcatttcacaaaccctctagttgctgttccttctgcagtcagtgttgtctgtatggcgcttggcgggagcggcctggccgtgttctggagaaacctaccgattccggcagatgacaaggatgacttcaaagagtaaatgaagtaggaaaggcggtttgcatcttctccaaacgatgtgattgttttgttgtaatgttagtaaacattacaaaatttgtgttgaaaaacatgaaacaaaatgtgtttaagagacatagaaacaagggcgtgcatgatgacaactttgtggtcaaccttttttttatttctcaattaatggacaaatcttttttggc

SEQ ID NO: 108184 - protein, 271 aa, Arabidopsis thaliana; identical to SEQ ID NO: 22581
  peptide (1)..(271): Ceres Seq. ID no. 13653423
  misc_feature (1)..(171): Pfam Name: Sodium Bile acid symporter family Pfam Description: Sodium Bile acid symporter family
  misc_feature (1)..(271): Homolog of NCBI NO: 30683305 NR Description: bile acid:sodium symporter family [Arabidopsis
  misc_feature (1)..(271): Homolog of NCBI NO: 20269901 NR Description: putative sodium-dependent bile acid symporter
  misc_feature (1)..(271): Homolog of NCBI NO: 34911708 NR Description: P0707D10.18 [Oryza sativa (japonica
  misc_feature (1)..(247): Homolog of NCBI NO: 7485401 NR Description: hypothetical protein At2g26900 [imported] - thaliana >gi|3426051|gb|AAC32250.1| putative Na+ dependent ileal
  misc_feature (1)..(271): Homolog of NCBI NO: 28393076 NR Description: putative Na+ dependent ileal bile acid
  misc_feature (1)..(265): Homolog of NCBI NO: 18412023 NR Description: bile acid:sodium symporter family [Arabidopsis >gi|16648877|gb|AAL24290.1| Unknown protein [Arabidopsis
  misc_feature (1)..(259): Homolog of NCBI NO: 24217327 NR Description: conserved hypothetical protein [Leptospira serovar lai str. 56601] >gi|24202399|gb|AAN51825.1|AE011614_2 hypothetical protein [Leptospira interrogans serovar lai str.
  misc_feature (1)..(264): Homolog of NCBI NO: 38346633 NR Description: OSJNBa0072D21.3 [Oryza sativa (japonica
  misc_feature (1)..(257): Homolog of NCBI NO: 33865169 NR Description: Sodium/bile acid cotransporter family sp. WH 8102] >gi|33638853|emb|CAE07150.1| Sodium/bile acid
  misc_feature (1)..(257): Homolog of NCBI NO: 22298669 NR Description: ORF_ID:tll1126~probable sodium-dependent

SEQ ID NO: 108185 - protein, 268 aa, Arabidopsis thaliana; identical to SEQ ID NO: 22582
  peptide (1)..(268): Ceres Seq. ID no. 13653424
  misc_feature (1)..(168): Pfam Name: Sodium Bile acid symporter family Pfam Description: Sodium Bile acid symporter family
  misc_feature (1)..(268): Homolog of NCBI NO: 30683305 NR Description: bile acid:sodium symporter family [Arabidopsis
  misc_feature (1)..(268): Homolog of NCBI NO: 20269901 NR Description: putative sodium-dependent bile acid symporter
  misc_feature (1)..(268): Homolog of NCBI NO: 34911708 NR Description: P0707D10.18 [Oryza sativa (japonica
  misc_feature (1)..(244): Homolog of NCBI NO: 7485401 NR Description: hypothetical protein At2g26900 [imported] - thaliana >gi|3426051|gb|AAC32250.1| putative Na+ dependent ileal
  misc_feature (1)..(268): Homolog of NCBI NO: 28393076 NR Description: putative Na+ dependent ileal bile acid
  misc_feature (1)..(262): Homolog of NCBI NO: 18412023 NR Description: bile acid:sodium symporter family [Arabidopsis >gi|16648877|gb|AAL24290.1| Unknown protein [Arabidopsis
  misc_feature (1)..(256): Homolog of NCBI NO: 24217327 NR Description: conserved hypothetical protein [Leptospira serovar lai str. 56601] >gi|24202399|gb|AAN51825.1|AE011614_2 hypothetical protein [Leptospira interrogans serovar lai str.
  misc_feature (1)..(261): Homolog of NCBI NO: 38346633 NR Description: OSJNBa0072D21.3 [Oryza sativa (japonica
  misc_feature (1)..(254): Homolog of NCBI NO: 33865169 NR Description: Sodium/bile acid cotransporter family sp. WH 8102] >gi|33638853|emb|CAE07150.1| Sodium/bile acid
  misc_feature (1)..(254): Homolog of NCBI NO: 22298669 NR Description: ORF_ID:tll1126~probable sodium-dependent

SEQ ID NO: 108186 - protein, 240 aa, Arabidopsis thaliana
  peptide (1)..(240): Ceres Seq. ID no. 13653425
  misc_feature (1)..(140): Pfam Name: Sodium Bile acid symporter family Pfam Description: Sodium Bile acid symporter family
  misc_feature (1)..(240): Homolog of NCBI NO: 30683305 NR Description: bile acid:sodium symporter family [Arabidopsis
  misc_feature (1)..(240): Homolog of NCBI NO: 20269901 NR Description: putative sodium-dependent bile acid symporter
  misc_feature (1)..(240): Homolog of NCBI NO: 34911708 NR Description: P0707D10.18 [Oryza sativa (japonica
  misc_feature (1)..(216): Homolog of NCBI NO: 7485401 NR Description: hypothetical protein At2g26900 [imported] - thaliana >gi|3426051|gb|AAC32250.1| putative Na+ dependent ileal
  misc_feature (1)..(240): Homolog of NCBI NO: 28393076 NR Description: putative Na+ dependent ileal bile acid
  misc_feature (1)..(234): Homolog of NCBI NO: 18412023 NR Description: bile acid:sodium symporter family [Arabidopsis >gi|16648877|gb|AAL24290.1| Unknown protein [Arabidopsis
  misc_feature (1)..(228): Homolog of NCBI NO: 24217327 NR Description: conserved hypothetical protein [Leptospira serovar lai str. 56601] >gi|24202399|gb|AAN51825.1|AE011614_2 hypothetical protein [Leptospira interrogans serovar lai str.
  misc_feature (1)..(233): Homolog of NCBI NO: 38346633 NR Description: OSJNBa0072D21.3 [Oryza sativa (japonica
  misc_feature (1)..(226): Homolog of NCBI NO: 33865169 NR Description: Sodium/bile acid cotransporter family sp. WH 8102] >gi|33638853|emb|CAE07150.1| Sodium/bile acid
  misc_feature (1)..(226): Homolog of NCBI NO: 22298669 NR Description: ORF_ID:tll1126~probable sodium-dependent
MIKPILGFLIAMTLKLSAPLATGLILVSCCPGGQASNVATYISKGNVALSVLMTTCSTIGAIIMTPLLTKLLAGQLVPVDAAGLALSTFQVVLVPTIIGVLANEFFPKFTSKIITVTPLIGVILTTLLCASPIGQVADVLKTQGAQLILPVALLHAAAFAIGYWISKFSFGESTSRTISIECGMQSSALGFLLAQKHFTNPLVAVPSAVSVVCMALGGSGLAVFWRNLPIPADDKDDFKE

SEQ ID NO: 108187 - DNA, 1828 bp, Arabidopsis thaliana
  misc_feature (1)..(1828): Ceres Seq. ID no. 13653430
  misc_feature: MA Experiment ID: 20000180 Result: Up-regulated in Transcription
  misc_feature: MA Experiment 20000180 PARAMETER Experiment Name: At_Germinating_Seeds_P Parameter: Age (hr) Value: 24 vs. 0
  misc_feature: MA Experiment 20000180 PARAMETER Experiment Name: At_Germinating_Seeds_P Parameter: Tissue Value: Germinating Seeds
  misc_feature: MA Experiment ID: 20000794 Result: Up-regulated in Transcription
  misc_feature: MA Experiment 20000794 PARAMETER Experiment Name: At_Petals_P Parameter: Age (day) Value: 23-25 days
  misc_feature: MA Experiment 20000794 PARAMETER Experiment Name: At_Petals_P Parameter: Plant Line Value: WS
  misc_feature: MA Experiment 20000794 PARAMETER Experiment Name: At_Petals_P Parameter: Tissue Value: Petals vs. Whole plant
gtggagaaagtaaaaaatggcttccattgatgaagaaaggtcacttcttgaagttgaagaatctcttatacaggaagaagtaaaattatatgctgaagatggttcaatagatattcatggaaacccaccattgaagcagacaacaggaaactggaaagcttgtccattcatttttgcaaacgaatgctgcgaacggttggcttattatggaattgccaagaatctcatcacgtacttcacaaatgaattgcatgagactaatgtttctgctgctagacacgtcatgacatggcaaggaacatgttacatcactcctcttattggagctttaatagctgatgcttactggggaagatattggactattgcttgtttctctgccatttatttcaccggaatggttgcattgacactctcagcttcagttccgggtcttaagccagcggaatgcattggctctctatgtccaccagcaacaatggttcagtctacggttttattttcagggctttaccttatcgctcttggcactggaggaatcaaaccatgtgtctcatcctttggtgctgatcagtttgataagaccgatccaagcgaacgagtcagaaaagcttctttctttaactggttttacttcactatcaacattggtgcttttgtttcatctactgttctagtttggattcaagagaattatggatgggaattaggattcttgatacctaccgtgttcatgggacttgctactatgagtttcttctttggcacgccgctttatagatttcagaaaccgagaggtagcccgattactagcgtctgccaagttcttgtagccgcataccgtaaatcgaatctcaaggtccctgaagactccacggacggttacaagaaaatctttttccctctcatttcttgtttgaattgagcattagtctattaacggttaaataaacgggttgtgatatcaatgtacaggtttcttgacaaagcggcaattatatcagaaggagatgcaaacactaacccgtggaagctatgtaccgtgactcaagtcgaagaagttaagattctgttacgtttggtccccatttgggcctcaggaatcatcttctcagttctccattcacagatttacactctctttgttcaacaaggacggtgcatgaaacgaaccatcggcttattcgaaatccctcccgcaactctcgggatgttcgacactgcaagtgttctcatatctgtcccaatctatgaccgcgtcatcgttcccttagtgagacggttcacaggcttagctaaaggattcaccgagctacaaagaatggggattggtctttttgtctctgttttgagcttgacatttgcagctatcgttgagacggttcggttacagttagctagagatcttgatctagtggaaagtggagacattgttccattaaacatcttttggcaaatccctcagtactttttaatgggcactgctggagttttcttctttgttgggaggattgagtttttctatgagcaatctccagattcaatgagaagcttgtgtagtgcttgggctcttctcactactacactaggaaactacttgagctcgttgatcattacccttgtggcgtatttgagcggaaaagattgttggattccttcagacaacattaacaatggacatcttgattacttcttctggcttttggtcagtcttggatctgttaacatacctgtttttgtcttcttctctgtgaaatatactcatatgaaggtttgatctcttcttctggctcttgtgtgtactttcaaaattgtttttttttaaacc

SEQ ID NO: 108188 - protein, 302 aa, Arabidopsis thaliana
  peptide (1)..(302): Ceres Seq. ID no. 13653431
  misc_feature (114)..(288): Pfam Name: POT family Pfam Description: POT family
  misc_feature (1)..(288): Homolog of NCBI NO: 15226856 NR Description: peptide/amino acid transporter -related thaliana] >gi|25410951|pir||A84432 probable peptide/amino acid
  misc_feature (5)..(302): Homolog of NCBI NO: 30696666 NR Description: oligopeptide transporter -related [Arabidopsis >gi|16604436|gb|AAL24224.1| At1g62200/F19K23_13 [Arabidopsis
  misc_feature (1)..(302): Homolog of NCBI NO: 15226861 NR Description: histidine transport protein (PTR2-B) [Arabidopsis
  misc_feature (1)..(302): Homolog of NCBI NO: 1076331 NR Description: histidine transport protein - Arabidopsis thaliana
  misc_feature (17)..(302): Homolog of NCBI NO: 4102839 NR Description: LeOPT1 [Lycopersicon esculentum]
  misc_feature (1)..(302): Homolog of NCBI NO: 31088360 NR Description: peptide transporter 1 [Vicia faba]
  misc_feature (6)..(302): Homolog of NCBI NO: 15076661 NR Description: peptide transporter [Oryza sativa (japonica >gi|15076663|dbj|BAB62327.1| peptide transporter [Oryza sativa
  misc_feature (27)..(302): Homolog of NCBI NO: 25404366 NR Description: hypothetical protein F19K23.13 [imported] - thaliana >gi|2160144|gb|AAB60766.1| Strong similarity to
  misc_feature (1)..(302): Homolog of NCBI NO: 28392949 NR Description: putative peptide/amino acid transporter protein
  misc_feature (20)..(302): Homolog of NCBI NO: 15232435 NR Description: peptide transport - like protein [Arabidopsis
MASIDEERSLLEVEESLIQEEVKLYAEDGSIDIHGNPPLKQTTGNWKACPFIFANECCERLAYYGIAKNLITYFTNELHETNVSAARHVMTWQGTCYITPLIGALIADAYWGRYWTIACFSAIYFTGMVALTLSASVPGLKPAECIGSLCPPATMVQSTVLFSGLYLIALGTGGIKPCVSSFGADQFDKTDPSERVRKASFFNWFYFTINIGAFVSSTVLVWIQENYGWELGFLIPTVFMGLATMSFFFGTPLYRFQKPRGSPITSVCQVLVAAYRKSNLKVPEDSTDGYKKIFFPLISCLN

SEQ ID NO: 108189 - protein, 269 aa, Arabidopsis thaliana
  peptide (1)..(269): Ceres Seq. ID no. 13653432
  misc_feature (13)..(205): Pfam Name: POT family Pfam Description: POT family
  misc_feature (13)..(269): Homolog of NCBI NO: 15226856 NR Description: peptide/amino acid transporter -related thaliana] >gi|25410951|pir||A84432 probable peptide/amino acid
  misc_feature (1)..(268): Homolog of NCBI NO: 30696666 NR Description: oligopeptide transporter -related [Arabidopsis >gi|16604436|gb|AAL24224.1| At1g62200/F19K23_13 [Arabidopsis
  misc_feature (1)..(268): Homolog of NCBI NO: 15226861 NR Description: histidine transport protein (PTR2-B) [Arabidopsis
  misc_feature (1)..(268): Homolog of NCBI NO: 1076331 NR Description: histidine transport protein - Arabidopsis thaliana
  misc_feature (1)..(268): Homolog of NCBI NO: 4102839 NR Description: LeOPT1 [Lycopersicon esculentum]
  misc_feature (1)..(268): Homolog of NCBI NO: 31088360 NR Description: peptide transporter 1 [Vicia faba]
  misc_feature (1)..(268): Homolog of NCBI NO: 15076661 NR Description: peptide transporter [Oryza sativa (japonica >gi|15076663|dbj|BAB62327.1| peptide transporter [Oryza sativa
  misc_feature (1)..(232): Homolog of NCBI NO: 25404366 NR Description: hypothetical protein F19K23.13 [imported] - thaliana >gi|2160144|gb|AAB60766.1| Strong similarity to
  misc_feature (1)..(268): Homolog of NCBI NO: 15232435 NR Description: peptide transport - like protein [Arabidopsis
  misc_feature (1)..(269): Homolog of NCBI NO: 38567969 NR Description: OSJNBa0093F12.10 [Oryza sativa (japonica
MYRFLDKAAIISEGDANTNPWKLCTVTQVEEVKILLRLVPIWASGIIFSVLHSQIYTLFVQQGRCMKRTIGLFEIPPATLGMFDTASVLISVPIYDRVIVPLVRRFTGLAKGFTELQRMGIGLFVSVLSLTFAAIVETVRLQLARDLDLVESGDIVPLNIFWQIPQYFLMGTAGVFFFVGRIEFFYEQSPDSMRSLCSAWALLTTTLGNYLSSLIITLVAYLSGKDCWIPSDNINNGHLDYFFWLLVSLGSVNIPVFVFFSVKYTHMKV

SEQ ID NO: 108190 - protein, 213 aa, Arabidopsis thaliana
  peptide (1)..(213): Ceres Seq. ID no. 13653433
  misc_feature (25)..(199): Pfam Name: POT family Pfam Description: POT family
  misc_feature (1)..(199): Homolog of NCBI NO: 15226856 NR Description: peptide/amino acid transporter -related thaliana] >gi|25410951|pir||A84432 probable peptide/amino acid
  misc_feature (1)..(213): Homolog of NCBI NO: 30696666 NR Description: oligopeptide transporter -related [Arabidopsis >gi|16604436|gb|AAL24224.1| At1g62200/F19K23_13 [Arabidopsis
  misc_feature (1)..(213): Homolog of NCBI NO: 15226861 NR Description: histidine transport protein (PTR2-B) [Arabidopsis
  misc_feature (1)..(213): Homolog of NCBI NO: 1076331 NR Description: histidine transport protein - Arabidopsis thaliana
  misc_feature (1)..(213): Homolog of NCBI NO: 4102839 NR Description: LeOPT1 [Lycopersicon esculentum]
  misc_feature (1)..(213): Homolog of NCBI NO: 31088360 NR Description: peptide transporter 1 [Vicia faba]
  misc_feature (1)..(213): Homolog of NCBI NO: 15076661 NR Description: peptide transporter [Oryza sativa (japonica >gi|15076663|dbj|BAB62327.1| peptide transporter [Oryza sativa
  misc_feature (1)..(213): Homolog of NCBI NO: 25404366 NR Description: hypothetical protein F19K23.13 [imported] - thaliana >gi|2160144|gb|AAB60766.1| Strong similarity to
  misc_feature (1)..(213): Homolog of NCBI NO: 28392949 NR Description: putative peptide/amino acid transporter protein
  misc_feature (1)..(213): Homolog of NCBI NO: 15232435 NR Description: peptide transport - like protein [Arabidopsis
MTWQGTCYITPLIGALIADAYWGRYWTIACFSAIYFTGMVALTLSASVPGLKPAECIGSLCPPATMVQSTVLFSGLYLIALGTGGIKPCVSSFGADQFDKTDPSERVRKASFFNWFYFTINIGAFVSSTVLVWIQENYGWELGFLIPTVFMGLATMSFFFGTPLYRFQKPRGSPITSVCQVLVAAYRKSNLKVPEDSTDGYKKIFFPLISCLN

SEQ ID NO: 108191 - DNA, 1386 bp, Arabidopsis thaliana
  misc_feature (1)..(1386): Ceres Seq. ID no. 13653434
  misc_feature: MA Experiment ID: 20000265 Result: Up-regulated in Transcription
  misc_feature: MA Experiment 20000265 PARAMETER Experiment Name: At_Open_Flower_P Parameter: Age (day) Value: 21
  misc_feature: MA Experiment 20000265 PARAMETER Experiment Name: At_Open_Flower_P Parameter: Plant Line Value: WS
  misc_feature: MA Experiment 20000265 PARAMETER Experiment Name: At_Open_Flower_P Parameter: Tissue Value: Closed Flower vs. Whole Plant
gtaaatcgccgaaaacgaaatcgaccttcgttgctctgaaaccctaaaagaagctaaatctagcaatggcgagaagatccgtttcgatatttaatcgccttctggcgaatcctccttctccattcacatcactgtcccgatccatcacctacatgcctagacccggagatggagctccacgaaccgtaaccctaattcccggcgacggaatcggacctttggtgaccggtgcggtggaacaggtcatggaagcgatgcacgcgccagtgcatttcgagagatacgaggttctaggaaacatgagaaaagtccctgaagaagtgatcgagtctgtgaagagaaacaaggtttgtctcaaaggtggattagcgactcctgttggtgggggtgtcagttctttgaatatgcaattgaggaaagaactcgatatcttcgcttctcttgtcaattgcatcaatgtccctggattagtgacgcgacacgaaaatgttgatatcgttgtgataagagagaacactgaaggagagtactcaggtctcgagcatgaggttgttcctggtgttgtcgagagccttaaggtgataacaaagttttgttctgagagaatagcgagatatgcatttgagtatgcgtatctaaacaataggaagaaagtgactgctgttcataaagctaacattatgaagcttgcggatgggctcttccttgaatcttgtagagaggttgctaaacattattcggggattacttacaatgaaataatcgtagacaattgctgtatgcagcttgtcgccaagcctgagcaatttgatgtcatggtgacacctaatttgtatggtaaccttatagcaaacacggcggctggaatagccggtggcactggagtgatgccaggagggaatgttggtgcagaacatgcgatattcgagcaaggtgcatcagcagggaatgtggggaatgataagatggtggaacagaagaaagcgaatccggtggctctacttctctcgtcggctatgatgctaagacatctccggtttcctacttttgctgatcggcttgaaacagcagtgaaacaagtgattaaagaaggaaaatatagaacaaaagatcttggaggagattgtaccacgcaggaagttgttgatgctgtcatagcagctcttgagtgaaaccatgtgagcttctctgcttctgcttgcttcttctttcgtctttttcatttcaactaagagaaaagtgttggttttctctgttttgcgttgctattttttgtttcttgattcatttttgttctctttttgattaatatccgatctcacgtttgagcatgagctctatgttataaaataaaatcaataaggacagacagaagcaatgttgttt

SEQ ID NO: 108192 - protein, 368 aa, Arabidopsis thaliana; identical to SEQ ID NO: 86968
  peptide (1)..(368): Ceres Seq. ID no. 13653435
  misc_feature (40)..(363): Pfam Name: Isocitrate/isopropylmalate dehydrogenase Pfam Description: Isocitrate/isopropylmalate dehydrogenase
  misc_feature (1)..(368): Homolog of NCBI NO: 15237075 NR Description: isocitrate dehydrogenase [NAD+], putative thaliana] >gi|7431336|pir||T04670 isocitrate dehydrogenase (NAD+)
  misc_feature (1)..(368): Homolog of NCBI NO: 28974502 NR Description: NAD-dependent isocitrate dehydrogenase beta
  misc_feature (1)..(368): Homolog of NCBI NO: 28974498 NR Description: NAD-dependent isocitrate dehydrogenase beta
  misc_feature (1)..(368): Homolog of NCBI NO: 15236932 NR Description: isocitrate dehydrogenase [NAD+] subunit 1 thaliana] >gi|7431337|pir||T06131 isocitrate dehydrogenase (NAD)
  misc_feature (1)..(368): Homolog of NCBI NO: 21537157 NR Description: NAD+ dependent isocitrate dehydrogenase subunit 1
  misc_feature (1)..(368): Homolog of NCBI NO: 3790188 NR Description: NAD-dependent isocitrate dehydrogenase [Nicotiana
  misc_feature (1)..(368): Homolog of NCBI NO: 1766046 NR Description: NAD+ dependent isocitrate dehydrogenase subunit 1
  misc_feature (1)..(368): Homolog of NCBI NO: 15227370 NR Description: isocitrate dehydrogenase [NAD+] subunit 2
  misc_feature (1)..(368): Homolog of NCBI NO: 1766048 NR Description: NAD+ dependent isocitrate dehydrogenase subunit 2
  misc_feature (1)..(368): Homolog of NCBI NO: 28974504 NR Description: NAD-dependent isocitrate dehydrogenase gamma

SEQ ID NO: 108193 - protein, 339 aa, Arabidopsis thaliana; identical to SEQ ID NO: 86969
  peptide (1)..(339): Ceres Seq. ID no. 13653436
  misc_feature (11)..(334): Pfam Name: Isocitrate/isopropylmalate dehydrogenase Pfam Description: Isocitrate/isopropylmalate dehydrogenase
  misc_feature (1)..(339): Homolog of NCBI NO: 15237075 NR Description: isocitrate dehydrogenase [NAD+], putative thaliana] >gi|7431336|pir||T04670 isocitrate dehydrogenase (NAD+)
  misc_feature (1)..(339): Homolog of NCBI NO: 28974502 NR Description: NAD-dependent isocitrate dehydrogenase beta
  misc_feature (1)..(339): Homolog of NCBI NO: 28974498 NR Description: NAD-dependent isocitrate dehydrogenase beta
  misc_feature (1)..(339): Homolog of NCBI NO: 15236932 NR Description: isocitrate dehydrogenase [NAD+] subunit 1 thaliana] >gi|7431337|pir||T06131 isocitrate dehydrogenase (NAD)
  misc_feature (1)..(339): Homolog of NCBI NO: 21537157 NR Description: NAD+ dependent isocitrate dehydrogenase subunit 1
  misc_feature (1)..(339): Homolog of NCBI NO: 3790188 NR Description: NAD-dependent isocitrate dehydrogenase [Nicotiana
  misc_feature (1)..(339): Homolog of NCBI NO: 1766046 NR Description: NAD+ dependent isocitrate dehydrogenase subunit 1
  misc_feature (1)..(339): Homolog of NCBI NO: 15227370 NR Description: isocitrate dehydrogenase [NAD+] subunit 2
  misc_feature (1)..(339): Homolog of NCBI NO: 1766048 NR Description: NAD+ dependent isocitrate dehydrogenase subunit 2
  misc_feature (1)..(339): Homolog of NCBI NO: 28974504 NR Description: NAD-dependent isocitrate dehydrogenase gamma

SEQ ID NO: 108194 - protein, 308 aa, Arabidopsis thaliana; identical to SEQ ID NO: 86970
  peptide (1)..(308): Ceres Seq. ID no. 13653437
  misc_feature (1)..(303): Pfam Name: Isocitrate/isopropylmalate dehydrogenase Pfam Description: Isocitrate/isopropylmalate dehydrogenase
  misc_feature (1)..(308): Homolog of NCBI NO: 15237075 NR Description: isocitrate dehydrogenase [NAD+], putative thaliana] >gi|7431336|pir||T04670 isocitrate dehydrogenase (NAD+)
  misc_feature (1)..(308): Homolog of NCBI NO: 28974502 NR Description: NAD-dependent isocitrate dehydrogenase beta
  misc_feature (1)..(308): Homolog of NCBI NO: 28974498 NR Description: NAD-dependent isocitrate dehydrogenase beta
  misc_feature (1)..(308): Homolog of NCBI NO: 15236932 NR Description: isocitrate dehydrogenase [NAD+] subunit 1 thaliana] >gi|7431337|pir||T06131 isocitrate dehydrogenase (NAD)
  misc_feature (1)..(308): Homolog of NCBI NO: 21537157 NR Description: NAD+ dependent isocitrate dehydrogenase subunit 1
  misc_feature (1)..(308): Homolog of NCBI NO: 3790188 NR Description: NAD-dependent isocitrate dehydrogenase [Nicotiana
  misc_feature (1)..(308): Homolog of NCBI NO: 1766046 NR Description: NAD+ dependent isocitrate dehydrogenase subunit 1
  misc_feature (1)..(308): Homolog of NCBI NO: 15227370 NR Description: isocitrate dehydrogenase [NAD+] subunit 2
  misc_feature (1)..(308): Homolog of NCBI NO: 1766048 NR Description: NAD+ dependent isocitrate dehydrogenase subunit 2
  misc_feature (1)..(308): Homolog of NCBI NO: 28974504 NR Description: NAD-dependent isocitrate dehydrogenase gamma

SEQ ID NO: 108195 - DNA, 1380 bp, Arabidopsis thaliana
  misc_feature (1)..(1380): Ceres Seq. ID no. 13653446
  misc_feature: MA Experiment ID: 20000267 Result: Up-regulated in Transcription
  misc_feature: MA Experiment 20000267 PARAMETER Experiment Name: At_Drought_P Parameter: Age (day) Value: 7
  misc_feature: MA Experiment 20000267 PARAMETER Experiment Name: At_Drought_P Parameter: Organism Value: A. thaliana
  misc_feature: MA Experiment 20000267 PARAMETER Experiment Name: At_Drought_P Parameter: Plant Line Value: WS
  misc_feature: MA Experiment 20000267 PARAMETER Experiment Name: At_Drought_P Parameter: Timepoint (hr) Value: 6
  misc_feature: MA Experiment 20000267 PARAMETER Experiment Name: At_Drought_P Parameter: Tissue Value: Whole Plant
  misc_feature: MA Experiment 20000267 PARAMETER Experiment Name: At_Drought_P Parameter: Treatment Value: Drought vs. No Drought
  misc_feature: MA Experiment ID: 20000436 Result: Up-regulated in Transcription
  misc_feature: MA Experiment 20000436 PARAMETER Experiment Name: At_Drought_P Parameter: Age (day) Value: 7
  misc_feature: MA Experiment 20000436 PARAMETER Experiment Name: At_Drought_P Parameter: Organism Value: A. thaliana
  misc_feature: MA Experiment 20000436 PARAMETER Experiment Name: At_Drought_P Parameter: Plant Line Value: WS
  misc_feature: MA Experiment 20000436 PARAMETER Experiment Name: At_Drought_P Parameter: Timepoint (hr) Value: 12
  misc_feature: MA Experiment 20000436 PARAMETER Experiment Name: At_Drought_P Parameter: Tissue Value: Whole Plant
  misc_feature: MA Experiment 20000436 PARAMETER Experiment Name: At_Drought_P Parameter: Treatment Value: Drought vs. No Drought
  misc_feature: MA Experiment ID: 20000437 Result: Up-regulated in Transcription
  misc_feature: MA Experiment 20000437 PARAMETER Experiment Name: At_Drought_P Parameter: Age (day) Value: 8
  misc_feature: MA Experiment 20000437 PARAMETER Experiment Name: At_Drought_P Parameter: Organism Value: A. thaliana
  misc_feature: MA Experiment 20000437 PARAMETER Experiment Name: At_Drought_P Parameter: Plant Line Value: WS
  misc_feature: MA Experiment 20000437 PARAMETER Experiment Name: At_Drought_P Parameter: Timepoint (hr) Value: 24
  misc_feature: MA Experiment 20000437 PARAMETER Experiment Name: At_Drought_P Parameter: Tissue Value: Whole Plant
  misc_feature: MA Experiment 20000437 PARAMETER Experiment Name: At_Drought_P Parameter: Treatment Value: Drought vs. No Drought
  misc_feature: MA Experiment ID: 20000439 Result: Down-regulated in Transcription
  misc_feature: MA Experiment 20000439 PARAMETER Experiment Name: At_Roots__P Parameter: Age (day) Value: 14 vs. 21
  misc_feature: MA Experiment 20000439 PARAMETER Experiment Name: At_Roots__P Parameter: Organism Value: A. thaliana
  misc_feature: MA Experiment 20000439 PARAMETER Experiment Name: At_Roots__P Parameter: Tissue Value: Roots vs. Whole Plant
  misc_feature: MA Experiment ID: 20001247 Result: Down-regulated in Transcription
  misc_feature: MA Experiment 20001247 PARAMETER Experiment Name: At_Far-red-induction_P Parameter: Age (day) Value: 7
  misc_feature: MA Experiment 20001247 PARAMETER Experiment Name: At_Far-red-induction_P Parameter: Light Value: Far-red vs. White
  misc_feature: MA Experiment 20001247 PARAMETER Experiment Name: At_Far-red-induction_P Parameter: Organism Value: A. thaliana
  misc_feature: MA Experiment 20001247 PARAMETER Experiment Name: At_Far-red-induction_P Parameter: Plant Line Value: Columbia
  misc_feature: MA Experiment 20001247 PARAMETER Experiment Name: At_Far-red-induction_P Parameter: Timepoint (hr) Value: 1
  misc_feature: MA Experiment 20001247 PARAMETER Experiment Name: At_Far-red-induction_P Parameter: Tissue Value: Whole Plant
  misc_feature: MA Experiment ID: 20001558 Result: Down-regulated in Transcription
  misc_feature: MA Experiment 20001558 PARAMETER Experiment Name: At_Drought_Soil_Dry_P Parameter: Age (day) Value: 27
  misc_feature: MA Experiment 20001558 PARAMETER Experiment Name: At_Drought_Soil_Dry_P Parameter: Organism Value: A. thaliana
  misc_feature: MA Experiment 20001558 PARAMETER Experiment Name: At_Drought_Soil_Dry_P Parameter: Plant Line Value: WS
  misc_feature: MA Experiment 20001558 PARAMETER Experiment Name: At_Drought_Soil_Dry_P Parameter: Post Timepoint (hr) Value: 6
  misc_feature: MA Experiment 20001558 PARAMETER Experiment Name: At_Drought_Soil_Dry_P Parameter: Post-Treatment Value: Re-Water vs. No Drought
  misc_feature: MA Experiment 20001558 PARAMETER Experiment Name: At_Drought_Soil_Dry_P Parameter: Timepoint (day) Value: 13
  misc_feature: MA Experiment 20001558 PARAMETER Experiment Name: At_Drought_Soil_Dry_P Parameter: Treatment Value: Drought vs. No Drought
agagcgttcagatttctcttcaacataatcatggcattgaccttcttcttcttgttatcgaatttgttcttctccggtaagaatctgcctgatctcacatatttaaagactctaattatttttaaatttcttcatttttttcaatcttaggagttatgtcaaggagcttcacattttcaaacaaatgcgattacacagtgtggccgggaattctatctaacgccggagtttctccattaccaaccaccggcttcgtcctcctgaaaggcgagacgcgtacaatcaacgcaccgtcatcatgggggggtcgtttctggggaagaacactctgctcaaccgattccgatggaaaattctcgtgtgccaccggagattgcggctccggaaaaatcgaatgctccggcgctggagctgctcctcctgcgactttagctgaattcactctcgatggctccggaggactcgatttctacgatgtcagtctcgtcgacggctacaatgtccagatgctggtggttcctcaaggcggctccggtcagaattgcagcagcaccggctgcgtcgtcgatttaaacggatcttgcccgtcggagctaagggtgaatagcgtcgacgggaaggaggcggtggcgatggcgtgtaaaagtgcgtgcgaggcgtttcggcagccggagtattgctgcagcggcgcgtttggatcgcctgacacgtgtaagccgtctacgtactcgcggatcttcaagagcgcgtgtccacgcgcctatagctacgcgtatgacgataagtctagtacatttacgtgcgcgaaatctcccaactacgtcatcactttctgtccttctcccaacaccagcctaaaatcagctgaggaacacagcacagagacaatgacgacgacaagtccaagttccggcagtacgacgtcgtcgcagatggtctacgaaggtgctctggacgaaagcagtggttcaccatctacgtatcacggcgtatcacgagcaatcacagtcgttcttctctcgcttgctttttgtcgtatgtggtggttcttctgaccagagattatttgtcttagtgtctgccacgtatgcgcagaaacaagaacgtatgggcctttagaaggccttttctcactatagtaaaaatatttctaaagtttttccacataatgtcaactttttactccacatgaccaaacgttgaatgattaaaccattcttaaggaaaatcaagaaagtaggctatattaaagcattaatattggtagtattttagattagtcttaagtctaaacatagtttttaggaataattttataattaattttaaaaattttgatgttaaaaaactaaaattttggcaatatacaatggtggtttt

SEQ ID NO: 108196 - protein, 299 aa, Arabidopsis thaliana; identical to SEQ ID NO: 46829
  peptide (1)..(299): Ceres Seq. ID no. 13653447
  misc_feature (9)..(228): Pfam Name: Thaumatin family Pfam Description: Thaumatin family
  misc_feature (1)..(299): Homolog of NCBI NO: 25296204 NR Description: hypothetical protein T20H2.19 [imported] - thaliana >gi|8778995|gb|AAF79910.1|AC022472_19 Contains to SCUTL1 mRNA from Vitis vinifera gb|AF195653 and is a member of
  misc_feature (1)..(299): Homolog of NCBI NO: 30686652 NR Description: thaumatin family [Arabidopsis thaliana] calreticulin, putative [Arabidopsis thaliana]
  misc_feature (1)..(299): Homolog of NCBI NO: 15222875 NR Description: thaumatin family [Arabidopsis thaliana]
  misc_feature (1)..(232): Homolog of NCBI NO: 4105697 NR Description: thaumatin-like protein [Arabidopsis thaliana]
  misc_feature (1)..(270): Homolog of NCBI NO: 15233437 NR Description: thaumatin family [Arabidopsis thaliana]
  misc_feature (1)..(290): Homolog of NCBI NO: 6273383 NR Description: SCUTL1 [Vitis vinifera]
  misc_feature (4)..(291): Homolog of NCBI NO: 37531042 NR Description: putative thaumatin-like protein [Oryza sativa
  misc_feature (1)..(252): Homolog of NCBI NO: 15240873 NR Description: receptor serine/threonine kinase PR5K thaliana] >gi|10177803|dbj|BAB11294.1| receptor serine/threonine
  misc_feature (1)..(231): Homolog of NCBI NO: 15227907 NR Description: thaumatin family [Arabidopsis thaliana]
  misc_feature (1)..(252): Homolog of NCBI NO: 1235680 NR Description: receptor serine/threonine kinase PR5K

SEQ ID NO: 108197 - protein, 182 aa, Arabidopsis thaliana; identical to SEQ ID NO: 46830
  peptide (1)..(182): Ceres Seq. ID no. 13653448
  misc_feature (1)..(111): Pfam Name: Thaumatin family Pfam Description: Thaumatin family
  misc_feature (1)..(182): Homolog of NCBI NO: 25296204 NR Description: hypothetical protein T20H2.19 [imported] - thaliana >gi|8778995|gb|AAF79910.1|AC022472_19 Contains to SCUTL1 mRNA from Vitis vinifera gb|AF195653 and is a member of
  misc_feature (1)..(182): Homolog of NCBI NO: 30686652 NR Description: thaumatin family [Arabidopsis thaliana] calreticulin, putative [Arabidopsis thaliana]
  misc_feature (1)..(182): Homolog of NCBI NO: 15222875 NR Description: thaumatin family [Arabidopsis thaliana]
  misc_feature (1)..(115): Homolog of NCBI NO: 4105697 NR Description: thaumatin-like protein [Arabidopsis thaliana]
  misc_feature (1)..(153): Homolog of NCBI NO: 15233437 NR Description: thaumatin family [Arabidopsis thaliana]
  misc_feature (1)..(173): Homolog of NCBI NO: 6273383 NR Description: SCUTL1 [Vitis vinifera]
  misc_feature (1)..(174): Homolog of NCBI NO: 37531042 NR Description: putative thaumatin-like protein [Oryza sativa
  misc_feature (1)..(135): Homolog of NCBI NO: 15240873 NR Description: receptor serine/threonine kinase PR5K thaliana] >gi|10177803|dbj|BAB11294.1| receptor serine/threonine
  misc_feature (1)..(114): Homolog of NCBI NO: 15227907 NR Description: thaumatin family [Arabidopsis thaliana]
  misc_feature (1)..(135): Homolog of NCBI NO: 1235680 NR Description: receptor serine/threonine kinase PR5K

SEQ ID NO: 108198 - DNA, 3148 bp, Arabidopsis thaliana
  misc_feature (1)..(3148): Ceres Seq. ID no. 13653453
  misc_feature: MA Experiment ID: 20000171 Result: Down-regulated in Transcription
  misc_feature: MA Experiment 20000171 PARAMETER Experiment Name: At_42deg_Heat_P Parameter: Age (day) Value: 14
  misc_feature: MA Experiment 20000171 PARAMETER Experiment Name: At_42deg_Heat_P Parameter: Organism Value: A. thaliana
  misc_feature: MA Experiment 20000171 PARAMETER Experiment Name: At_42deg_Heat_P Parameter: Plant Line Value: WS
  misc_feature: MA Experiment 20000171 PARAMETER Experiment Name: At_42deg_Heat_P Parameter: Temperature (deg C) Value: 42 vs. 22
  misc_feature: MA Experiment 20000171 PARAMETER Experiment Name: At_42deg_Heat_P Parameter: Timepoint (hr) Value: 1
  misc_feature: MA Experiment 20000171 PARAMETER Experiment Name: At_42deg_Heat_P Parameter: Tissue Value: Aerial
  misc_feature: MA Experiment ID: 20000173 Result: Down-regulated in Transcription
  misc_feature: MA Experiment 20000173 PARAMETER Experiment Name: At_42deg_Heat_P Parameter: Age (day) Value: 14
  misc_feature: MA Experiment 20000173 PARAMETER Experiment Name: At_42deg_Heat_P Parameter: Organism Value: A. thaliana
  misc_feature: MA Experiment 20000173 PARAMETER Experiment Name: At_42deg_Heat_P Parameter: Plant Line Value: WS
  misc_feature: MA Experiment 20000173 PARAMETER Experiment Name: At_42deg_Heat_P Parameter: Temperature (deg C) Value: 42 vs. 22
  misc_feature: MA Experiment 20000173 PARAMETER Experiment Name: At_42deg_Heat_P Parameter: Timepoint (hr) Value: 6
  misc_feature: MA Experiment 20000173 PARAMETER Experiment Name: At_42deg_Heat_P Parameter: Tissue Value: Aerial
  misc_feature: MA Experiment ID: 20000184 Result: Down-regulated in Transcription
  misc_feature: MA Experiment 20000184 PARAMETER Experiment Name: At_Shoots__P Parameter: Age (day) Value: 7
  misc_feature: MA Experiment 20000184 PARAMETER Experiment Name: At_Shoots__P Parameter: Tissue Value: Shoots vs. Whole Plant
  misc_feature: MA Experiment ID: 20000185 Result: Down-regulated in Transcription
  misc_feature: MA Experiment 20000185 PARAMETER Experiment Name: At_Roots__P Parameter: Age (day) Value: 7 vs. 21
  misc_feature: MA Experiment 20000185 PARAMETER Experiment Name: At_Roots__P Parameter: Organism Value: A. thaliana
  misc_feature: MA Experiment 20000185 PARAMETER Experiment Name: At_Roots__P Parameter: Tissue Value: Roots vs. Whole Plant
  misc_feature: MA Experiment ID: 20000264 Result: Down-regulated in Transcription
  misc_feature: MA Experiment 20000264 PARAMETER Experiment Name: At_Open_Flower_P Parameter: Age (day) Value: 21
  misc_feature: MA Experiment 20000264 PARAMETER Experiment Name: At_Open_Flower_P Parameter: Plant Line Value: WS
  misc_feature: MA Experiment 20000264 PARAMETER Experiment Name: At_Open_Flower_P Parameter: Tissue Value: Open Flower vs. Whole Plant
  misc_feature: MA Experiment ID: 20000268 Result: Down-regulated in Transcription
  misc_feature: MA Experiment 20000268 PARAMETER Experiment Name: At_100mM_NaCl__P Parameter: Age (day) Value: 14
  misc_feature: MA Experiment 20000268 PARAMETER Experiment Name: At_100mM_NaCl__P Parameter: Organism Value: A. thaliana
  misc_feature: MA Experiment 20000268 PARAMETER Experiment Name: At_100mM_NaCl__P Parameter: Plant Line Value: WS
  misc_feature: MA Experiment 20000268 PARAMETER Experiment Name: At_100mM_NaCl__P Parameter: Timepoint (hr) Value: 6
  misc_feature: MA Experiment 20000268 PARAMETER Experiment Name: At_100mM_NaCl__P Parameter: Tissue Value: Whole Plant
  misc_feature: MA Experiment 20000268 PARAMETER Experiment Name: At_100mM_NaCl__P Parameter: Treatment Value: 100mM NaCl vs. No Treatment
  misc_feature: MA Experiment ID: 20000286 Result: Down-regulated in Transcription
  misc_feature: MA Experiment 20000286 PARAMETER Experiment Name: At_Open_Flower_P Parameter: Age (day) Value: 21
  misc_feature: MA Experiment 20000286 PARAMETER Experiment Name: At_Open_Flower_P Parameter: Plant Line Value: WS
  misc_feature: MA Experiment 20000286 PARAMETER Experiment Name: At_Open_Flower_P Parameter: Tissue Value: Half Open vs. Whole Plant
  misc_feature: MA Experiment ID: 20000436 Result: Down-regulated in Transcription
  misc_feature: MA Experiment 20000436 PARAMETER Experiment Name: At_Drought_P Parameter: Age (day) Value: 7
  misc_feature: MA Experiment 20000436 PARAMETER Experiment Name: At_Drought_P Parameter: Organism Value: A. thaliana
  misc_feature: MA Experiment 20000436 PARAMETER Experiment Name: At_Drought_P Parameter: Plant Line Value: WS
  misc_feature: MA Experiment 20000436 PARAMETER Experiment Name: At_Drought_P Parameter: Timepoint (hr) Value: 12
  misc_feature: MA Experiment 20000436 PARAMETER Experiment Name: At_Drought_P Parameter: Tissue Value: Whole Plant
  misc_feature: MA Experiment 20000436 PARAMETER Experiment Name: At_Drought_P Parameter: Treatment Value: Drought vs. No Drought
  misc_feature: MA Experiment ID: 20000437 Result: Down-regulated in Transcription
  misc_feature: MA Experiment 20000437 PARAMETER Experiment Name: At_Drought_P Parameter: Age (day) Value: 8
  misc_feature: MA Experiment 20000437 PARAMETER Experiment Name: At_Drought_P Parameter: Organism Value: A. thaliana
  misc_feature: MA Experiment 20000437 PARAMETER Experiment Name: At_Drought_P Parameter: Plant Line Value: WS
  misc_feature: MA Experiment 20000437 PARAMETER Experiment Name: At_Drought_P Parameter: Timepoint (hr) Value: 24
  misc_feature: MA Experiment 20000437 PARAMETER Experiment Name: At_Drought_P Parameter: Tissue Value: Whole Plant
  misc_feature: MA Experiment 20000437 PARAMETER Experiment Name: At_Drought_P Parameter: Treatment Value: Drought vs. No Drought
  misc_feature: MA Experiment ID: 20000439 Result: Down-regulated in Transcription
  misc_feature: MA Experiment 20000439 PARAMETER Experiment Name: At_Roots__P Parameter: Age (day) Value: 14 vs. 21
  misc_feature: MA Experiment 20000439 PARAMETER Experiment Name: At_Roots__P Parameter: Organism Value: A. thaliana
  misc_feature: MA Experiment 20000439 PARAMETER Experiment Name: At_Roots__P Parameter: Tissue Value: Roots vs. Whole Plant
  misc_feature: MA Experiment ID: 20000441 Result: Up-regulated in Transcription
  misc_feature: MA Experiment 20000441 PARAMETER Experiment Name: At_1uM_BR-BRZ__P Parameter: Tissue Value: Shoot Apices
  misc_feature: MA Experiment 20000441 PARAMETER Experiment Name: At_1uM_BR-BRZ__P Parameter: Treatment Value: 1uM BR vs. No Treatment
  misc_feature: MA Experiment ID: 20000573 Result: Down-regulated in Transcription
  misc_feature: MA Experiment 20000573 PARAMETER Experiment Name: At_100uM_ABA_Mutants__P Parameter: Organism Value: A. thaliana
  misc_feature: MA Experiment 20000573 PARAMETER Experiment Name: At_100uM_ABA_Mutants__P Parameter: Plant Line Value: CS22 vs. Ler wt
  misc_feature: MA Experiment 20000573 PARAMETER Experiment Name: At_100uM_ABA_Mutants__P Parameter: Timepoint (hr) Value: N/A
  misc_feature: MA Experiment 20000573 PARAMETER Experiment Name: At_100uM_ABA_Mutants__P Parameter: Tissue Value: Whole Plant
  misc_feature: MA Experiment 20000573 PARAMETER Experiment Name: At_100uM_ABA_Mutants__P Parameter: Treatment Value: None
  misc_feature: MA Experiment ID: 20000574 Result: Down-regulated in Transcription
  misc_feature: MA Experiment 20000574 PARAMETER Experiment Name: At_100uM_ABA_Mutants__P Parameter: Organism Value: A. thaliana
  misc_feature: MA Experiment 20000574 PARAMETER Experiment Name: At_100uM_ABA_Mutants__P Parameter: Plant Line Value: CS23 vs. Ler wt
  misc_feature: MA Experiment 20000574 PARAMETER Experiment Name: At_100uM_ABA_Mutants__P Parameter: Timepoint (hr) Value: N/A
  misc_feature: MA Experiment 20000574 PARAMETER Experiment Name: At_100uM_ABA_Mutants__P Parameter: Tissue Value: Whole Plant
  misc_feature: MA Experiment 20000574 PARAMETER Experiment Name: At_100uM_ABA_Mutants__P Parameter: Treatment Value: None
  misc_feature: MA Experiment ID: 20001247 Result: Up-regulated in Transcription
  misc_feature: MA Experiment 20001247 PARAMETER Experiment Name: At_Far-red-induction_P Parameter: Age (day) Value: 7
  misc_feature: MA Experiment 20001247 PARAMETER Experiment Name: At_Far-red-induction_P Parameter: Light Value: Far-red vs. White
  misc_feature: MA Experiment 20001247 PARAMETER Experiment Name: At_Far-red-induction_P Parameter: Organism Value: A. thaliana
  misc_feature: MA Experiment 20001247 PARAMETER Experiment Name: At_Far-red-induction_P Parameter: Plant Line Value: Columbia
  misc_feature: MA Experiment 20001247 PARAMETER Experiment Name: At_Far-red-induction_P Parameter: Timepoint (hr) Value: 1
  misc_feature: MA Experiment 20001247 PARAMETER Experiment Name: At_Far-red-induction_P Parameter: Tissue Value: Whole Plant
  misc_feature: MA Experiment ID: 20001450 Result: Up-regulated in Transcription
  misc_feature: MA Experiment 20001450 PARAMETER Experiment Name: At_Far-red-induction_P Parameter: Age (day) Value: 7
  misc_feature: MA Experiment 20001450 PARAMETER Experiment Name: At_Far-red-induction_P Parameter: Light Value: Far-red vs. White
  misc_feature: MA Experiment 20001450 PARAMETER Experiment Name: At_Far-red-induction_P Parameter: Organism Value: A. thaliana
  misc_feature: MA Experiment 20001450 PARAMETER Experiment Name: At_Far-red-induction_P Parameter: Plant Line Value: Columbia
  misc_feature: MA Experiment 20001450 PARAMETER Experiment Name: At_Far-red-induction_P Parameter: Timepoint (hr) Value: 8
  misc_feature: MA Experiment 20001450 PARAMETER Experiment Name: At_Far-red-induction_P Parameter: Tissue Value: Whole Plant
  misc_feature: MA Experiment ID: 20001555 Result: Down-regulated in Transcription
  misc_feature: MA Experiment 20001555 PARAMETER Experiment Name: At_Drought_Soil_Dry_P Parameter: Age (day) Value: 24
  misc_feature: MA Experiment 20001555 PARAMETER Experiment Name: At_Drought_Soil_Dry_P Parameter: Organism Value: A. thaliana
  misc_feature: MA Experiment 20001555 PARAMETER Experiment Name: At_Drought_Soil_Dry_P Parameter: Plant Line Value: WS
  misc_feature: MA Experiment 20001555 PARAMETER Experiment Name: At_Drought_Soil_Dry_P Parameter: Post Timepoint (hr) Value: None
  misc_feature: MA Experiment 20001555 PARAMETER Experiment Name: At_Drought_Soil_Dry_P Parameter: Post-Treatment Value: None
  misc_feature: MA Experiment 20001555 PARAMETER Experiment Name: At_Drought_Soil_Dry_P Parameter: Timepoint (day) Value: 10
  misc_feature: MA Experiment 20001555 PARAMETER Experiment Name: At_Drought_Soil_Dry_P Parameter: Treatment Value: Drought vs. No Drought
  misc_feature: MA Experiment ID: 20001556 Result: Down-regulated in Transcription
  misc_feature: MA Experiment 20001556 PARAMETER Experiment Name: At_Drought_Soil_Dry_P Parameter: Age (day) Value: 26
  misc_feature: MA Experiment 20001556 PARAMETER Experiment Name: At_Drought_Soil_Dry_P Parameter: Organism Value: A. thaliana
  misc_feature: MA Experiment 20001556 PARAMETER Experiment Name: At_Drought_Soil_Dry_P Parameter: Plant Line Value: WS
  misc_feature: MA Experiment 20001556 PARAMETER Experiment Name: At_Drought_Soil_Dry_P Parameter: Post Timepoint (hr) Value: None
  misc_feature: MA Experiment 20001556 PARAMETER Experiment Name: At_Drought_Soil_Dry_P Parameter: Post-Treatment Value: None
  misc_feature: MA Experiment 20001556 PARAMETER Experiment Name: At_Drought_Soil_Dry_P Parameter: Timepoint (day) Value: 12
  misc_feature: MA Experiment 20001556 PARAMETER Experiment Name: At_Drought_Soil_Dry_P Parameter: Treatment Value: Drought vs. No Drought
  misc_feature: MA Experiment ID: 20001904 Result: Down-regulated in Transcription
  misc_feature: MA Experiment 20001904 PARAMETER Experiment Name: At_Drought_Reproduction_P Parameter: Age (day) Value: 37
  misc_feature: MA Experiment 20001904 PARAMETER Experiment Name: At_Drought_Reproduction_P Parameter: Organism Value: A. thaliana
  misc_feature: MA Experiment 20001904 PARAMETER Experiment Name: At_Drought_Reproduction_P Parameter: Plant Line Value: WS
  misc_feature: MA Experiment 20001904 PARAMETER Experiment Name: At_Drought_Reproduction_P Parameter: Timepoint (day) Value: 7
  misc_feature: MA Experiment 20001904 PARAMETER Experiment Name: At_Drought_Reproduction_P Parameter: Tissue Value: Rosettes
  misc_feature: MA Experiment 20001904 PARAMETER Experiment Name: At_Drought_Reproduction_P Parameter: Treatment Value: Drought vs. No Drought
  misc_feature: MA Experiment ID: 20001905 Result: Down-regulated in Transcription
  misc_feature: MA Experiment 20001905 PARAMETER Experiment Name: At_Drought_Reproduction_P Parameter: Age (day) Value: 40
  misc_feature: MA Experiment 20001905 PARAMETER Experiment Name: At_Drought_Reproduction_P Parameter: Organism Value: A. thaliana
  misc_feature: MA Experiment 20001905 PARAMETER Experiment Name: At_Drought_Reproduction_P Parameter: Plant Line Value: WS
  misc_feature: MA Experiment 20001905 PARAMETER Experiment Name: At_Drought_Reproduction_P Parameter: Timepoint (day) Value: 10
  misc_feature: MA Experiment 20001905 PARAMETER Experiment Name: At_Drought_Reproduction_P Parameter: Tissue Value: Rosettes
  misc_feature: MA Experiment 20001905 PARAMETER Experiment Name: At_Drought_Reproduction_P Parameter: Treatment Value: Drought vs. No Drought
  misc_feature: MA Experiment ID: 20001906 Result: Down-regulated in Transcription
  misc_feature: MA Experiment 20001906 PARAMETER Experiment Name: At_Drought_Reproduction_P Parameter: Age (day) Value: 35
  misc_feature: MA Experiment 20001906 PARAMETER Experiment Name: At_Drought_Reproduction_P Parameter: Organism Value: A. thaliana
  misc_feature: MA Experiment 20001906 PARAMETER Experiment Name: At_Drought_Reproduction_P Parameter: Plant Line Value: WS
  misc_feature: MA Experiment 20001906 PARAMETER Experiment Name: At_Drought_Reproduction_P Parameter: Timepoint (day) Value: 5
  misc_feature: MA Experiment 20001906 PARAMETER Experiment Name: At_Drought_Reproduction_P Parameter: Tissue Value: Siliques
  misc_feature: MA Experiment 20001906 PARAMETER Experiment Name: At_Drought_Reproduction_P Parameter: Treatment Value: Drought vs. No Drought
  misc_feature: MA Experiment ID: 20001907 Result: Down-regulated in Transcription
  misc_feature: MA Experiment 20001907 PARAMETER Experiment Name: At_Drought_Reproduction_P Parameter: Age (day) Value: 37
  misc_feature: MA Experiment 20001907 PARAMETER Experiment Name: At_Drought_Reproduction_P Parameter: Organism Value: A. thaliana
  misc_feature: MA Experiment 20001907 PARAMETER Experiment Name: At_Drought_Reproduction_P Parameter: Plant Line Value: WS
  misc_feature: MA Experiment 20001907 PARAMETER Experiment Name: At_Drought_Reproduction_P Parameter: Timepoint (day) Value: 7
  misc_feature: MA Experiment 20001907 PARAMETER Experiment Name: At_Drought_Reproduction_P Parameter: Tissue Value: Siliques
  misc_feature: MA Experiment 20001907 PARAMETER Experiment Name: At_Drought_Reproduction_P Parameter: Treatment Value: Drought vs. No Drought
  misc_feature: MA Experiment ID: 20001908 Result: Down-regulated in Transcription
  misc_feature: MA Experiment 20001908 PARAMETER Experiment Name: At_Drought_Reproduction_P Parameter: Age (day) Value: 40
  misc_feature: MA Experiment 20001908 PARAMETER Experiment Name: At_Drought_Reproduction_P Parameter: Organism Value: A. thaliana
  misc_feature: MA Experiment 20001908 PARAMETER Experiment Name: At_Drought_Reproduction_P Parameter: Plant Line Value: WS
  misc_feature: MA Experiment 20001908 PARAMETER Experiment Name: At_Drought_Reproduction_P Parameter: Timepoint (day) Value: 10
  misc_feature: MA Experiment 20001908 PARAMETER Experiment Name: At_Drought_Reproduction_P Parameter: Tissue Value: Siliques
  misc_feature: MA Experiment 20001908 PARAMETER Experiment Name: At_Drought_Reproduction_P Parameter: Treatment Value: Drought vs. No Drought
  misc_feature: MA Experiment ID: 20001910 Result: Down-regulated in Transcription
  misc_feature: MA Experiment 20001910 PARAMETER Experiment Name: At_Drought_Reproduction_P Parameter: Age (day) Value: 37
  misc_feature: MA Experiment 20001910 PARAMETER Experiment Name: At_Drought_Reproduction_P Parameter: Organism Value: A. thaliana
  misc_feature: MA Experiment 20001910 PARAMETER Experiment Name: At_Drought_Reproduction_P Parameter: Plant Line Value: WS
  misc_feature: MA Experiment 20001910 PARAMETER Experiment Name: At_Drought_Reproduction_P Parameter: Timepoint (day) Value: 7
  misc_feature: MA Experiment 20001910 PARAMETER Experiment Name: At_Drought_Reproduction_P Parameter: Tissue Value: Flowers
  misc_feature: MA Experiment 20001910 PARAMETER Experiment Name: At_Drought_Reproduction_P Parameter: Treatment Value: Drought vs. No Drought
  misc_feature: MA Experiment ID: 20001911 Result: Down-regulated in Transcription
  misc_feature: MA Experiment 20001911 PARAMETER Experiment Name: At_Drought_Reproduction_P Parameter: Age (day) Value: 40
  misc_feature: MA Experiment 20001911 PARAMETER Experiment Name: At_Drought_Reproduction_P Parameter: Organism Value: A. thaliana
  misc_feature: MA Experiment 20001911 PARAMETER Experiment Name: At_Drought_Reproduction_P Parameter: Plant Line Value: WS
  misc_feature: MA Experiment 20001911 PARAMETER Experiment Name: At_Drought_Reproduction_P Parameter: Timepoint (day) Value: 10
  misc_feature: MA Experiment 20001911 PARAMETER Experiment Name: At_Drought_Reproduction_P Parameter: Tissue Value: Flowers
  misc_feature: MA Experiment 20001911 PARAMETER Experiment Name: At_Drought_Reproduction_P Parameter: Treatment Value: Drought vs. No Drought
atcttctttctatagtttccatgaagtcttcttcttctcagagctacgatgttttccccaacttcagaggggaagatgtccgccactcattagtcagccaccttcgtaaggaacttgatcgcaaattcatcaatacattcaacgacaacaggatcgaaagaagccgcaaaataaccccagagctgttattggctatagaaaactcaaggatctcacttgtcgtcttctctaaaaactatgcttcttccacgtggtgcttagatgaattggtgaagatccaagagtgctatgagaaattggatcaaatggtgattcctattttctacaaagtagatccttctcatgttagaaaacagaccggagagtttggcatggtctttggggagacctgcaagggcagaacagagaatgagaagcgaaaatggatgcgagctctagcagaggtagcacatctagccggagaagatcttcggaactggcgtagcgaagcagaaatgcttgaaaatatcgccaaggatgtttcaaacaaactcttccccccatcaaataatttcagtgacttcgtcgggattgaagctcatatagaggcattgatatcaatgttgcgcttcgactccaagaaagcgcgaatgatagggatttgtgggccttctgaaactggtaagactactataggaagagctttatacagcagactcaaaagcgacttccaccatcgggctttcgtagcatataagagaaaaatacggagcgactatgaccagaagctgtattgggaagaacaatttctatcagaaattctttgtcagaaggatataaagatagaggaatgtggtgcggtggaacaacgactaaagcacacgaaagttcttattgttcttgatgatgttgatgatatagagctactaaaaacgttggtaggacgtatcagatggtttggatctgagagcaaaattgttgtgattactcaaaaaagggaacttctcaaggctcacaacattgcacatgtttatgaagtgggattcccatcagaagaactggctcatcaaatgttttgtcgatatgcttttgggaaaaactctccacctcatggtttcaacgagcttgcagatgaagctgcaaagattgccggtaatcgtcctaaagctctcaagtacgttggttcgtcttttagaagactagacaaggaacaatgggtgaagatgctatcggagttccgtagtaatgggaataaactaaaaatcagctatgatgagttagatggtaaaggtcaagattacgttgcgtgtttaaccaatggttcaaattcccaggtgaaggcagagtggatccacttggcactaggcgtgtctatattacttaacatccgcagtgacggaacgacaattctcaaacatttgagctacaatcgaagcatggcgcaacaagcaaaaatatggtggtatgaaaatttggaaagagtgtgcaagaagtacaatatatgtggcatagatagctcaactaatggtggtggtaagaaagtttgctacgttgggatatacccctatgttttaatacaatatcgtattgcgggacgatattgatagtataaaaacggctaggagataggttaagtctctcgtactggcccattcgtttccacgttttcgatgaagatctggataagaatacatcttatgttgttagttttttccaatttggtatttgcatttagatggtgcatgcaaacccaattgtgtaccaaaaaattctagatattttggatgcacaaaaaactatatcacatcacatgcaatgcataactctcttgcttcacattagctatgcatgcaatgcaggttcaacgtatggacaatgttcaaattcccaatttcaaagaaacatggacgcaagccccgggggaaacaaaaccagtaatcaatccacaaaagattcaccgagagcttctcaagtagagaaggaaaagatcgagtactgtgagccacatgtatatataacacctgccatcttcagtgacggaaccagagctcccaaatacgtggagtctaggtaacgtgaaatctaatctttcacaatatataagtatactttcttttcacatcgtagaatcttaagtagtaacttggaactaggattctatatcaatcaatctttcaacaagtggttgtttgtacttagtagccgaagagtaacccaagtgcaccacgccaaaacatggtggccggagaattgtgaaaaagtgtacgagaaccacaacaacatatatggcatagatagatcaattgacggtggtgataagtttgagggaaaaagtaaagttagtgacggtgggttagacggcaaagatcaaggttcaatgtatggacaaagttcaaattccgagcttcaaataaacatggacgcagacaataggagatgtgaacctgtgagtgagatgcttttcaaaaattacaatgtgtgttcgcctaatggtaagggaagtgatatttgaaaattgcgcatgacgatattgttatctggacttacaattcttactgataagtccctcaagcacatatgcctgcaggtttaaccgatgtaaactgttcaaatccccagtctcaaagaaaattggacgcaagcctaaagaaagacaaaattgtgcatgagtggattcgaaccggtagtggcttcttttttgattttcagggcccaaaatctatagtgagtgctgctcaagtggacgagaaaaatttcgagtactgtgaacaaggtgtgtatataacacttggcatcctcagtggcggaattatagttctcaaacatttggagttcagccgaagaatggcgcaacaagcaaaagtttggtggtcggaaaattggataaaagtgtaccaggagcacaacatatgtggcatagataaatcatttgatggtaggtttgatgatagacgtgtcattcgtcaattaagaccaaactgaagcacggcctggcccttgtaaaagtcaggacttgagctagatacttaagccaagcagatctgtttggctaagtctggtcgggttagcgcgaaattgtcgaaatctgtttaataattgcattcagtgcaagtctttaatttgtacttcatggctttaatacactaattaaacattggatcatttttag

SEQ ID NO: 108199 - protein, 526 aa, Arabidopsis thaliana
  peptide (1)..(526): Ceres Seq. ID no. 13653454
  misc_feature (168)..(457): Pfam Name: NB-ARC domain Pfam Description: NB-ARC domain
  misc_feature (7)..(504): Homolog of NCBI NO: 26451875 NR Description: putative disease resistance RPP5 protein thaliana] >gi|29028968|gb|AAO64863.1| At4g16990 [Arabidopsis
  misc_feature (7)..(526): Homolog of NCBI NO: 27311837 NR Description: Unknown protein [Arabidopsis thaliana]
  misc_feature (7)..(526): Homolog of NCBI NO: 30683889 NR Description: disease resistance protein (TIR-NBS class),
  misc_feature (7)..(438): Homolog of NCBI NO: 25407556 NR Description: disease resistance RPP5 like protein (partial) - Arabidopsis thaliana >gi|5302809|emb|CAB46050.1| disease RPP5 like protein (fragment) [Arabidopsis thaliana] (fragment)
  misc_feature (7)..(467): Homolog of NCBI NO: 9758205 NR Description: disease resistance protein; strong similarity to
  misc_feature (7)..(467): Homolog of NCBI NO: 30696077 NR Description: disease resistance protein (TIR-NBS-LRR class),
  misc_feature (9)..(439): Homolog of NCBI NO: 7485210 NR Description: hypothetical protein - Arabidopsis thaliana
  misc_feature (9)..(439): Homolog of NCBI NO: 15235924 NR Description: disease resistance protein (TIR-NBS-LRR class), [Arabidopsis thaliana] >gi|25407548|pir||D85188 disease
  misc_feature (6)..(464): Homolog of NCBI NO: 7488173 NR Description: probable resistance gene - Arabidopsis thaliana
  misc_feature (6)..(464): Homolog of NCBI NO: 15235932 NR Description: disease resistance protein (TIR-NBS-LRR class), [Arabidopsis thaliana] >gi|25407554|pir||C85189 disease
LLSIVSMKSSSSQSYDVFPNFRGEDVRHSLVSHLRKELDRKFINTFNDNRIERSRKITPELLLAIENSRISLVVFSKNYASSTWCLDELVKIQECYEKLDQMVIPIFYKVDPSHVRKQTGEFGMVFGETCKGRTENEKRKWMRALAEVAHLAGEDLRNWRSEAEMLENIAKDVSNKLFPPSNNFSDFVGIEAHIEALISMLRFDSKKARMIGICGPSETGKTTIGRALYSRLKSDFHHRAFVAYKRKIRSDYDQKLYWEEQFLSEILCQKDIKIEECGAVEQRLKHTKVLIVLDDVDDIELLKTLVGRIRWFGSESKIVVITQKRELLKAHNIAHVYEVGFPSEELAHQMFCRYAFGKNSPPHGFNELADEAAKIAGNRPKALKYVGSSFRRLDKEQWVKMLSEFRSNGNKLKISYDELDGKGQDYVACLTNGSNSQVKAEWIHLALGVSILLNIRSDGTTILKHLSYNRSMAQQAKIWWYENLERVCKKYNICGIDSSTNGGGKKVCYVGIYPYVLIQYRIAGRY

SEQ ID NO: 108200 - protein, 520 aa, Arabidopsis thaliana
  peptide (1)..(520): Ceres Seq. ID no. 13653455
  misc_feature (162)..(451): Pfam Name: NB-ARC domain Pfam Description: NB-ARC domain
  misc_feature (1)..(498): Homolog of NCBI NO: 26451875 NR Description: putative disease resistance RPP5 protein thaliana] >gi|29028968|gb|AAO64863.1| At4g16990 [Arabidopsis
  misc_feature (1)..(520): Homolog of NCBI NO: 27311837 NR Description: Unknown protein [Arabidopsis thaliana]
  misc_feature (1)..(520): Homolog of NCBI NO: 30683889 NR Description: disease resistance protein (TIR-NBS class),
  misc_feature (1)..(432): Homolog of NCBI NO: 25407556 NR Description: disease resistance RPP5 like protein (partial) - Arabidopsis thaliana >gi|5302809|emb|CAB46050.1| disease RPP5 like protein (fragment) [Arabidopsis thaliana] (fragment)
  misc_feature (1)..(461): Homolog of NCBI NO: 9758205 NR Description: disease resistance protein; strong similarity to
  misc_feature (1)..(461): Homolog of NCBI NO: 30696077 NR Description: disease resistance protein (TIR-NBS-LRR class),
  misc_feature (3)..(433): Homolog of NCBI NO: 7485210 NR Description: hypothetical protein - Arabidopsis thaliana
  misc_feature (3)..(433): Homolog of NCBI NO: 15235924 NR Description: disease resistance protein (TIR-NBS-LRR class), [Arabidopsis thaliana] >gi|25407548|pir||D85188 disease
  misc_feature (1)..(458): Homolog of NCBI NO: 7488173 NR Description: probable resistance gene - Arabidopsis thaliana
  misc_feature (1)..(458): Homolog of NCBI NO: 15235932 NR Description: disease resistance protein (TIR-NBS-LRR class), [Arabidopsis thaliana] >gi|25407554|pir||C85189 disease
MKSSSSQSYDVFPNFRGEDVRHSLVSHLRKELDRKFINTFNDNRIERSRKITPELLLAIENSRISLVVFSKNYASSTWCLDELVKIQECYEKLDQMVIPIFYKVDPSHVRKQTGEFGMVFGETCKGRTENEKRKWMRALAEVAHLAGEDLRNWRSEAEMLENIAKDVSNKLFPPSNNFSDFVGIEAHIEALISMLRFDSKKARMIGICGPSETGKTTIGRALYSRLKSDFHHRAFVAYKRKIRSDYDQKLYWEEQFLSEILCQKDIKIEECGAVEQRLKHTKVLIVLDDVDDIELLKTLVGRIRWFGSESKIVVITQKRELLKAHNIAHVYEVGFPSEELAHQMFCRYAFGKNSPPHGFNELADEAAKIAGNRPKALKYVGSSFRRLDKEQWVKMLSEFRSNGNKLKISYDELDGKGQDYVACLTNGSNSQVKAEWIHLALGVSILLNIRSDGTTILKHLSYNRSMAQQAKIWWYENLERVCKKYNICGIDSSTNGGGKKVCYVGIYPYVLIQYRIAGRY

SEQ ID NO: 108201 - protein, 425 aa, Arabidopsis thaliana
  peptide (1)..(425): Ceres Seq. ID no. 13653456
  misc_feature (67)..(356): Pfam Name: NB-ARC domain Pfam Description: NB-ARC domain
  misc_feature (1)..(403): Homolog of NCBI NO: 26451875 NR Description: putative disease resistance RPP5 protein thaliana] >gi|29028968|gb|AAO64863.1| At4g16990 [Arabidopsis
  misc_feature (1)..(425): Homolog of NCBI NO: 27311837 NR Description: Unknown protein [Arabidopsis thaliana]
  misc_feature (1)..(425): Homolog of NCBI NO: 30683889 NR Description: disease resistance protein (TIR-NBS class),
  misc_feature (1)..(337): Homolog of NCBI NO: 25407556 NR Description: disease resistance RPP5 like protein (partial) - Arabidopsis thaliana >gi|5302809|emb|CAB46050.1| disease RPP5 like protein (fragment) [Arabidopsis thaliana] (fragment)
  misc_feature (1)..(366): Homolog of NCBI NO: 9758205 NR Description: disease resistance protein; strong similarity to
  misc_feature (1)..(366): Homolog of NCBI NO: 30696077 NR Description: disease resistance protein (TIR-NBS-LRR class),
  misc_feature (1)..(338): Homolog of NCBI NO: 7485210 NR Description: hypothetical protein - Arabidopsis thaliana
  misc_feature (1)..(338): Homolog of NCBI NO: 15235924 NR Description: disease resistance protein (TIR-NBS-LRR class), [Arabidopsis thaliana] >gi|25407548|pir||D85188 disease
  misc_feature (1)..(363): Homolog of NCBI NO: 7488173 NR Description: probable resistance gene - Arabidopsis thaliana
  misc_feature (1)..(363): Homolog of NCBI NO: 15235932 NR Description: disease resistance protein (TIR-NBS-LRR class), [Arabidopsis thaliana] >gi|25407554|pir||C85189 disease
MVIPIFYKVDPSHVRKQTGEFGMVFGETCKGRTENEKRKWMRALAEVAHLAGEDLRNWRSEAEMLENIAKDVSNKLFPPSNNFSDFVGIEAHIEALISMLRFDSKKARMIGICGPSETGKTTIGRALYSRLKSDFHHRAFVAYKRKIRSDYDQKLYWEEQFLSEILCQKDIKIEECGAVEQRLKHTKVLIVLDDVDDIELLKTLVGRIRWFGSESKIVVITQKRELLKAHNIAHVYEVGFPSEELAHQMFCRYAFGKNSPPHGFNELADEAAKIAGNRPKALKYVGSSFRRLDKEQWVKMLSEFRSNGNKLKISYDELDGKGQDYVACLTNGSNSQVKAEWIHLALGVSILLNIRSDGTTILKHLSYNRSMAQQAKIWWYENLERVCKKYNICGIDSSTNGGGKKVCYVGIYPYVLIQYRIAGRY

SEQ ID NO: 108202 - DNA, 1576 bp, Arabidopsis thaliana
  misc_feature (1)..(1576): Ceres Seq. ID no. 13653457
  misc_feature: MA Experiment ID: 20000437 Result: Down-regulated in Transcription
  misc_feature: MA Experiment 20000437 PARAMETER Experiment Name: At_Drought_P Parameter: Age (day) Value: 8
  misc_feature: MA Experiment 20000437 PARAMETER Experiment Name: At_Drought_P Parameter: Organism Value: A. thaliana
  misc_feature: MA Experiment 20000437 PARAMETER Experiment Name: At_Drought_P Parameter: Plant Line Value: WS
  misc_feature: MA Experiment 20000437 PARAMETER Experiment Name: At_Drought_P Parameter: Timepoint (hr) Value: 24
  misc_feature: MA Experiment 20000437 PARAMETER Experiment Name: At_Drought_P Parameter: Tissue Value: Whole Plant
  misc_feature: MA Experiment 20000437 PARAMETER Experiment Name: At_Drought_P Parameter: Treatment Value: Drought vs. No Drought
  misc_feature: MA Experiment ID: 20001451 Result: Down-regulated in Transcription
  misc_feature: MA Experiment 20001451 PARAMETER Experiment Name: At_Far-red-induction_P Parameter: Age (day) Value: 7
  misc_feature: MA Experiment 20001451 PARAMETER Experiment Name: At_Far-red-induction_P Parameter: Light Value: Far-red vs. White
  misc_feature: MA Experiment 20001451 PARAMETER Experiment Name: At_Far-red-induction_P Parameter: Organism Value: A. thaliana
  misc_feature: MA Experiment 20001451 PARAMETER Experiment Name: At_Far-red-induction_P Parameter: Plant Line Value: Columbia
  misc_feature: MA Experiment 20001451 PARAMETER Experiment Name: At_Far-red-induction_P Parameter: Timepoint (hr) Value: 24
  misc_feature: MA Experiment 20001451 PARAMETER Experiment Name: At_Far-red-induction_P Parameter: Tissue Value: Whole Plant
  misc_feature: MA Experiment ID: 20001557 Result: Up-regulated in Transcription
  misc_feature: MA Experiment 20001557 PARAMETER Experiment Name: At_Drought_Soil_Dry_P Parameter: Age (day) Value: 27
  misc_feature: MA Experiment 20001557 PARAMETER Experiment Name: At_Drought_Soil_Dry_P Parameter: Organism Value: A. thaliana
  misc_feature: MA Experiment 20001557 PARAMETER Experiment Name: At_Drought_Soil_Dry_P Parameter: Plant Line Value: WS
  misc_feature: MA Experiment 20001557 PARAMETER Experiment Name: At_Drought_Soil_Dry_P Parameter: Post Timepoint (hr) Value: 3
  misc_feature: MA Experiment 20001557 PARAMETER Experiment Name: At_Drought_Soil_Dry_P Parameter: Post-Treatment Value: Re-Water vs. No Drought
  misc_feature: MA Experiment 20001557 PARAMETER Experiment Name: At_Drought_Soil_Dry_P Parameter: Timepoint (day) Value: 13
  misc_feature: MA Experiment 20001557 PARAMETER Experiment Name: At_Drought_Soil_Dry_P Parameter: Treatment Value: Drought vs. No Drought
  misc_feature: MA Experiment ID: 20001558 Result: Up-regulated in Transcription
  misc_feature: MA Experiment 20001558 PARAMETER Experiment Name: At_Drought_Soil_Dry_P Parameter: Age (day) Value: 27
  misc_feature: MA Experiment 20001558 PARAMETER Experiment Name: At_Drought_Soil_Dry_P Parameter: Organism Value: A. thaliana
  misc_feature: MA Experiment 20001558 PARAMETER Experiment Name: At_Drought_Soil_Dry_P Parameter: Plant Line Value: WS
  misc_feature: MA Experiment 20001558 PARAMETER Experiment Name: At_Drought_Soil_Dry_P Parameter: Post Timepoint (hr) Value: 6
  misc_feature: MA Experiment 20001558 PARAMETER Experiment Name: At_Drought_Soil_Dry_P Parameter: Post-Treatment Value: Re-Water vs. No Drought
  misc_feature: MA Experiment 20001558 PARAMETER Experiment Name: At_Drought_Soil_Dry_P Parameter: Timepoint (day) Value: 13
  misc_feature: MA Experiment 20001558 PARAMETER Experiment Name: At_Drought_Soil_Dry_P Parameter: Treatment Value: Drought vs. No Drought
  misc_feature: MA Experiment ID: 20001757 Result: Up-regulated in Transcription
  misc_feature: MA Experiment 20001757 PARAMETER Experiment Name: At_50mM_NH4NO3_L-to-H_P Parameter: Timepoint (hr) Value: 6
  misc_feature: MA Experiment 20001757 PARAMETER Experiment Name: At_50mM_NH4NO3_L-to-H_P Parameter: Tissue Value: Leaf
  misc_feature: MA Experiment 20001757 PARAMETER Experiment Name: At_50mM_NH4NO3_L-to-H_P Parameter: Treatment Value: 50mM NH4NO3 vs 100mM Mannitol
aggcgctctcatatttctcacattttcgtagccgcaagactcctttcagattcttacttgcagctatgggtaaagagaagtttcacattaacattgtggtcattggtcatgttgattctggaaaatcgaccacaactggtcacttgatctataagcttggtggtattgacaagcgtgtcatcgagaggttcgagaaggaggctgctgagatgaacaagaggtccttcaagtacgcatgggtgttggacaaacttaaggccgagcgtgagcgtggtattaccatcgatattgctctatggaagttcgagaccaccaagtactactgcacagtcattgatgccccaggacatcgtgatttcatcaagaacatgattactggtacctcccaggctgattgtgctgttcttatcattgactccaccactggaggttttgaggctggtatctctaaggatggtcagacccgtgagcacgctcttcttgctttcacccttggtgtcaagcagatgatttgctgttgtaacaagatggatgccaccacccccaaatactccaaggctaggtacgatgaaatcatcaaggaggtgtcttcatacctgaagaaggtcggatacaaccctgacaaaatcccatttgtgccaatctctggattcgagggagacaacatgattgagaggtcaaccaaccttgactggtacaagggaccaactcttcttgaggctcttgaccagatcaacgagcccaagaggccatcagacaagccccttcgtcttccacttcaggatgtctacaagattggtggtattggaacggtgccagtgggacgtgttgagactggtatgatcaagcctggtatggttgttacctttgctcccacagggttgaccactgaggttaagtctgttgagatgcaccacgagtctcttcttgaggcacttcccggtgacaatgttggattcaatgtcaagaatgttgctgtcaaggatcttaagagaggatacgttgcctctaactccaaggatgatccagctaagggtgccgccaacttcacctcccaggtcatcatcatgaaccaccctggtcagattggtaacggttacgccccagttctcgattgccacacctctcacattgcagtcaagttctctgagatcttgaccaagattgacaggcgttctggtaaggagattgagaaggagcccaagtttttgaagaatggtgacgctggtatggttaagatgaccccaaccaagcccatggttgttgagactttctccgagtacccacctttgggacgtttcgctgttagggacatgaggcagaccgttgctgttggtgttattaagagcgtggacaagaaggacccaactggagccaaggtcaccaaggctgcagtgaagaagggtgccaaatgatgagactttcgttatgatcgactctcttatggttttctttggttcttaaaactttgatggcgtttgagcctttttcttttttctctttatttctgtgactttctctctccctcctttttggatatctctgagactttttattatggttttcaattatgcat

SEQ ID NO: 108203 - protein, 470 aa, Arabidopsis thaliana; identical to SEQ ID NO: 40875
  peptide (1)..(470): Ceres Seq. ID no. 13653458
  misc_feature (26)..(248): Pfam Name: Elongation factor Tu GTP binding domain Pfam Description: Elongation factor Tu GTP binding domain
  misc_feature (17)..(470): Homolog of NCBI NO: 25407012 NR Description: protein T6D22.2 [imported] - Arabidopsis thaliana
  misc_feature (22)..(470): Homolog of NCBI NO: 15239308 NR Description: elongation factor 1-alpha (EF-1-alpha)
  misc_feature (22)..(470): Homolog of NCBI NO: 99688 NR Description: translation elongation factor eEF-1 alpha chain
  misc_feature (22)..(470): Homolog of NCBI NO: 13605682 NR Description: At1g07930/T6D22_3 [Arabidopsis thaliana]
  misc_feature (22)..(470): Homolog of NCBI NO: 13430510 NR Description: putative translation elongation factor eEF-1
  misc_feature (22)..(470): Homolog of NCBI NO: 25407012 NR Description: protein T6D22.2 [imported] - Arabidopsis thaliana
  misc_feature (22)..(470): Homolog of NCBI NO: 23397097 NR Description: putative translation elongation factor eEF-1
  misc_feature (22)..(470): Homolog of NCBI NO: 18086389 NR Description: At1g07930/T6D22_3 [Arabidopsis thaliana]
  misc_feature (22)..(470): Homolog of NCBI NO: 17064954 NR Description: putative elongation factor 1-a [Arabidopsis
  misc_feature (22)..(470): Homolog of NCBI NO: 15081765 NR Description: At1g07930/T6D22_3 [Arabidopsis thaliana]

SEQ ID NO: 108204 - protein, 449 aa, Arabidopsis thaliana; identical to SEQ ID NO: 27284
  peptide (1)..(449): Ceres Seq. ID no. 13653459
  misc_feature (5)..(227): Pfam Name: Elongation factor Tu GTP binding domain Pfam Description: Elongation factor Tu GTP binding domain
  misc_feature (1)..(449): Homolog of NCBI NO: 25407012 NR Description: protein T6D22.2 [imported] - Arabidopsis thaliana
  misc_feature (1)..(449): Homolog of NCBI NO: 15239308 NR Description: elongation factor 1-alpha (EF-1-alpha)
  misc_feature (1)..(449): Homolog of NCBI NO: 99688 NR Description: translation elongation factor eEF-1 alpha chain
  misc_feature (1)..(449): Homolog of NCBI NO: 13605682 NR Description: At1g07930/T6D22_3 [Arabidopsis thaliana]
  misc_feature (1)..(449): Homolog of NCBI NO: 13430510 NR Description: putative translation elongation factor eEF-1
  misc_feature (1)..(449): Homolog of NCBI NO: 25407012 NR Description: protein T6D22.2 [imported] - Arabidopsis thaliana
  misc_feature (1)..(449): Homolog of NCBI NO: 23397097 NR Description: putative translation elongation factor eEF-1
  misc_feature (1)..(449): Homolog of NCBI NO: 18086389 NR Description: At1g07930/T6D22_3 [Arabidopsis thaliana]
  misc_feature (1)..(449): Homolog of NCBI NO: 17064954 NR Description: putative elongation factor 1-a [Arabidopsis
  misc_feature (1)..(449): Homolog of NCBI NO: 15081765 NR Description: At1g07930/T6D22_3 [Arabidopsis thaliana]

SEQ ID NO: 108205 - protein, 401 aa, Arabidopsis thaliana; identical to SEQ ID NO: 21437
  peptide (1)..(401): Ceres Seq. ID no. 13653460
  misc_feature (1)..(179): Pfam Name: Elongation factor Tu GTP binding domain Pfam Description: Elongation factor Tu GTP binding domain
  misc_feature (1)..(401): Homolog of NCBI NO: 25407012 NR Description: protein T6D22.2 [imported] - Arabidopsis thaliana
  misc_feature (1)..(401): Homolog of NCBI NO: 15239308 NR Description: elongation factor 1-alpha (EF-1-alpha)
  misc_feature (1)..(401): Homolog of NCBI NO: 99688 NR Description: translation elongation factor eEF-1 alpha chain
  misc_feature (1)..(401): Homolog of NCBI NO: 13605682 NR Description: At1g07930/T6D22_3 [Arabidopsis thaliana]
  misc_feature (1)..(401): Homolog of NCBI NO: 13430510 NR Description: putative translation elongation factor eEF-1
  misc_feature (1)..(401): Homolog of NCBI NO: 25407012 NR Description: protein T6D22.2 [imported] - Arabidopsis thaliana
  misc_feature (1)..(401): Homolog of NCBI NO: 23397097 NR Description: putative translation elongation factor eEF-1
  misc_feature (1)..(401): Homolog of NCBI NO: 18086389 NR Description: At1g07930/T6D22_3 [Arabidopsis thaliana]
  misc_feature (1)..(401): Homolog of NCBI NO: 17064954 NR Description: putative elongation factor 1-a [Arabidopsis
  misc_feature (1)..(401): Homolog of NCBI NO: 15081765 NR Description: At1g07930/T6D22_3 [Arabidopsis thaliana]

SEQ ID NO: 108206 - DNA, 899 bp, Arabidopsis thaliana
  misc_feature (1)..(899): Ceres Seq. ID no. 13653481
  misc_feature: MA Experiment ID: 20001248 Result: Down-regulated in Transcription
  misc_feature: MA Experiment 20001248 PARAMETER Experiment Name: At_Far-red-induction_P Parameter: Age (day) Value: 7
  misc_feature: MA Experiment 20001248 PARAMETER Experiment Name: At_Far-red-induction_P Parameter: Light Value: Far-red vs. White
  misc_feature: MA Experiment 20001248 PARAMETER Experiment Name: At_Far-red-induction_P Parameter: Organism Value: A. thaliana
  misc_feature: MA Experiment 20001248 PARAMETER Experiment Name: At_Far-red-induction_P Parameter: Plant Line Value: Columbia
  misc_feature: MA Experiment 20001248 PARAMETER Experiment Name: At_Far-red-induction_P Parameter: Timepoint (hr) Value: 4
  misc_feature: MA Experiment 20001248 PARAMETER Experiment Name: At_Far-red-induction_P Parameter: Tissue Value: Whole Plant
  misc_feature: Pfam Name: RF-1 Pfam Description: Peptidyl-tRNA hydrolase domain
gacatcgtcattttgacatcggaagaatcttcagtgccgagaaagataaacaaaatggcggcaatcagaacgatgacgaacatgattctacgcgagttcatccatcatccacttctccttcactcttcatcgaaatcgtgtcaatctcttttaccatgtctccgtctcactcccctaatttctccaattcactctaattcccggctcgtatccgtccgatgtgcggcatcgacctccggtggaagcggtggtgatcggaaagtctcttcacggttgtcgcaggtgcaacagatgcttcatgaagccgaagagagagctagttccgctggcaatgagcctactcctcaaatcactctagacaatgttacacttaactttgctagaagtggtggtcctggaggccagaatgtgaacaaattgaataccaaagtagatatgcgcttcaatgttaagaacgcgtattggctgagtgacaggatcagagagaaaatcttactgacggagaagaatcggatcaacaaggatggtgaacttgtgatatcttctaccaaaaccagaacgcagaaaggtaacatcgacgatgcacttgaaaaactacaggcgataattgatgcggcttcatatgttccacctccaccatcagaagaacaaaagaagaaaatagtaaagctcgctgcgaaagctgacaataaacgacttaaaagcaaaaaagttctgtcagacaagaaatctgcgagaagaagccgcggtagttacgatgattaaacttaaaaccatacaatggagtccaggttgattctaaagcttttaacttaaaatgattgttattttcttggaatttaatgtaacacaacaatcaaatcatccaataaaaatttgcagtatattggattttatgt

SEQ ID NO: 108207 - protein, 254 aa, Arabidopsis thaliana
  peptide (1)..(254): Ceres Seq. ID no. 13653482
  misc_feature: Pfam Name: RF-1 Pfam Description: Peptidyl-tRNA hydrolase domain
  misc_feature (19)..(254): Homolog of NCBI NO: 27754314 NR Description: unknown protein [Arabidopsis thaliana]
  misc_feature (146)..(254): Homolog of NCBI NO: 15221608 NR Description: expressed protein [Arabidopsis thaliana]
  misc_feature (19)..(119): Homolog of NCBI NO: 22330386 NR Description: expressed protein [Arabidopsis thaliana]
  misc_feature (120)..(188): Homolog of NCBI NO: 6630453 NR Description: F23N19.20 [Arabidopsis thaliana]
  misc_feature (225)..(254): Homolog of NCBI NO: 6630453 NR Description: F23N19.20 [Arabidopsis thaliana]
  misc_feature (96)..(247): Homolog of NCBI NO: 19387848 NR Description: immature colon carcinoma transcript 1 [Mus >gi|12833706|dbj|BAB22632.1| unnamed protein product [Mus
  misc_feature (112)..(247): Homolog of NCBI NO: 27690532 NR Description: similar to immature colon carcinoma transcript 1
  misc_feature (117)..(247): Homolog of NCBI NO: 12833859 NR Description: unnamed protein product [Mus musculus]
  misc_feature (117)..(247): Homolog of NCBI NO: 20306641 NR Description: Ict1 protein [Mus musculus]
  misc_feature (105)..(247): Homolog of NCBI NO: 4557657 NR Description: immature colon carcinoma transcript 1 [Homo >gi|6015033|sp|Q14197|ICT1_HUMAN Immature colon carcinoma
DIVILTSEESSVPRKINKMAAIRTMTNMILREFIHHPLLLHSSSKSCQSLLPCLRLTPLISPIHSNSRLVSVRCAASTSGGSGGDRKVSSRLSQVQQMLHEAEERASSAGNEPTPQITLDNVTLNFARSGGPGGQNVNKLNTKVDMRFNVKNAYWLSDRIREKILLTEKNRINKDGELVISSTKTRTQKGNIDDALEKLQAIIDAASYVPPPPSEEQKKKIVKLAAKADNKRLKSKKVLSDKKSARRSRGSYDD

SEQ ID NO: 108208 - protein, 236 aa, Arabidopsis thaliana; identical to SEQ ID NO: 26577
  peptide (1)..(236): Ceres Seq. ID no. 13653483
  misc_feature: Pfam Name: RF-1 Pfam Description: Peptidyl-tRNA hydrolase domain
  misc_feature (1)..(236): Homolog of NCBI NO: 27754314 NR Description: unknown protein [Arabidopsis thaliana]
  misc_feature (128)..(236): Homolog of NCBI NO: 15221608 NR Description: expressed protein [Arabidopsis thaliana]
  misc_feature (1)..(101): Homolog of NCBI NO: 22330386 NR Description: expressed protein [Arabidopsis thaliana]
  misc_feature (102)..(170): Homolog of NCBI NO: 6630453 NR Description: F23N19.20 [Arabidopsis thaliana]
  misc_feature (207)..(236): Homolog of NCBI NO: 6630453 NR Description: F23N19.20 [Arabidopsis thaliana]
  misc_feature (78)..(229): Homolog of NCBI NO: 19387848 NR Description: immature colon carcinoma transcript 1 [Mus >gi|12833706|dbj|BAB22632.1| unnamed protein product [Mus
  misc_feature (94)..(229): Homolog of NCBI NO: 27690532 NR Description: similar to immature colon carcinoma transcript 1
  misc_feature (99)..(229): Homolog of NCBI NO: 12833859 NR Description: unnamed protein product [Mus musculus]
  misc_feature (99)..(229): Homolog of NCBI NO: 20306641 NR Description: Ict1 protein [Mus musculus]
  misc_feature (87)..(229): Homolog of NCBI NO: 4557657 NR Description: immature colon carcinoma transcript 1 [Homo >gi|6015033|sp|Q14197|ICT1_HUMAN Immature colon carcinoma

SEQ ID NO: 108209 - protein, 230 aa, Arabidopsis thaliana; identical to SEQ ID NO: 26578
  peptide (1)..(230): Ceres Seq. ID no. 13653484
  misc_feature: Pfam Name: RF-1 Pfam Description: Peptidyl-tRNA hydrolase domain
  misc_feature (1)..(230): Homolog of NCBI NO: 27754314 NR Description: unknown protein [Arabidopsis thaliana]
  misc_feature (122)..(230): Homolog of NCBI NO: 15221608 NR Description: expressed protein [Arabidopsis thaliana]
  misc_feature (1)..(95): Homolog of NCBI NO: 22330386 NR Description: expressed protein [Arabidopsis thaliana]
  misc_feature (96)..(164): Homolog of NCBI NO: 6630453 NR Description: F23N19.20 [Arabidopsis thaliana]
  misc_feature (201)..(230): Homolog of NCBI NO: 6630453 NR Description: F23N19.20 [Arabidopsis thaliana]
  misc_feature (72)..(223): Homolog of NCBI NO: 19387848 NR Description: immature colon carcinoma transcript 1 [Mus >gi|12833706|dbj|BAB22632.1| unnamed protein product [Mus
  misc_feature (88)..(223): Homolog of NCBI NO: 27690532 NR Description: similar to immature colon carcinoma transcript 1
  misc_feature (93)..(223): Homolog of NCBI NO: 12833859 NR Description: unnamed protein product [Mus musculus]
  misc_feature (93)..(223): Homolog of NCBI NO: 20306641 NR Description: Ict1 protein [Mus musculus]
  misc_feature (81)..(223): Homolog of NCBI NO: 4557657 NR Description: immature colon carcinoma transcript 1 [Homo >gi|6015033|sp|Q14197|ICT1_HUMAN Immature colon carcinoma

SEQ ID NO: 108210 - DNA, 835 bp, Arabidopsis thaliana
  misc_feature (1)..(835): Ceres Seq. ID no. 13653493
  misc_feature: MA Experiment ID: 108462 Result: Up-regulated in Transcription
  misc_feature: MA Experiment 108462 PARAMETER Experiment Name: At_Germinating_Seeds_cDNA_P Parameter: Age (day) Value: 2 vs. 0
  misc_feature: MA Experiment 108462 PARAMETER Experiment Name: At_Germinating_Seeds_cDNA_P Parameter: Tissue Value: Germinating Seeds
  misc_feature: MA Experiment ID: 20000069 Result: Up-regulated in Transcription
  misc_feature: MA Experiment 20000069 PARAMETER Experiment Name: At_100uM_ABA_Mutants_cDNA_P Parameter: Plant Line Value: CS23
  misc_feature: MA Experiment 20000069 PARAMETER Experiment Name: At_100uM_ABA_Mutants_cDNA_P Parameter: Timepoint (hr) Value: 6
  misc_feature: MA Experiment 20000069 PARAMETER Experiment Name: At_100uM_ABA_Mutants_cDNA_P Parameter: Tissue Value: Aerial
  misc_feature: MA Experiment 20000069 PARAMETER Experiment Name: At_100uM_ABA_Mutants_cDNA_P Parameter: Treatment Value: 100uM ABA vs. No Treatment
  misc_feature: MA Experiment ID: 20000071 Result: Up-regulated in Transcription
  misc_feature: MA Experiment 20000071 PARAMETER Experiment Name: At_100uM_ABA_Mutants_cDNA_P Parameter: Plant Line Value: CS8104
  misc_feature: MA Experiment 20000071 PARAMETER Experiment Name: At_100uM_ABA_Mutants_cDNA_P Parameter: Timepoint (hr) Value: 6
  misc_feature: MA Experiment 20000071 PARAMETER Experiment Name: At_100uM_ABA_Mutants_cDNA_P Parameter: Tissue Value: Aerial
  misc_feature: MA Experiment 20000071 PARAMETER Experiment Name: At_100uM_ABA_Mutants_cDNA_P Parameter: Treatment Value: 100uM ABA vs. No Treatment
  misc_feature: MA Experiment ID: 20000117 Result: Up-regulated in Transcription
  misc_feature: MA Experiment 20000117 PARAMETER Experiment Name: At_100uM_ABA_Mutants_cDNA_P Parameter: Plant Line Value: Columbia
  misc_feature: MA Experiment 20000117 PARAMETER Experiment Name: At_100uM_ABA_Mutants_cDNA_P Parameter: Timepoint (hr) Value: 6
  misc_feature: MA Experiment 20000117 PARAMETER Experiment Name: At_100uM_ABA_Mutants_cDNA_P Parameter: Tissue Value: Aerial
  misc_feature: MA Experiment 20000117 PARAMETER Experiment Name: At_100uM_ABA_Mutants_cDNA_P Parameter: Treatment Value: 100uM ABA vs. No Treatment
  misc_feature: MA Experiment ID: 20000184 Result: Down-regulated in Transcription
  misc_feature: MA Experiment 20000184 PARAMETER Experiment Name: At_Shoots__P Parameter: Age (day) Value: 7
  misc_feature: MA Experiment 20000184 PARAMETER Experiment Name: At_Shoots__P Parameter: Tissue Value: Shoots vs. Whole Plant
aagaaaagggaaaacaaaggatcttccatgggcgatcgctgagaagatccgcaagaacaaaaacatcaaattccttgaaatcaggaatcttattcgatagtctatttgagcccttgatctggttttttatttggtgaaagttttgaaatggtgctggtattggcattgggggatctccatgtaccccatagagcggctgatctacctcctaagttcaaatcaatgcttgttcctgggaagattcaacacatcatctgcactggaaatctctgcatcaaagaaatccatgactacttgaagactatctgccctgatttgcatatagttcgaggggagtttgacgaagatgcgcgataccctgagaataaaaccttgactattgggcaattcaagctgggattgtgtcatggccaccaggtgatcccatggggtgatctagactcactcgccatgcttcagagacaactgggcgtcgacattctcgtaacaggccatacccaccagttcacagcgtacaaacacgagggaggagtggtgataaacccgggctctgcaaccggagcttacagcagcataaaccaagacgttaacccaagctttgtccttatggacatcgatggtttccgagctgtagtctatgtctatgagctaatcgatggagaagttaaagtcgacaagatcgagttcaagaagccccctactaccagctctggtccgtagttccttaaaaaaaaacttaaaccgttttatgttttcgtctgaaatcactcctaaacatttagaactttcttgtgaaaaataatatttttaacaatttgcaaaacgaaccattgag

SEQ ID NO: 108211 - protein, 190 aa, Arabidopsis thaliana; identical to SEQ ID NO: 21979
  peptide (1)..(190): Ceres Seq. ID no. 13653494
  misc_feature (2)..(120): Pfam Name: Calcineurin-like phosphoesterase Pfam Description: Calcineurin-like phosphoesterase
  misc_feature (1)..(190): Homolog of NCBI NO: 7487365 NR Description: VPS29-like phosphoesterase-related protein
  misc_feature (44)..(190): Homolog of NCBI NO: 30692933 NR Description: calcineurin-like phosphoesterase family
  misc_feature (2)..(183): Homolog of NCBI NO: 7706441 NR Description: vacuolar protein sorting 29 isoform 1; vacuolar protein VPS29/PEP11; vacuolar protein sorting 29 (yeast homolog); protein; x 007 protein [Homo sapiens]
  misc_feature (3)..(183): Homolog of NCBI NO: 17402912 NR Description: vacuolar protein sorting 29 isoform 2; vacuolar protein VPS29/PEP11; vacuolar protein sorting 29 (yeast homolog); protein; x 007 protein [Homo sapiens]
  misc_feature (3)..(183): Homolog of NCBI NO: 9295176 NR Description: DC15 [Homo sapiens]
  misc_feature (2)..(182): Homolog of NCBI NO: 28279210 NR Description: Similar to vacuolar protein sorting 29 (S. pombe)
  misc_feature (2)..(182): Homolog of NCBI NO: 9790285 NR Description: vacuolar protein sorting 29; vacuolar sorting Vacuolar protein sorting 29 (Vesicle protein sorting 29)
  misc_feature (2)..(183): Homolog of NCBI NO: 12052754 NR Description: hypothetical protein [Homo sapiens]
  misc_feature (3)..(182): Homolog of NCBI NO: 12835154 NR Description: unnamed protein product [Mus musculus]
  misc_feature (2)..(182): Homolog of NCBI NO: 31207327 NR Description: ENSANGP00000015419 [Anopheles gambiae]

SEQ ID NO: 108212 - protein, 165 aa, Arabidopsis thaliana; identical to SEQ ID NO: 21980
  peptide (1)..(165): Ceres Seq. ID no. 13653495
  misc_feature (1)..(95): Pfam Name: Calcineurin-like phosphoesterase Pfam Description: Calcineurin-like phosphoesterase
  misc_feature (1)..(165): Homolog of NCBI NO: 7487365 NR Description: VPS29-like phosphoesterase-related protein
  misc_feature (19)..(165): Homolog of NCBI NO: 30692933 NR Description: calcineurin-like phosphoesterase family
  misc_feature (1)..(158): Homolog of NCBI NO: 7706441 NR Description: vacuolar protein sorting 29 isoform 1; vacuolar protein VPS29/PEP11; vacuolar protein sorting 29 (yeast homolog); protein; x 007 protein [Homo sapiens]
  misc_feature (1)..(158): Homolog of NCBI NO: 17402912 NR Description: vacuolar protein sorting 29 isoform 2; vacuolar protein VPS29/PEP11; vacuolar protein sorting 29 (yeast homolog); protein; x 007 protein [Homo sapiens]
  misc_feature (1)..(158): Homolog of NCBI NO: 9295176 NR Description: DC15 [Homo sapiens]
  misc_feature (1)..(157): Homolog of NCBI NO: 28279210 NR Description: Similar to vacuolar protein sorting 29 (S. pombe)
  misc_feature (1)..(157): Homolog of NCBI NO: 9790285 NR Description: vacuolar protein sorting 29; vacuolar sorting Vacuolar protein sorting 29 (Vesicle protein sorting 29)
  misc_feature (1)..(158): Homolog of NCBI NO: 12052754 NR Description: hypothetical protein [Homo sapiens]
  misc_feature (1)..(157): Homolog of NCBI NO: 12835154 NR Description: unnamed protein product [Mus musculus]
  misc_feature (1)..(157): Homolog of NCBI NO: 31207327 NR Description: ENSANGP00000015419 [Anopheles gambiae]

SEQ ID NO: 108213 - DNA, 757 bp, Arabidopsis thaliana
  misc_feature (1)..(757): Ceres Seq. ID no. 13653508
  misc_feature: MA Experiment ID: 20000179 Result: Up-regulated in Transcription
  misc_feature: MA Experiment 20000179 PARAMETER Experiment Name: At_Germinating_Seeds_P Parameter: Age (hr) Value: 6 vs. 0
  misc_feature: MA Experiment 20000179 PARAMETER Experiment Name: At_Germinating_Seeds_P Parameter: Tissue Value: Germinating Seeds
  misc_feature: MA Experiment ID: 20000180 Result: Up-regulated in Transcription
  misc_feature: MA Experiment 20000180 PARAMETER Experiment Name: At_Germinating_Seeds_P Parameter: Age (hr) Value: 24 vs. 0
  misc_feature: MA Experiment 20000180 PARAMETER Experiment Name: At_Germinating_Seeds_P Parameter: Tissue Value: Germinating Seeds
aatgttgttgtttgagagagatgatggctgcgaagcttcagaaatggcgaaatctggcaggtcgtctagatctgatgaatcggagcggcgctgtgtcgacgaggcggttcctgcacgaaggtccagataccgtggaggagcttctcgaaagacatctagcgaagaaagagaaaccaataatcgatcacgatgaggctgagtttctgaatagacggcgtctgacgagcacgcgccgggaagcgttgagtttgtacagagacatattacgagcgactcggttcttcacgtggattgattccaggggaaatttatggagggacgtgttgagagagaacgcgaggaaggagtttgaagcggcgcgatttgagacggatccggaggttatcacaaggcttctgataggtggaagcgacgccgtttcgtctgctttagataagcttgcggagaagcaaagagagatgattgagaaacaacgccgtggtgatcaacgctgatttgacggatcatagggcatgaatgtttcaacagaatgattcatcgagtttaaagtggttggtgtttgaaattcttgctgtaaaatggttgccagaagaagaagcgagatcatttagaaacgtgcttacagaattttgggtttgatgtttgagtgttgtaattcacttgcacaacttacacacttcgtttctgaaattatcattcatgtcattgtagagtttgtatacactgccacagagctataaacaaggctgttgatttt

SEQ ID NO: 108214 - protein, 163 aa, Arabidopsis thaliana
  peptide (1)..(163): Ceres Seq. ID no. 13653509
  misc_feature (75)..(144): Pfam Name: Complex 1 protein (LYR family) Pfam Description: Complex 1 protein (LYR family)
  misc_feature (1)..(163): Homolog of NCBI NO: 25373205 NR Description: protein T4O12.26 [imported] - Arabidopsis >gi|6721112|gb|AAF26766.1|AC007396_15 T4O12.26 [Arabidopsis
  misc_feature (7)..(163): Homolog of NCBI NO: 30699138 NR Description: expressed protein [Arabidopsis thaliana]
  misc_feature (7)..(163): Homolog of NCBI NO: 27754395 NR Description: unknown protein [Arabidopsis thaliana]
CCCLREMMAAKLQKWRNLAGRLDLMNRSGAVSTRRFLHEGPDTVEELLERHLAKKEKPIIDHDEAEFLNRRRLTSTRREALSLYRDILRATRFFTWIDSRGNLWRDVLRENARKEFEAARFETDPEVITRLLIGGSDAVSSALDKLAEKQREMIEKQRRGDQR

SEQ ID NO: 108215 - protein, 157 aa, Arabidopsis thaliana
  peptide (1)..(157): Ceres Seq. ID no. 13653510
  misc_feature (69)..(138): Pfam Name: Complex 1 protein (LYR family) Pfam Description: Complex 1 protein (LYR family)
  misc_feature (1)..(157): Homolog of NCBI NO: 25373205 NR Description: protein T4O12.26 [imported] - Arabidopsis >gi|6721112|gb|AAF26766.1|AC007396_15 T4O12.26 [Arabidopsis
  misc_feature (1)..(157): Homolog of NCBI NO: 30699138 NR Description: expressed protein [Arabidopsis thaliana]
  misc_feature (1)..(157): Homolog of NCBI NO: 27754395 NR Description: unknown protein [Arabidopsis thaliana]
MMAAKLQKWRNLAGRLDLMNRSGAVSTRRFLHEGPDTVEELLERHLAKKEKPIIDHDEAEFLNRRRLTSTRREALSLYRDILRATRFFTWIDSRGNLWRDVLRENARKEFEAARFETDPEVITRLLIGGSDAVSSALDKLAEKQREMIEKQRRGDQR

SEQ ID NO: 108216 - protein, 156 aa, Arabidopsis thaliana
  peptide (1)..(156): Ceres Seq. ID no. 13653511
  misc_feature (68)..(137): Pfam Name: Complex 1 protein (LYR family) Pfam Description: Complex 1 protein (LYR family)
  misc_feature (1)..(156): Homolog of NCBI NO: 25373205 NR Description: protein T4O12.26 [imported] - Arabidopsis >gi|6721112|gb|AAF26766.1|AC007396_15 T4O12.26 [Arabidopsis
  misc_feature (1)..(156): Homolog of NCBI NO: 30699138 NR Description: expressed protein [Arabidopsis thaliana]
  misc_feature (1)..(156): Homolog of NCBI NO: 27754395 NR Description: unknown protein [Arabidopsis thaliana]
MAAKLQKWRNLAGRLDLMNRSGAVSTRRFLHEGPDTVEELLERHLAKKEKPIIDHDEAEFLNRRRLTSTRREALSLYRDILRATRFFTWIDSRGNLWRDVLRENARKEFEAARFETDPEVITRLLIGGSDAVSSALDKLAEKQREMIEKQRRGDQR

SEQ ID NO: 108217 - DNA, 3308 bp, Arabidopsis thaliana
  misc_feature (1)..(3308): Ceres Seq. ID no. 13653524
  misc_feature: MA Experiment ID: 20000184 Result: Up-regulated in Transcription
  misc_feature: MA Experiment 20000184 PARAMETER Experiment Name: At_Shoots__P Parameter: Age (day) Value: 7
  misc_feature: MA Experiment 20000184 PARAMETER Experiment Name: At_Shoots__P Parameter: Tissue Value: Shoots vs. Whole Plant
  misc_feature: MA Experiment ID: 20000185 Result: Up-regulated in Transcription
  misc_feature: MA Experiment 20000185 PARAMETER Experiment Name: At_Roots__P Parameter: Age (day) Value: 7 vs. 21
  misc_feature: MA Experiment 20000185 PARAMETER Experiment Name: At_Roots__P Parameter: Organism Value: A. thaliana
  misc_feature: MA Experiment 20000185 PARAMETER Experiment Name: At_Roots__P Parameter: Tissue Value: Roots vs. Whole Plant
  misc_feature: MA Experiment ID: 20000439 Result: Up-regulated in Transcription
  misc_feature: MA Experiment 20000439 PARAMETER Experiment Name: At_Roots__P Parameter: Age (day) Value: 14 vs. 21
  misc_feature: MA Experiment 20000439 PARAMETER Experiment Name: At_Roots__P Parameter: Organism Value: A. thaliana
  misc_feature: MA Experiment 20000439 PARAMETER Experiment Name: At_Roots__P Parameter: Tissue Value: Roots vs. Whole Plant
agagactcgagacgtagaagaagaagacaaacgtgaacgtctttaaattatgaaacctctttcttaaagttctcaagaggtgctcaacaatggcggatcaatctcttctacactctccgatcaacccacatttctttcagcctattcttacagaatctcgcactcacctcaacattcctgtagctttcttctcgaagcatgttgaaggaagaaacaaccaaaacaagactgtgacgctaagatcagacgcgtcggataaaacttggttagtgaagatggacggtctaaaactaaccgacggatgggaagattttgcctttgcacatgatcttcgaactggtgacatcgtcgttttcagacttgaaggagaaatggtgtttcatgtcacagctttaggaccaagctgttgcgagattcaatatcatacatcatctcacaatatcaatgatgatgatcgtaatgatcagatcaacattgcttcaagaaacagttcaagagtgaagaagaatccacgaaagaaagtagagtcttctttagaccattctcgttttgtggcaaaagtctcagcttggtgcctaagcaatgatagactgtatataccactaagtttcgccaggttaaacggtctgaacaaaatcaacagtaagaaaatctatcttcagaacgaagaaggaagatcatggaagttagttttgagacatgacaaatcaggcacgcaaacttttgtccaatccggttggagaagattctgctctgaaaatgggattaggcaaggtcaatatacattcaaacttgtccgaaaatcagcaccacctgtcatccgtttgtgccgcgcaaaagctaaaccaaaacaaagatcagttgcagaatattcatcagaccattcttgttttgagggatctgtcactccttcaagcctaagaaatgatctactgtatcttccaaggagctttgtgaactcaaatcgtctggacaaaagatgcagtgagatagttttaaagaatgaacagggagtaaaatggcctttagttttgaaacgtttcaaatcagtcacttatctcccaaaaggctggactagtttctgtcaagtaaacaggatcaaagcaggagattcattcaagtttaaactggttggaacctggaaaaaacctgttctttctttgtgtccgacacaatccaacaatcacaaaactccattagagtgttcagaaggtaacaaatccgaagaaagtgaagaggattgcttggaggtaaagaaaaagaagtattggtcgagatgcagagcttctgtagaaaacatggatgatgatcagaccaacattggaaacagttcaagaaagaagagagtgagtaagaatccaagagagaaagtagagtcttcatcagaccattctagttttgtgggatctgtcaatccttcaagcctatacaaagatcaactgtatcttccaaggaattttgtgagctcaaattttctggacaaaagatgcagtgagatagttttaaagaatgaacggggagaaaaaaggactttagttttgaaacacttcaaaaaagaccttacttttctcaaaaaaggctggactagtttctgtcaagtaaataggatcaaagctggagattccttcaagtttaaactggttggaacatggaacaaacctgttctttctttgtgccctacagaaaccaactatcacaaaactccattagcgtgttcagagggcaacaaatccgaagaaagtgaagaggagggtactgaagacaagaatacctcacaagattgcttggaggtgaagaaaaggaagtattggtcaacatgcagagcttctgcagagaacatagatgatgatcagaccaatattggaaacagttcaaaagagaagagagtgaagaaaaatccagtaaagaaagcagagtcttcatcagaccattctagttttgtggctaatgtcacagcttcaagcctaaactatgatcgactgtatttaccactaagtttcgtgagttcaaacggtctagataaaatgaacggtaaggagatcgttcttcttaatgaagaaggactatcatggaagtttaatttgaagtacaaccaagcaggcaagcatacttatgtcagacctggttggtcaagattctgtgatgcaaatgggatgagccaaggtcaacaatttacattcaaactggtccaaaaacatggaccacctgtcatgtatttgagcctcagtgaacatagaccaaagtcagaatcttcatcgcaccgttcctattttgtaggatctgtcactgcttcaagcataaagaaagataaactgtatttatggaagagttttgtgagctctaatggtctggacaaaggatgcaagaagataattttaaagaataaatggggaagagaatggaaattagtcttgaaacactacaaatcaaactgctttactattatcaaacgaggctggaccagtttctgccaaggcaacggtttgaaagctggagattccttcaagttcaaactggttggaaccggggaaaagcctgttctttctttgtgccctgcagaatccagccatgaaaaaattccattagagtgtccagaaggtatagatgatgtcaattcactctcctcaaatcctagcagtggagatgacagtagtagatccgaagaaagcgaagaggagaatatggaagacaagaacatctcacaggattgcttggaaaccaagaaaaggaagtattgctcttcatcgtcatatagtcaaaaccgatttgtgacattaactcttacacggtccgcttttcaaacctataaactggtaagcttcttcaacaactatgcctcaaggttgtcttagtatattattttgccacaaaatcatttttttgcagtttcttccgcgcggtttcacgcaggtgaatggcatcaacaagccaaggaagataactctgctgggtcaagatggagttaaaaaggtggtggatctctatcaggaaagtagtagcagaataatgagatttggaaaaggctggagagagttctttgatgctcaaggcgtgaagatagacgactcctttgtgttggaactcatttgggagaaagaagcaagtccggtgcttaagttctgcaccaaagtaccaaagtaaactctgcttgagactgtttccagagaagtagcttgtggtgtgtctcaacacattctctcattccctcgatttctttagcttttgcaactcttgactagatgtctacatatctgagtcttgtttaagagttgaagaaaatgttacgacttaactacttgtgtgttgtg

SEQ ID NO: 108218 - protein, 920 aa, Arabidopsis thaliana
  peptide (1)..(920): Ceres Seq. ID no. 13653525
  misc_feature (727)..(827): Pfam Name: B3 DNA binding domain Pfam Description: B3 DNA binding domain
  misc_feature (575)..(899): Homolog of NCBI NO: 15224180 NR Description: transcriptional factor B3 family [Arabidopsis
  misc_feature (6)..(267): Homolog of NCBI NO: 15224180 NR Description: transcriptional factor B3 family [Arabidopsis
  misc_feature (128)..(509): Homolog of NCBI NO: 15224604 NR Description: transcriptional factor B3 family [Arabidopsis
  misc_feature (6)..(111): Homolog of NCBI NO: 15224604 NR Description: transcriptional factor B3 family [Arabidopsis
  misc_feature (585)..(688): Homolog of NCBI NO: 15224604 NR Description: transcriptional factor B3 family [Arabidopsis
  misc_feature (12)..(246): Homolog of NCBI NO: 26450115 NR Description: unknown protein [Arabidopsis thaliana]
  misc_feature (424)..(583): Homolog of NCBI NO: 26450115 NR Description: unknown protein [Arabidopsis thaliana]
  misc_feature (252)..(849): Homolog of NCBI NO: 15224180 NR Description: transcriptional factor B3 family [Arabidopsis
  misc_feature (741)..(859): Homolog of NCBI NO: 15224604 NR Description: transcriptional factor B3 family [Arabidopsis
  misc_feature (713)..(820): Homolog of NCBI NO: 15224604 NR Description: transcriptional factor B3 family [Arabidopsis
MADQSLLHSPINPHFFQPILTESRTHLNIPVAFFSKHVEGRNNQNKTVTLRSDASDKTWLVKMDGLKLTDGWEDFAFAHDLRTGDIVVFRLEGEMVFHVTALGPSCCEIQYHTSSHNINDDDRNDQINIASRNSSRVKKNPRKKVESSLDHSRFVAKVSAWCLSNDRLYIPLSFARLNGLNKINSKKIYLQNEEGRSWKLVLRHDKSGTQTFVQSGWRRFCSENGIRQGQYTFKLVRKSAPPVIRLCRAKAKPKQRSVAEYSSDHSCFEGSVTPSSLRNDLLYLPRSFVNSNRLDKRCSEIVLKNEQGVKWPLVLKRFKSVTYLPKGWTSFCQVNRIKAGDSFKFKLVGTWKKPVLSLCPTQSNNHKTPLECSEGNKSEESEEDCLEVKKKKYWSRCRASVENMDDDQTNIGNSSRKKRVSKNPREKVESSSDHSSFVGSVNPSSLYKDQLYLPRNFVSSNFLDKRCSEIVLKNERGEKRTLVLKHFKKDLTFLKKGWTSFCQVNRIKAGDSFKFKLVGTWNKPVLSLCPTETNYHKTPLACSEGNKSEESEEEGTEDKNTSQDCLEVKKRKYWSTCRASAENIDDDQTNIGNSSKEKRVKKNPVKKAESSSDHSSFVANVTASSLNYDRLYLPLSFVSSNGLDKMNGKEIVLLNEEGLSWKFNLKYNQAGKHTYVRPGWSRFCDANGMSQGQQFTFKLVQKHGPPVMYLSLSEHRPKSESSSHRSYFVGSVTASSIKKDKLYLWKSFVSSNGLDKGCKKIILKNKWGREWKLVLKHYKSNCFTIIKRGWTSFCQGNGLKAGDSFKFKLVGTGEKPVLSLCPAESSHEKIPLECPEGIDDVNSLSSNPSSGDDSSRSEESEEENMEDKNISQDCLETKKRKYCSSSSYSQNRFVTLTLTRSAFQTYKLVSFFNNYASRLS

SEQ ID NO: 108219 - protein, 858 aa, Arabidopsis thaliana
  peptide (1)..(858): Ceres Seq. ID no. 13653526
  misc_feature (665)..(765): Pfam Name: B3 DNA binding domain Pfam Description: B3 DNA binding domain
  misc_feature (513)..(837): Homolog of NCBI NO: 15224180 NR Description: transcriptional factor B3 family [Arabidopsis
  misc_feature (1)..(205): Homolog of NCBI NO: 15224180 NR Description: transcriptional factor B3 family [Arabidopsis
  misc_feature (66)..(447): Homolog of NCBI NO: 15224604 NR Description: transcriptional factor B3 family [Arabidopsis
  misc_feature (1)..(49): Homolog of NCBI NO: 15224604 NR Description: transcriptional factor B3 family [Arabidopsis
  misc_feature (523)..(626): Homolog of NCBI NO: 15224604 NR Description: transcriptional factor B3 family [Arabidopsis
  misc_feature (1)..(184): Homolog of NCBI NO: 26450115 NR Description: unknown protein [Arabidopsis thaliana]
  misc_feature (362)..(521): Homolog of NCBI NO: 26450115 NR Description: unknown protein [Arabidopsis thaliana]
  misc_feature (190)..(787): Homolog of NCBI NO: 15224180 NR Description: transcriptional factor B3 family [Arabidopsis
  misc_feature (679)..(797): Homolog of NCBI NO: 15224604 NR Description: transcriptional factor B3 family [Arabidopsis
  misc_feature (651)..(758): Homolog of NCBI NO: 15224604 NR Description: transcriptional factor B3 family [Arabidopsis
MDGLKLTDGWEDFAFAHDLRTGDIVVFRLEGEMVFHVTALGPSCCEIQYHTSSHNINDDDRNDQINIASRNSSRVKKNPRKKVESSLDHSRFVAKVSAWCLSNDRLYIPLSFARLNGLNKINSKKIYLQNEEGRSWKLVLRHDKSGTQTFVQSGWRRFCSENGIRQGQYTFKLVRKSAPPVIRLCRAKAKPKQRSVAEYSSDHSCFEGSVTPSSLRNDLLYLPRSFVNSNRLDKRCSEIVLKNEQGVKWPLVLKRFKSVTYLPKGWTSFCQVNRIKAGDSFKFKLVGTWKKPVLSLCPTQSNNHKTPLECSEGNKSEESEEDCLEVKKKKYWSRCRASVENMDDDQTNIGNSSRKKRVSKNPREKVESSSDHSSFVGSVNPSSLYKDQLYLPRNFVSSNFLDKRCSEIVLKNERGEKRTLVLKHFKKDLTFLKKGWTSFCQVNRIKAGDSFKFKLVGTWNKPVLSLCPTETNYHKTPLACSEGNKSEESEEEGTEDKNTSQDCLEVKKRKYWSTCRASAENIDDDQTNIGNSSKEKRVKKNPVKKAESSSDHSSFVANVTASSLNYDRLYLPLSFVSSNGLDKMNGKEIVLLNEEGLSWKFNLKYNQAGKHTYVRPGWSRFCDANGMSQGQQFTFKLVQKHGPPVMYLSLSEHRPKSESSSHRSYFVGSVTASSIKKDKLYLWKSFVSSNGLDKGCKKIILKNKWGREWKLVLKHYKSNCFTIIKRGWTSFCQGNGLKAGDSFKFKLVGTGEKPVLSLCPAESSHEKIPLECPEGIDDVNSLSSNPSSGDDSSRSEESEEENMEDKNISQDCLETKKRKYCSSSSYSQNRFVTLTLTRSAFQTYKLVSFFNNYASRLS

SEQ ID NO: 108220 - protein, 826 aa, Arabidopsis thaliana
  peptide (1)..(826): Ceres Seq. ID no. 13653527
  misc_feature (633)..(733): Pfam Name: B3 DNA binding domain Pfam Description: B3 DNA binding domain
  misc_feature (481)..(805): Homolog of NCBI NO: 15224180 NR Description: transcriptional factor B3 family [Arabidopsis
  misc_feature (1)..(173): Homolog of NCBI NO: 15224180 NR Description: transcriptional factor B3 family [Arabidopsis
  misc_feature (34)..(415): Homolog of NCBI NO: 15224604 NR Description: transcriptional factor B3 family [Arabidopsis
  misc_feature (1)..(17): Homolog of NCBI NO: 15224604 NR Description: transcriptional factor B3 family [Arabidopsis
  misc_feature (491)..(594): Homolog of NCBI NO: 15224604 NR Description: transcriptional factor B3 family [Arabidopsis
  misc_feature (1)..(152): Homolog of NCBI NO: 26450115 NR Description: unknown protein [Arabidopsis thaliana]
  misc_feature (330)..(489): Homolog of NCBI NO: 26450115 NR Description: unknown protein [Arabidopsis thaliana]
  misc_feature (158)..(755): Homolog of NCBI NO: 15224180 NR Description: transcriptional factor B3 family [Arabidopsis
  misc_feature (647)..(765): Homolog of NCBI NO: 15224604 NR Description: transcriptional factor B3 family [Arabidopsis
  misc_feature (619)..(726): Homolog of NCBI NO: 15224604 NR Description: transcriptional factor B3 family [Arabidopsis
MVFHVTALGPSCCEIQYHTSSHNINDDDRNDQINIASRNSSRVKKNPRKKVESSLDHSRFVAKVSAWCLSNDRLYIPLSFARLNGLNKINSKKIYLQNEEGRSWKLVLRHDKSGTQTFVQSGWRRFCSENGIRQGQYTFKLVRKSAPPVIRLCRAKAKPKQRSVAEYSSDHSCFEGSVTPSSLRNDLLYLPRSFVNSNRLDKRCSEIVLKNEQGVKWPLVLKRFKSVTYLPKGWTSFCQVNRIKAGDSFKFKLVGTWKKPVLSLCPTQSNNHKTPLECSEGNKSEESEEDCLEVKKKKYWSRCRASVENMDDDQTNIGNSSRKKRVSKNPREKVESSSDHSSFVGSVNPSSLYKDQLYLPRNFVSSNFLDKRCSEIVLKNERGEKRTLVLKHFKKDLTFLKKGWTSFCQVNRIKAGDSFKFKLVGTWNKPVLSLCPTETNYHKTPLACSEGNKSEESEEEGTEDKNTSQDCLEVKKRKYWSTCRASAENIDDDQTNIGNSSKEKRVKKNPVKKAESSSDHSSFVANVTASSLNYDRLYLPLSFVSSNGLDKMNGKEIVLLNEEGLSWKFNLKYNQAGKHTYVRPGWSRFCDANGMSQGQQFTFKLVQKHGPPVMYLSLSEHRPKSESSSHRSYFVGSVTASSIKKDKLYLWKSFVSSNGLDKGCKKIILKNKWGREWKLVLKHYKSNCFTIIKRGWTSFCQGNGLKAGDSFKFKLVGTGEKPVLSLCPAESSHEKIPLECPEGIDDVNSLSSNPSSGDDSSRSEESEEENMEDKNISQDCLETKKRKYCSSSSYSQNRFVTLTLTRSAFQTYKLVSFFNNYASRLS

SEQ ID NO: 108221 - DNA, 1678 bp, Arabidopsis thaliana
  misc_feature (1)..(1678): Ceres Seq. ID no. 13653555
  misc_feature: MA Experiment ID: 20000171 Result: Down-regulated in Transcription
  misc_feature: MA Experiment 20000171 PARAMETER Experiment Name: At_42deg_Heat_P Parameter: Age (day) Value: 14
  misc_feature: MA Experiment 20000171 PARAMETER Experiment Name: At_42deg_Heat_P Parameter: Organism Value: A. thaliana
  misc_feature: MA Experiment 20000171 PARAMETER Experiment Name: At_42deg_Heat_P Parameter: Plant Line Value: WS
  misc_feature: MA Experiment 20000171 PARAMETER Experiment Name: At_42deg_Heat_P Parameter: Temperature (deg C) Value: 42 vs. 22
  misc_feature: MA Experiment 20000171 PARAMETER Experiment Name: At_42deg_Heat_P Parameter: Timepoint (hr) Value: 1
  misc_feature: MA Experiment 20000171 PARAMETER Experiment Name: At_42deg_Heat_P Parameter: Tissue Value: Aerial
  misc_feature: MA Experiment ID: 20000185 Result: Up-regulated in Transcription
  misc_feature: MA Experiment 20000185 PARAMETER Experiment Name: At_Roots__P Parameter: Age (day) Value: 7 vs. 21
  misc_feature: MA Experiment 20000185 PARAMETER Experiment Name: At_Roots__P Parameter: Organism Value: A. thaliana
  misc_feature: MA Experiment 20000185 PARAMETER Experiment Name: At_Roots__P Parameter: Tissue Value: Roots vs. Whole Plant
  misc_feature: MA Experiment ID: 20000234 Result: Up-regulated in Transcription
  misc_feature: MA Experiment 20000234 PARAMETER Experiment Name: At_Siliques_P Parameter: Age (day) Value: 21
  misc_feature: MA Experiment 20000234 PARAMETER Experiment Name: At_Siliques_P Parameter: Organism Value: A. thaliana
  misc_feature: MA Experiment 20000234 PARAMETER Experiment Name: At_Siliques_P Parameter: Plant Line Value: WS
  misc_feature: MA Experiment 20000234 PARAMETER Experiment Name: At_Siliques_P Parameter: Tissue Value: Less Than 5mm Siliques vs. Whole Plant
  misc_feature: MA Experiment ID: 20000264 Result: Up-regulated in Transcription
  misc_feature: MA Experiment 20000264 PARAMETER Experiment Name: At_Open_Flower_P Parameter: Age (day) Value: 21
  misc_feature: MA Experiment 20000264 PARAMETER Experiment Name: At_Open_Flower_P Parameter: Plant Line Value: WS
  misc_feature: MA Experiment 20000264 PARAMETER Experiment Name: At_Open_Flower_P Parameter: Tissue Value: Open Flower vs. Whole Plant
  misc_feature: MA Experiment ID: 20000265 Result: Up-regulated in Transcription
  misc_feature: MA Experiment 20000265 PARAMETER Experiment Name: At_Open_Flower_P Parameter: Age (day) Value: 21
  misc_feature: MA Experiment 20000265 PARAMETER Experiment Name: At_Open_Flower_P Parameter: Plant Line Value: WS
  misc_feature: MA Experiment 20000265 PARAMETER Experiment Name: At_Open_Flower_P Parameter: Tissue Value: Closed Flower vs. Whole Plant
  misc_feature: MA Experiment ID: 20000286 Result: Up-regulated in Transcription
  misc_feature: MA Experiment 20000286 PARAMETER Experiment Name: At_Open_Flower_P Parameter: Age (day) Value: 21
  misc_feature: MA Experiment 20000286 PARAMETER Experiment Name: At_Open_Flower_P Parameter: Plant Line Value: WS
  misc_feature: MA Experiment 20000286 PARAMETER Experiment Name: At_Open_Flower_P Parameter: Tissue Value: Half Open vs. Whole Plant
  misc_feature: MA Experiment ID: 20000439 Result: Up-regulated in Transcription
  misc_feature: MA Experiment 20000439 PARAMETER Experiment Name: At_Roots__P Parameter: Age (day) Value: 14 vs. 21
  misc_feature: MA Experiment 20000439 PARAMETER Experiment Name: At_Roots__P Parameter: Organism Value: A. thaliana
  misc_feature: MA Experiment 20000439 PARAMETER Experiment Name: At_Roots__P Parameter: Tissue Value: Roots vs. Whole Plant
  misc_feature: MA Experiment ID: 20000495 Result: Up-regulated in Transcription
  misc_feature: MA Experiment 20000495 PARAMETER Experiment Name: At_Guard_Cells_P Parameter: Harvest Date Value: 8/2/2002
  misc_feature: MA Experiment 20000495 PARAMETER Experiment Name: At_Guard_Cells_P Parameter: Organism Value: A. thaliana
  misc_feature: MA Experiment 20000495 PARAMETER Experiment Name: At_Guard_Cells_P Parameter: Tissue Value: Guard Cells vs. Leaves
  misc_feature: MA Experiment ID: 20000573 Result: Down-regulated in Transcription
  misc_feature: MA Experiment 20000573 PARAMETER Experiment Name: At_100uM_ABA_Mutants__P Parameter: Organism Value: A. thaliana
  misc_feature: MA Experiment 20000573 PARAMETER Experiment Name: At_100uM_ABA_Mutants__P Parameter: Plant Line Value: CS22 vs. Ler wt
  misc_feature: MA Experiment 20000573 PARAMETER Experiment Name: At_100uM_ABA_Mutants__P Parameter: Timepoint (hr) Value: N/A
  misc_feature: MA Experiment 20000573 PARAMETER Experiment Name: At_100uM_ABA_Mutants__P Parameter: Tissue Value: Whole Plant
  misc_feature: MA Experiment 20000573 PARAMETER Experiment Name: At_100uM_ABA_Mutants__P Parameter: Treatment Value: None
  misc_feature: MA Experiment ID: 20000574 Result: Down-regulated in Transcription
  misc_feature: MA Experiment 20000574 PARAMETER Experiment Name: At_100uM_ABA_Mutants__P Parameter: Organism Value: A. thaliana
  misc_feature: MA Experiment 20000574 PARAMETER Experiment Name: At_100uM_ABA_Mutants__P Parameter: Plant Line Value: CS23 vs. Ler wt
  misc_feature: MA Experiment 20000574 PARAMETER Experiment Name: At_100uM_ABA_Mutants__P Parameter: Timepoint (hr) Value: N/A
  misc_feature: MA Experiment 20000574 PARAMETER Experiment Name: At_100uM_ABA_Mutants__P Parameter: Tissue Value: Whole Plant
  misc_feature: MA Experiment 20000574 PARAMETER Experiment Name: At_100uM_ABA_Mutants__P Parameter: Treatment Value: None
  misc_feature: MA Experiment ID: 20001247 Result: Down-regulated in Transcription
  misc_feature: MA Experiment 20001247 PARAMETER Experiment Name: At_Far-red-induction_P Parameter: Age (day) Value: 7
  misc_feature: MA Experiment 20001247 PARAMETER Experiment Name: At_Far-red-induction_P Parameter: Light Value: Far-red vs. White
  misc_feature: MA Experiment 20001247 PARAMETER Experiment Name: At_Far-red-induction_P Parameter: Organism Value: A. thaliana
  misc_feature: MA Experiment 20001247 PARAMETER Experiment Name: At_Far-red-induction_P Parameter: Plant Line Value: Columbia
  misc_feature: MA Experiment 20001247 PARAMETER Experiment Name: At_Far-red-induction_P Parameter: Timepoint (hr) Value: 1
  misc_feature: MA Experiment 20001247 PARAMETER Experiment Name: At_Far-red-induction_P Parameter: Tissue Value: Whole Plant
  misc_feature: MA Experiment ID: 20001554 Result: Up-regulated in Transcription
  misc_feature: MA Experiment 20001554 PARAMETER Experiment Name: At_Drought_Soil_Dry_P Parameter: Age (day) Value: 21
  misc_feature: MA Experiment 20001554 PARAMETER Experiment Name: At_Drought_Soil_Dry_P Parameter: Organism Value: A. thaliana
  misc_feature: MA Experiment 20001554 PARAMETER Experiment Name: At_Drought_Soil_Dry_P Parameter: Plant Line Value: WS
  misc_feature: MA Experiment 20001554 PARAMETER Experiment Name: At_Drought_Soil_Dry_P Parameter: Post Timepoint (hr) Value: None
  misc_feature: MA Experiment 20001554 PARAMETER Experiment Name: At_Drought_Soil_Dry_P Parameter: Post-Treatment Value: None
  misc_feature: MA Experiment 20001554 PARAMETER Experiment Name: At_Drought_Soil_Dry_P Parameter: Timepoint (day) Value: 7
  misc_feature: MA Experiment 20001554 PARAMETER Experiment Name: At_Drought_Soil_Dry_P Parameter: Treatment Value: Drought vs. No Drought
  misc_feature: MA Experiment ID: 20001555 Result: Up-regulated in Transcription
  misc_feature: MA Experiment 20001555 PARAMETER Experiment Name: At_Drought_Soil_Dry_P Parameter: Age (day) Value: 24
  misc_feature: MA Experiment 20001555 PARAMETER Experiment Name: At_Drought_Soil_Dry_P Parameter: Organism Value: A. thaliana
  misc_feature: MA Experiment 20001555 PARAMETER Experiment Name: At_Drought_Soil_Dry_P Parameter: Plant Line Value: WS
  misc_feature: MA Experiment 20001555 PARAMETER Experiment Name: At_Drought_Soil_Dry_P Parameter: Post Timepoint (hr) Value: None
  misc_feature: MA Experiment 20001555 PARAMETER Experiment Name: At_Drought_Soil_Dry_P Parameter: Post-Treatment Value: None
  misc_feature: MA Experiment 20001555 PARAMETER Experiment Name: At_Drought_Soil_Dry_P Parameter: Timepoint (day) Value: 10
  misc_feature: MA Experiment 20001555 PARAMETER Experiment Name: At_Drought_Soil_Dry_P Parameter: Treatment Value: Drought vs. No Drought
  misc_feature: MA Experiment ID: 20001556 Result: Up-regulated in Transcription
  misc_feature: MA Experiment 20001556 PARAMETER Experiment Name: At_Drought_Soil_Dry_P Parameter: Age (day) Value: 26
  misc_feature: MA Experiment 20001556 PARAMETER Experiment Name: At_Drought_Soil_Dry_P Parameter: Organism Value: A. thaliana
  misc_feature: MA Experiment 20001556 PARAMETER Experiment Name: At_Drought_Soil_Dry_P Parameter: Plant Line Value: WS
  misc_feature: MA Experiment 20001556 PARAMETER Experiment Name: At_Drought_Soil_Dry_P Parameter: Post Timepoint (hr) Value: None
  misc_feature: MA Experiment 20001556 PARAMETER Experiment Name: At_Drought_Soil_Dry_P Parameter: Post-Treatment Value: None
  misc_feature: MA Experiment 20001556 PARAMETER Experiment Name: At_Drought_Soil_Dry_P Parameter: Timepoint (day) Value: 12
  misc_feature: MA Experiment 20001556 PARAMETER Experiment Name: At_Drought_Soil_Dry_P Parameter: Treatment Value: Drought vs. No Drought
  misc_feature: MA Experiment ID: 20001559 Result: Up-regulated in Transcription
  misc_feature: MA Experiment 20001559 PARAMETER Experiment Name: At_Drought_Soil_Dry_P Parameter: Age (day) Value: 28
  misc_feature: MA Experiment 20001559 PARAMETER Experiment Name: At_Drought_Soil_Dry_P Parameter: Organism Value: A. thaliana
  misc_feature: MA Experiment 20001559 PARAMETER Experiment Name: At_Drought_Soil_Dry_P Parameter: Plant Line Value: WS
  misc_feature: MA Experiment 20001559 PARAMETER Experiment Name: At_Drought_Soil_Dry_P Parameter: Post Timepoint (hr) Value: 29
  misc_feature: MA Experiment 20001559 PARAMETER Experiment Name: At_Drought_Soil_Dry_P Parameter: Post-Treatment Value: Re-Water vs. No Drought
  misc_feature: MA Experiment 20001559 PARAMETER Experiment Name: At_Drought_Soil_Dry_P Parameter: Timepoint (day) Value: 14
  misc_feature: MA Experiment 20001559 PARAMETER Experiment Name: At_Drought_Soil_Dry_P Parameter: Treatment Value: Drought vs. No Drought
  misc_feature: MA Experiment ID: 20001904 Result: Up-regulated in Transcription
  misc_feature: MA Experiment 20001904 PARAMETER Experiment Name: At_Drought_Reproduction_P Parameter: Age (day) Value: 37
  misc_feature: MA Experiment 20001904 PARAMETER Experiment Name: At_Drought_Reproduction_P Parameter: Organism Value: A. thaliana
  misc_feature: MA Experiment 20001904 PARAMETER Experiment Name: At_Drought_Reproduction_P Parameter: Plant Line Value: WS
  misc_feature: MA Experiment 20001904 PARAMETER Experiment Name: At_Drought_Reproduction_P Parameter: Timepoint (day) Value: 7
  misc_feature: MA Experiment 20001904 PARAMETER Experiment Name: At_Drought_Reproduction_P Parameter: Tissue Value: Rosettes
  misc_feature: MA Experiment 20001904 PARAMETER Experiment Name: At_Drought_Reproduction_P Parameter: Treatment Value: Drought vs. No Drought
  misc_feature: MA Experiment ID: 20001905 Result: Up-regulated in Transcription
  misc_feature: MA Experiment 20001905 PARAMETER Experiment Name: At_Drought_Reproduction_P Parameter: Age (day) Value: 40
  misc_feature: MA Experiment 20001905 PARAMETER Experiment Name: At_Drought_Reproduction_P Parameter: Organism Value: A. thaliana
  misc_feature: MA Experiment 20001905 PARAMETER Experiment Name: At_Drought_Reproduction_P Parameter: Plant Line Value: WS
  misc_feature: MA Experiment 20001905 PARAMETER Experiment Name: At_Drought_Reproduction_P Parameter: Timepoint (day) Value: 10
  misc_feature: MA Experiment 20001905 PARAMETER Experiment Name: At_Drought_Reproduction_P Parameter: Tissue Value: Rosettes
  misc_feature: MA Experiment 20001905 PARAMETER Experiment Name: At_Drought_Reproduction_P Parameter: Treatment Value: Drought vs. No Drought
  misc_feature: MA Experiment ID: 20001906 Result: Up-regulated in Transcription
  misc_feature: MA Experiment 20001906 PARAMETER Experiment Name: At_Drought_Reproduction_P Parameter: Age (day) Value: 35
  misc_feature: MA Experiment 20001906 PARAMETER Experiment Name: At_Drought_Reproduction_P Parameter: Organism Value: A. thaliana
  misc_feature: MA Experiment 20001906 PARAMETER Experiment Name: At_Drought_Reproduction_P Parameter: Plant Line Value: WS
  misc_feature: MA Experiment 20001906 PARAMETER Experiment Name: At_Drought_Reproduction_P Parameter: Timepoint (day) Value: 5
  misc_feature: MA Experiment 20001906 PARAMETER Experiment Name: At_Drought_Reproduction_P Parameter: Tissue Value: Siliques
  misc_feature: MA Experiment 20001906 PARAMETER Experiment Name: At_Drought_Reproduction_P Parameter: Treatment Value: Drought vs. No Drought
  misc_feature: MA Experiment ID: 20001908 Result: Up-regulated in Transcription
  misc_feature: MA Experiment 20001908 PARAMETER Experiment Name: At_Drought_Reproduction_P Parameter: Age (day) Value: 40
  misc_feature: MA Experiment 20001908 PARAMETER Experiment Name: At_Drought_Reproduction_P Parameter: Organism Value: A. thaliana
  misc_feature: MA Experiment 20001908 PARAMETER Experiment Name: At_Drought_Reproduction_P Parameter: Plant Line Value: WS
  misc_feature: MA Experiment 20001908 PARAMETER Experiment Name: At_Drought_Reproduction_P Parameter: Timepoint (day) Value: 10
  misc_feature: MA Experiment 20001908 PARAMETER Experiment Name: At_Drought_Reproduction_P Parameter: Tissue Value: Siliques
  misc_feature: MA Experiment 20001908 PARAMETER Experiment Name: At_Drought_Reproduction_P Parameter: Treatment Value: Drought vs. No Drought
  misc_feature: MA Experiment ID: 20001911 Result: Up-regulated in Transcription
  misc_feature: MA Experiment 20001911 PARAMETER Experiment Name: At_Drought_Reproduction_P Parameter: Age (day) Value: 40
  misc_feature: MA Experiment 20001911 PARAMETER Experiment Name: At_Drought_Reproduction_P Parameter: Organism Value: A. thaliana
  misc_feature: MA Experiment 20001911 PARAMETER Experiment Name: At_Drought_Reproduction_P Parameter: Plant Line Value: WS
  misc_feature: MA Experiment 20001911 PARAMETER Experiment Name: At_Drought_Reproduction_P Parameter: Timepoint (day) Value: 10
  misc_feature: MA Experiment 20001911 PARAMETER Experiment Name: At_Drought_Reproduction_P Parameter: Tissue Value: Flowers
  misc_feature: MA Experiment 20001911 PARAMETER Experiment Name: At_Drought_Reproduction_P Parameter: Treatment Value: Drought vs. No Drought
  misc_feature: Pfam Name: p450 Pfam Description: Cytochrome P450
tcatcgctgtctggaacagcgaagaaaatggacctcacccaaatcctactcctctcctttctctttctcactatctccatcaaactcttgctcacaaaatctaaccggaaacctaatcttcctccttctccggcttaccctttaccggttatcggccacctccacctcctcaagcaaccggtccaccgaacattccactccatctctaagtcccttggaaatgctccaatcttccacctccgcctgggaaaccgcctcgtttacgtcatctcctcacactccatagccgaagaatgtttcaccaaaaacgacgtcgttcttgcgaaccgtcctgatatcatcatggccaaacacgtcggctataactttaccaatatgattgcagcatcttacggcgaccactggaggaatctccgccgcatcgccgccgtcgagatattttcttctcatagaatcagtaccttttcttctatccgtaaagacgagatccgacggctcataacacatctctctagagactccttgcacggatttgttgaagtggagttgaaatcgttattaaccaacttggcattcaacaacatcatcatgatggtagccggaaaacgatattacggtaccggtacagaagacaatgatgaagccaagctcgtgagggaacttatagcggagataatggccggcgccggttctggaaatttggctgattatcttccgtccataaattgggtcacaaactttgagaaccagaccaaaatcttggggaatcgactcgatagagtcctgcaaaaactggttgatgagaaacgtgcagagaaagaaaagggtcaaactttgatcgatcatttgctttctttccaagaaaccgaacccgagtactatactgatgtcatcatcaaaggaatcatactggctttggttcttgcggggacagatacatcttcagtgacgttggaatgggcaatgtcaaatttgctgaaccatccagagatacttgagaaagcgagagcggagatcgatgataaaatcggttcagaccggttagttgaagaatcagatattgtaaatctccattatctccaaaacattgtgtcagaaacattacgtttgtatcctgcggttccactactactccctcatttctcatcggatgaatgtaaagtggcgggctacgatatgccacgtcgcacgttgttattaacaaacgtatgggcgatgcatagagatccaggtttatgggaagagccagagaggttcaagccggagaggttcgagaaagaaggagaggctcgaaagctaatgccgtttgggatgggacgacgagcttgtcctggagctgagcttgggaagcggttagtgagccttgctcttgggtgcttgattcagtctttcgagtgggagagagttggtgcagaacttgtggacatgactgaaggcgaagggatcactatgcctaaagctactccgttgcgagctatgtgcaaggcacgtgccattgttggtaaaacgatataattgacgtatgtaggatctattgtgtagaaacctatatagtttcttacattccacgtgttcatggaaaataaaagtattctgtggtcaattagttggatgcagagcaatgtcacggcttctatagaaagttcaacagaaccaaaatttcactgtttccatctcg

SEQ ID NO: 108222 - protein, 504 aa, Arabidopsis thaliana
  peptide (1)..(504): Ceres Seq. ID no. 13653556
  misc_feature: Pfam Name: p450 Pfam Description: Cytochrome P450
  misc_feature (10)..(504): Homolog of NCBI NO: 15235517 NR Description: cytochrome P450 family [Arabidopsis thaliana]
  misc_feature (10)..(504): Homolog of NCBI NO: 15235533 NR Description: cytochrome P450 family [Arabidopsis thaliana]
  misc_feature (13)..(502): Homolog of NCBI NO: 15235536 NR Description: cytochrome P450, putative [Arabidopsis thaliana]
  misc_feature (13)..(502): Homolog of NCBI NO: 21554381 NR Description: cytochrome P450-like protein [Arabidopsis
  misc_feature (3)..(504): Homolog of NCBI NO: 15228472 NR Description: cytochrome P450 family [Arabidopsis thaliana] cytochrome P450 [Arabidopsis thaliana] putative cytochrome P450 protein [Arabidopsis thaliana]
  misc_feature (14)..(504): Homolog of NCBI NO: 15235534 NR Description: cytochrome P450 family [Arabidopsis thaliana]
  misc_feature (15)..(504): Homolog of NCBI NO: 15235535 NR Description: cytochrome P450 family [Arabidopsis thaliana]
  misc_feature (15)..(502): Homolog of NCBI NO: 15227789 NR Description: cytochrome P450, putative [Arabidopsis thaliana]
  misc_feature (2)..(500): Homolog of NCBI NO: 15227792 NR Description: cytochrome P450, putative [Arabidopsis thaliana]
  misc_feature (17)..(504): Homolog of NCBI NO: 30692923 NR Description: cytochrome P450 91A1 [Arabidopsis thaliana] Cytochrome P450 81D1 >gi|9759034|dbj|BAB09361.1| cytochrome P450 thaliana] >gi|20147351|gb|AAM10388.1| AT5g36220/T30G6_3
SSLSGTAKKMDLTQILLLSFLFLTISIKLLLTKSNRKPNLPPSPAYPLPVIGHLHLLKQPVHRTFHSISKSLGNAPIFHLRLGNRLVYVISSHSIAEECFTKNDVVLANRPDIIMAKHVGYNFTNMIAASYGDHWRNLRRIAAVEIFSSHRISTFSSIRKDEIRRLITHLSRDSLHGFVEVELKSLLTNLAFNNIIMMVAGKRYYGTGTEDNDEAKLVRELIAEIMAGAGSGNLADYLPSINWVTNFENQTKILGNRLDRVLQKLVDEKRAEKEKGQTLIDHLLSFQETEPEYYTDVIIKGIILALVLAGTDTSSVTLEWAMSNLLNHPEILEKARAEIDDKIGSDRLVEESDIVNLHYLQNIVSETLRLYPAVPLLLPHFSSDECKVAGYDMPRRTLLLTNVWAMHRDPGLWEEPERFKPERFEKEGEARKLMPFGMGRRACPGAELGKRLVSLALGCLIQSFEWERVGAELVDMTEGEGITMPKATPLRAMCKARAIVGKTI

SEQ ID NO: 108223 - protein, 495 aa, Arabidopsis thaliana; identical to SEQ ID NO: 50488
  peptide (1)..(495): Ceres Seq. ID no. 13653557
  misc_feature: Pfam Name: p450 Pfam Description: Cytochrome P450
  misc_feature (1)..(495): Homolog of NCBI NO: 15235517 NR Description: cytochrome P450 family [Arabidopsis thaliana]
  misc_feature (1)..(495): Homolog of NCBI NO: 15235533 NR Description: cytochrome P450 family [Arabidopsis thaliana]
  misc_feature (4)..(493): Homolog of NCBI NO: 15235536 NR Description: cytochrome P450, putative [Arabidopsis thaliana]
  misc_feature (4)..(493): Homolog of NCBI NO: 21554381 NR Description: cytochrome P450-like protein [Arabidopsis
  misc_feature (1)..(495): Homolog of NCBI NO: 15228472 NR Description: cytochrome P450 family [Arabidopsis thaliana] cytochrome P450 [Arabidopsis thaliana] putative cytochrome P450 protein [Arabidopsis thaliana]
  misc_feature (5)..(495): Homolog of NCBI NO: 15235534 NR Description: cytochrome P450 family [Arabidopsis thaliana]
  misc_feature (6)..(495): Homolog of NCBI NO: 15235535 NR Description: cytochrome P450 family [Arabidopsis thaliana]
  misc_feature (6)..(493): Homolog of NCBI NO: 15227789 NR Description: cytochrome P450, putative [Arabidopsis thaliana]
  misc_feature (1)..(491): Homolog of NCBI NO: 15227792 NR Description: cytochrome P450, putative [Arabidopsis thaliana]
  misc_feature (8)..(495): Homolog of NCBI NO: 30692923 NR Description: cytochrome P450 91A1 [Arabidopsis thaliana] Cytochrome P450 81D1 >gi|9759034|dbj|BAB09361.1| cytochrome P450 thaliana] >gi|20147351|gb|AAM10388.1| AT5g36220/T30G6_3

SEQ ID NO: 108224 - protein, 390 aa, Arabidopsis thaliana; identical to SEQ ID NO: 50489
  peptide (1)..(390): Ceres Seq. ID no. 13653558
  misc_feature: Pfam Name: p450 Pfam Description: Cytochrome P450
  misc_feature (1)..(390): Homolog of NCBI NO: 15235517 NR Description: cytochrome P450 family [Arabidopsis thaliana]
  misc_feature (1)..(390): Homolog of NCBI NO: 15235533 NR Description: cytochrome P450 family [Arabidopsis thaliana]
  misc_feature (1)..(388): Homolog of NCBI NO: 15235536 NR Description: cytochrome P450, putative [Arabidopsis thaliana]
  misc_feature (1)..(388): Homolog of NCBI NO: 21554381 NR Description: cytochrome P450-like protein [Arabidopsis
  misc_feature (1)..(390): Homolog of NCBI NO: 15228472 NR Description: cytochrome P450 family [Arabidopsis thaliana] cytochrome P450 [Arabidopsis thaliana] putative cytochrome P450 protein [Arabidopsis thaliana]
  misc_feature (1)..(390): Homolog of NCBI NO: 15235534 NR Description: cytochrome P450 family [Arabidopsis thaliana]
  misc_feature (1)..(390): Homolog of NCBI NO: 15235535 NR Description: cytochrome P450 family [Arabidopsis thaliana]
  misc_feature (1)..(388): Homolog of NCBI NO: 15227789 NR Description: cytochrome P450, putative [Arabidopsis thaliana]
  misc_feature (1)..(386): Homolog of NCBI NO: 15227792 NR Description: cytochrome P450, putative [Arabidopsis thaliana]
  misc_feature (1)..(390): Homolog of NCBI NO: 30692923 NR Description: cytochrome P450 91A1 [Arabidopsis thaliana] Cytochrome P450 81D1 >gi|9759034|dbj|BAB09361.1| cytochrome P450 thaliana] >gi|20147351|gb|AAM10388.1| AT5g36220/T30G6_3

SEQ ID NO: 108225 - DNA, 1200 bp, Arabidopsis thaliana
  misc_feature (1)..(1200): Ceres Seq. ID no. 13653559
  misc_feature: MA Experiment ID: 108573 Result: Up-regulated in Transcription
  misc_feature: MA Experiment 108573 PARAMETER Experiment Name: At_Drought_cDNA_P Parameter: Timepoint (hr) Value: 6
  misc_feature: MA Experiment 108573 PARAMETER Experiment Name: At_Drought_cDNA_P Parameter: Tissue Value: Aerial
  misc_feature: MA Experiment 108573 PARAMETER Experiment Name: At_Drought_cDNA_P Parameter: Treatment Value: Drought vs. No Drought
  misc_feature: MA Experiment ID: 108595 Result: Down-regulated in Transcription
  misc_feature: MA Experiment 108595 PARAMETER Experiment Name: At_Ler-pi_Ovule_cDNA_P Parameter: Plant Line Value: null
  misc_feature: MA Experiment ID: 20000224 Result: Down-regulated in Transcription
  misc_feature: MA Experiment ID: 20001558 Result: Down-regulated in Transcription
  misc_feature: MA Experiment 20001558 PARAMETER Experiment Name: At_Drought_Soil_Dry_P Parameter: Age (day) Value: 27
  misc_feature: MA Experiment 20001558 PARAMETER Experiment Name: At_Drought_Soil_Dry_P Parameter: Organism Value: A. thaliana
  misc_feature: MA Experiment 20001558 PARAMETER Experiment Name: At_Drought_Soil_Dry_P Parameter: Plant Line Value: WS
  misc_feature: MA Experiment 20001558 PARAMETER Experiment Name: At_Drought_Soil_Dry_P Parameter: Post Timepoint (hr) Value: 6
  misc_feature: MA Experiment 20001558 PARAMETER Experiment Name: At_Drought_Soil_Dry_P Parameter: Post-Treatment Value: Re-Water vs. No Drought
  misc_feature: MA Experiment 20001558 PARAMETER Experiment Name: At_Drought_Soil_Dry_P Parameter: Timepoint (day) Value: 13
  misc_feature: MA Experiment 20001558 PARAMETER Experiment Name: At_Drought_Soil_Dry_P Parameter: Treatment Value: Drought vs. No Drought
aaaaatcgaatcaagcatcttcttctttcacgtacgaaacaaaaagctcagagcagagtcgaatcgcgatgaagcatcgagttcggtgttcatgaaggtcagagagttaagtattagcagaactggttaggtcttagtgacaaacaaggtattcatgttatccatccctgatactagaatgtggaatctagcatcgagttatcttacgggaaacattggaccgaaaaacgatatcagaagaccggtccatgctcatgcggagtgttcagatgacgatgtatcttctgtaggtagtaaagacgaaggtctcgagtgtcctatatgctgggaatcatttaatatagttgaaaacgttccgtatgtgttatggtgtggacatacgatgtgtaaaaactgcattttgggacttcaatgggctattgtgaaattgcctactcacccggttcagcttcctctcttcatttcatgcccctggtgcaaccttttgtctttccgtctggtcttcagaggaacactcagattccctcacaagaactactttgtgctttggatggtcgagaggatgaatggagagagacgtaactcacctggtggagctcaaacagatggaaacaatgatcatacaagggaaactccatctccatgtctccacaatcgccatcatcgcagtcaacctgaaccatcacgttctgttaatgatcatcgcattccaagggacaacatacaaacttcactgaggaagtctctggttttctttgtccagttgacagcaaagttcccattagttgtcatatttctgctgataatactctatgcaataccgaccagtgcagccatattggcgatgtacattctagtcactctcttgctggctctaccgtcgtttctcatcctctacttcgcttatccttgtctcgactggcttgttcgagagattgtcacatgaactttctaaggatgcgttcagaaacttcccattcctaatttgacgacttttcttcaacaactgagacccaagatcggtcatgtaagtataacaatttcgtaattaccgtcttctttatctatatatggatgtagttttggattgcattgttgctctacgaagctggacgtatgtgttgtaagggctcttgcagaaacttattagtatttgtggatttgtttgtgagtgtttgagtgtctcaataagatttatgt

SEQ ID NO: 108226 - protein, 263 aa, Arabidopsis thaliana; identical to SEQ ID NO: 38728
  peptide (1)..(263): Ceres Seq. ID no. 13653560
  misc_feature (54)..(108): Pfam Name: Zinc finger, C3HC4 type (RING finger) Pfam Description: Zinc finger, C3HC4 type (RING finger)
  misc_feature (1)..(263): Homolog of NCBI NO: 15228658 NR Description: expressed protein [Arabidopsis thaliana] unknown protein [Arabidopsis thaliana]
  misc_feature (9)..(263): Homolog of NCBI NO: 11994767 NR Description: RING zinc finger protein-like [Arabidopsis
  misc_feature (9)..(263): Homolog of NCBI NO: 18409246 NR Description: zinc finger (C3HC4-type RING finger) protein [Arabidopsis thaliana] >gi|12325097|gb|AAG52506.1|AC018364_24
  misc_feature (9)..(263): Homolog of NCBI NO: 21594048 NR Description: unknown [Arabidopsis thaliana]
  misc_feature (9)..(263): Homolog of NCBI NO: 15221223 NR Description: zinc finger (C3HC4-type RING finger) protein [Arabidopsis thaliana] >gi|25373335|pir||D96772 probable RING
  misc_feature (9)..(263): Homolog of NCBI NO: 21592563 NR Description: putative RING zinc finger protein [Arabidopsis

SEQ ID NO: 108227 - protein, 255 aa, Arabidopsis thaliana; identical to SEQ ID NO: 38729
  peptide (1)..(255): Ceres Seq. ID no. 13653561
  misc_feature (46)..(100): Pfam Name: Zinc finger, C3HC4 type (RING finger) Pfam Description: Zinc finger, C3HC4 type (RING finger)
  misc_feature (1)..(255): Homolog of NCBI NO: 15228658 NR Description: expressed protein [Arabidopsis thaliana] unknown protein [Arabidopsis thaliana]
  misc_feature (1)..(255): Homolog of NCBI NO: 11994767 NR Description: RING zinc finger protein-like [Arabidopsis
  misc_feature (1)..(255): Homolog of NCBI NO: 18409246 NR Description: zinc finger (C3HC4-type RING finger) protein [Arabidopsis thaliana] >gi|12325097|gb|AAG52506.1|AC018364_24
  misc_feature (1)..(255): Homolog of NCBI NO: 21594048 NR Description: unknown [Arabidopsis thaliana]
  misc_feature (1)..(255): Homolog of NCBI NO: 15221223 NR Description: zinc finger (C3HC4-type RING finger) protein [Arabidopsis thaliana] >gi|25373335|pir||D96772 probable RING
  misc_feature (1)..(255): Homolog of NCBI NO: 21592563 NR Description: putative RING zinc finger protein [Arabidopsis

SEQ ID NO: 108228 - protein, 187 aa, Arabidopsis thaliana; identical to SEQ ID NO: 38730
  peptide (1)..(187): Ceres Seq. ID no. 13653562
  misc_feature (1)..(187): Homolog of NCBI NO: 15228658 NR Description: expressed protein [Arabidopsis thaliana] unknown protein [Arabidopsis thaliana]
  misc_feature (1)..(187): Homolog of NCBI NO: 11994767 NR Description: RING zinc finger protein-like [Arabidopsis
  misc_feature (1)..(187): Homolog of NCBI NO: 18409246 NR Description: zinc finger (C3HC4-type RING finger) protein [Arabidopsis thaliana] >gi|12325097|gb|AAG52506.1|AC018364_24
  misc_feature (1)..(187): Homolog of NCBI NO: 21594048 NR Description: unknown [Arabidopsis thaliana]
  misc_feature (1)..(187): Homolog of NCBI NO: 15221223 NR Description: zinc finger (C3HC4-type RING finger) protein [Arabidopsis thaliana] >gi|25373335|pir||D96772 probable RING
  misc_feature (1)..(187): Homolog of NCBI NO: 21592563 NR Description: putative RING zinc finger protein [Arabidopsis

SEQ ID NO: 108229 - DNA, 1062 bp, Arabidopsis thaliana
  misc_feature (1)..(1062): Ceres Seq. ID no. 13653563
  misc_feature: MA Experiment ID: 108435 Result: Down-regulated in Transcription
  misc_feature: MA Experiment 108435 PARAMETER Experiment Name: At_stm_Mutants_cDNA_P Parameter: Plant Line Value: wt Landsburg vs stm
  misc_feature: MA Experiment 108435 PARAMETER Experiment Name: At_stm_Mutants_cDNA_P Parameter: Tissue Value: Shoot Apical Meristem Region
  misc_feature: MA Experiment ID: 108461 Result: Up-regulated in Transcription
  misc_feature: MA Experiment 108461 PARAMETER Experiment Name: At_Germinating_Seeds_cDNA_P Parameter: Age (day) Value: 1 vs. 0
  misc_feature: MA Experiment 108461 PARAMETER Experiment Name: At_Germinating_Seeds_cDNA_P Parameter: Tissue Value: Germinating Seeds
  misc_feature: MA Experiment ID: 108462 Result: Up-regulated in Transcription
  misc_feature: MA Experiment 108462 PARAMETER Experiment Name: At_Germinating_Seeds_cDNA_P Parameter: Age (day) Value: 2 vs. 0
  misc_feature: MA Experiment 108462 PARAMETER Experiment Name: At_Germinating_Seeds_cDNA_P Parameter: Tissue Value: Germinating Seeds
  misc_feature: MA Experiment ID: 108463 Result: Up-regulated in Transcription
  misc_feature: MA Experiment 108463 PARAMETER Experiment Name: At_Germinating_Seeds_cDNA_P Parameter: Age (day) Value: 3 vs. 0
  misc_feature: MA Experiment 108463 PARAMETER Experiment Name: At_Germinating_Seeds_cDNA_P Parameter: Tissue Value: Germinating Seeds
  misc_feature: MA Experiment ID: 108464 Result: Up-regulated in Transcription
  misc_feature: MA Experiment 108464 PARAMETER Experiment Name: At_Germinating_Seeds_cDNA_P Parameter: Age (day) Value: 4 vs. 0
  misc_feature: MA Experiment 108464 PARAMETER Experiment Name: At_Germinating_Seeds_cDNA_P Parameter: Tissue Value: Germinating Seeds
  misc_feature: MA Experiment ID: 108469 Result: Down-regulated in Transcription
  misc_feature: MA Experiment ID: 108579 Result: Up-regulated in Transcription
  misc_feature: MA Experiment 108579 PARAMETER Experiment Name: At_4deg_Cold_cDNA_P Parameter: Temperature (deg C) Value: 4 vs. 22
  misc_feature: MA Experiment 108579 PARAMETER Experiment Name: At_4deg_Cold_cDNA_P Parameter: Timepoint (hr) Value: 6
  misc_feature: MA Experiment 108579 PARAMETER Experiment Name: At_4deg_Cold_cDNA_P Parameter: Tissue Value: Aerial
  misc_feature: MA Experiment ID: 108595 Result: Down-regulated in Transcription
  misc_feature: MA Experiment 108595 PARAMETER Experiment Name: At_Ler-pi_Ovule_cDNA_P Parameter: Plant Line Value: null
  misc_feature: MA Experiment ID: 108668 Result: Down-regulated in Transcription
  misc_feature: MA Experiment 108668 PARAMETER Experiment Name: At_2mM_SA_cDNA_P Parameter: Plant Line Value: WS
  misc_feature: MA Experiment 108668 PARAMETER Experiment Name: At_2mM_SA_cDNA_P Parameter: Timepoint (hr) Value: 6
  misc_feature: MA Experiment 108668 PARAMETER Experiment Name: At_2mM_SA_cDNA_P Parameter: Treatment Value: 2mM SA vs. No Treatment
  misc_feature: MA Experiment ID: 20000069 Result: Down-regulated in Transcription
  misc_feature: MA Experiment 20000069 PARAMETER Experiment Name: At_100uM_ABA_Mutants_cDNA_P Parameter: Plant Line Value: CS23
  misc_feature: MA Experiment 20000069 PARAMETER Experiment Name: At_100uM_ABA_Mutants_cDNA_P Parameter: Timepoint (hr) Value: 6
  misc_feature: MA Experiment 20000069 PARAMETER Experiment Name: At_100uM_ABA_Mutants_cDNA_P Parameter: Tissue Value: Aerial
  misc_feature: MA Experiment 20000069 PARAMETER Experiment Name: At_100uM_ABA_Mutants_cDNA_P Parameter: Treatment Value: 100uM ABA vs. No Treatment
  misc_feature: MA Experiment ID: 20000070 Result: Down-regulated in Transcription
  misc_feature: MA Experiment 20000070 PARAMETER Experiment Name: At_100uM_ABA_Mutants_cDNA_P Parameter: Plant Line Value: CS24
  misc_feature: MA Experiment 20000070 PARAMETER Experiment Name: At_100uM_ABA_Mutants_cDNA_P Parameter: Timepoint (hr) Value: 6
  misc_feature: MA Experiment 20000070 PARAMETER Experiment Name: At_100uM_ABA_Mutants_cDNA_P Parameter: Tissue Value: Aerial
  misc_feature: MA Experiment 20000070 PARAMETER Experiment Name: At_100uM_ABA_Mutants_cDNA_P Parameter: Treatment Value: 100uM ABA vs. No Treatment
  misc_feature: MA Experiment ID: 20000071 Result: Down-regulated in Transcription
  misc_feature: MA Experiment 20000071 PARAMETER Experiment Name: At_100uM_ABA_Mutants_cDNA_P Parameter: Plant Line Value: CS8104
  misc_feature: MA Experiment 20000071 PARAMETER Experiment Name: At_100uM_ABA_Mutants_cDNA_P Parameter: Timepoint (hr) Value: 6
  misc_feature: MA Experiment 20000071 PARAMETER Experiment Name: At_100uM_ABA_Mutants_cDNA_P Parameter: Tissue Value: Aerial
  misc_feature: MA Experiment 20000071 PARAMETER Experiment Name: At_100uM_ABA_Mutants_cDNA_P Parameter: Treatment Value: 100uM ABA vs. No Treatment
  misc_feature: MA Experiment ID: 20000072 Result: Down-regulated in Transcription
  misc_feature: MA Experiment 20000072 PARAMETER Experiment Name: At_100uM_ABA_Mutants_cDNA_P Parameter: Plant Line Value: CS8105
  misc_feature: MA Experiment 20000072 PARAMETER Experiment Name: At_100uM_ABA_Mutants_cDNA_P Parameter: Timepoint (hr) Value: 6
  misc_feature: MA Experiment 20000072 PARAMETER Experiment Name: At_100uM_ABA_Mutants_cDNA_P Parameter: Tissue Value: Aerial
  misc_feature: MA Experiment 20000072 PARAMETER Experiment Name: At_100uM_ABA_Mutants_cDNA_P Parameter: Treatment Value: 100uM ABA vs. No Treatment
  misc_feature: MA Experiment ID: 20000086 Result: Down-regulated in Transcription
  misc_feature: MA Experiment 20000086 PARAMETER Experiment Name: At_100uM_ABA_Mutants_cDNA_P Parameter: Plant Line Value: CS22
  misc_feature: MA Experiment 20000086 PARAMETER Experiment Name: At_100uM_ABA_Mutants_cDNA_P Parameter: Timepoint (hr) Value: 6
  misc_feature: MA Experiment 20000086 PARAMETER Experiment Name: At_100uM_ABA_Mutants_cDNA_P Parameter: Tissue Value: Aerial
  misc_feature: MA Experiment 20000086 PARAMETER Experiment Name: At_100uM_ABA_Mutants_cDNA_P Parameter: Treatment Value: 100uM ABA vs. No Treatment
  misc_feature: MA Experiment ID: 20000087 Result: Down-regulated in Transcription
  misc_feature: MA Experiment 20000087 PARAMETER Experiment Name: At_100uM_ABA_Mutants_cDNA_P Parameter: Plant Line Value: WS
  misc_feature: MA Experiment 20000087 PARAMETER Experiment Name: At_100uM_ABA_Mutants_cDNA_P Parameter: Timepoint (hr) Value: 6
  misc_feature: MA Experiment 20000087 PARAMETER Experiment Name: At_100uM_ABA_Mutants_cDNA_P Parameter: Tissue Value: Aerial
  misc_feature: MA Experiment 20000087 PARAMETER Experiment Name: At_100uM_ABA_Mutants_cDNA_P Parameter: Treatment Value: 100uM ABA vs. No Treatment
  misc_feature: MA Experiment ID: 20000088 Result: Down-regulated in Transcription
  misc_feature: MA Experiment 20000088 PARAMETER Experiment Name: At_100uM_ABA_Mutants_cDNA_P Parameter: Plant Line Value: Landsberg
  misc_feature: MA Experiment 20000088 PARAMETER Experiment Name: At_100uM_ABA_Mutants_cDNA_P Parameter: Timepoint (hr) Value: 6
  misc_feature: MA Experiment 20000088 PARAMETER Experiment Name: At_100uM_ABA_Mutants_cDNA_P Parameter: Tissue Value: Aerial
  misc_feature: MA Experiment 20000088 PARAMETER Experiment Name: At_100uM_ABA_Mutants_cDNA_P Parameter: Treatment Value: 100uM ABA vs. No Treatment
  misc_feature: MA Experiment ID: 20000089 Result: Down-regulated in Transcription
  misc_feature: MA Experiment ID: 20000117 Result: Down-regulated in Transcription
  misc_feature: MA Experiment 20000117 PARAMETER Experiment Name: At_100uM_ABA_Mutants_cDNA_P Parameter: Plant Line Value: Columbia
  misc_feature: MA Experiment 20000117 PARAMETER Experiment Name: At_100uM_ABA_Mutants_cDNA_P Parameter: Timepoint (hr) Value: 6
  misc_feature: MA Experiment 20000117 PARAMETER Experiment Name: At_100uM_ABA_Mutants_cDNA_P Parameter: Tissue Value: Aerial
  misc_feature: MA Experiment 20000117 PARAMETER Experiment Name: At_100uM_ABA_Mutants_cDNA_P Parameter: Treatment Value: 100uM ABA vs. No Treatment
  misc_feature: MA Experiment ID: 20000180 Result: Up-regulated in Transcription
  misc_feature: MA Experiment 20000180 PARAMETER Experiment Name: At_Germinating_Seeds_P Parameter: Age (hr) Value: 24 vs. 0
  misc_feature: MA Experiment 20000180 PARAMETER Experiment Name: At_Germinating_Seeds_P Parameter: Tissue Value: Germinating Seeds
  misc_feature: MA Experiment ID: 20000182 Result: Down-regulated in Transcription
  misc_feature: MA Experiment 20000182 PARAMETER Experiment Name: At_2mM_SA_P Parameter: Age (day) Value: 14
  misc_feature: MA Experiment 20000182 PARAMETER Experiment Name: At_2mM_SA_P Parameter: Organism Value: A. thaliana
  misc_feature: MA Experiment 20000182 PARAMETER Experiment Name: At_2mM_SA_P Parameter: Plant Line Value: WS
  misc_feature: MA Experiment 20000182 PARAMETER Experiment Name: At_2mM_SA_P Parameter: Timepoint (hr) Value: 6
  misc_feature: MA Experiment 20000182 PARAMETER Experiment Name: At_2mM_SA_P Parameter: Tissue Value: Aerial
  misc_feature: MA Experiment 20000182 PARAMETER Experiment Name: At_2mM_SA_P Parameter: Treatment Value: 2mM SA vs. No Treatment
  misc_feature: MA Experiment ID: 20000184 Result: Up-regulated in Transcription
  misc_feature: MA Experiment 20000184 PARAMETER Experiment Name: At_Shoots__P Parameter: Age (day) Value: 7
  misc_feature: MA Experiment 20000184 PARAMETER Experiment Name: At_Shoots__P Parameter: Tissue Value: Shoots vs. Whole Plant
  misc_feature: MA Experiment ID: 20000185 Result: Down-regulated in Transcription
  misc_feature: MA Experiment 20000185 PARAMETER Experiment Name: At_Roots__P Parameter: Age (day) Value: 7 vs. 21
  misc_feature: MA Experiment 20000185 PARAMETER Experiment Name: At_Roots__P Parameter: Organism Value: A. thaliana
  misc_feature: MA Experiment 20000185 PARAMETER Experiment Name: At_Roots__P Parameter: Tissue Value: Roots vs. Whole Plant
  misc_feature: MA Experiment ID: 20000264 Result: Down-regulated in Transcription
  misc_feature: MA Experiment 20000264 PARAMETER Experiment Name: At_Open_Flower_P Parameter: Age (day) Value: 21
  misc_feature: MA Experiment 20000264 PARAMETER Experiment Name: At_Open_Flower_P Parameter: Plant Line Value: WS
  misc_feature: MA Experiment 20000264 PARAMETER Experiment Name: At_Open_Flower_P Parameter: Tissue Value: Open Flower vs. Whole Plant
  misc_feature: MA Experiment ID: 20000437 Result: Down-regulated in Transcription
  misc_feature: MA Experiment 20000437 PARAMETER Experiment Name: At_Drought_P Parameter: Age (day) Value: 8
  misc_feature: MA Experiment 20000437 PARAMETER Experiment Name: At_Drought_P Parameter: Organism Value: A. thaliana
  misc_feature: MA Experiment 20000437 PARAMETER Experiment Name: At_Drought_P Parameter: Plant Line Value: WS
  misc_feature: MA Experiment 20000437 PARAMETER Experiment Name: At_Drought_P Parameter: Timepoint (hr) Value: 24
  misc_feature: MA Experiment 20000437 PARAMETER Experiment Name: At_Drought_P Parameter: Tissue Value: Whole Plant
  misc_feature: MA Experiment 20000437 PARAMETER Experiment Name: At_Drought_P Parameter: Treatment Value: Drought vs. No Drought
  misc_feature: MA Experiment ID: 20000438 Result: Up-regulated in Transcription
  misc_feature: MA Experiment 20000438 PARAMETER Experiment Name: At_Shoots__P Parameter: Age (day) Value: 14
  misc_feature: MA Experiment 20000438 PARAMETER Experiment Name: At_Shoots__P Parameter: Tissue Value: Shoots vs. Whole Plant
  misc_feature: MA Experiment ID: 20000439 Result: Down-regulated in Transcription
  misc_feature: MA Experiment 20000439 PARAMETER Experiment Name: At_Roots__P Parameter: Age (day) Value: 14 vs. 21
  misc_feature: MA Experiment 20000439 PARAMETER Experiment Name: At_Roots__P Parameter: Organism Value: A. thaliana
  misc_feature: MA Experiment 20000439 PARAMETER Experiment Name: At_Roots__P Parameter: Tissue Value: Roots vs. Whole Plant
  misc_feature: MA Experiment ID: 20000794 Result: Down-regulated in Transcription
  misc_feature: MA Experiment 20000794 PARAMETER Experiment Name: At_Petals_P Parameter: Age (day) Value: 23-25 days
  misc_feature: MA Experiment 20000794 PARAMETER Experiment Name: At_Petals_P Parameter: Plant Line Value: WS
  misc_feature: MA Experiment 20000794 PARAMETER Experiment Name: At_Petals_P Parameter: Tissue Value: Petals vs. Whole plant
  misc_feature: MA Experiment ID: 20001248 Result: Down-regulated in Transcription
  misc_feature: MA Experiment 20001248 PARAMETER Experiment Name: At_Far-red-induction_P Parameter: Age (day) Value: 7
  misc_feature: MA Experiment 20001248 PARAMETER Experiment Name: At_Far-red-induction_P Parameter: Light Value: Far-red vs. White
  misc_feature: MA Experiment 20001248 PARAMETER Experiment Name: At_Far-red-induction_P Parameter: Organism Value: A. thaliana
  misc_feature: MA Experiment 20001248 PARAMETER Experiment Name: At_Far-red-induction_P Parameter: Plant Line Value: Columbia
  misc_feature: MA Experiment 20001248 PARAMETER Experiment Name: At_Far-red-induction_P Parameter: Timepoint (hr) Value: 4
  misc_feature: MA Experiment 20001248 PARAMETER Experiment Name: At_Far-red-induction_P Parameter: Tissue Value: Whole Plant
  misc_feature: MA Experiment ID: 20001450 Result: Down-regulated in Transcription
  misc_feature: MA Experiment 20001450 PARAMETER Experiment Name: At_Far-red-induction_P Parameter: Age (day) Value: 7
  misc_feature: MA Experiment 20001450 PARAMETER Experiment Name: At_Far-red-induction_P Parameter: Light Value: Far-red vs. White
  misc_feature: MA Experiment 20001450 PARAMETER Experiment Name: At_Far-red-induction_P Parameter: Organism Value: A. thaliana
  misc_feature: MA Experiment 20001450 PARAMETER Experiment Name: At_Far-red-induction_P Parameter: Plant Line Value: Columbia
  misc_feature: MA Experiment 20001450 PARAMETER Experiment Name: At_Far-red-induction_P Parameter: Timepoint (hr) Value: 8
  misc_feature: MA Experiment 20001450 PARAMETER Experiment Name: At_Far-red-induction_P Parameter: Tissue Value: Whole Plant
  misc_feature: MA Experiment ID: 20001451 Result: Down-regulated in Transcription
  misc_feature: MA Experiment 20001451 PARAMETER Experiment Name: At_Far-red-induction_P Parameter: Age (day) Value: 7
  misc_feature: MA Experiment 20001451 PARAMETER Experiment Name: At_Far-red-induction_P Parameter: Light Value: Far-red vs. White
  misc_feature: MA Experiment 20001451 PARAMETER Experiment Name: At_Far-red-induction_P Parameter: Organism Value: A. thaliana
  misc_feature: MA Experiment 20001451 PARAMETER Experiment Name: At_Far-red-induction_P Parameter: Plant Line Value: Columbia
  misc_feature: MA Experiment 20001451 PARAMETER Experiment Name: At_Far-red-induction_P Parameter: Timepoint (hr) Value: 24
  misc_feature: MA Experiment 20001451 PARAMETER Experiment Name: At_Far-red-induction_P Parameter: Tissue Value: Whole Plant
  misc_feature: MA Experiment ID: 20001757 Result: Up-regulated in Transcription
  misc_feature: MA Experiment 20001757 PARAMETER Experiment Name: At_50mM_NH4NO3_L-to-H_P Parameter: Timepoint (hr) Value: 6
  misc_feature: MA Experiment 20001757 PARAMETER Experiment Name: At_50mM_NH4NO3_L-to-H_P Parameter: Tissue Value: Leaf
  misc_feature: MA Experiment 20001757 PARAMETER Experiment Name: At_50mM_NH4NO3_L-to-H_P Parameter: Treatment Value: 50mM NH4NO3 vs 100mM Mannitol
  misc_feature: MA Experiment ID: 20001904 Result: Down-regulated in Transcription
  misc_feature: MA Experiment 20001904 PARAMETER Experiment Name: At_Drought_Reproduction_P Parameter: Age (day) Value: 37
  misc_feature: MA Experiment 20001904 PARAMETER Experiment Name: At_Drought_Reproduction_P Parameter: Organism Value: A. thaliana
  misc_feature: MA Experiment 20001904 PARAMETER Experiment Name: At_Drought_Reproduction_P Parameter: Plant Line Value: WS
  misc_feature: MA Experiment 20001904 PARAMETER Experiment Name: At_Drought_Reproduction_P Parameter: Timepoint (day) Value: 7
  misc_feature: MA Experiment 20001904 PARAMETER Experiment Name: At_Drought_Reproduction_P Parameter: Tissue Value: Rosettes
  misc_feature: MA Experiment 20001904 PARAMETER Experiment Name: At_Drought_Reproduction_P Parameter: Treatment Value: Drought vs. No Drought
  misc_feature: MA Experiment ID: 20001905 Result: Down-regulated in Transcription
  misc_feature: MA Experiment 20001905 PARAMETER Experiment Name: At_Drought_Reproduction_P Parameter: Age (day) Value: 40
  misc_feature: MA Experiment 20001905 PARAMETER Experiment Name: At_Drought_Reproduction_P Parameter: Organism Value: A. thaliana
  misc_feature: MA Experiment 20001905 PARAMETER Experiment Name: At_Drought_Reproduction_P Parameter: Plant Line Value: WS
  misc_feature: MA Experiment 20001905 PARAMETER Experiment Name: At_Drought_Reproduction_P Parameter: Timepoint (day) Value: 10
  misc_feature: MA Experiment 20001905 PARAMETER Experiment Name: At_Drought_Reproduction_P Parameter: Tissue Value: Rosettes
  misc_feature: MA Experiment 20001905 PARAMETER Experiment Name: At_Drought_Reproduction_P Parameter: Treatment Value: Drought vs. No Drought
  misc_feature: MA Experiment ID: 20001906 Result: Down-regulated in Transcription
  misc_feature: MA Experiment 20001906 PARAMETER Experiment Name: At_Drought_Reproduction_P Parameter: Age (day) Value: 35
  misc_feature: MA Experiment 20001906 PARAMETER Experiment Name: At_Drought_Reproduction_P Parameter: Organism Value: A. thaliana
  misc_feature: MA Experiment 20001906 PARAMETER Experiment Name: At_Drought_Reproduction_P Parameter: Plant Line Value: WS
  misc_feature: MA Experiment 20001906 PARAMETER Experiment Name: At_Drought_Reproduction_P Parameter: Timepoint (day) Value: 5
  misc_feature: MA Experiment 20001906 PARAMETER Experiment Name: At_Drought_Reproduction_P Parameter: Tissue Value: Siliques
  misc_feature: MA Experiment 20001906 PARAMETER Experiment Name: At_Drought_Reproduction_P Parameter: Treatment Value: Drought vs. No Drought
  misc_feature: MA Experiment ID: 20001908 Result: Down-regulated in Transcription
  misc_feature: MA Experiment 20001908 PARAMETER Experiment Name: At_Drought_Reproduction_P Parameter: Age (day) Value: 40
  misc_feature: MA Experiment 20001908 PARAMETER Experiment Name: At_Drought_Reproduction_P Parameter: Organism Value: A. thaliana
  misc_feature: MA Experiment 20001908 PARAMETER Experiment Name: At_Drought_Reproduction_P Parameter: Plant Line Value: WS
  misc_feature: MA Experiment 20001908 PARAMETER Experiment Name: At_Drought_Reproduction_P Parameter: Timepoint (day) Value: 10
  misc_feature: MA Experiment 20001908 PARAMETER Experiment Name: At_Drought_Reproduction_P Parameter: Tissue Value: Siliques
  misc_feature: MA Experiment 20001908 PARAMETER Experiment Name: At_Drought_Reproduction_P Parameter: Treatment Value: Drought vs. No Drought
catgggttccgagtcatcgctgtctggaacagcgatgactagctagacattttcgttttcatctccccacgaatcaaagatggcttttgccattgcttctgctctcacttccacactcacattatccacgagcagagtcaaaaatcctacccagagaagaccacatgtagcgtccacatcatccaccggtggaagattaatgagagagcgcttggtggtggttcgtgccggcaaagaagtttctagcgtctgtgaaccacttcctccggaccgtcctttatggttccctggtagctctccacctgaatggctcgatggcagcttacctggtgatttcggtttcgatcctctcggtttagggtctgatccggacaccctcaaatggtttgcacaagctgagcttatacatagccggtgggcaatgctggccgtgaccggtatcataataccagaatgtctcgagcggttaggtttcattgaaaatttctcatggtatgacgcagggtctcgtgagtacttcgcggattccactacgctgtttgtggctcaaatggttttaatgggctgggcagaaggtagaagatgggctgatttgattaaaccggggtctgttgacatagaaccaaagtacccgcataaagtaaatcctaaaccggatgttggttaccctggaggtttgtggttcgattttatgatgtgggggagaggttctcctgaaccggtaatggttttgaggactaaagagattaagaacggacggctcgcgatgcttgctttccttgggttctgtttccaagctacctacactagccaagatccaattgagaatctcatggctcatctggctgatcctggtcattgcaacgtcttttcggcatttacatcacattaatgaggattagcttggggcgaatataatattttttatatatttatggatgttgaacttttgtatagtgtcactcgccgttgttacaacttctgcttacttaattaacatgtaaaatatattttatatatatgtagaagaaagaaacaagaagagaaaatgagcattattat

SEQ ID NO: 108230 - protein, 270 aa, Arabidopsis thaliana
  peptide (1)..(270): Ceres Seq. ID no. 13653564
  misc_feature (73)..(241): Pfam Name: Chlorophyll A-B binding protein Pfam Description: Chlorophyll A-B binding protein
  misc_feature (1)..(270): Homolog of NCBI NO: 27754356 NR Description: putative light-harvesting chlorophyll a/b binding
  misc_feature (1)..(270): Homolog of NCBI NO: 15221956 NR Description: light-harvesting chlorophyll a/b binding protein
  misc_feature (1)..(265): Homolog of NCBI NO: 25299032 NR Description: hypothetical protein T29M8.2 - Arabidopsis
  misc_feature (1)..(270): Homolog of NCBI NO: 1084336 NR Description: chlorophyll a/b-binding protein type II -
  misc_feature (5)..(268): Homolog of NCBI NO: 115766 NR Description: Chlorophyll A-B binding protein, chloroplast
  misc_feature (5)..(268): Homolog of NCBI NO: 115765 NR Description: Chlorophyll A-B binding protein 7, chloroplast
  misc_feature (30)..(268): Homolog of NCBI NO: 15233120 NR Description: light-harvesting chlorophyll a/b binding protein
  misc_feature (30)..(268): Homolog of NCBI NO: 11277627 NR Description: PS I antenna protein Lhca2 [imported] - thaliana >gi|4741940|gb|AAD28767.1|AF134120_1 Lhca2 protein thaliana] >gi|15451180|gb|AAK96861.1| Lhca2 protein [Arabidopsis
  misc_feature (1)..(268): Homolog of NCBI NO: 2129879 NR Description: chlorophyll a/b-binding protein type II precursor,
  misc_feature (6)..(269): Homolog of NCBI NO: 99486 NR Description: chlorophyll a/b-binding protein (clone pINEab 31)
MAFAIASALTSTLTLSTSRVKNPTQRRPHVASTSSTGGRLMRERLVVVRAGKEVSSVCEPLPPDRPLWFPGSSPPEWLDGSLPGDFGFDPLGLGSDPDTLKWFAQAELIHSRWAMLAVTGIIIPECLERLGFIENFSWYDAGSREYFADSTTLFVAQMVLMGWAEGRRWADLIKPGSVDIEPKYPHKVNPKPDVGYPGGLWFDFMMWGRGSPEPVMVLRTKEIKNGRLAMLAFLGFCFQATYTSQDPIENLMAHLADPGHCNVFSAFTSH

SEQ ID NO: 108231 - protein, 230 aa, Arabidopsis thaliana; identical to SEQ ID NO: 36595
  peptide (1)..(230): Ceres Seq. ID no. 13653565
  misc_feature (33)..(201): Pfam Name: Chlorophyll A-B binding protein Pfam Description: Chlorophyll A-B binding protein
  misc_feature (1)..(230): Homolog of NCBI NO: 27754356 NR Description: putative light-harvesting chlorophyll a/b binding
  misc_feature (1)..(230): Homolog of NCBI NO: 15221956 NR Description: light-harvesting chlorophyll a/b binding protein
  misc_feature (1)..(225): Homolog of NCBI NO: 25299032 NR Description: hypothetical protein T29M8.2 - Arabidopsis
  misc_feature (1)..(230): Homolog of NCBI NO: 1084336 NR Description: chlorophyll a/b-binding protein type II -
  misc_feature (1)..(228): Homolog of NCBI NO: 115766 NR Description: Chlorophyll A-B binding protein, chloroplast
  misc_feature (1)..(228): Homolog of NCBI NO: 115765 NR Description: Chlorophyll A-B binding protein 7, chloroplast
  misc_feature (1)..(228): Homolog of NCBI NO: 15233120 NR Description: light-harvesting chlorophyll a/b binding protein
  misc_feature (1)..(228): Homolog of NCBI NO: 11277627 NR Description: PS I antenna protein Lhca2 [imported] - thaliana >gi|4741940|gb|AAD28767.1|AF134120_1 Lhca2 protein thaliana] >gi|15451180|gb|AAK96861.1| Lhca2 protein [Arabidopsis
  misc_feature (1)..(228): Homolog of NCBI NO: 2129879 NR Description: chlorophyll a/b-binding protein type II precursor,
  misc_feature (1)..(229): Homolog of NCBI NO: 99486 NR Description: chlorophyll a/b-binding protein (clone pINEab 31)

SEQ ID NO: 108232 - protein, 156 aa, Arabidopsis thaliana; identical to SEQ ID NO: 36596
  peptide (1)..(156): Ceres Seq. ID no. 13653566
  misc_feature (1)..(127): Pfam Name: Chlorophyll A-B binding protein Pfam Description: Chlorophyll A-B binding protein
  misc_feature (1)..(156): Homolog of NCBI NO: 27754356 NR Description: putative light-harvesting chlorophyll a/b binding
  misc_feature (1)..(156): Homolog of NCBI NO: 15221956 NR Description: light-harvesting chlorophyll a/b binding protein
  misc_feature (1)..(151): Homolog of NCBI NO: 25299032 NR Description: hypothetical protein T29M8.2 - Arabidopsis
  misc_feature (1)..(156): Homolog of NCBI NO: 1084336 NR Description: chlorophyll a/b-binding protein type II -
  misc_feature (1)..(154): Homolog of NCBI NO: 115766 NR Description: Chlorophyll A-B binding protein, chloroplast
  misc_feature (1)..(154): Homolog of NCBI NO: 115765 NR Description: Chlorophyll A-B binding protein 7, chloroplast
  misc_feature (1)..(154): Homolog of NCBI NO: 15233120 NR Description: light-harvesting chlorophyll a/b binding protein
  misc_feature (1)..(154): Homolog of NCBI NO: 11277627 NR Description: PS I antenna protein Lhca2 [imported] - thaliana >gi|4741940|gb|AAD28767.1|AF134120_1 Lhca2 protein thaliana] >gi|15451180|gb|AAK96861.1| Lhca2 protein [Arabidopsis
  misc_feature (1)..(154): Homolog of NCBI NO: 2129879 NR Description: chlorophyll a/b-binding protein type II precursor,
  misc_feature (1)..(155): Homolog of NCBI NO: 99486 NR Description: chlorophyll a/b-binding protein (clone pINEab 31)

SEQ ID NO: 108233 - DNA, 1189 bp, Arabidopsis thaliana
  misc_feature (1)..(1189): Ceres Seq. ID no. 13653567
  misc_feature: MA Experiment ID: 20000180 Result: Down-regulated in Transcription
  misc_feature: MA Experiment 20000180 PARAMETER Experiment Name: At_Germinating_Seeds_P Parameter: Age (hr) Value: 24 vs. 0
  misc_feature: MA Experiment 20000180 PARAMETER Experiment Name: At_Germinating_Seeds_P Parameter: Tissue Value: Germinating Seeds
  misc_feature: MA Experiment ID: 20000227 Result: Up-regulated in Transcription
  misc_feature: MA Experiment 20000227 PARAMETER Experiment Name: At_Root-Tips-vs-Tops_P Parameter: Tissue Value: Root Tips vs. Root Tops
  misc_feature: MA Experiment ID: 20000234 Result: Up-regulated in Transcription
  misc_feature: MA Experiment 20000234 PARAMETER Experiment Name: At_Siliques_P Parameter: Age (day) Value: 21
  misc_feature: MA Experiment 20000234 PARAMETER Experiment Name: At_Siliques_P Parameter: Organism Value: A. thaliana
  misc_feature: MA Experiment 20000234 PARAMETER Experiment Name: At_Siliques_P Parameter: Plant Line Value: WS
  misc_feature: MA Experiment 20000234 PARAMETER Experiment Name: At_Siliques_P Parameter: Tissue Value: Less Than 5mm Siliques vs. Whole Plant
  misc_feature: MA Experiment ID: 20000264 Result: Up-regulated in Transcription
  misc_feature: MA Experiment 20000264 PARAMETER Experiment Name: At_Open_Flower_P Parameter: Age (day) Value: 21
  misc_feature: MA Experiment 20000264 PARAMETER Experiment Name: At_Open_Flower_P Parameter: Plant Line Value: WS
  misc_feature: MA Experiment 20000264 PARAMETER Experiment Name: At_Open_Flower_P Parameter: Tissue Value: Open Flower vs. Whole Plant
  misc_feature: MA Experiment ID: 20000265 Result: Up-regulated in Transcription
  misc_feature: MA Experiment 20000265 PARAMETER Experiment Name: At_Open_Flower_P Parameter: Age (day) Value: 21
  misc_feature: MA Experiment 20000265 PARAMETER Experiment Name: At_Open_Flower_P Parameter: Plant Line Value: WS
  misc_feature: MA Experiment 20000265 PARAMETER Experiment Name: At_Open_Flower_P Parameter: Tissue Value: Closed Flower vs. Whole Plant
  misc_feature: MA Experiment ID: 20000286 Result: Up-regulated in Transcription
  misc_feature: MA Experiment 20000286 PARAMETER Experiment Name: At_Open_Flower_P Parameter: Age (day) Value: 21
  misc_feature: MA Experiment 20000286 PARAMETER Experiment Name: At_Open_Flower_P Parameter: Plant Line Value: WS
  misc_feature: MA Experiment 20000286 PARAMETER Experiment Name: At_Open_Flower_P Parameter: Tissue Value: Half Open vs. Whole Plant
  misc_feature: MA Experiment ID: 20001557 Result: Up-regulated in Transcription
  misc_feature: MA Experiment 20001557 PARAMETER Experiment Name: At_Drought_Soil_Dry_P Parameter: Age (day) Value: 27
  misc_feature: MA Experiment 20001557 PARAMETER Experiment Name: At_Drought_Soil_Dry_P Parameter: Organism Value: A. thaliana
  misc_feature: MA Experiment 20001557 PARAMETER Experiment Name: At_Drought_Soil_Dry_P Parameter: Plant Line Value: WS
  misc_feature: MA Experiment 20001557 PARAMETER Experiment Name: At_Drought_Soil_Dry_P Parameter: Post Timepoint (hr) Value: 3
  misc_feature: MA Experiment 20001557 PARAMETER Experiment Name: At_Drought_Soil_Dry_P Parameter: Post-Treatment Value: Re-Water vs. No Drought
  misc_feature: MA Experiment 20001557 PARAMETER Experiment Name: At_Drought_Soil_Dry_P Parameter: Timepoint (day) Value: 13
  misc_feature: MA Experiment 20001557 PARAMETER Experiment Name: At_Drought_Soil_Dry_P Parameter: Treatment Value: Drought vs. No Drought
  misc_feature: MA Experiment ID: 20001558 Result: Up-regulated in Transcription
  misc_feature: MA Experiment 20001558 PARAMETER Experiment Name: At_Drought_Soil_Dry_P Parameter: Age (day) Value: 27
  misc_feature: MA Experiment 20001558 PARAMETER Experiment Name: At_Drought_Soil_Dry_P Parameter: Organism Value: A. thaliana
  misc_feature: MA Experiment 20001558 PARAMETER Experiment Name: At_Drought_Soil_Dry_P Parameter: Plant Line Value: WS
  misc_feature: MA Experiment 20001558 PARAMETER Experiment Name: At_Drought_Soil_Dry_P Parameter: Post Timepoint (hr) Value: 6
  misc_feature: MA Experiment 20001558 PARAMETER Experiment Name: At_Drought_Soil_Dry_P Parameter: Post-Treatment Value: Re-Water vs. No Drought
  misc_feature: MA Experiment 20001558 PARAMETER Experiment Name: At_Drought_Soil_Dry_P Parameter: Timepoint (day) Value: 13
  misc_feature: MA Experiment 20001558 PARAMETER Experiment Name: At_Drought_Soil_Dry_P Parameter: Treatment Value: Drought vs. No Drought
  misc_feature: MA Experiment ID: 20001560 Result: Up-regulated in Transcription
  misc_feature: MA Experiment 20001560 PARAMETER Experiment Name: At_Drought_Soil_Dry_P Parameter: Age (day) Value: 28
  misc_feature: MA Experiment 20001560 PARAMETER Experiment Name: At_Drought_Soil_Dry_P Parameter: Organism Value: A. thaliana
  misc_feature: MA Experiment 20001560 PARAMETER Experiment Name: At_Drought_Soil_Dry_P Parameter: Plant Line Value: WS
  misc_feature: MA Experiment 20001560 PARAMETER Experiment Name: At_Drought_Soil_Dry_P Parameter: Post Timepoint (hr) Value: None
  misc_feature: MA Experiment 20001560 PARAMETER Experiment Name: At_Drought_Soil_Dry_P Parameter: Post-Treatment Value: None
  misc_feature: MA Experiment 20001560 PARAMETER Experiment Name: At_Drought_Soil_Dry_P Parameter: Timepoint (day) Value: 14
  misc_feature: MA Experiment 20001560 PARAMETER Experiment Name: At_Drought_Soil_Dry_P Parameter: Treatment Value: Drought vs. No Drought
agttaccaattttctctcactaaatcagaaatgccgccgtcgttaccgtctctgcaactccgacggcttctcctccgtagcttcatttcctcctcctccgtcaatactcttcaatctcagccccgtatcatttcttccaagccgttgttttctcctcttcccccttcccgttcctctatattctcaacatttccttctagattcttctcatctgaaacgaatgcggaatcggaatctttggattcgaatgagatcgctctctctttctcgaaggatttgagataggaaccaaagcgtataacatgatgcttgattgtgtttgtaagctttgtaggaagaaagatccttttaagcttcaacctgaagtagagaaggttttgctggagatggagtttcgtggtgtacctagaaacacagagactttcaatgtgttgattaacaatctttgtaaaatcaggagaactgaagaagcaatgacattgtttggtaggatgggtgaatggggttgtcaaccagatgctgagacttatcttgttctgattaggagtttgtatcaagcagcgaggatcggtgaaggggacgaaatgatcgataagatgaaatcagcgggatatggtgagcttttgaataagaaagagtattacgggtttctcaagatattgtgtgggattgagaggcttgagcatgcgatgagtgtgtttaagagcatgaaagctaatggatgcaaacctgggatcaagacttatgatttgttgatggggaaaatgtgtgcgaataaccagctgactagagctaatggtttgtataaagaagcggctaagaaaggaatcgctgttagccctaaggaatacagagtagatccacggtttatgaaaaagaagaccaaggaagtggatagcaatgttaagaagagggagactttgcctgagaaaaccgcgaggaagaagaaacggctcaagcagatcaatatgagttttgttaagaaaccgcacaataagatgagacggagaatgtgatgctgatgaatcttcaacatctgatagaattttctaaagattattgtctttgttctttcctttttaagatattgtcaagagtactcatcattttgcttgatcatgagcaaattgtcccaataatcttttgttttgtctcagtgtaacgtttactaagagttcatgcttggccc

SEQ ID NO: 108234 - protein, 237 aa, Arabidopsis thaliana
  peptide (1)..(237): Ceres Seq. ID no. 13653568
  misc_feature (39)..(73): Pfam Name: PPR repeat Pfam Description: PPR repeat
  misc_feature (1)..(237): Homolog of NCBI NO: 15239488 NR Description: pentatricopeptide (PPR) repeat-containing protein thaliana] >gi|10177319|dbj|BAB10645.1|
  misc_feature (1)..(237): Homolog of NCBI NO: 21554346 NR Description: unknown [Arabidopsis thaliana]
  misc_feature (1)..(235): Homolog of NCBI NO: 34394565 NR Description: unknown protein [Oryza sativa (japonica
  misc_feature (1)..(234): Homolog of NCBI NO: 15240232 NR Description: pentatricopeptide (PPR) repeat-containing protein thaliana] >gi|9757858|dbj|BAB08492.1| gene_id:MFB13.15~unknown [Arabidopsis thaliana] >gi|17529064|gb|AAL38742.1| unknown
  misc_feature (1)..(234): Homolog of NCBI NO: 21593376 NR Description: unknown [Arabidopsis thaliana]
  misc_feature (1)..(201): Homolog of NCBI NO: 37534458 NR Description: putative endopeptidase [Oryza sativa (japonica group)] >gi|31432148|gb|AAP53818.1| putative endopeptidase [Oryza
  misc_feature (1)..(212): Homolog of NCBI NO: 15231863 NR Description: pentatricopeptide (PPR) repeat-containing protein
  misc_feature (1)..(185): Homolog of NCBI NO: 15234269 NR Description: hypothetical protein [Arabidopsis thaliana]
  misc_feature (17)..(224): Homolog of NCBI NO: 25518293 NR Description: hypothetical protein F13K23.2 - Arabidopsis >gi|8698724|gb|AAF78482.1|AC012187_2 Contains similarity to an protein F16M19.7 gi|6598837 from Arabidopsis thaliana BAC
  misc_feature (17)..(224): Homolog of NCBI NO: 15220990 NR Description: pentatricopeptide (PPR) repeat-containing protein
MMLDCVCKLCRKKDPFKLQPEVEKVLLEMEFRGVPRNTETFNVLINNLCKIRRTEEAMTLFGRMGEWGCQPDAETYLVLIRSLYQAARIGEGDEMIDKMKSAGYGELLNKKEYYGFLKILCGIERLEHAMSVFKSMKANGCKPGIKTYDLLMGKMCANNQLTRANGLYKEAAKKGIAVSPKEYRVDPRFMKKKTKEVDSNVKKRETLPEKTARKKKRLKQINMSFVKKPHNKMRRRM

SEQ ID NO: 108235 - protein, 236 aa, Arabidopsis thaliana
  peptide (1)..(236): Ceres Seq. ID no. 13653569
  misc_feature (38)..(72): Pfam Name: PPR repeat Pfam Description: PPR repeat
  misc_feature (1)..(236): Homolog of NCBI NO: 15239488 NR Description: pentatricopeptide (PPR) repeat-containing protein thaliana] >gi|10177319|dbj|BAB10645.1|
  misc_feature (1)..(236): Homolog of NCBI NO: 21554346 NR Description: unknown [Arabidopsis thaliana]
  misc_feature (1)..(234): Homolog of NCBI NO: 34394565 NR Description: unknown protein [Oryza sativa (japonica
  misc_feature (1)..(233): Homolog of NCBI NO: 15240232 NR Description: pentatricopeptide (PPR) repeat-containing protein thaliana] >gi|9757858|dbj|BAB08492.1| gene_id:MFB13.15~unknown [Arabidopsis thaliana] >gi|17529064|gb|AAL38742.1| unknown
  misc_feature (1)..(233): Homolog of NCBI NO: 21593376 NR Description: unknown [Arabidopsis thaliana]
  misc_feature (1)..(200): Homolog of NCBI NO: 37534458 NR Description: putative endopeptidase [Oryza sativa (japonica group)] >gi|31432148|gb|AAP53818.1| putative endopeptidase [Oryza
  misc_feature (1)..(211): Homolog of NCBI NO: 15231863 NR Description: pentatricopeptide (PPR) repeat-containing protein
  misc_feature (1)..(184): Homolog of NCBI NO: 15234269 NR Description: hypothetical protein [Arabidopsis thaliana]
  misc_feature (16)..(223): Homolog of NCBI NO: 25518293 NR Description: hypothetical protein F13K23.2 - Arabidopsis >gi|8698724|gb|AAF78482.1|AC012187_2 Contains similarity to an protein F16M19.7 gi|6598837 from Arabidopsis thaliana BAC
  misc_feature (16)..(223): Homolog of NCBI NO: 15220990 NR Description: pentatricopeptide (PPR) repeat-containing protein
MLDCVCKLCRKKDPFKLQPEVEKVLLEMEFRGVPRNTETFNVLINNLCKIRRTEEAMTLFGRMGEWGCQPDAETYLVLIRSLYQAARIGEGDEMIDKMKSAGYGELLNKKEYYGFLKILCGIERLEHAMSVFKSMKANGCKPGIKTYDLLMGKMCANNQLTRANGLYKEAAKKGIAVSPKEYRVDPRFMKKKTKEVDSNVKKRETLPEKTARKKKRLKQINMSFVKKPHNKMRRRM

SEQ ID NO: 108236 - protein, 209 aa, Arabidopsis thaliana
  peptide (1)..(209): Ceres Seq. ID no. 13653570
  misc_feature (11)..(45): Pfam Name: PPR repeat Pfam Description: PPR repeat
  misc_feature (1)..(209): Homolog of NCBI NO: 15239488 NR Description: pentatricopeptide (PPR) repeat-containing protein thaliana] >gi|10177319|dbj|BAB10645.1|
  misc_feature (1)..(209): Homolog of NCBI NO: 21554346 NR Description: unknown [Arabidopsis thaliana]
  misc_feature (1)..(207): Homolog of NCBI NO: 34394565 NR Description: unknown protein [Oryza sativa (japonica
  misc_feature (1)..(206): Homolog of NCBI NO: 15240232 NR Description: pentatricopeptide (PPR) repeat-containing protein thaliana] >gi|9757858|dbj|BAB08492.1| gene_id:MFB13.15~unknown [Arabidopsis thaliana] >gi|17529064|gb|AAL38742.1| unknown
  misc_feature (1)..(206): Homolog of NCBI NO: 21593376 NR Description: unknown [Arabidopsis thaliana]
  misc_feature (1)..(173): Homolog of NCBI NO: 37534458 NR Description: putative endopeptidase [Oryza sativa (japonica group)] >gi|31432148|gb|AAP53818.1| putative endopeptidase [Oryza
  misc_feature (1)..(184): Homolog of NCBI NO: 15231863 NR Description: pentatricopeptide (PPR) repeat-containing protein
  misc_feature (1)..(157): Homolog of NCBI NO: 15234269 NR Description: hypothetical protein [Arabidopsis thaliana]
  misc_feature (1)..(196): Homolog of NCBI NO: 25518293 NR Description: hypothetical protein F13K23.2 - Arabidopsis >gi|8698724|gb|AAF78482.1|AC012187_2 Contains similarity to an protein F16M19.7 gi|6598837 from Arabidopsis thaliana BAC
  misc_feature (1)..(196): Homolog of NCBI NO: 15220990 NR Description: pentatricopeptide (PPR) repeat-containing protein
MEFRGVPRNTETFNVLINNLCKIRRTEEAMTLFGRMGEWGCQPDAETYLVLIRSLYQAARIGEGDEMIDKMKSAGYGELLNKKEYYGFLKILCGIERLEHAMSVFKSMKANGCKPGIKTYDLLMGKMCANNQLTRANGLYKEAAKKGIAVSPKEYRVDPRFMKKKTKEVDSNVKKRETLPEKTARKKKRLKQINMSFVKKPHNKMRRRM

SEQ ID NO: 108237 - DNA, 1684 bp, Arabidopsis thaliana
  misc_feature (1)..(1684): Ceres Seq. ID no. 13653579
  misc_feature: MA Experiment ID: 20000314 Result: Up-regulated in Transcription
  misc_feature: MA Experiment 20000314 PARAMETER Experiment Name: At_14day_Shoots-Roots_Sub_P Parameter: Age (day) Value: 14
  misc_feature: MA Experiment 20000314 PARAMETER Experiment Name: At_14day_Shoots-Roots_Sub_P Parameter: Organism Value: A. thaliana
  misc_feature: MA Experiment 20000314 PARAMETER Experiment Name: At_14day_Shoots-Roots_Sub_P Parameter: Plant Line Value: WS
  misc_feature: MA Experiment 20000314 PARAMETER Experiment Name: At_14day_Shoots-Roots_Sub_P Parameter: Tissue Value: Roots vs. Whole Plant
  misc_feature: MA Experiment ID: 20001807 Result: Down-regulated in Transcription
  misc_feature: MA Experiment 20001807 PARAMETER Experiment Name: At_50mM_NH4NO3_L-to-H_Sub_P Parameter: Timepoint (hr) Value: 6
  misc_feature: MA Experiment 20001807 PARAMETER Experiment Name: At_50mM_NH4NO3_L-to-H_Sub_P Parameter: Tissue Value: Leaf
  misc_feature: MA Experiment 20001807 PARAMETER Experiment Name: At_50mM_NH4NO3_L-to-H_Sub_P Parameter: Treatment Value: 50mM NH4NO3 vs 100mM Mannitol
  misc_feature: Pfam Name: Pkinase Pfam Description: Protein kinase domain
aaattacttgtttcaatggagtttttgtttgtttgatttcctctgttacttatgcagcaaaagaagaaattgagtttaaaggagaagtgtgagaaggaagtttcaggaagatgggtgaagaaaagaggagaatttcaggaagatcagtttcacttccatcgatagacatattactagacgagaaaccaggttggccatttcttaaaagagcaagtttagggacaccacaacaagttcacaaatggcacacacgaaaagtctcagtggtcaattgggtcatgagcttacctgaacggtttccaaatcatcaacagactctaaactatgagacaagcttgataaagaaacaaatcaaggacatattgagagacaataacaaatggttcaactacaatgttcttaggaaagcaacatcagatttctctcaagagaatgtgattgggaaaggaggatgcaacgaagtgtaccgagggattcttgaagatggaaaaggcattgcagtgaaaatcttgaagtcatcatctaaagaagcaatgacaaatttcgttcatgaaatcaacattatctcttctttgagtcaccaaaacatctcaccgttacttggtgtttgtgtccaagacaatgaactaatctccgtttacaatctttcaaacacaggaagtttagaagaaacccttcacggtaagcaaaagggaaagtatgtattatcatgggaagagagattcaagatagctatcgggttggcggaagcattagactatcttcataaccgatgttctaagccagtgattcatagagatgtcaaaacttctaacgtccttctatcacttgagctccaacctcaggtaatctgtcagattttggtctgtcgatgtggggaccgacaacatcttctcgatattcgatacaaggtgatgtggtgggaacatttggatatcttgcaccggagtacttcatgtatggaaaagtcagtgataaagttgatgtttacgcctttggagtggttctgcttgaactcatttctggaagaaatcctatttcacctcagaatcctagaggacaagagagtttggtaatgtgggcaaagcctttgattgataccggaaatttaaaagtactgttggatccagacgttacagatatattcgacgagtctcagtttcaaagaatggtacttgctgcttcacattgcctcacaagatcagccacacatcgtcccaatataagacaagtaagattttgtttcattccttaagaaagctaagtccctcatgcaagaactaatctttaacgtttcttcagatactgaggctactaagagatgaaaacgaagccgggaaatggattatggaagaagaaggaaatgaagattgcttcgatgacgaggtttacccgaattccagcacagaattacacttaaaccttgcgatgcttgaggtggaagacgatgaaactgcatcaatcagcagcatggagagaagtaacaacggccttttttcttctacttgttcatctagggagcttcaaacataaggaattatgcttttagctaatagagaggttaggtacttaggttagaggtttgtttcttagtgtatggagtttacttgataactttatgttagacctgagctccctgctgttatctggaccagaaaattcattcccaagacgaatcattctc

SEQ ID NO: 108238 - protein, 321 aa, Arabidopsis thaliana
  peptide (1)..(321): Ceres Seq. ID no. 13653580
  misc_feature: Pfam Name: Pkinase Pfam Description: Protein kinase domain
  misc_feature (1)..(246): Homolog of NCBI NO: 15236248 NR Description: protein kinase - like [Arabidopsis thaliana]
  misc_feature (1)..(321): Homolog of NCBI NO: 27754592 NR Description: putative protein kinase [Arabidopsis thaliana]
  misc_feature (1)..(246): Homolog of NCBI NO: 15227291 NR Description: protein kinase -related [Arabidopsis thaliana]
  misc_feature (9)..(246): Homolog of NCBI NO: 15223890 NR Description: hypothetical protein [Arabidopsis thaliana]
  misc_feature (90)..(246): Homolog of NCBI NO: 22329713 NR Description: expressed protein [Arabidopsis thaliana] At1g21590/F24J8_9 [Arabidopsis thaliana]
  misc_feature (92)..(246): Homolog of NCBI NO: 15237563 NR Description: expressed protein [Arabidopsis thaliana] contains similarity to protein kinase~gene_id:MBM17.4 thaliana] >gi|20260318|gb|AAM13057.1| unknown protein
  misc_feature (92)..(246): Homolog of NCBI NO: 15242821 NR Description: protein kinase family [Arabidopsis thaliana] contains similarity to unknown protein~gene_id:MRI1.2~pir||T01617
  misc_feature (92)..(248): Homolog of NCBI NO: 28376688 NR Description: putative serine/threonine kinase [Oryza sativa
  misc_feature (92)..(246): Homolog of NCBI NO: 11994703 NR Description: somatic embryogenesis receptor kinase-like
  misc_feature (93)..(246): Homolog of NCBI NO: 34902064 NR Description: protein kinase [Oryza sativa (japonica
MGEEKRRISGRSVSLPSIDILLDEKPGWPFLKRASLGTPQQVHKWHTRKVSVVNWVMSLPERFPNHQQTLNYETSLIKKQIKDILRDNNKWFNYNVLRKATSDFSQENVIGKGGCNEVYRGILEDGKGIAVKILKSSSKEAMTNFVHEINIISSLSHQNISPLLGVCVQDNELISVYNLSNTGSLEETLHGKQKGKYVLSWEERFKIAIGLAEALDYLHNRCSKPVIHRDVKTSNVLLSLELQPQVICQILVCRCGDRQHLLDIRYKVMWWEHLDILHRSTSCMEKSVIKLMFTPLEWFCLNSFLEEILFHLRILEDKRVW

SEQ ID NO: 108239 - protein, 265 aa, Arabidopsis thaliana
  peptide (1)..(265): Ceres Seq. ID no. 13653581
  misc_feature: Pfam Name: Pkinase Pfam Description: Protein kinase domain
  misc_feature (1)..(190): Homolog of NCBI NO: 15236248 NR Description: protein kinase - like [Arabidopsis thaliana]
  misc_feature (1)..(265): Homolog of NCBI NO: 27754592 NR Description: putative protein kinase [Arabidopsis thaliana]
  misc_feature (1)..(190): Homolog of NCBI NO: 15227291 NR Description: protein kinase -related [Arabidopsis thaliana]
  misc_feature (1)..(190): Homolog of NCBI NO: 15223890 NR Description: hypothetical protein [Arabidopsis thaliana]
  misc_feature (34)..(190): Homolog of NCBI NO: 22329713 NR Description: expressed protein [Arabidopsis thaliana] At1g21590/F24J8_9 [Arabidopsis thaliana]
  misc_feature (36)..(190): Homolog of NCBI NO: 15237563 NR Description: expressed protein [Arabidopsis thaliana] contains similarity to protein kinase~gene_id:MBM17.4 thaliana] >gi|20260318|gb|AAM13057.1| unknown protein
  misc_feature (36)..(190): Homolog of NCBI NO: 15242821 NR Description: protein kinase family [Arabidopsis thaliana] contains similarity to unknown protein~gene_id:MRI1.2~pir||T01617
  misc_feature (36)..(192): Homolog of NCBI NO: 28376688 NR Description: putative serine/threonine kinase [Oryza sativa
  misc_feature (36)..(190): Homolog of NCBI NO: 11994703 NR Description: somatic embryogenesis receptor kinase-like
  misc_feature (37)..(190): Homolog of NCBI NO: 34902064 NR Description: protein kinase [Oryza sativa (japonica
MSLPERFPNHQQTLNYETSLIKKQIKDILRDNNKWFNYNVLRKATSDFSQENVIGKGGCNEVYRGILEDGKGIAVKILKSSSKEAMTNFVHEINIISSLSHQNISPLLGVCVQDNELISVYNLSNTGSLEETLHGKQKGKYVLSWEERFKIAIGLAEALDYLHNRCSKPVIHRDVKTSNVLLSLELQPQVICQILVCRCGDRQHLLDIRYKVMWWEHLDILHRSTSCMEKSVIKLMFTPLEWFCLNSFLEEILFHLRILEDKRVW

SEQ ID NO: 108240 - protein, 180 aa, Arabidopsis thaliana
  peptide (1)..(180): Ceres Seq. ID no. 13653582
  misc_feature: Pfam Name: Pkinase Pfam Description: Protein kinase domain
  misc_feature (1)..(105): Homolog of NCBI NO: 15236248 NR Description: protein kinase - like [Arabidopsis thaliana]
  misc_feature (1)..(180): Homolog of NCBI NO: 27754592 NR Description: putative protein kinase [Arabidopsis thaliana]
  misc_feature (1)..(105): Homolog of NCBI NO: 15227291 NR Description: protein kinase -related [Arabidopsis thaliana]
  misc_feature (1)..(105): Homolog of NCBI NO: 15223890 NR Description: hypothetical protein [Arabidopsis thaliana]
  misc_feature (1)..(105): Homolog of NCBI NO: 22329713 NR Description: expressed protein [Arabidopsis thaliana] At1g21590/F24J8_9 [Arabidopsis thaliana]
  misc_feature (1)..(105): Homolog of NCBI NO: 15237563 NR Description: expressed protein [Arabidopsis thaliana] contains similarity to protein kinase~gene_id:MBM17.4 thaliana] >gi|20260318|gb|AAM13057.1| unknown protein
  misc_feature (1)..(105): Homolog of NCBI NO: 15242821 NR Description: protein kinase family [Arabidopsis thaliana] contains similarity to unknown protein~gene_id:MRI1.2~pir||T01617
  misc_feature (1)..(107): Homolog of NCBI NO: 28376688 NR Description: putative serine/threonine kinase [Oryza sativa
  misc_feature (1)..(105): Homolog of NCBI NO: 11994703 NR Description: somatic embryogenesis receptor kinase-like
  misc_feature (1)..(105): Homolog of NCBI NO: 34902064 NR Description: protein kinase [Oryza sativa (japonica
MTNFVHEINIISSLSHQNISPLLGVCVQDNELISVYNLSNTGSLEETLHGKQKGKYVLSWEERFKIAIGLAEALDYLHNRCSKPVIHRDVKTSNVLLSLELQPQVICQILVCRCGDRQHLLDIRYKVMWWEHLDILHRSTSCMEKSVIKLMFTPLEWFCLNSFLEEILFHLRILEDKRVW

SEQ ID NO: 108241 - DNA, 1727 bp, Arabidopsis thaliana
  misc_feature (1)..(1727): Ceres Seq. ID no. 13653602
  misc_feature: MA Experiment ID: 108573 Result: Up-regulated in Transcription
  misc_feature: MA Experiment 108573 PARAMETER Experiment Name: At_Drought_cDNA_P Parameter: Timepoint (hr) Value: 6
  misc_feature: MA Experiment 108573 PARAMETER Experiment Name: At_Drought_cDNA_P Parameter: Tissue Value: Aerial
  misc_feature: MA Experiment 108573 PARAMETER Experiment Name: At_Drought_cDNA_P Parameter: Treatment Value: Drought vs. No Drought
  misc_feature: MA Experiment ID: 108577 Result: Down-regulated in Transcription
  misc_feature: MA Experiment 108577 PARAMETER Experiment Name: At_42deg_Heat_cDNA_P Parameter: Temperature (deg C) Value: 42 vs. 22
  misc_feature: MA Experiment 108577 PARAMETER Experiment Name: At_42deg_Heat_cDNA_P Parameter: Timepoint (hr) Value: 6
  misc_feature: MA Experiment 108577 PARAMETER Experiment Name: At_42deg_Heat_cDNA_P Parameter: Tissue Value: Aerial
  misc_feature: MA Experiment ID: 20000113 Result: Down-regulated in Transcription
  misc_feature: MA Experiment 20000113 PARAMETER Experiment Name: At_42deg_Heat_cDNA_P Parameter: Temperature (deg C) Value: 42 vs. 22
  misc_feature: MA Experiment 20000113 PARAMETER Experiment Name: At_42deg_Heat_cDNA_P Parameter: Timepoint (hr) Value: 8
  misc_feature: MA Experiment 20000113 PARAMETER Experiment Name: At_42deg_Heat_cDNA_P Parameter: Tissue Value: Aerial
  misc_feature: Pfam Name: bZIP_1 Pfam Description: bZIP transcription factor
gccaccagaaaaagaaacaatttgacagattcattcattagaagaagaagacaacaatccatcttcttctccccattcctcgtttcaattttgcagatctcgtctccttctcgatttattattaatatagagatggcaagttcaaaggggtctcagaatcatagaaatctgggatgcaatgggaaacaagctttactgcctccgaaaagtccgtttacgggtggtccaacgtttagtgcagattttgttccaagtagtgtgattggatccaaggctgttcagaagcttggagaaggaaatgccaatcatcatcgaacttcatctgagagttttcttattgaggaacagccttcttggcttgacgatcttctcaacgaacctgaaacacctgtacggaaaggagggcatcgacggtcatcgagtgattcatttgcatatgtagatgttcctgttggttttgatgttgattacacgctttgggatggtggtagatataataacaataatggtttctctaatcacgttagaggtcccaaggagtctgattaccttagaagccagcctgttcctttctacccttcagctcatttgtccaaacagaaaataagaccgtgggattcattaccagattccggtgctcgcccgaacagtagttctggttgtttggagagtagctctatcacaagatcagggtcttctggtagcctacgtgatacagaaaaggcttattctgctgctgatagcaagaaagatttcataaataatttcgcaaagtcgtcattcgaaaaacgggataatcctctggctaagtctgctacttccgaggctgatacgaaacgtgctagacagcagtttgcacagcgctctcgagtccgtaaaattcagtacatagctgaactggaaaggaacgttcagatgttacaagtatagggttctgaagtgtctgcggagcttgagtttctcaatcagcagaatctaattctcagcttggagaacaagtcccttaagaatcggttggaaagcttagcacaagagcagcttataaagtacttagaacatgatgtattggagaaagagattgtgaggctaagggctttataccagcttcaacagcagcaagagccgcagcagcaacatcagacaaaaaagcaaggatcatctagccaccagcgttcgaagagtagagatctagagacgcaattcacgaatctgtccttgaggccttaacagttcaaagttcctgccgaaaatagttttatgcttatggctagagcttgagctgtcttcatggttccaggccagcttcttgtgtgtctttccctatcgcattagtagctgctcagtttgtgcttatgcttcttagtttattttcatctttgttgacccggtttgacatctcgatgagcaagtgccagcgattgatgggaaaacggcataaatgaaacaacgagttcgctggaggcggtttggtctgtctctgcgcacatcagggctctcaaatctcgggctgtgtctcgcttgtattgtgtgtctgaagagaatgttccctgtaaaacgtgtagtggtgtaagctttgtatcaactgtcgtttgtcttgctcatctgtttgtgtaaccaaattctcatcatttatcagaaacttgaacaccttaagaaatattttggttctgatgtaacgatagcaaatttaacgtttgaaactactaataaaatgttgaccgttcttc

SEQ ID NO: 108242 - protein, 309 aa, Arabidopsis thaliana
  peptide (1)..(309): Ceres Seq. ID no. 13653603
  misc_feature: Pfam Name: bZIP_1 Pfam Description: bZIP transcription factor
  misc_feature (1)..(309): Homolog of NCBI NO: 30680232 NR Description: bZIP transcriptional activator protein -related
  misc_feature (45)..(309): Homolog of NCBI NO: 27311723 NR Description: Unknown protein [Arabidopsis thaliana]
  misc_feature (45)..(309): Homolog of NCBI NO: 28393180 NR Description: putative bZIP family transcription factor
  misc_feature (45)..(309): Homolog of NCBI NO: 25404190 NR Description: hypothetical protein T18I24.3 [imported] - thaliana >gi|12321251|gb|AAG50695.1|AC079604_2 bZIP activator RSG, putative [Arabidopsis thaliana]
  misc_feature (45)..(309): Homolog of NCBI NO: 30696210 NR Description: bZIP family transcription factor [Arabidopsis
  misc_feature (64)..(309): Homolog of NCBI NO: 15230964 NR Description: transcription factor bZIP61 (BZIP61),
  misc_feature (129)..(309): Homolog of NCBI NO: 18399693 NR Description: bZIP family transcription factor [Arabidopsis
  misc_feature (129)..(309): Homolog of NCBI NO: 25403436 NR Description: protein F15O4.49 [imported] - Arabidopsis >gi|8778353|gb|AAF79361.1|AC007887_20 F15O4.49 [Arabidopsis
  misc_feature (129)..(309): Homolog of NCBI NO: 21592919 NR Description: unknown [Arabidopsis thaliana]
  misc_feature (115)..(309): Homolog of NCBI NO: 18491297 NR Description: At2g42380/MHK10.10 [Arabidopsis thaliana]
ATRKRNNLTDSFIRRRRQQSIFFSPFLVSILQISSPSRFIINIEMASSKGSQNHRNLGCNGKQALLPPKSPFTGGPTFSADFVPSSVIGSKAVQKLGEGNANHHRTSSESFLIEEQPSWLDDLLNEPETPVRKGGHRRSSSDSFAYVDVPVGFDVDYTLWDGGRYNNNNGFSNHVRGPKESDYLRSQPVPFYPSAHLSKQKIRPWDSLPDSGARPNSSSGCLESSSITRSGSSGSLRDTEKAYSAADSKKDFINNFAKSSFEKRDNPLAKSATSEADTKRARQQFAQRSRVRKIQYIAELERNVQMLQV

SEQ ID NO: 108243 - protein, 265 aa, Arabidopsis thaliana
  peptide (1)..(265): Ceres Seq. ID no. 13653604
  misc_feature: Pfam Name: bZIP_1 Pfam Description: bZIP transcription factor
  misc_feature (1)..(265): Homolog of NCBI NO: 30680232 NR Description: bZIP transcriptional activator protein -related
  misc_feature (1)..(265): Homolog of NCBI NO: 27311723 NR Description: Unknown protein [Arabidopsis thaliana]
  misc_feature (1)..(265): Homolog of NCBI NO: 28393180 NR Description: putative bZIP family transcription factor
  misc_feature (1)..(265): Homolog of NCBI NO: 25404190 NR Description: hypothetical protein T18I24.3 [imported] - thaliana >gi|12321251|gb|AAG50695.1|AC079604_2 bZIP activator RSG, putative [Arabidopsis thaliana]
  misc_feature (1)..(265): Homolog of NCBI NO: 30696210 NR Description: bZIP family transcription factor [Arabidopsis
  misc_feature (20)..(265): Homolog of NCBI NO: 15230964 NR Description: transcription factor bZIP61 (BZIP61),
  misc_feature (85)..(265): Homolog of NCBI NO: 18399693 NR Description: bZIP family transcription factor [Arabidopsis
  misc_feature (85)..(265): Homolog of NCBI NO: 25403436 NR Description: protein F15O4.49 [imported] - Arabidopsis >gi|8778353|gb|AAF79361.1|AC007887_20 F15O4.49 [Arabidopsis
  misc_feature (85)..(265): Homolog of NCBI NO: 21592919 NR Description: unknown [Arabidopsis thaliana]
  misc_feature (71)..(265): Homolog of NCBI NO: 18491297 NR Description: At2g42380/MHK10.10 [Arabidopsis thaliana]
MASSKGSQNHRNLGCNGKQALLPPKSPFTGGPTFSADFVPSSVIGSKAVQKLGEGNANHHRTSSESFLIEEQPSWLDDLLNEPETPVRKGGHRRSSSDSFAYVDVPVGFDVDYTLWDGGRYNNNNGFSNHVRGPKESDYLRSQPVPFYPSAHLSKQKIRPWDSLPDSGARPNSSSGCLESSSITRSGSSGSLRDTEKAYSAADSKKDFINNFAKSSFEKRDNPLAKSATSEADTKRARQQFAQRSRVRKIQYIAELERNVQMLQV

SEQ ID NO: 108244 - DNA, 1125 bp, Arabidopsis thaliana
  misc_feature (1)..(1125): Ceres Seq. ID no. 13653617
  misc_feature: MA Experiment ID: 20000438 Result: Up-regulated in Transcription
  misc_feature: MA Experiment 20000438 PARAMETER Experiment Name: At_Shoots__P Parameter: Age (day) Value: 14
  misc_feature: MA Experiment 20000438 PARAMETER Experiment Name: At_Shoots__P Parameter: Tissue Value: Shoots vs. Whole Plant
  misc_feature: MA Experiment ID: 20000495 Result: Down-regulated in Transcription
  misc_feature: MA Experiment 20000495 PARAMETER Experiment Name: At_Guard_Cells_P Parameter: Harvest Date Value: 8/2/2002
  misc_feature: MA Experiment 20000495 PARAMETER Experiment Name: At_Guard_Cells_P Parameter: Organism Value: A. thaliana
  misc_feature: MA Experiment 20000495 PARAMETER Experiment Name: At_Guard_Cells_P Parameter: Tissue Value: Guard Cells vs. Leaves
  misc_feature: MA Experiment ID: 20000496 Result: Down-regulated in Transcription
  misc_feature: MA Experiment 20000496 PARAMETER Experiment Name: At_Guard_Cells_P Parameter: Harvest Date Value: 7/19/2002
  misc_feature: MA Experiment 20000496 PARAMETER Experiment Name: At_Guard_Cells_P Parameter: Organism Value: Canola
  misc_feature: MA Experiment 20000496 PARAMETER Experiment Name: At_Guard_Cells_P Parameter: Tissue Value: Guard Cells vs. Leaves
  misc_feature: MA Experiment ID: 20001451 Result: Down-regulated in Transcription
  misc_feature: MA Experiment 20001451 PARAMETER Experiment Name: At_Far-red-induction_P Parameter: Age (day) Value: 7
  misc_feature: MA Experiment 20001451 PARAMETER Experiment Name: At_Far-red-induction_P Parameter: Light Value: Far-red vs. White
  misc_feature: MA Experiment 20001451 PARAMETER Experiment Name: At_Far-red-induction_P Parameter: Organism Value: A. thaliana
  misc_feature: MA Experiment 20001451 PARAMETER Experiment Name: At_Far-red-induction_P Parameter: Plant Line Value: Columbia
  misc_feature: MA Experiment 20001451 PARAMETER Experiment Name: At_Far-red-induction_P Parameter: Timepoint (hr) Value: 24
  misc_feature: MA Experiment 20001451 PARAMETER Experiment Name: At_Far-red-induction_P Parameter: Tissue Value: Whole Plant
atggcgtcttgtttacaagcatccatgaattctctgcttccacgctcttcttctttttctcctcatcctcctctatcttcgaattcatccgggagaagaaacttgaagacttttcgttacgcctttcgcgccaaagcctctgccaaaatccctatgcctccgataaatccaaaggatcctttcctctccacgctcgcttctattgccgcgaattctccggaaaagcttctcaatcggccggttaacgctgatgtgccgccatatcttgacatctttgactcccctcagctcatgtcttctcctgcacaggttgaaagatcagtggcttataacgagcaccgaccgagaactcctccaccagacttgccatctatgcttcttgacgggagaattgtttacattggaatgcctcttgtgccggcagtgactgagctagttgtcgctgagctaatgtatcttcagtggctggatcccaaggaacccatttacatttacatcaactccacagggaccactcgtgatgatggagagacggttggaatggaatcagaagggtttgcgatctatgactctttgatgcaacttaaaaacgaggtacatacagtatgtgtgggagcagccataggtcaggcctgtctattactttctgcgggaaccaagggtaaacggtttatgatgccacatgccaaagcgatgattcagcaaccacgtgtaccttcttctgggttgatgcctgccagtgatgtcctgattcgggccaaagaggtcattacaaatagggatatacttgtggaactactatcaaagcatactgggaattccgtggagactgtagctaacgtaatgagaaggccatattacatggatgcaccaaaagctaaagaatttggagtcattgacaggattctttggcgcggtcaagaaaagattattgcggacgtggttccttcagaggaattcgacaagaatgcagggattaaaagcgtagtatgagtctagtcttaagttttcttggcctaaatcatactgcgtcatggagaagaacaaatagactgaccaaaatcacattggccgcagactgccttgtttcaaatcacttggtaaatgtgaacatgcgattaggag

SEQ ID NO: 108245 - protein, 330 aa, Arabidopsis thaliana; identical to SEQ ID NO: 46533
  peptide (1)..(330): Ceres Seq. ID no. 13653618
  misc_feature (115)..(306): Pfam Name: Clp protease Pfam Description: Clp protease
  misc_feature (1)..(330): Homolog of NCBI NO: 18390982 NR Description: ATP-dependent Clp protease proteolytic subunit
  misc_feature (1)..(230): Homolog of NCBI NO: 25402516 NR Description: hypothetical protein [imported] - Arabidopsis
  misc_feature (98)..(303): Homolog of NCBI NO: 22299302 NR Description: ATP-dependent Clp protease proteolytic subunit 3
  misc_feature (100)..(302): Homolog of NCBI NO: 23126723 NR Description: hypothetical protein [Nostoc punctiforme]
  misc_feature (100)..(302): Homolog of NCBI NO: 17231850 NR Description: ATP-dependent Clp protease proteolytic subunit
  misc_feature (106)..(303): Homolog of NCBI NO: 16331161 NR Description: ATP-dependent Clp protease proteolytic subunit
  misc_feature (118)..(303): Homolog of NCBI NO: 13812146 NR Description: ATP-dependent Clp protease proteolytic subunit
  misc_feature (106)..(303): Homolog of NCBI NO: 16506759 NR Description: hypothetical protein [Cyanothece sp. PCC 8801]
  misc_feature (98)..(303): Homolog of NCBI NO: 23043113 NR Description: hypothetical protein [Trichodesmium erythraeum
  misc_feature (114)..(302): Homolog of NCBI NO: 18402863 NR Description: ATP-dependent Clp protease proteolytic subunit [Arabidopsis thaliana] >gi|25453549|pir||T52451 endopeptidase Clp

SEQ ID NO: 108246 - protein, 322 aa, Arabidopsis thaliana; identical to SEQ ID NO: 46534
  peptide (1)..(322): Ceres Seq. ID no. 13653619
  misc_feature (107)..(298): Pfam Name: Clp protease Pfam Description: Clp protease
  misc_feature (1)..(322): Homolog of NCBI NO: 18390982 NR Description: ATP-dependent Clp protease proteolytic subunit
  misc_feature (1)..(222): Homolog of NCBI NO: 25402516 NR Description: hypothetical protein [imported] - Arabidopsis
  misc_feature (90)..(295): Homolog of NCBI NO: 22299302 NR Description: ATP-dependent Clp protease proteolytic subunit 3
  misc_feature (92)..(294): Homolog of NCBI NO: 23126723 NR Description: hypothetical protein [Nostoc punctiforme]
  misc_feature (92)..(294): Homolog of NCBI NO: 17231850 NR Description: ATP-dependent Clp protease proteolytic subunit
  misc_feature (98)..(295): Homolog of NCBI NO: 16331161 NR Description: ATP-dependent Clp protease proteolytic subunit
  misc_feature (110)..(295): Homolog of NCBI NO: 13812146 NR Description: ATP-dependent Clp protease proteolytic subunit
  misc_feature (98)..(295): Homolog of NCBI NO: 16506759 NR Description: hypothetical protein [Cyanothece sp. PCC 8801]
  misc_feature (90)..(295): Homolog of NCBI NO: 23043113 NR Description: hypothetical protein [Trichodesmium erythraeum
  misc_feature (106)..(294): Homolog of NCBI NO: 18402863 NR Description: ATP-dependent Clp protease proteolytic subunit [Arabidopsis thaliana] >gi|25453549|pir||T52451 endopeptidase Clp

SEQ ID NO: 108247 - protein, 279 aa, Arabidopsis thaliana
  peptide (1)..(279): Ceres Seq. ID no. 13653620
  misc_feature (64)..(255): Pfam Name: Clp protease Pfam Description: Clp protease
  misc_feature (1)..(279): Homolog of NCBI NO: 18390982 NR Description: ATP-dependent Clp protease proteolytic subunit
  misc_feature (1)..(179): Homolog of NCBI NO: 25402516 NR Description: hypothetical protein [imported] - Arabidopsis
  misc_feature (47)..(252): Homolog of NCBI NO: 22299302 NR Description: ATP-dependent Clp protease proteolytic subunit 3
  misc_feature (49)..(251): Homolog of NCBI NO: 23126723 NR Description: hypothetical protein [Nostoc punctiforme]
  misc_feature (49)..(251): Homolog of NCBI NO: 17231850 NR Description: ATP-dependent Clp protease proteolytic subunit
  misc_feature (55)..(252): Homolog of NCBI NO: 16331161 NR Description: ATP-dependent Clp protease proteolytic subunit
  misc_feature (67)..(252): Homolog of NCBI NO: 13812146 NR Description: ATP-dependent Clp protease proteolytic subunit
  misc_feature (55)..(252): Homolog of NCBI NO: 16506759 NR Description: hypothetical protein [Cyanothece sp. PCC 8801]
  misc_feature (47)..(252): Homolog of NCBI NO: 23043113 NR Description: hypothetical protein [Trichodesmium erythraeum
  misc_feature (63)..(251): Homolog of NCBI NO: 18402863 NR Description: ATP-dependent Clp protease proteolytic subunit [Arabidopsis thaliana] >gi|25453549|pir||T52451 endopeptidase Clp
MPPINPKDPFLSTLASIAANSPEKLLNRPVNADVPPYLDIFDSPQLMSSPAQVERSVAYNEHRPRTPPPDLPSMLLDGRIVYIGMPLVPAVTELVVAELMYLQWLDPKEPIYIYINSTGTTRDDGETVGMESEGFAIYDSLMQLKNEVHTVCVGAAIGQACLLLSAGTKGKRFMMPHAKAMIQQPRVPSSGLMPASDVLIRAKEVITNRDILVELLSKHTGNSVETVANVMRRPYYMDAPKAKEFGVIDRILWRGQEKIIADVVPSEEFDKNAGIKSVV

SEQ ID NO: 108248 - DNA, 1660 bp, Arabidopsis thaliana
  misc_feature (1)..(1660): Ceres Seq. ID no. 13653621
  misc_feature: MA Experiment ID: 108434 Result: Up-regulated in Transcription
  misc_feature: MA Experiment 108434 PARAMETER Experiment Name: At_Root_Tips_cDNA_P Parameter: Tissue Value: Root Tips
  misc_feature: MA Experiment ID: 108461 Result: Down-regulated in Transcription
  misc_feature: MA Experiment 108461 PARAMETER Experiment Name: At_Germinating_Seeds_cDNA_P Parameter: Age (day) Value: 1 vs. 0
  misc_feature: MA Experiment 108461 PARAMETER Experiment Name: At_Germinating_Seeds_cDNA_P Parameter: Tissue Value: Germinating Seeds
  misc_feature: MA Experiment ID: 108462 Result: Down-regulated in Transcription
  misc_feature: MA Experiment 108462 PARAMETER Experiment Name: At_Germinating_Seeds_cDNA_P Parameter: Age (day) Value: 2 vs. 0
  misc_feature: MA Experiment 108462 PARAMETER Experiment Name: At_Germinating_Seeds_cDNA_P Parameter: Tissue Value: Germinating Seeds
  misc_feature: MA Experiment ID: 108463 Result: Down-regulated in Transcription
  misc_feature: MA Experiment 108463 PARAMETER Experiment Name: At_Germinating_Seeds_cDNA_P Parameter: Age (day) Value: 3 vs. 0
  misc_feature: MA Experiment 108463 PARAMETER Experiment Name: At_Germinating_Seeds_cDNA_P Parameter: Tissue Value: Germinating Seeds
  misc_feature: MA Experiment ID: 108464 Result: Down-regulated in Transcription
  misc_feature: MA Experiment 108464 PARAMETER Experiment Name: At_Germinating_Seeds_cDNA_P Parameter: Age (day) Value: 4 vs. 0
  misc_feature: MA Experiment 108464 PARAMETER Experiment Name: At_Germinating_Seeds_cDNA_P Parameter: Tissue Value: Germinating Seeds
  misc_feature: MA Experiment ID: 20000113 Result: Down-regulated in Transcription
  misc_feature: MA Experiment 20000113 PARAMETER Experiment Name: At_42deg_Heat_cDNA_P Parameter: Temperature (deg C) Value: 42 vs. 22
  misc_feature: MA Experiment 20000113 PARAMETER Experiment Name: At_42deg_Heat_cDNA_P Parameter: Timepoint (hr) Value: 8
  misc_feature: MA Experiment 20000113 PARAMETER Experiment Name: At_42deg_Heat_cDNA_P Parameter: Tissue Value: Aerial
  misc_feature: MA Experiment ID: 20000227 Result: Up-regulated in Transcription
  misc_feature: MA Experiment 20000227 PARAMETER Experiment Name: At_Root-Tips-vs-Tops_P Parameter: Tissue Value: Root Tips vs. Root Tops
  misc_feature: MA Experiment ID: 20000495 Result: Up-regulated in Transcription
  misc_feature: MA Experiment 20000495 PARAMETER Experiment Name: At_Guard_Cells_P Parameter: Harvest Date Value: 8/2/2002
  misc_feature: MA Experiment 20000495 PARAMETER Experiment Name: At_Guard_Cells_P Parameter: Organism Value: A. thaliana
  misc_feature: MA Experiment 20000495 PARAMETER Experiment Name: At_Guard_Cells_P Parameter: Tissue Value: Guard Cells vs. Leaves
  misc_feature: MA Experiment ID: 20001557 Result: Up-regulated in Transcription
  misc_feature: MA Experiment 20001557 PARAMETER Experiment Name: At_Drought_Soil_Dry_P Parameter: Age (day) Value: 27
  misc_feature: MA Experiment 20001557 PARAMETER Experiment Name: At_Drought_Soil_Dry_P Parameter: Organism Value: A. thaliana
  misc_feature: MA Experiment 20001557 PARAMETER Experiment Name: At_Drought_Soil_Dry_P Parameter: Plant Line Value: WS
  misc_feature: MA Experiment 20001557 PARAMETER Experiment Name: At_Drought_Soil_Dry_P Parameter: Post Timepoint (hr) Value: 3
  misc_feature: MA Experiment 20001557 PARAMETER Experiment Name: At_Drought_Soil_Dry_P Parameter: Post-Treatment Value: Re-Water vs. No Drought
  misc_feature: MA Experiment 20001557 PARAMETER Experiment Name: At_Drought_Soil_Dry_P Parameter: Timepoint (day) Value: 13
  misc_feature: MA Experiment 20001557 PARAMETER Experiment Name: At_Drought_Soil_Dry_P Parameter: Treatment Value: Drought vs. No Drought
atgccgatcgataagatcttcaaagatgatgctagtgaagagaagggagaacgtgcgaggatggcatcatttgttggtgcaatggctatcagtgatctggttaagtctactttagggccaaagggcatggataaaatcttgcaatctactggtagaggtcatgcggtcactgttactaacgatggtgctactattctcaagtcacttcacatagacaaccctgcagctaaagttcttgttgacatctcgaaagttcaagatgatgaggttggtgatggaactacctctgttgttgtcttggccggcgagcttctgagggaagcagaaaagcttgtggcttctaagattcaccctatgaccatcatagcaggttacagaatggcttcggaatgtgctcgtaatgctttactgaaaagagtcattgataacaaggacaatgcagagaagtttaggtcagacttgttgaagattgcgatgactactttatgttccaaaattctctcacaggacaaggaacattttgcagaaatggccgtggatgctgttttcaggctaaagggaagcacaaacttggaagctattcagatcatcaaaaaacctggagggtctctgaaggattcgtttttggatgaagggtttattcttgacaagaaaataggaattgggcagcctaagcgcatagagaatgcaaatatcttagtagctaatactgctatggataccgataaagtgaagatttacggtgcacgtgtccgtgtggattccatgaccaaggttgctgagattgaaggggctgagaaggaaaaaatgaaagacaaggtgaagaagatcataggccacggaatcaactgctttgttaacaggcagttgatctacaatttccctgaggaactctttgctgatgctggtatacttgctattgagcatgctgactttgagggaatagagcgtcttggtttggttactggtggtgaaattgcttcgacctttgacaacccagagtctgttaagcttgggcattgcaagcttatagaagaaatcatgattggtgaagacaagttgattcatttctctggttgtgaaatgggccaggcttgttcaattgtcctaagaggggccagtcaccatgtcctagatgaggctgaaagatcactccatgatgccttatgtgtactctctcaaacagtgaatgatactagagttttgcttggaggtggatggccagagatggtgatggcaaaggaagtagatgagcttgcaaggaaaactgctggcaaaaaatctcatgccattgaagctttctcacgtgctctagttgctataccgacaacaatcgctgacaacgctggtttagacagtgccgaattggttgctcagcttcgtgcagagcaccacactgaagggtgtaacgctgggatcgacgtcatcactggagctgtaggagatatggaagagagaggaatctatgaagcattcaaagtgaagcaagcggttctgctttcagccacagaagcatctgagatgatattgcgagtggatgaaatcattacatgtgctcctaggaggagagaagacaggatgtgaaaaactcaacacaaacacatgaacgtggtgggagcctagagattccatgattgtgttttcgatttggaagggtggg

SEQ ID NO: 108249 - protein, 527 aa, Arabidopsis thaliana; identical to SEQ ID NO: 29071
  peptide (1)..(527): Ceres Seq. ID no. 13653622
  misc_feature (30)..(520): Pfam Name: TCP-1/cpn60 chaperonin family Pfam Description: TCP-1/cpn60 chaperonin family
  misc_feature (1)..(527): Homolog of NCBI NO: 15242093 NR Description: chaperonin, putative [Arabidopsis thaliana] AT5g20890/F22D1_60 [Arabidopsis thaliana]
  misc_feature (2)..(523): Homolog of NCBI NO: 27503862 NR Description: Similar to chaperonin subunit 2 (beta) [Xenopus
  misc_feature (2)..(523): Homolog of NCBI NO: 5453603 NR Description: chaperonin containing TCP1, subunit 2 (beta);
  misc_feature (2)..(523): Homolog of NCBI NO: 22654291 NR Description: T-complex protein 1, beta subunit (TCP-1-beta)
  misc_feature (2)..(523): Homolog of NCBI NO: 6671700 NR Description: chaperonin subunit 2 (beta) [Mus musculus]
  misc_feature (2)..(502): Homolog of NCBI NO: 21105454 NR Description: chaperonin-containing TCP-1 complex beta chain
  misc_feature (5)..(524): Homolog of NCBI NO: 32421079 NR Description: hypothetical protein [Neurospora crassa]
  misc_feature (5)..(527): Homolog of NCBI NO: 19113929 NR Description: probable t-complex protein 1, beta subunit
  misc_feature (2)..(524): Homolog of NCBI NO: 17066722 NR Description: CCT chaperonin beta subunit [Physarum
  misc_feature (2)..(526): Homolog of NCBI NO: 18858175 NR Description: CG7033-PA [Drosophila melanogaster]

SEQ ID NO: 108250 - protein, 507 aa, Arabidopsis thaliana; identical to SEQ ID NO: 29072
  peptide (1)..(507): Ceres Seq. ID no. 13653623
  misc_feature (10)..(500): Pfam Name: TCP-1/cpn60 chaperonin family Pfam Description: TCP-1/cpn60 chaperonin family
  misc_feature (1)..(507): Homolog of NCBI NO: 15242093 NR Description: chaperonin, putative [Arabidopsis thaliana] AT5g20890/F22D1_60 [Arabidopsis thaliana]
  misc_feature (1)..(503): Homolog of NCBI NO: 27503862 NR Description: Similar to chaperonin subunit 2 (beta) [Xenopus
  misc_feature (1)..(503): Homolog of NCBI NO: 5453603 NR Description: chaperonin containing TCP1, subunit 2 (beta);
  misc_feature (1)..(503): Homolog of NCBI NO: 22654291 NR Description: T-complex protein 1, beta subunit (TCP-1-beta)
  misc_feature (1)..(503): Homolog of NCBI NO: 6671700 NR Description: chaperonin subunit 2 (beta) [Mus musculus]
  misc_feature (1)..(482): Homolog of NCBI NO: 21105454 NR Description: chaperonin-containing TCP-1 complex beta chain
  misc_feature (1)..(504): Homolog of NCBI NO: 32421079 NR Description: hypothetical protein [Neurospora crassa]
  misc_feature (1)..(507): Homolog of NCBI NO: 19113929 NR Description: probable t-complex protein 1, beta subunit
  misc_feature (1)..(504): Homolog of NCBI NO: 17066722 NR Description: CCT chaperonin beta subunit [Physarum
  misc_feature (1)..(506): Homolog of NCBI NO: 18858175 NR Description: CG7033-PA [Drosophila melanogaster]

SEQ ID NO: 108251 - protein, 500 aa, Arabidopsis thaliana; identical to SEQ ID NO: 29073
  peptide (1)..(500): Ceres Seq. ID no. 13653624
  misc_feature (3)..(493): Pfam Name: TCP-1/cpn60 chaperonin family Pfam Description: TCP-1/cpn60 chaperonin family
  misc_feature (1)..(500): Homolog of NCBI NO: 15242093 NR Description: chaperonin, putative [Arabidopsis thaliana] AT5g20890/F22D1_60 [Arabidopsis thaliana]
  misc_feature (1)..(496): Homolog of NCBI NO: 27503862 NR Description: Similar to chaperonin subunit 2 (beta) [Xenopus
  misc_feature (1)..(496): Homolog of NCBI NO: 5453603 NR Description: chaperonin containing TCP1, subunit 2 (beta);
  misc_feature (1)..(496): Homolog of NCBI NO: 22654291 NR Description: T-complex protein 1, beta subunit (TCP-1-beta)
  misc_feature (1)..(496): Homolog of NCBI NO: 6671700 NR Description: chaperonin subunit 2 (beta) [Mus musculus]
  misc_feature (1)..(475): Homolog of NCBI NO: 21105454 NR Description: chaperonin-containing TCP-1 complex beta chain
  misc_feature (1)..(497): Homolog of NCBI NO: 32421079 NR Description: hypothetical protein [Neurospora crassa]
  misc_feature (1)..(500): Homolog of NCBI NO: 19113929 NR Description: probable t-complex protein 1, beta subunit
  misc_feature (1)..(497): Homolog of NCBI NO: 17066722 NR Description: CCT chaperonin beta subunit [Physarum
  misc_feature (1)..(499): Homolog of NCBI NO: 18858175 NR Description: CG7033-PA [Drosophila melanogaster]

SEQ ID NO: 108252 - DNA, 2486 bp, Arabidopsis thaliana
  misc_feature (1)..(2486): Ceres Seq. ID no. 13653652
  misc_feature: MA Experiment ID: 20001905 Result: Up-regulated in Transcription
  misc_feature: MA Experiment 20001905 PARAMETER Experiment Name: At_Drought_Reproduction_P Parameter: Age (day) Value: 40
  misc_feature: MA Experiment 20001905 PARAMETER Experiment Name: At_Drought_Reproduction_P Parameter: Organism Value: A. thaliana
  misc_feature: MA Experiment 20001905 PARAMETER Experiment Name: At_Drought_Reproduction_P Parameter: Plant Line Value: WS
  misc_feature: MA Experiment 20001905 PARAMETER Experiment Name: At_Drought_Reproduction_P Parameter: Timepoint (day) Value: 10
  misc_feature: MA Experiment 20001905 PARAMETER Experiment Name: At_Drought_Reproduction_P Parameter: Tissue Value: Rosettes
  misc_feature: MA Experiment 20001905 PARAMETER Experiment Name: At_Drought_Reproduction_P Parameter: Treatment Value: Drought vs. No Drought
atctctctctatctcttctccgctcacagcgaatctctctctctctctctctctctctctcttctccggtgtattccgttctccgggaatttctccgaagagggagagaggaaaaaaaaaacgtccgattcaatctcttcgttgctcgacgaatttttcttaagctttccttattgggagctgcaggtgactcatcgaaatgcagtgaaatgagtgttgatgagaagagacagcttgtttatgaactgtcgaagcaatcacatctagctgctgaggtcttgcaggcatggagccgccaagagattctacagatcttatgcgcagaaatgggaaaagaaaggaagtatactggtttgaccaaagtcaagatcatcgagacccttttgaaaattgtatctgagaaaaactctggagagtgtgaagggaagaagagagattctgattgtttgcctattcagagaaacactaagagacaaaggaaggttgataatccttctcggtatgtgattccagcaaccaacattgtaacaagcaacaatgcctcagggagctgcagctcggttaatactaaaggtgagagtactaccatctactgcaaaaatttggcttgtcgtgctgtactgagacaggaagactcgttttgcagaaggtgttcatgttgcatctgtcgtaagtatgatgataacaaagatcctagtctctggttaacatgtagctcagatcctccatttgagggtgagtcttgcggattctcgtgtcatcttgaatgtgctttcaacactgaaaaatccggtcttggaaaagacaagcaaagtgagggatgctgcttctattgtgtctcttgcggtaaagcaaacagtttgcttgaatgctggaagaagcaattgacgattgctaaagaaaccagaagggtagaagtgctttgttaccgtcttttcttagtccagaaactattgaagagctcaactaaataccgaaatctgtgtgaggttgtggatgaagctgtcaagactcttgaagctgatgtgggtcctctcactggtcttcctatgaaaatgggtagaggaattgtaaacagacttcattcgggacccgatgtgcagaaactttgctcttctgctcttgaatctcttgaaactatagcaactacacctcctgatgttgctgcattaccttcacctcgcagctccaagatgcagcaagatacagcaaccacaggatcaaccaagatcaggttcgaggatgtaaacgcgacttcacttacagtggttctcgcctctaatgaaattccctcacctccaaacatcgttcactacagtatttggcatcgtaaggtaccagaaaaagattacccggagaaatcgacttgcacattgtttattccaaacacaagatttgttgtctctggattagctccagcttctgagtactgcttcaaagttgtgtcctatagtggaaccagagaaatgggcgttgatgaaatcaatgttttgacacgtagcgctgaagaaggagcgaattgctcttcggcagtggaaagaagcgtaagccctctcacaaattgcagcacattgtcttctaatccttcttctgttgaagctgagtccaacaacgattacattgtcccaaagaagccatcttcaaagaacgaagacaacaattctccttcagtcgatgaaagtgctgcgaaaaggatgaagaggacaaccgactcagacattgtacagattgagaaggacgttgagcagattgtgttgttggatgatgaagaacaagaagctgttctggataagacggaatctgaaactccagtcgtggttactacgaaaagtcttgttggtaatcgaaacagttcagatgcgagtttgccaattactcccttcaggtcagatgaaatcaagaaccgtcaagctagaatcgaaatatcgatgaaagacaactgtaacaacggtgatcattcagcgaatggaggaacagaaagtggattagagcattgtgtgaagatcataagacaactcgagtgttcaggacatatcgataagaatttcagacagaagtttctgacttggtatagcttgagagcaacgtcacaagagattagagttgtgaagatattcattgatacatttattgatgatcccatggctttggctgagcagctcattgatactttcgacgaccgtgtttcgataaagcgttctgcggttggtggtagcggtgcgtctgcagttgttccatctggattctgtatgaagttgtggcattagagaatgggaacttgtgctctgtttttttcaagtcattttcaaaacgttattctaattattgggaaatttgcattattggaacatttccatgcaagaacagtagtactgttgctatcgaatagatcgtctttgtcggattatttatttatttttagtggatttgattccatttataatttagtaattagtcctagactgaattattcttatttcgttgac

SEQ ID NO: 108253 - protein, 754 aa, Arabidopsis thaliana
  peptide (1)..(754): Ceres Seq. ID no. 13653653
  misc_feature (218)..(283): Pfam Name: PHD-finger Pfam Description: PHD-finger
  misc_feature (63)..(576): Homolog of NCBI NO: 38637254 NR Description: putative coiled-coil protein [Oryza sativa
  misc_feature (651)..(754): Homolog of NCBI NO: 38637254 NR Description: putative coiled-coil protein [Oryza sativa
  misc_feature (98)..(529): Homolog of NCBI NO: 30350861 NR Description: hypothetical protein At2g18880 [Arabidopsis
  misc_feature (637)..(744): Homolog of NCBI NO: 30350861 NR Description: hypothetical protein At2g18880 [Arabidopsis
  misc_feature (157)..(537): Homolog of NCBI NO: 15242117 NR Description: hypothetical protein [Arabidopsis thaliana] gene_id:MSF19.4~pir||T14080~strong similarity to unknown protein
  misc_feature (198)..(502): Homolog of NCBI NO: 15230113 NR Description: expressed protein [Arabidopsis thaliana] emb|CAB52464.1~gene_id:MXP5.1~similar to unknown protein
  misc_feature (613)..(732): Homolog of NCBI NO: 15230113 NR Description: expressed protein [Arabidopsis thaliana] emb|CAB52464.1~gene_id:MXP5.1~similar to unknown protein
  misc_feature (293)..(503): Homolog of NCBI NO: 15224250 NR Description: hypothetical protein [Arabidopsis thaliana]
  misc_feature (637)..(744): Homolog of NCBI NO: 15224250 NR Description: hypothetical protein [Arabidopsis thaliana]
  misc_feature (70)..(160): Homolog of NCBI NO: 15224250 NR Description: hypothetical protein [Arabidopsis thaliana]
LSLSLLRSQRISLSLSLSLSSPVYSVLREFLRRGREEKKNVRFNLFVARRIFLKLSLLGAAGDSSKCSEMSVDEKRQLVYELSKQSHLAAEVLQAWSRQEILQILCAEMGKERKYTGLTKVKIIETLLKIVSEKNSGECEGKKRDSDCLPIQRNTKRQRKVDNPSRYVIPATNIVTSNNASGSCSSVNTKGESTTIYCKNLACRAVLRQEDSFCRRCSCCICRKYDDNKDPSLWLTCSSDPPFEGESCGFSCHLECAFNTEKSGLGKDKQSEGCCFYCVSCGKANSLLECWKKQLTIAKETRRVEVLCYRLFLVQKLLKSSTKYRNLCEVVDEAVKTLEADVGPLTGLPMKMGRGIVNRLHSGPDVQKLCSSALESLETIATTPPDVAALPSPRSSKMQQDTATTGSTKIRFEDVNATSLTVVLASNEIPSPPNIVHYSIWHRKVPEKDYPEKSTCTLFIPNTRFVVSGLAPASEYCFKVVSYSGTREMGVDEINVLTRSAEEGANCSSAVERSVSPLTNCSTLSSNPSSVEAESNNDYIVPKKPSSKNEDNNSPSVDESAAKRMKRTTDSDIVQIEKDVEQIVLLDDEEQEAVLDKTESETPVVVTTKSLVGNRNSSDASLPITPFRSDEIKNRQARIEISMKDNCNNGDHSANGGTESGLEHCVKIIRQLECSGHIDKNFRQKFLTWYSLRATSQEIRVVKIFIDTFIDDPMALAEQLIDTFDDRVSIKRSAVGGSGASAVVPSGFCMKLWH

SEQ ID NO: 108254 - protein, 685 aa, Arabidopsis thaliana
  peptide (1)..(685): Ceres Seq. ID no. 13653654
  misc_feature (149)..(214): Pfam Name: PHD-finger Pfam Description: PHD-finger
  misc_feature (1)..(507): Homolog of NCBI NO: 38637254 NR Description: putative coiled-coil protein [Oryza sativa
  misc_feature (582)..(685): Homolog of NCBI NO: 38637254 NR Description: putative coiled-coil protein [Oryza sativa
  misc_feature (29)..(460): Homolog of NCBI NO: 30350861 NR Description: hypothetical protein At2g18880 [Arabidopsis
  misc_feature (568)..(675): Homolog of NCBI NO: 30350861 NR Description: hypothetical protein At2g18880 [Arabidopsis
  misc_feature (88)..(468): Homolog of NCBI NO: 15242117 NR Description: hypothetical protein [Arabidopsis thaliana] gene_id:MSF19.4~pir||T14080~strong similarity to unknown protein
  misc_feature (129)..(433): Homolog of NCBI NO: 15230113 NR Description: expressed protein [Arabidopsis thaliana] emb|CAB52464.1~gene_id:MXP5.1~similar to unknown protein
  misc_feature (544)..(663): Homolog of NCBI NO: 15230113 NR Description: expressed protein [Arabidopsis thaliana] emb|CAB52464.1~gene_id:MXP5.1~similar to unknown protein
  misc_feature (224)..(434): Homolog of NCBI NO: 15224250 NR Description: hypothetical protein [Arabidopsis thaliana]
  misc_feature (568)..(675): Homolog of NCBI NO: 15224250 NR Description: hypothetical protein [Arabidopsis thaliana]
  misc_feature (1)..(91): Homolog of NCBI NO: 15224250 NR Description: hypothetical protein [Arabidopsis thaliana]
MSVDEKRQLVYELSKQSHLAAEVLQAWSRQEILQILCAEMGKERKYTGLTKVKIIETLLKIVSEKNSGECEGKKRDSDCLPIQRNTKRQRKVDNPSRYVIPATNIVTSNNASGSCSSVNTKGESTTIYCKNLACRAVLRQEDSFCRRCSCCICRKYDDNKDPSLWLTCSSDPPFEGESCGFSCHLECAFNTEKSGLGKDKQSEGCCFYCVSCGKANSLLECWKKQLTIAKETRRVEVLCYRLFLVQKLLKSSTKYRNLCEVVDEAVKTLEADVGPLTGLPMKMGRGIVNRLHSGPDVQKLCSSALESLETIATTPPDVAALPSPRSSKMQQDTATTGSTKIRFEDVNATSLTVVLASNEIPSPPNIVHYSIWHRKVPEKDYPEKSTCTLFIPNTRFVVSGLAPASEYCFKVVSYSGTREMGVDEINVLTRSAEEGANCSSAVERSVSPLTNCSTLSSNPSSVEAESNNDYIVPKKPSSKNEDNNSPSVDESAAKRMKRTTDSDIVQIEKDVEQIVLLDDEEQEAVLDKTESETPVVVTTKSLVGNRNSSDASLPITPFRSDEIKNRQARIEISMKDNCNNGDHSANGGTESGLEHCVKIIRQLECSGHIDKNFRQKFLTWYSLRATSQEIRVVKIFIDTFIDDPMALAEQLIDTFDDRVSIKRSAVGGSGASAVVPSGFCMKLWH

SEQ ID NO: 108255 - protein, 646 aa, Arabidopsis thaliana
  peptide (1)..(646): Ceres Seq. ID no. 13653655
  misc_feature (110)..(175): Pfam Name: PHD-finger Pfam Description: PHD-finger
  misc_feature (1)..(468): Homolog of NCBI NO: 38637254 NR Description: putative coiled-coil protein [Oryza sativa
  misc_feature (543)..(646): Homolog of NCBI NO: 38637254 NR Description: putative coiled-coil protein [Oryza sativa
  misc_feature (1)..(421): Homolog of NCBI NO: 30350861 NR Description: hypothetical protein At2g18880 [Arabidopsis
  misc_feature (529)..(636): Homolog of NCBI NO: 30350861 NR Description: hypothetical protein At2g18880 [Arabidopsis
  misc_feature (49)..(429): Homolog of NCBI NO: 15242117 NR Description: hypothetical protein [Arabidopsis thaliana] gene_id:MSF19.4~pir||T14080~strong similarity to unknown protein
  misc_feature (90)..(394): Homolog of NCBI NO: 15230113 NR Description: expressed protein [Arabidopsis thaliana] emb|CAB52464.1~gene_id:MXP5.1~similar to unknown protein
  misc_feature (505)..(624): Homolog of NCBI NO: 15230113 NR Description: expressed protein [Arabidopsis thaliana] emb|CAB52464.1~gene_id:MXP5.1~similar to unknown protein
  misc_feature (185)..(395): Homolog of NCBI NO: 15224250 NR Description: hypothetical protein [Arabidopsis thaliana]
  misc_feature (529)..(636): Homolog of NCBI NO: 15224250 NR Description: hypothetical protein [Arabidopsis thaliana]
  misc_feature (1)..(52): Homolog of NCBI NO: 15224250 NR Description: hypothetical protein [Arabidopsis thaliana]
MGKERKYTGLTKVKIIETLLKIVSEKNSGECEGKKRDSDCLPIQRNTKRQRKVDNPSRYVIPATNIVTSNNASGSCSSVNTKGESTTIYCKNLACRAVLRQEDSFCRRCSCCICRKYDDNKDPSLWLTCSSDPPFEGESCGFSCHLECAFNTEKSGLGKDKQSEGCCFYCVSCGKANSLLECWKKQLTIAKETRRVEVLCYRLFLVQKLLKSSTKYRNLCEVVDEAVKTLEADVGPLTGLPMKMGRGIVNRLHSGPDVQKLCSSALESLETIATTPPDVAALPSPRSSKMQQDTATTGSTKIRFEDVNATSLTVVLASNEIPSPPNIVHYSIWHRKVPEKDYPEKSTCTLFIPNTRFVVSGLAPASEYCFKVVSYSGTREMGVDEINVLTRSAEEGANCSSAVERSVSPLTNCSTLSSNPSSVEAESNNDYIVPKKPSSKNEDNNSPSVDESAAKRMKRTTDSDIVQIEKDVEQIVLLDDEEQEAVLDKTESETPVVVTTKSLVGNRNSSDASLPITPFRSDEIKNRQARIEISMKDNCNNGDHSANGGTESGLEHCVKIIRQLECSGHIDKNFRQKFLTWYSLRATSQEIRVVKIFIDTFIDDPMALAEQLIDTFDDRVSIKRSAVGGSGASAVVPSGFCMKLWH

SEQ ID NO: 108256 - DNA, 1104 bp, Arabidopsis thaliana
  misc_feature (1)..(1104): Ceres Seq. ID no. 13653684
aaaaaaaatccccccccccccccccgaagaaacagccaacggattagggatcttaccgttctgcgattcgccgagtttgaagctttttttagagacttcaatggtgagccaaggaatggtatctcttacaaagtctctatgcactatgactccaagagtccgtctcaagaatccgaatatgttgcagaaactaaagactggatcttgtaatttccgtttcagaaatctccgtgtcttatgcacaccaaagctgtctcagtgggaaccgtcacctttcattcatgcttctgcagaagaagctgctgatatagtattggacaaaaccgcgaatgtgttagaatctattgtctccgagagtgcagaggaagagaaagtagatatgtcagcgcaacaacgaactaattctcaagttcagattgcattttcaatcttggagcaacccttttcctcttaatggctgattcttgcgcacgtcctaaagacccatcacagtcctgcaacagcaaaccaccatttagctataagttctggaacatgttttcactcataatcgggtttctagtcccaatgttacttctcttcggatcccaatctggccttctcgcttctctccagccccagattcctttcctctcgtccgctgttatcctcttcccgtacttcattctccttgctgttcagacattaacagagatcctcacatggcactggcaatcaccggtctggctagtcacaccagttgtctacgaggcttaccgaatcttgcaactgatgagagggttgacacttagtgcagaggtcaacgcaccggtttgggtggttcatatgcttcgtgggcttgtctcttggtgggtattgatcttgggaatgcaactcatgagagttgcttggtttgctggttttgcatctagaacaacaacaggtcagcaaccacaatctgttgcttctaagtaaagacagataaatgtttcttcgtttagtttttaaagtcatgtcaaagatttgtaactctttcttcactgtatagcttttattattcgtgggttggtgataaggattaaaaaaaaacacatattctttatgatcatattcgctcttttagtc

SEQ ID NO: 108257 - protein, 166 aa, Arabidopsis thaliana
  peptide (1)..(166): Ceres Seq. ID no. 13653685
  misc_feature (1)..(166): Homolog of NCBI NO: 11281196 NR Description: hypothetical protein T8B10.250 - Arabidopsis >gi|7288007|emb|CAB81845.1| putative protein [Arabidopsis
  misc_feature (1)..(166): Homolog of NCBI NO: 30695235 NR Description: expressed protein [Arabidopsis thaliana]
  misc_feature (1)..(166): Homolog of NCBI NO: 30695238 NR Description: expressed protein [Arabidopsis thaliana] putative protein [Arabidopsis thaliana]
  misc_feature (1)..(156): Homolog of NCBI NO: 38605903 NR Description: OSJNBb0020O11.15 [Oryza sativa (japonica
  misc_feature (1)..(134): Homolog of NCBI NO: 23127993 NR Description: hypothetical protein [Nostoc punctiforme]
MADSCARPKDPSQSCNSKPPFSYKFWNMFSLIIGFLVPMLLLFGSQSGLLASLQPQIPFLSSAVILFPYFILLAVQTLTEILTWHWQSPVWLVTPVVYEAYRILQLMRGLTLSAEVNAPVWVVHMLRGLVSWWVLILGMQLMRVAWFAGFASRTTTGQQPQSVASK

SEQ ID NO: 108258 - protein, 150 aa, Arabidopsis thaliana
  peptide (1)..(150): Ceres Seq. ID no. 13653686
  misc_feature (34)..(150): Homolog of NCBI NO: 11281196 NR Description: hypothetical protein T8B10.250 - Arabidopsis >gi|7288007|emb|CAB81845.1| putative protein [Arabidopsis
KKIPPPPPEETANGLGILPFCDSPSLKLFLETSMVSQGMVSLTKSLCTMTPRVRLKNPNMLQKLKTGSCNFRFRNLRVLCTPKLSQWEPSPFIHASAEEAADIVLDKTANVLESIVSESAEEEKVDMSAQQRTNSQVQIAFSILEQPFSS

SEQ ID NO: 108259 - protein, 139 aa, Arabidopsis thaliana
  peptide (1)..(139): Ceres Seq. ID no. 13653687
  misc_feature (1)..(139): Homolog of NCBI NO: 11281196 NR Description: hypothetical protein T8B10.250 - Arabidopsis >gi|7288007|emb|CAB81845.1| putative protein [Arabidopsis
  misc_feature (1)..(139): Homolog of NCBI NO: 30695235 NR Description: expressed protein [Arabidopsis thaliana]
  misc_feature (1)..(139): Homolog of NCBI NO: 30695238 NR Description: expressed protein [Arabidopsis thaliana] putative protein [Arabidopsis thaliana]
  misc_feature (1)..(129): Homolog of NCBI NO: 38605903 NR Description: OSJNBb0020O11.15 [Oryza sativa (japonica
  misc_feature (1)..(107): Homolog of NCBI NO: 23127993 NR Description: hypothetical protein [Nostoc punctiforme]
MFSLIIGFLVPMLLLFGSQSGLLASLQPQIPFLSSAVILFPYFILLAVQTLTEILTWHWQSPVWLVTPVVYEAYRILQLMRGLTLSAEVNAPVWVVHMLRGLVSWWVLILGMQLMRVAWFAGFASRTTTGQQPQSVASK

SEQ ID NO: 108260 - protein, 117 aa, Arabidopsis thaliana
  peptide (1)..(117): Ceres Seq. ID no. 13653688
  misc_feature (1)..(117): Homolog of NCBI NO: 11281196 NR Description: hypothetical protein T8B10.250 - Arabidopsis >gi|7288007|emb|CAB81845.1| putative protein [Arabidopsis
MVSQGMVSLTKSLCTMTPRVRLKNPNMLQKLKTGSCNFRFRNLRVLCTPKLSQWEPSPFIHASAEEAADIVLDKTANVLESIVSESAEEEKVDMSAQQRTNSQVQIAFSILEQPFSS

SEQ ID NO: 108261 - DNA, 650 bp, Arabidopsis thaliana
  misc_feature (1)..(650): Ceres Seq. ID no. 13653716
  misc_feature: MA Experiment ID: 108434 Result: Up-regulated in Transcription
  misc_feature: MA Experiment 108434 PARAMETER Experiment Name: At_Root_Tips_cDNA_P Parameter: Tissue Value: Root Tips
  misc_feature: MA Experiment ID: 108461 Result: Up-regulated in Transcription
  misc_feature: MA Experiment 108461 PARAMETER Experiment Name: At_Germinating_Seeds_cDNA_P Parameter: Age (day) Value: 1 vs. 0
  misc_feature: MA Experiment 108461 PARAMETER Experiment Name: At_Germinating_Seeds_cDNA_P Parameter: Tissue Value: Germinating Seeds
  misc_feature: MA Experiment ID: 108462 Result: Up-regulated in Transcription
  misc_feature: MA Experiment 108462 PARAMETER Experiment Name: At_Germinating_Seeds_cDNA_P Parameter: Age (day) Value: 2 vs. 0
  misc_feature: MA Experiment 108462 PARAMETER Experiment Name: At_Germinating_Seeds_cDNA_P Parameter: Tissue Value: Germinating Seeds
  misc_feature: MA Experiment ID: 108464 Result: Up-regulated in Transcription
  misc_feature: MA Experiment 108464 PARAMETER Experiment Name: At_Germinating_Seeds_cDNA_P Parameter: Age (day) Value: 4 vs. 0
  misc_feature: MA Experiment 108464 PARAMETER Experiment Name: At_Germinating_Seeds_cDNA_P Parameter: Tissue Value: Germinating Seeds
  misc_feature: MA Experiment ID: 108595 Result: Down-regulated in Transcription
  misc_feature: MA Experiment 108595 PARAMETER Experiment Name: At_Ler-pi_Ovule_cDNA_P Parameter: Plant Line Value: null
  misc_feature: MA Experiment ID: 20000224 Result: Down-regulated in Transcription
  misc_feature: MA Experiment ID: 20000306 Result: Up-regulated in Transcription
  misc_feature: MA Experiment 20000306 PARAMETER Experiment Name: At_Germinating_Seeds_Sub_P Parameter: Age (hr) Value: 6 vs. 0
  misc_feature: MA Experiment 20000306 PARAMETER Experiment Name: At_Germinating_Seeds_Sub_P Parameter: Organism Value: A. thaliana
  misc_feature: MA Experiment 20000306 PARAMETER Experiment Name: At_Germinating_Seeds_Sub_P Parameter: Plant Line Value: WS
  misc_feature: MA Experiment 20000306 PARAMETER Experiment Name: At_Germinating_Seeds_Sub_P Parameter: Tissue Value: Germinating Seeds
  misc_feature: MA Experiment ID: 20000307 Result: Up-regulated in Transcription
  misc_feature: MA Experiment 20000307 PARAMETER Experiment Name: At_Germinating_Seeds_Sub_P Parameter: Age (hr) Value: 24 vs. 0
  misc_feature: MA Experiment 20000307 PARAMETER Experiment Name: At_Germinating_Seeds_Sub_P Parameter: Organism Value: A. thaliana
  misc_feature: MA Experiment 20000307 PARAMETER Experiment Name: At_Germinating_Seeds_Sub_P Parameter: Plant Line Value: WS
  misc_feature: MA Experiment 20000307 PARAMETER Experiment Name: At_Germinating_Seeds_Sub_P Parameter: Tissue Value: Germinating Seeds
ctcagatctcttgttcgttttgatgtacaatggcgtccttggtagcagctcctatctctttctcaggtgactctcatgtcaaagcacaccgaaacttcaatgcgattcgcaagagctctacattgactgttcaaacaaaatcaaaccgcagtcacaaactctcggtttctgcaggttaccgtgggggaagtaagggtggtggaagtagtgattttgttaccggttttcttctaggaagtgctgtgttcggaactctggcttatatctttgctccacagatccgaagatcagtgctgagcgagaatgaatatggtttcaagaaaccggagcagccgatgtactatgacgaaggcctagaggagagaagagagatattgaatgagaaaatcggccaactcaattccgccattgacaaggtttcgtcgcgtctgaaaggaggtcgaagcggtagcagcaagaacacttcttcgccgtctgtcccagttgaaaccgacgcagaagcagaagctactgcatgattgaatgtaatgctctgctccattttaccaattcaaaactgccttccattggttctgtggtttttttgttggaactattcctaggggcttttctgacttttagatattgaaagaaaaagacaatcgtcgtat

SEQ ID NO: 108262 - protein, 162 aa, Arabidopsis thaliana; identical to SEQ ID NO: 28061
  peptide (1)..(162): Ceres Seq. ID no. 13653717
  misc_feature (1)..(162): Homolog of NCBI NO: 15233017 NR Description: expressed protein [Arabidopsis thaliana] unknown protein [Arabidopsis thaliana] unknown protein [Arabidopsis thaliana]
  misc_feature (1)..(161): Homolog of NCBI NO: 17065406 NR Description: Unknown protein [Arabidopsis thaliana]
  misc_feature (1)..(161): Homolog of NCBI NO: 22326856 NR Description: protein; similar to unknown protein -related [Arabidopsis thaliana] >gi|24899755|gb|AAN65092.1|
  misc_feature (24)..(161): Homolog of NCBI NO: 10176975 NR Description: protein; similar to unknown protein [Arabidopsis
  misc_feature (1)..(162): Homolog of NCBI NO: 18400762 NR Description: expressed protein [Arabidopsis thaliana]

SEQ ID NO: 108263 - DNA, 1027 bp, Arabidopsis thaliana
  misc_feature (1)..(1027): Ceres Seq. ID no. 13653718
  misc_feature: MA Experiment ID: 20000315 Result: Down-regulated in Transcription
  misc_feature: MA Experiment 20000315 PARAMETER Experiment Name: At_14day_Shoots-Roots_Sub_P Parameter: Age (day) Value: 14
  misc_feature: MA Experiment 20000315 PARAMETER Experiment Name: At_14day_Shoots-Roots_Sub_P Parameter: Organism Value: A. thaliana
  misc_feature: MA Experiment 20000315 PARAMETER Experiment Name: At_14day_Shoots-Roots_Sub_P Parameter: Plant Line Value: WS
  misc_feature: MA Experiment 20000315 PARAMETER Experiment Name: At_14day_Shoots-Roots_Sub_P Parameter: Tissue Value: Shoots vs. Whole Plant
  misc_feature: MA Experiment ID: 20000355 Result: Down-regulated in Transcription
  misc_feature: MA Experiment 20000355 PARAMETER Experiment Name: At_Siliques_Sub_P Parameter: Age (day) Value: 21
  misc_feature: MA Experiment 20000355 PARAMETER Experiment Name: At_Siliques_Sub_P Parameter: Organism Value: A. thaliana
  misc_feature: MA Experiment 20000355 PARAMETER Experiment Name: At_Siliques_Sub_P Parameter: Plant Line Value: WS
  misc_feature: MA Experiment 20000355 PARAMETER Experiment Name: At_Siliques_Sub_P Parameter: Tissue Value: Less Than 5mm Siliques vs. Whole Plant
  misc_feature: MA Experiment ID: 20000440 Result: Up-regulated in Transcription
  misc_feature: MA Experiment 20000440 PARAMETER Experiment Name: At_Closed-Flower__Sub_P Parameter: Tissue Value: Closed Flower vs. Whole Plant
ctttttttcttctctcataatcgtctcttaatgatgatgataaagcttgagagaagtgattagtctgtagaagaagaagagttaaaaccattcaccaaagaagaaattgagaactagagacagtcatggagatcaaatcttaccaaaatcaagcagagtattttgttgaacactatttattagcagatccatttcttccatatacttctgttcttgttggaatctgtctttgcaaattggtatatgatcttacggagttattcagctcaattcatgtcaaatcatactcagctctcacaaaaataaagagaattgaatggaacaacaggggaatttctacagtccatgcgatctttatctcattcatggcattatactttgcgttcttctctgatttgttttctgaccaaagaagccttgaaacccttacggtgtttcgtaactcgcctctgtctacctttggtttaggagtatcagttggttactttcttgcggatcttggaatgatcttttggttatacccttctttaggaggatcagaatatatattacatcactgcttatctggaacagcagtagcgtattctttgttctctggagaggctcagctttacacatacatggttttaatctctgaagtgactacaccagagatcaatcttagatggtaccttgacattgctggtttgaaacgatctaaagcttatcttgttaatggagttgctatattctttgcttggttgacagcaagaattcttctgttcatctacatgttttaccatgtctacacacattatgatcaggtgatagagatgcatacattcggttatctactggtatttgttgtaccgatttcattgagtgtcatgaacttgatctggtttggtaagatagtgaagggattgaagaaaactcttgagaaaagacagtgaagaaagagttgtgtttttttttttatgtaaatataaaactcttatgaagaatcttacaagtttataagcaacaaagatatggtttgtttctaact

SEQ ID NO: 108264 - protein, 268 aa, Arabidopsis thaliana; identical to SEQ ID NO: 101212
  peptide (1)..(268): Ceres Seq. ID no. 13653719
  misc_feature (25)..(268): Pfam Name: Eukaryotic protein of unknown function (DUF887) Pfam Description: Eukaryotic protein of unknown function (DUF887)
  misc_feature (1)..(268): Homolog of NCBI NO: 22328807 NR Description: expressed protein [Arabidopsis thaliana] expressed protein [Arabidopsis thaliana] unknown protein [Arabidopsis thaliana]
  misc_feature (1)..(267): Homolog of NCBI NO: 18397885 NR Description: expressed protein [Arabidopsis thaliana] At1g31300/T19E23_12 [Arabidopsis thaliana]
  misc_feature (1)..(266): Homolog of NCBI NO: 40538924 NR Description: expressed protein [Oryza sativa (japonica
  misc_feature (1)..(206): Homolog of NCBI NO: 25403400 NR Description: protein T19E23.9 [imported] - Arabidopsis >gi|6692122|gb|AAF24587.1|AC007654_3 T19E23.9 [Arabidopsis
  misc_feature (217)..(267): Homolog of NCBI NO: 25403400 NR Description: protein T19E23.9 [imported] - Arabidopsis >gi|6692122|gb|AAF24587.1|AC007654_3 T19E23.9 [Arabidopsis
  misc_feature (28)..(268): Homolog of NCBI NO: 34909246 NR Description: B1148D12.11 [Oryza sativa (japonica
  misc_feature (28)..(266): Homolog of NCBI NO: 21537382 NR Description: unknown [Arabidopsis thaliana]
  misc_feature (28)..(266): Homolog of NCBI NO: 18413327 NR Description: expressed protein [Arabidopsis thaliana] AT4g10360/F24G24_160 [Arabidopsis thaliana]
  misc_feature (28)..(266): Homolog of NCBI NO: 7486070 NR Description: hypothetical protein F24G24.160 - Arabidopsis >gi|4538965|emb|CAB39789.1| hypothetical protein [Arabidopsis >gi|7267733|emb|CAB78159.1| hypothetical protein [Arabidopsis
  misc_feature (37)..(264): Homolog of NCBI NO: 30725869 NR Description: RIKEN cDNA C730036B01 [Mus musculus]

SEQ ID NO: 108265 - protein, 188 aa, Arabidopsis thaliana; identical to SEQ ID NO: 101213
  peptide (1)..(188): Ceres Seq. ID no. 13653720
  misc_feature (1)..(188): Pfam Name: Eukaryotic protein of unknown function (DUF887) Pfam Description: Eukaryotic protein of unknown function (DUF887)
  misc_feature (1)..(188): Homolog of NCBI NO: 22328807 NR Description: expressed protein [Arabidopsis thaliana] expressed protein [Arabidopsis thaliana] unknown protein [Arabidopsis thaliana]
  misc_feature (1)..(187): Homolog of NCBI NO: 18397885 NR Description: expressed protein [Arabidopsis thaliana] At1g31300/T19E23_12 [Arabidopsis thaliana]
  misc_feature (1)..(186): Homolog of NCBI NO: 40538924 NR Description: expressed protein [Oryza sativa (japonica
  misc_feature (1)..(126): Homolog of NCBI NO: 25403400 NR Description: protein T19E23.9 [imported] - Arabidopsis >gi|6692122|gb|AAF24587.1|AC007654_3 T19E23.9 [Arabidopsis
  misc_feature (137)..(187): Homolog of NCBI NO: 25403400 NR Description: protein T19E23.9 [imported] - Arabidopsis >gi|6692122|gb|AAF24587.1|AC007654_3 T19E23.9 [Arabidopsis
  misc_feature (1)..(188): Homolog of NCBI NO: 34909246 NR Description: B1148D12.11 [Oryza sativa (japonica
  misc_feature (1)..(186): Homolog of NCBI NO: 21537382 NR Description: unknown [Arabidopsis thaliana]
  misc_feature (1)..(186): Homolog of NCBI NO: 18413327 NR Description: expressed protein [Arabidopsis thaliana] AT4g10360/F24G24_160 [Arabidopsis thaliana]
  misc_feature (1)..(186): Homolog of NCBI NO: 7486070 NR Description: hypothetical protein F24G24.160 - Arabidopsis >gi|4538965|emb|CAB39789.1| hypothetical protein [Arabidopsis >gi|7267733|emb|CAB78159.1| hypothetical protein [Arabidopsis
  misc_feature (1)..(184): Homolog of NCBI NO: 30725869 NR Description: RIKEN cDNA C730036B01 [Mus musculus]

SEQ ID NO: 108266 - protein, 142 aa, Arabidopsis thaliana; identical to SEQ ID NO: 101214
  peptide (1)..(142): Ceres Seq. ID no. 13653721
  misc_feature (1)..(142): Pfam Name: Eukaryotic protein of unknown function (DUF887) Pfam Description: Eukaryotic protein of unknown function (DUF887)
  misc_feature (1)..(142): Homolog of NCBI NO: 22328807 NR Description: expressed protein [Arabidopsis thaliana] expressed protein [Arabidopsis thaliana] unknown protein [Arabidopsis thaliana]
  misc_feature (1)..(141): Homolog of NCBI NO: 18397885 NR Description: expressed protein [Arabidopsis thaliana] At1g31300/T19E23_12 [Arabidopsis thaliana]
  misc_feature (1)..(140): Homolog of NCBI NO: 40538924 NR Description: expressed protein [Oryza sativa (japonica
  misc_feature (1)..(80): Homolog of NCBI NO: 25403400 NR Description: protein T19E23.9 [imported] - Arabidopsis >gi|6692122|gb|AAF24587.1|AC007654_3 T19E23.9 [Arabidopsis
  misc_feature (91)..(141): Homolog of NCBI NO: 25403400 NR Description: protein T19E23.9 [imported] - Arabidopsis >gi|6692122|gb|AAF24587.1|AC007654_3 T19E23.9 [Arabidopsis
  misc_feature (1)..(142): Homolog of NCBI NO: 34909246 NR Description: B1148D12.11 [Oryza sativa (japonica
  misc_feature (1)..(140): Homolog of NCBI NO: 21537382 NR Description: unknown [Arabidopsis thaliana]
  misc_feature (1)..(140): Homolog of NCBI NO: 18413327 NR Description: expressed protein [Arabidopsis thaliana] AT4g10360/F24G24_160 [Arabidopsis thaliana]
  misc_feature (1)..(140): Homolog of NCBI NO: 7486070 NR Description: hypothetical protein F24G24.160 - Arabidopsis >gi|4538965|emb|CAB39789.1| hypothetical protein [Arabidopsis >gi|7267733|emb|CAB78159.1| hypothetical protein [Arabidopsis
  misc_feature (1)..(138): Homolog of NCBI NO: 30725869 NR Description: RIKEN cDNA C730036B01 [Mus musculus]

SEQ ID NO: 108267 - DNA, 1226 bp, Arabidopsis thaliana
  misc_feature (1)..(1226): Ceres Seq. ID no. 13653726
  misc_feature: MA Experiment ID: 20000227 Result: Down-regulated in Transcription
  misc_feature: MA Experiment 20000227 PARAMETER Experiment Name: At_Root-Tips-vs-Tops_P Parameter: Tissue Value: Root Tips vs. Root Tops
  misc_feature: MA Experiment ID: 20000265 Result: Up-regulated in Transcription
  misc_feature: MA Experiment 20000265 PARAMETER Experiment Name: At_Open_Flower_P Parameter: Age (day) Value: 21
  misc_feature: MA Experiment 20000265 PARAMETER Experiment Name: At_Open_Flower_P Parameter: Plant Line Value: WS
  misc_feature: MA Experiment 20000265 PARAMETER Experiment Name: At_Open_Flower_P Parameter: Tissue Value: Closed Flower vs. Whole Plant
  misc_feature: MA Experiment ID: 20001451 Result: Down-regulated in Transcription
  misc_feature: MA Experiment 20001451 PARAMETER Experiment Name: At_Far-red-induction_P Parameter: Age (day) Value: 7
  misc_feature: MA Experiment 20001451 PARAMETER Experiment Name: At_Far-red-induction_P Parameter: Light Value: Far-red vs. White
  misc_feature: MA Experiment 20001451 PARAMETER Experiment Name: At_Far-red-induction_P Parameter: Organism Value: A. thaliana
  misc_feature: MA Experiment 20001451 PARAMETER Experiment Name: At_Far-red-induction_P Parameter: Plant Line Value: Columbia
  misc_feature: MA Experiment 20001451 PARAMETER Experiment Name: At_Far-red-induction_P Parameter: Timepoint (hr) Value: 24
  misc_feature: MA Experiment 20001451 PARAMETER Experiment Name: At_Far-red-induction_P Parameter: Tissue Value: Whole Plant
gatcttcaaaagtgtctcactttttctaacctcgcctccaaagattcttccttttccgattccgatgaaaaggaattttgggttttaggaaagttcgattggttggtttggaaacatctccctaacacacgcagcaaacactttcgttgtttacggagacagtcactttttgtatatatggattcgaatcaatcgatgcggctcctcagtgcttggattggtcaaattggtgatcttggtcttaatttgctatggcgttttatacacattgttgtgagcttatggtacattgtctctggcatatttgaggcaatagaaagctatgccataacgttaggattgaataaaaagtacggttccatcgatcttgagaaactccggtgtctagctgttgtagtggacatcgaagcagctcaagatgttgccaatgttgttgagcttttgcaatggctaaccaccattggggttaaacaagttggtctatttgactctcaaggtttattgaagaaatccaaggatttgatccttgaaaccgttccaggttccatgttgttagaggagattgaaaaggatgttgcgcctgacggaaagcgcattgcattagaattcatttcatcttcagacaataaagaagctgttatgaaagcagccaacatacttcttcagagatacttgaaatccagccatcctgaggacgacaaaggggaagacttttttacagagtctcatttgaatgacgcattaagagttgttggtgagaatgtgcatgtacccgatctgttactggtttatggacctataaggagccacctcggtttccctgcttggagacttcgatacactgagatagtacatatgggaactttgaagtatatgagatatggttcccttttgaaggcaattcacaagttcacaggagtccaccaaaactatggaacttaacggtgactagagagcagagtttcagagatcgatttttggtttgtgattcacatatttgcaatgaattctaaaggagagattattggagagcttttgagtcagtgcagccactactgttcccaatttccggcaattctatgtaccaaagcaacatatgcattggcattgtataggattaagtagtaacaagctggacctaaccaatccggtttttccataaagttccggtttgcttggttatcgtgtgtaaacaaaaatagaacacaactttcagatttttcagt

SEQ ID NO: 108268 - protein, 313 aa, Arabidopsis thaliana
  peptide (1)..(313): Ceres Seq. ID no. 13653727
  misc_feature (59)..(313): Homolog of NCBI NO: 25372987 NR Description: protein F25C20.9 [imported] - Arabidopsis >gi|4835781|gb|AAD30247.1|AC007296_8 F25C20.9 [Arabidopsis
  misc_feature (60)..(313): Homolog of NCBI NO: 25083010 NR Description: Unknown protein [Arabidopsis thaliana]
  misc_feature (15)..(252): Homolog of NCBI NO: 15221091 NR Description: expressed protein [Arabidopsis thaliana]
  misc_feature (123)..(312): Homolog of NCBI NO: 20270243 NR Description: hypothetical protein, MGC:7199 [Homo sapiens]
DLQKCLTFSNLASKDSSFSDSDEKEFWVLGKFDWLVWKHLPNTRSKHFRCLRRQSLFVYMDSNQSMRLLSAWIGQIGDLGLNLLWRFIHIVVSLWYIVSGIFEAIESYAITLGLNKKYGSIDLEKLRCLAVVVDIEAAQDVANVVELLQWLTTIGVKQVGLFDSQGLLKKSKDLILETVPGSMLLEEIEKDVAPDGKRIALEFISSSDNKEAVMKAANILLQRYLKSSHPEDDKGEDFFTESHLNDALRVVGENVHVPDLLLVYGPIRSHLGFPAWRLRYTEIVHMGTLKYMRYGSLLKAIHKFTGVHQNYGT

SEQ ID NO: 108269 - protein, 254 aa, Arabidopsis thaliana
  peptide (1)..(254): Ceres Seq. ID no. 13653728
  misc_feature (1)..(254): Homolog of NCBI NO: 25372987 NR Description: protein F25C20.9 [imported] - Arabidopsis >gi|4835781|gb|AAD30247.1|AC007296_8 F25C20.9 [Arabidopsis
  misc_feature (1)..(254): Homolog of NCBI NO: 25083010 NR Description: Unknown protein [Arabidopsis thaliana]
  misc_feature (1)..(193): Homolog of NCBI NO: 15221091 NR Description: expressed protein [Arabidopsis thaliana]
  misc_feature (64)..(253): Homolog of NCBI NO: 20270243 NR Description: hypothetical protein, MGC:7199 [Homo sapiens]
MDSNQSMRLLSAWIGQIGDLGLNLLWRFIHIVVSLWYIVSGIFEAIESYAITLGLNKKYGSIDLEKLRCLAVVVDIEAAQDVANVVELLQWLTTIGVKQVGLFDSQGLLKKSKDLILETVPGSMLLEEIEKDVAPDGKRIALEFISSSDNKEAVMKAANILLQRYLKSSHPEDDKGEDFFTESHLNDALRVVGENVHVPDLLLVYGPIRSHLGFPAWRLRYTEIVHMGTLKYMRYGSLLKAIHKFTGVHQNYGT

SEQ ID NO: 108270 - protein, 248 aa, Arabidopsis thaliana
  peptide (1)..(248): Ceres Seq. ID no. 13653729
  misc_feature (1)..(248): Homolog of NCBI NO: 25372987 NR Description: protein F25C20.9 [imported] - Arabidopsis >gi|4835781|gb|AAD30247.1|AC007296_8 F25C20.9 [Arabidopsis
  misc_feature (1)..(248): Homolog of NCBI NO: 25083010 NR Description: Unknown protein [Arabidopsis thaliana]
  misc_feature (1)..(187): Homolog of NCBI NO: 15221091 NR Description: expressed protein [Arabidopsis thaliana]
  misc_feature (58)..(247): Homolog of NCBI NO: 20270243 NR Description: hypothetical protein, MGC:7199 [Homo sapiens]
MRLLSAWIGQIGDLGLNLLWRFIHIVVSLWYIVSGIFEAIESYAITLGLNKKYGSIDLEKLRCLAVVVDIEAAQDVANVVELLQWLTTIGVKQVGLFDSQGLLKKSKDLILETVPGSMLLEEIEKDVAPDGKRIALEFISSSDNKEAVMKAANILLQRYLKSSHPEDDKGEDFFTESHLNDALRVVGENVHVPDLLLVYGPIRSHLGFPAWRLRYTEIVHMGTLKYMRYGSLLKAIHKFTGVHQNYGT

SEQ ID NO: 108271 - DNA, 595 bp, Arabidopsis thaliana
  misc_feature (1)..(595): Ceres Seq. ID no. 13653730
  misc_feature: MA Experiment ID: 20000182 Result: Down-regulated in Transcription
  misc_feature: MA Experiment 20000182 PARAMETER Experiment Name: At_2mM_SA_P Parameter: Age (day) Value: 14
  misc_feature: MA Experiment 20000182 PARAMETER Experiment Name: At_2mM_SA_P Parameter: Organism Value: A. thaliana
  misc_feature: MA Experiment 20000182 PARAMETER Experiment Name: At_2mM_SA_P Parameter: Plant Line Value: WS
  misc_feature: MA Experiment 20000182 PARAMETER Experiment Name: At_2mM_SA_P Parameter: Timepoint (hr) Value: 6
  misc_feature: MA Experiment 20000182 PARAMETER Experiment Name: At_2mM_SA_P Parameter: Tissue Value: Aerial
  misc_feature: MA Experiment 20000182 PARAMETER Experiment Name: At_2mM_SA_P Parameter: Treatment Value: 2mM SA vs. No Treatment
  misc_feature: MA Experiment ID: 20000185 Result: Down-regulated in Transcription
  misc_feature: MA Experiment 20000185 PARAMETER Experiment Name: At_Roots__P Parameter: Age (day) Value: 7 vs. 21
  misc_feature: MA Experiment 20000185 PARAMETER Experiment Name: At_Roots__P Parameter: Organism Value: A. thaliana
  misc_feature: MA Experiment 20000185 PARAMETER Experiment Name: At_Roots__P Parameter: Tissue Value: Roots vs. Whole Plant
  misc_feature: MA Experiment ID: 20000264 Result: Down-regulated in Transcription
  misc_feature: MA Experiment 20000264 PARAMETER Experiment Name: At_Open_Flower_P Parameter: Age (day) Value: 21
  misc_feature: MA Experiment 20000264 PARAMETER Experiment Name: At_Open_Flower_P Parameter: Plant Line Value: WS
  misc_feature: MA Experiment 20000264 PARAMETER Experiment Name: At_Open_Flower_P Parameter: Tissue Value: Open Flower vs. Whole Plant
  misc_feature: MA Experiment ID: 20000286 Result: Down-regulated in Transcription
  misc_feature: MA Experiment 20000286 PARAMETER Experiment Name: At_Open_Flower_P Parameter: Age (day) Value: 21
  misc_feature: MA Experiment 20000286 PARAMETER Experiment Name: At_Open_Flower_P Parameter: Plant Line Value: WS
  misc_feature: MA Experiment 20000286 PARAMETER Experiment Name: At_Open_Flower_P Parameter: Tissue Value: Half Open vs. Whole Plant
  misc_feature: MA Experiment ID: 20000437 Result: Down-regulated in Transcription
  misc_feature: MA Experiment 20000437 PARAMETER Experiment Name: At_Drought_P Parameter: Age (day) Value: 8
  misc_feature: MA Experiment 20000437 PARAMETER Experiment Name: At_Drought_P Parameter: Organism Value: A. thaliana
  misc_feature: MA Experiment 20000437 PARAMETER Experiment Name: At_Drought_P Parameter: Plant Line Value: WS
  misc_feature: MA Experiment 20000437 PARAMETER Experiment Name: At_Drought_P Parameter: Timepoint (hr) Value: 24
  misc_feature: MA Experiment 20000437 PARAMETER Experiment Name: At_Drought_P Parameter: Tissue Value: Whole Plant
  misc_feature: MA Experiment 20000437 PARAMETER Experiment Name: At_Drought_P Parameter: Treatment Value: Drought vs. No Drought
  misc_feature: MA Experiment ID: 20000439 Result: Down-regulated in Transcription
  misc_feature: MA Experiment 20000439 PARAMETER Experiment Name: At_Roots__P Parameter: Age (day) Value: 14 vs. 21
  misc_feature: MA Experiment 20000439 PARAMETER Experiment Name: At_Roots__P Parameter: Organism Value: A. thaliana
  misc_feature: MA Experiment 20000439 PARAMETER Experiment Name: At_Roots__P Parameter: Tissue Value: Roots vs. Whole Plant
  misc_feature: MA Experiment ID: 20000495 Result: Down-regulated in Transcription
  misc_feature: MA Experiment 20000495 PARAMETER Experiment Name: At_Guard_Cells_P Parameter: Harvest Date Value: 8/2/2002
  misc_feature: MA Experiment 20000495 PARAMETER Experiment Name: At_Guard_Cells_P Parameter: Organism Value: A. thaliana
  misc_feature: MA Experiment 20000495 PARAMETER Experiment Name: At_Guard_Cells_P Parameter: Tissue Value: Guard Cells vs. Leaves
  misc_feature: MA Experiment ID: 20000496 Result: Down-regulated in Transcription
  misc_feature: MA Experiment 20000496 PARAMETER Experiment Name: At_Guard_Cells_P Parameter: Harvest Date Value: 7/19/2002
  misc_feature: MA Experiment 20000496 PARAMETER Experiment Name: At_Guard_Cells_P Parameter: Organism Value: Canola
  misc_feature: MA Experiment 20000496 PARAMETER Experiment Name: At_Guard_Cells_P Parameter: Tissue Value: Guard Cells vs. Leaves
  misc_feature: MA Experiment ID: 20000794 Result: Down-regulated in Transcription
  misc_feature: MA Experiment 20000794 PARAMETER Experiment Name: At_Petals_P Parameter: Age (day) Value: 23-25 days
  misc_feature: MA Experiment 20000794 PARAMETER Experiment Name: At_Petals_P Parameter: Plant Line Value: WS
  misc_feature: MA Experiment 20000794 PARAMETER Experiment Name: At_Petals_P Parameter: Tissue Value: Petals vs. Whole plant
  misc_feature: MA Experiment ID: 20001451 Result: Down-regulated in Transcription
  misc_feature: MA Experiment 20001451 PARAMETER Experiment Name: At_Far-red-induction_P Parameter: Age (day) Value: 7
  misc_feature: MA Experiment 20001451 PARAMETER Experiment Name: At_Far-red-induction_P Parameter: Light Value: Far-red vs. White
  misc_feature: MA Experiment 20001451 PARAMETER Experiment Name: At_Far-red-induction_P Parameter: Organism Value: A. thaliana
  misc_feature: MA Experiment 20001451 PARAMETER Experiment Name: At_Far-red-induction_P Parameter: Plant Line Value: Columbia
  misc_feature: MA Experiment 20001451 PARAMETER Experiment Name: At_Far-red-induction_P Parameter: Timepoint (hr) Value: 24
  misc_feature: MA Experiment 20001451 PARAMETER Experiment Name: At_Far-red-induction_P Parameter: Tissue Value: Whole Plant
  misc_feature: MA Experiment ID: 20001557 Result: Down-regulated in Transcription
  misc_feature: MA Experiment 20001557 PARAMETER Experiment Name: At_Drought_Soil_Dry_P Parameter: Age (day) Value: 27
  misc_feature: MA Experiment 20001557 PARAMETER Experiment Name: At_Drought_Soil_Dry_P Parameter: Organism Value: A. thaliana
  misc_feature: MA Experiment 20001557 PARAMETER Experiment Name: At_Drought_Soil_Dry_P Parameter: Plant Line Value: WS
  misc_feature: MA Experiment 20001557 PARAMETER Experiment Name: At_Drought_Soil_Dry_P Parameter: Post Timepoint (hr) Value: 3
  misc_feature: MA Experiment 20001557 PARAMETER Experiment Name: At_Drought_Soil_Dry_P Parameter: Post-Treatment Value: Re-Water vs. No Drought
  misc_feature: MA Experiment 20001557 PARAMETER Experiment Name: At_Drought_Soil_Dry_P Parameter: Timepoint (day) Value: 13
  misc_feature: MA Experiment 20001557 PARAMETER Experiment Name: At_Drought_Soil_Dry_P Parameter: Treatment Value: Drought vs. No Drought
  misc_feature: MA Experiment ID: 20001757 Result: Up-regulated in Transcription
  misc_feature: MA Experiment 20001757 PARAMETER Experiment Name: At_50mM_NH4NO3_L-to-H_P Parameter: Timepoint (hr) Value: 6
  misc_feature: MA Experiment 20001757 PARAMETER Experiment Name: At_50mM_NH4NO3_L-to-H_P Parameter: Tissue Value: Leaf
  misc_feature: MA Experiment 20001757 PARAMETER Experiment Name: At_50mM_NH4NO3_L-to-H_P Parameter: Treatment Value: 50mM NH4NO3 vs 100mM Mannitol
  misc_feature: MA Experiment ID: 20001905 Result: Down-regulated in Transcription
  misc_feature: MA Experiment 20001905 PARAMETER Experiment Name: At_Drought_Reproduction_P Parameter: Age (day) Value: 40
  misc_feature: MA Experiment 20001905 PARAMETER Experiment Name: At_Drought_Reproduction_P Parameter: Organism Value: A. thaliana
  misc_feature: MA Experiment 20001905 PARAMETER Experiment Name: At_Drought_Reproduction_P Parameter: Plant Line Value: WS
  misc_feature: MA Experiment 20001905 PARAMETER Experiment Name: At_Drought_Reproduction_P Parameter: Timepoint (day) Value: 10
  misc_feature: MA Experiment 20001905 PARAMETER Experiment Name: At_Drought_Reproduction_P Parameter: Tissue Value: Rosettes
  misc_feature: MA Experiment 20001905 PARAMETER Experiment Name: At_Drought_Reproduction_P Parameter: Treatment Value: Drought vs. No Drought
  misc_feature: MA Experiment ID: 20001906 Result: Down-regulated in Transcription
  misc_feature: MA Experiment 20001906 PARAMETER Experiment Name: At_Drought_Reproduction_P Parameter: Age (day) Value: 35
  misc_feature: MA Experiment 20001906 PARAMETER Experiment Name: At_Drought_Reproduction_P Parameter: Organism Value: A. thaliana
  misc_feature: MA Experiment 20001906 PARAMETER Experiment Name: At_Drought_Reproduction_P Parameter: Plant Line Value: WS
  misc_feature: MA Experiment 20001906 PARAMETER Experiment Name: At_Drought_Reproduction_P Parameter: Timepoint (day) Value: 5
  misc_feature: MA Experiment 20001906 PARAMETER Experiment Name: At_Drought_Reproduction_P Parameter: Tissue Value: Siliques
  misc_feature: MA Experiment 20001906 PARAMETER Experiment Name: At_Drought_Reproduction_P Parameter: Treatment Value: Drought vs. No Drought
aaaaaaaaaaaaaaaaaaaaaaaaaaaaaaaatggtaattctcagcaacgtctcgttgttctcctgctgcaacatctctcagaaaccatctctcttttctccgtcttctcgtagttctcattgtcccattcgttgctcacagtcacaggaagggaaagaagtggttaccagtcctttgagaagtgtggtttggtcattaggagaagaggtttcaaagagaagtctatttgcacttgtctctgcttctctcttctttgttgatcctgctcttgcttttaagggtggaggtccctatggtcaaggagtcaccaggggacaggacttatctggcaaagatttcagtggccagactcttatcaggcaggacttcaaaacgtccatcctaaggcaagccaacttcaagggtgcaaagttgttaggtgctagcttctttgatgcagatctaacaggtgctgatttatcggaagctgatctccgaggtgcagatttctccttggcaaatgtaacaaaggtgaatctaacgaacgctaacttagaaggagcgactgttactggaaacacatcattcaagggatcaaacattacaggcgcaggt

SEQ ID NO: 108272 - protein, 198 aa, Arabidopsis thaliana
  peptide (1)..(198): Ceres Seq. ID no. 13653731
  misc_feature (126)..(165): Pfam Name: Pentapeptide repeats (8 copies) Pfam Description: Pentapeptide repeats (8 copies)
  misc_feature (11)..(197): Homolog of NCBI NO: 18406663 NR Description: thylakoid lumen pentapeptide repeat family [Arabidopsis thaliana] >gi|20196924|gb|AAC31832.2| pentapeptide family protein [Arabidopsis thaliana] >gi|24030254|gb|AAN41302.1|
  misc_feature (11)..(197): Homolog of NCBI NO: 18406661 NR Description: thylakoid lumen pentapeptide repeat family [Arabidopsis thaliana] >gi|20141847|sp|O22160|TL15_ARATH lumenal 15 kDa protein, chloroplast precursor (p15)
  misc_feature (11)..(186): Homolog of NCBI NO: 7486947 NR Description: hypothetical protein At2g44920 [imported] -
  misc_feature (57)..(197): Homolog of NCBI NO: 34895746 NR Description: P0024G09.19 [Oryza sativa (japonica
  misc_feature (104)..(197): Homolog of NCBI NO: 16331083 NR Description: unknown protein [Synechocystis sp. PCC 6803]
  misc_feature (79)..(197): Homolog of NCBI NO: 23128511 NR Description: hypothetical protein [Nostoc punctiforme]
  misc_feature (75)..(197): Homolog of NCBI NO: 33865584 NR Description: conserved hypothetical protein [Synechococcus sp.
  misc_feature (104)..(194): Homolog of NCBI NO: 37523071 NR Description: hypothetical protein glr3502 [Gloeobacter
  misc_feature (106)..(197): Homolog of NCBI NO: 23039927 NR Description: hypothetical protein [Trichodesmium erythraeum
  misc_feature (104)..(197): Homolog of NCBI NO: 23043019 NR Description: hypothetical protein [Trichodesmium erythraeum
KKKKKKKKKKMVILSNVSLFSCCNISQKPSLFSPSSRSSHCPIRCSQSQEGKEVVTSPLRSVVWSLGEEVSKRSLFALVSASLFFVDPALAFKGGGPYGQGVTRGQDLSGKDFSGQTLIRQDFKTSILRQANFKGAKLLGASFFDADLTGADLSEADLRGADFSLANVTKVNLTNANLEGATVTGNTSFKGSNITGAG

SEQ ID NO: 108273 - protein, 188 aa, Arabidopsis thaliana
  peptide (1)..(188): Ceres Seq. ID no. 13653732
  misc_feature (116)..(155): Pfam Name: Pentapeptide repeats (8 copies) Pfam Description: Pentapeptide repeats (8 copies)
  misc_feature (1)..(187): Homolog of NCBI NO: 18406663 NR Description: thylakoid lumen pentapeptide repeat family [Arabidopsis thaliana] >gi|20196924|gb|AAC31832.2| pentapeptide family protein [Arabidopsis thaliana] >gi|24030254|gb|AAN41302.1|
  misc_feature (1)..(187): Homolog of NCBI NO: 18406661 NR Description: thylakoid lumen pentapeptide repeat family [Arabidopsis thaliana] >gi|20141847|sp|O22160|TL15_ARATH lumenal 15 kDa protein, chloroplast precursor (p15)
  misc_feature (1)..(176): Homolog of NCBI NO: 7486947 NR Description: hypothetical protein At2g44920 [imported] -
  misc_feature (47)..(187): Homolog of NCBI NO: 34895746 NR Description: P0024G09.19 [Oryza sativa (japonica
  misc_feature (94)..(187): Homolog of NCBI NO: 16331083 NR Description: unknown protein [Synechocystis sp. PCC 6803]
  misc_feature (69)..(187): Homolog of NCBI NO: 23128511 NR Description: hypothetical protein [Nostoc punctiforme]
  misc_feature (65)..(187): Homolog of NCBI NO: 33865584 NR Description: conserved hypothetical protein [Synechococcus sp.
  misc_feature (94)..(184): Homolog of NCBI NO: 37523071 NR Description: hypothetical protein glr3502 [Gloeobacter
  misc_feature (96)..(187): Homolog of NCBI NO: 23039927 NR Description: hypothetical protein [Trichodesmium erythraeum
  misc_feature (94)..(187): Homolog of NCBI NO: 23043019 NR Description: hypothetical protein [Trichodesmium erythraeum
MVILSNVSLFSCCNISQKPSLFSPSSRSSHCPIRCSQSQEGKEVVTSPLRSVVWSLGEEVSKRSLFALVSASLFFVDPALAFKGGGPYGQGVTRGQDLSGKDFSGQTLIRQDFKTSILRQANFKGAKLLGASFFDADLTGADLSEADLRGADFSLANVTKVNLTNANLEGATVTGNTSFKGSNITGAG

SEQ ID NO: 108274 - DNA, 3350 bp, Arabidopsis thaliana
  misc_feature (1)..(3350): Ceres Seq. ID no. 13653739
  misc_feature: MA Experiment ID: 20000179 Result: Down-regulated in Transcription
  misc_feature: MA Experiment 20000179 PARAMETER Experiment Name: At_Germinating_Seeds_P Parameter: Age (hr) Value: 6 vs. 0
  misc_feature: MA Experiment 20000179 PARAMETER Experiment Name: At_Germinating_Seeds_P Parameter: Tissue Value: Germinating Seeds
  misc_feature: MA Experiment ID: 20000286 Result: Up-regulated in Transcription
  misc_feature: MA Experiment 20000286 PARAMETER Experiment Name: At_Open_Flower_P Parameter: Age (day) Value: 21
  misc_feature: MA Experiment 20000286 PARAMETER Experiment Name: At_Open_Flower_P Parameter: Plant Line Value: WS
  misc_feature: MA Experiment 20000286 PARAMETER Experiment Name: At_Open_Flower_P Parameter: Tissue Value: Half Open vs. Whole Plant
  misc_feature: MA Experiment ID: 20000437 Result: Up-regulated in Transcription
  misc_feature: MA Experiment 20000437 PARAMETER Experiment Name: At_Drought_P Parameter: Age (day) Value: 8
  misc_feature: MA Experiment 20000437 PARAMETER Experiment Name: At_Drought_P Parameter: Organism Value: A. thaliana
  misc_feature: MA Experiment 20000437 PARAMETER Experiment Name: At_Drought_P Parameter: Plant Line Value: WS
  misc_feature: MA Experiment 20000437 PARAMETER Experiment Name: At_Drought_P Parameter: Timepoint (hr) Value: 24
  misc_feature: MA Experiment 20000437 PARAMETER Experiment Name: At_Drought_P Parameter: Tissue Value: Whole Plant
  misc_feature: MA Experiment 20000437 PARAMETER Experiment Name: At_Drought_P Parameter: Treatment Value: Drought vs. No Drought
  misc_feature: MA Experiment ID: 20001451 Result: Down-regulated in Transcription
  misc_feature: MA Experiment 20001451 PARAMETER Experiment Name: At_Far-red-induction_P Parameter: Age (day) Value: 7
  misc_feature: MA Experiment 20001451 PARAMETER Experiment Name: At_Far-red-induction_P Parameter: Light Value: Far-red vs. White
  misc_feature: MA Experiment 20001451 PARAMETER Experiment Name: At_Far-red-induction_P Parameter: Organism Value: A. thaliana
  misc_feature: MA Experiment 20001451 PARAMETER Experiment Name: At_Far-red-induction_P Parameter: Plant Line Value: Columbia
  misc_feature: MA Experiment 20001451 PARAMETER Experiment Name: At_Far-red-induction_P Parameter: Timepoint (hr) Value: 24
  misc_feature: MA Experiment 20001451 PARAMETER Experiment Name: At_Far-red-induction_P Parameter: Tissue Value: Whole Plant
  misc_feature: Pfam Name: WD40 Pfam Description: WD domain, G-beta repeat
atctctctctctctctgcgcctccctttttgcttctctctctctcttcttcttcttccttgtgctctgctctctgtcaatctctctctgtctccttttttacttcgccattggagaaaagagaaatcactttcaacttctccttagattttccgcttatctaagacaacaacgaagttccgagtattcctcaaaaaaattcctcctttatcatttcttcacttccccaaattttgtgtgttttcgtggagcagagtgagattggcgttttgggaagacgaaagttaagcccttttttgctggattggttcagcggttgagaaagcggagatcttgagggctgcttgctttcttcgatttctcgagattttggttttggtatggttgttgagagtgtaatttgaatgtcctccacttcaagggtttcgtttccgccatgaccaccaagcgagcctataagcttcaggaatttgtggcacattctgctgctgtcaattgtcttaagatcggaaggaagtcttctagggttctggtaacaggtggtgaagatcacaaggtcaatctttgggctattggtaagcccaatgccattctgagcttgtatgggcactcaagtggaattgattcagtgacgtttgatgcttcggaggtcttagttgcagcaggagctgctagtggtactatcaaactttgggatttagaggaggcaaagattgtcaggactctcactggtcacaggtccaattgcatctcagtggatttccacccttttggtgagttttttgcgtcaggctcactagacacaaatcttaagatatgggatatacgaaaaaagggctgcatccatacttacaagggtcacacgcgaggagtcaatgtactcagattcaccccagatggtcgctgggttgtatctggaggagaggacaacattgttaaggtttgggatttaacagctggaaaactgctgaccgagtttaagagtcatgaagggcaaattcaaagcctagattttcatcctcatgaattcctactggcaacaggttcagctgatagaactgtaaaattctgggatctggaaacattcgagctgattggttctggtggacctgagactgccggggtccgttgcctgagtttcaatccagatggaaagactgtgctttgtggattgcaagaaagtctcaagattttctcatgggagccaattagatgtcatgatggagtggatgttggatggtcaagattgtcagatatgaatgttcacgagggaaagcttcttggttgctcatacaatcagagttgtgtaggcgtgtgggttgtagatctctcgcgtactgagccatgtatggctggagacactgcgcaatcaaatggtcatccagagaaacgatcttgctcaggaagagatccagtagttctcaatgataataactcaaagacagttctcgggaagctgtccgtttcccaaaatgtagatcctttattgaaggaaacaaagtctctaggaagattatctgtttctcagaactctgatccttcgacaaaagaaacaaagtccattggaaggtcatcaacatcacaaaattcagagtcctcgatgaaggaatcaaagcctctcgggaggttgtcagtttctcaaaattcagacgtttctaaagagtcaaggacgttttcatccacaggaagtttaccaggcactcctcatagggtcagttcgaccaatgtatcaaaagccacttcgggtgtttcaacagccgtctctaatgctgcaacgtcaaggaggaattttacaaaagctaacccaaaggcgaatcctgtcaataaggcagcagattttgctccggtgattgtccccagagcagaccctagaatagagcaggctactgaatccagagcagaacttgacataattgcaagaaccatgccgtattcattgcaggcggctgattcccgaaggtcacctagcagcagaaataaccctgatctgccagacgcttcggttcttgaaatgtctgagtctcagccagttgaaccaaataatataccagatgggggtacacttcctggtggaaaggttggcatgcggggtgcaactgagcgaagcattaatgattttagatacaagagatatggcaggagtaattcaaggtcacggatggggtcacctccacgaaaccacgatgaaaactatgacttggtaagccacagatcaaatagagacccaagccccactgaaagtcagaaaggaggaagattccagtcactcgtcataaatagggagaggagaggaagattttcaaacttcgagggtcctgtttcaaatttttcaagtggaaatatgcctgctccaaacatccgcccttcaaatatgttcaagcagagagggaaccatatgccagttgaacaagggatcgattctccttctgaagaaaatattgttgaagacataatgggaaagcacaatcaatttgtcagctctatgcagtctcgtttggctaagttacaggtagttcgtagatattgggaaaggaatgatgtaaaaaattcgataggctcgatagagaagatggctgataatgctgttactgcggacgtactgggtataataaccgagagaaatgagattttgacactggataattgtacctcccttcttccccttctaacagctcttttagggagcggcatggatcagcatttgagcgtttccctggatttgctgctgaagcttgtcagactgtatgggtcaccaatttactcatcactgtcagctccagcatctgttggtgtagatatcgaggctgagcaaaggatcgagcgctacagccgttgctttgtagagctagagaaagtcaaagcatgccttccctctctagcaagaagaggaggtttggtggccaagtctgtgctcgaactcaacctagcatttcaggaagtttcatcataataactatgagtcttacaaccctggacaaaaacgcagagcaaaagcccgtcttcctcgtggaagaacctgcatcatcccaagtccccaaccatctgctttttgatgtggatttggttccaaagggagtctaacaaaaactaaaggctgatacttactaagttaaccaaaagagttggaaggcaaaaatcctcccaagttagctgcttctggtcactaatctttgtctgcattgttctaattttggtgtgtagtagagagggacagagagaaagagagagagccattgggctgtgtattgttcttatgagagtactgcttgagtttctactcgtctgaaagagacatgttcagtgttctctcgaaacatgaatagaggtttttcgcggtttcttggatttctt

SEQ ID NO: 108275 - protein, 837 aa, Arabidopsis thaliana [sequence omitted]

SEQ ID NO: 108276 - protein, 564 aa, Arabidopsis thaliana
  peptide (1)..(564): Ceres Seq. ID no. 13653741
  misc_feature: Pfam Name: WD40 Pfam Description: WD domain, G-beta repeat
  misc_feature (52)..(546): Homolog of NCBI NO: 9759081 NR Description: contains similarity to unknown
  misc_feature (1)..(26): Homolog of NCBI NO: 9759081 NR Description: contains similarity to unknown
  misc_feature (1)..(332): Homolog of NCBI NO: 18415801 NR Description: katanin p80 subunit - like protein [Arabidopsis
  misc_feature (1)..(333): Homolog of NCBI NO: 9759081 NR Description: contains similarity to unknown
  misc_feature (1)..(213): Homolog of NCBI NO: 38344202 NR Description: OSJNBa0064G10.18 [Oryza sativa (japonica
  misc_feature (1)..(208): Homolog of NCBI NO: 37535664 NR Description: putative microtubule-severing protein subunit
  misc_feature (353)..(562): Homolog of NCBI NO: 37535664 NR Description: putative microtubule-severing protein subunit
  misc_feature (1)..(383): Homolog of NCBI NO: 25402650 NR Description: hypothetical protein [imported] - Arabidopsis >gi|5734734|gb|AAD49999.1|AC007259_12 Hypothetical protein
  misc_feature (444)..(520): Homolog of NCBI NO: 25402650 NR Description: hypothetical protein [imported] - Arabidopsis >gi|5734734|gb|AAD49999.1|AC007259_12 Hypothetical protein
  misc_feature (1)..(383): Homolog of NCBI NO: 15220302 NR Description: transducin / WD-40 repeat protein family
MNVHEGKLLGCSYNQSCVGVWVVDLSRTEPCMAGDTAQSNGHPEKRSCSGRDPVVLNDNNSKTVLGKLSVSQNVDPLLKETKSLGRLSVSQNSDPSTKETKSIGRSSTSQNSESSMKESKPLGRLSVSQNSDVSKESRTFSSTGSLPGTPHRVSSTNVSKATSGVSTAVSNAATSRRNFTKANPKANPVNKAADFAPVIVPRADPRIEQATESRAELDIIARTMPYSLQAADSRRSPSSRNNPDLPDASVLEMSESQPVEPNNIPDGGTLPGGKVGMRGATERSINDFRYKRYGRSNSRSRMGSPPRNHDENYDLVSHRSNRDPSPTESQKGGRFQSLVINRERRGRFSNFEGPVSNFSSGNMPAPNIRPSNMFKQRGNHMPVEQGIDSPSEENIVEDIMGKHNQFVSSMQSRLAKLQVVRRYWERNDVKNSIGSIEKMADNAVTADVLGIITERNEILTLDNCTSLLPLLTALLGSGMDQHLSVSLDLLLKLVRLYGSPIYSSLSAPASVGVDIEAEQRIERYSRCFVELEKVKACLPSLARRGGLVAKSVLELNLAFQEVSS

SEQ ID NO: 108277 - protein, 533 aa, Arabidopsis thaliana
  peptide (1)..(533): Ceres Seq. ID no. 13653742
  misc_feature: Pfam Name: WD40 Pfam Description: WD domain, G-beta repeat
  misc_feature (21)..(515): Homolog of NCBI NO: 9759081 NR Description: contains similarity to unknown
  misc_feature (1)..(301): Homolog of NCBI NO: 18415801 NR Description: katanin p80 subunit - like protein [Arabidopsis
  misc_feature (1)..(302): Homolog of NCBI NO: 9759081 NR Description: contains similarity to unknown
  misc_feature (1)..(182): Homolog of NCBI NO: 38344202 NR Description: OSJNBa0064G10.18 [Oryza sativa (japonica
  misc_feature (1)..(177): Homolog of NCBI NO: 37535664 NR Description: putative microtubule-severing protein subunit
  misc_feature (322)..(531): Homolog of NCBI NO: 37535664 NR Description: putative microtubule-severing protein subunit
  misc_feature (1)..(352): Homolog of NCBI NO: 25402650 NR Description: hypothetical protein [imported] - Arabidopsis >gi|5734734|gb|AAD49999.1|AC007259_12 Hypothetical protein
  misc_feature (413)..(489): Homolog of NCBI NO: 25402650 NR Description: hypothetical protein [imported] - Arabidopsis >gi|5734734|gb|AAD49999.1|AC007259_12 Hypothetical protein
  misc_feature (1)..(352): Homolog of NCBI NO: 15220302 NR Description: transducin / WD-40 repeat protein family
  misc_feature (357)..(489): Homolog of NCBI NO: 15220302 NR Description: transducin / WD-40 repeat protein family
MAGDTAQSNGHPEKRSCSGRDPVVLNDNNSKTVLGKLSVSQNVDPLLKETKSLGRLSVSQNSDPSTKETKSIGRSSTSQNSESSMKESKPLGRLSVSQNSDVSKESRTFSSTGSLPGTPHRVSSTNVSKATSGVSTAVSNAATSRRNFTKANPKANPVNKAADFAPVIVPRADPRIEQATESRAELDIIARTMPYSLQAADSRRSPSSRNNPDLPDASVLEMSESQPVEPNNIPDGGTLPGGKVGMRGATERSINDFRYKRYGRSNSRSRMGSPPRNHDENYDLVSHRSNRDPSPTESQKGGRFQSLVINRERRGRFSNFEGPVSNFSSGNMPAPNIRPSNMFKQRGNHMPVEQGIDSPSEENIVEDIMGKHNQFVSSMQSRLAKLQVVRRYWERNDVKNSIGSIEKMADNAVTADVLGIITERNEILTLDNCTSLLPLLTALLGSGMDQHLSVSLDLLLKLVRLYGSPIYSSLSAPASVGVDIEAEQRIERYSRCFVELEKVKACLPSLARRGGLVAKSVLELNLAFQEVSS

SEQ ID NO: 108278 - DNA, 1540 bp, Arabidopsis thaliana
  misc_feature (1)..(1540): Ceres Seq. ID no. 13653743
  misc_feature: MA Experiment ID: 20000180 Result: Up-regulated in Transcription
  misc_feature: MA Experiment 20000180 PARAMETER Experiment Name: At_Germinating_Seeds_P Parameter: Age (hr) Value: 24 vs. 0
  misc_feature: MA Experiment 20000180 PARAMETER Experiment Name: At_Germinating_Seeds_P Parameter: Tissue Value: Germinating Seeds
  misc_feature: MA Experiment ID: 20000184 Result: Up-regulated in Transcription
  misc_feature: MA Experiment 20000184 PARAMETER Experiment Name: At_Shoots__P Parameter: Age (day) Value: 7
  misc_feature: MA Experiment 20000184 PARAMETER Experiment Name: At_Shoots__P Parameter: Tissue Value: Shoots vs. Whole Plant
  misc_feature: MA Experiment ID: 20000436 Result: Down-regulated in Transcription
  misc_feature: MA Experiment 20000436 PARAMETER Experiment Name: At_Drought_P Parameter: Age (day) Value: 7
  misc_feature: MA Experiment 20000436 PARAMETER Experiment Name: At_Drought_P Parameter: Organism Value: A. thaliana
  misc_feature: MA Experiment 20000436 PARAMETER Experiment Name: At_Drought_P Parameter: Plant Line Value: WS
  misc_feature: MA Experiment 20000436 PARAMETER Experiment Name: At_Drought_P Parameter: Timepoint (hr) Value: 12
  misc_feature: MA Experiment 20000436 PARAMETER Experiment Name: At_Drought_P Parameter: Tissue Value: Whole Plant
  misc_feature: MA Experiment 20000436 PARAMETER Experiment Name: At_Drought_P Parameter: Treatment Value: Drought vs. No Drought
  misc_feature: MA Experiment ID: 20000437 Result: Down-regulated in Transcription
  misc_feature: MA Experiment 20000437 PARAMETER Experiment Name: At_Drought_P Parameter: Age (day) Value: 8
  misc_feature: MA Experiment 20000437 PARAMETER Experiment Name: At_Drought_P Parameter: Organism Value: A. thaliana
  misc_feature: MA Experiment 20000437 PARAMETER Experiment Name: At_Drought_P Parameter: Plant Line Value: WS
  misc_feature: MA Experiment 20000437 PARAMETER Experiment Name: At_Drought_P Parameter: Timepoint (hr) Value: 24
  misc_feature: MA Experiment 20000437 PARAMETER Experiment Name: At_Drought_P Parameter: Tissue Value: Whole Plant
  misc_feature: MA Experiment 20000437 PARAMETER Experiment Name: At_Drought_P Parameter: Treatment Value: Drought vs. No Drought
  misc_feature: MA Experiment ID: 20000438 Result: Up-regulated in Transcription
  misc_feature: MA Experiment 20000438 PARAMETER Experiment Name: At_Shoots__P Parameter: Age (day) Value: 14
  misc_feature: MA Experiment 20000438 PARAMETER Experiment Name: At_Shoots__P Parameter: Tissue Value: Shoots vs. Whole Plant
  misc_feature: MA Experiment ID: 20000495 Result: Down-regulated in Transcription
  misc_feature: MA Experiment 20000495 PARAMETER Experiment Name: At_Guard_Cells_P Parameter: Harvest Date Value: 8/2/2002
  misc_feature: MA Experiment 20000495 PARAMETER Experiment Name: At_Guard_Cells_P Parameter: Organism Value: A. thaliana
  misc_feature: MA Experiment 20000495 PARAMETER Experiment Name: At_Guard_Cells_P Parameter: Tissue Value: Guard Cells vs. Leaves
  misc_feature: MA Experiment ID: 20000527 Result: Up-regulated in Transcription
  misc_feature: MA Experiment 20000527 PARAMETER Experiment Name: At_10percent_PEG_P Parameter: Age (day) Value: 20
  misc_feature: MA Experiment 20000527 PARAMETER Experiment Name: At_10percent_PEG_P Parameter: Organism Value: A. thaliana
  misc_feature: MA Experiment 20000527 PARAMETER Experiment Name: At_10percent_PEG_P Parameter: Plant Line Value: WS
  misc_feature: MA Experiment 20000527 PARAMETER Experiment Name: At_10percent_PEG_P Parameter: Timepoint (day) Value: 20
  misc_feature: MA Experiment 20000527 PARAMETER Experiment Name: At_10percent_PEG_P Parameter: Tissue Value: Whole Plant
  misc_feature: MA Experiment 20000527 PARAMETER Experiment Name: At_10percent_PEG_P Parameter: Treatment Value: 10percent PEG vs. No Treatment
  misc_feature: MA Experiment ID: 20001248 Result: Down-regulated in Transcription
  misc_feature: MA Experiment 20001248 PARAMETER Experiment Name: At_Far-red-induction_P Parameter: Age (day) Value: 7
  misc_feature: MA Experiment 20001248 PARAMETER Experiment Name: At_Far-red-induction_P Parameter: Light Value: Far-red vs. White
  misc_feature: MA Experiment 20001248 PARAMETER Experiment Name: At_Far-red-induction_P Parameter: Organism Value: A. thaliana
  misc_feature: MA Experiment 20001248 PARAMETER Experiment Name: At_Far-red-induction_P Parameter: Plant Line Value: Columbia
  misc_feature: MA Experiment 20001248 PARAMETER Experiment Name: At_Far-red-induction_P Parameter: Timepoint (hr) Value: 4
  misc_feature: MA Experiment 20001248 PARAMETER Experiment Name: At_Far-red-induction_P Parameter: Tissue Value: Whole Plant
  misc_feature: MA Experiment ID: 20001905 Result: Down-regulated in Transcription
  misc_feature: MA Experiment 20001905 PARAMETER Experiment Name: At_Drought_Reproduction_P Parameter: Age (day) Value: 40
  misc_feature: MA Experiment 20001905 PARAMETER Experiment Name: At_Drought_Reproduction_P Parameter: Organism Value: A. thaliana
  misc_feature: MA Experiment 20001905 PARAMETER Experiment Name: At_Drought_Reproduction_P Parameter: Plant Line Value: WS
  misc_feature: MA Experiment 20001905 PARAMETER Experiment Name: At_Drought_Reproduction_P Parameter: Timepoint (day) Value: 10
  misc_feature: MA Experiment 20001905 PARAMETER Experiment Name: At_Drought_Reproduction_P Parameter: Tissue Value: Rosettes
  misc_feature: MA Experiment 20001905 PARAMETER Experiment Name: At_Drought_Reproduction_P Parameter: Treatment Value: Drought vs. No Drought
gagaaatcaaaataccatcttttatcttcttcttcttcttcttcttctttctttttcatacctgcaatttccctgagagactgatcactgatgtgctttcgttctctcgtgacaacaatcttcaatcaatcgagttcactttttagttcgtgactccctaatttcacacgatcaaagatctcgccaccgaaacgctttcaccgaaggattctttcaacggcggcgaaggagatgattacacgacggagaaggatgcgcggaagactatggccaagagagggatagtgaaattaacgaccagttggcagattcgtaggctttaaaactacaattcgactgcggaggaagaagacaaatttgtgtttcatcgatcgatcgataatcatcaccagcgagaaccaagagaccttttcaaatccaaaacagaggaatataagagattaaggaaccattgtgacgatgcctaacttgctccacaccaatcaatctcacttcttcttcctccatcatccgccaatctacaccgtcagttcaaagacgcaggctttccacttcccgcaatcaatggcgccggtcaacctccgtacgaatctctccgtgcgcaggaccgtacggtgtatggcgaacccgaggagagttaagatggtggctaagcagataatgagagaactctccgacatgcttctaacagacacggttttacaacacgctgtcttacctgaagctgcacttggagctgaccgctacctctcttctctcaccaccattagcgatgttgaagtctctaatgatttgcaggtggttaaagtatatgtatccgtgtttggagatgatagagggaaagacgttgcaattgcggggttgaaatcgaaagctaagtacgttaggagtgagcttgggaagcgaatgaagttgagattgacgcctgaggtcaggtttattgaggatgaagccatggaaagaggaagcagggtaattgcaatactggacaaaataaaagctgagaaaggaagcggtgaagggaaaacagaaccatctgactcaacagaagatgatcaagattgggaagtggatgaccccgacgaagacataatctatgtaaagtaatggtctgaagccgtttaagcaacgagtgcatattactctgatagaacgctccgcgttgttggacaagactaaggcggaatggagaaccggagaagatgaataccgatggtagttactcattatgaagcctgaaagcttctttggtccattactcggggatctctccaacaaattgttattttggataatatcagtgtaagggtttggtcatgagctcaagtttctgcctcgttgtttcaatgttttgtccttgtttggtgttacagttaatgtcagctctcacaatgactcaagtagaaattaaccgattcggtttcatatatgcctagatgagttgtgtacttgtgtcattgggcccgtatctcatgtatgcagtaacattttaggcccaaacaaaaatcagaacctaatccattgtttatgttacttatac

SEQ ID NO: 108279 - protein, 215 aa, Arabidopsis thaliana
  peptide (1)..(215): Ceres Seq. ID no. 13653744
  misc_feature (59)..(179): Pfam Name: Ribosome-binding factor A Pfam Description: Ribosome-binding factor A
  misc_feature (1)..(215): Homolog of NCBI NO: 30690114 NR Description: expressed protein [Arabidopsis thaliana] putative protein [Arabidopsis thaliana]
  misc_feature (36)..(211): Homolog of NCBI NO: 3914555 NR Description: Putative ribosome-binding factor A, chloroplast
  misc_feature (71)..(215): Homolog of NCBI NO: 3914555 NR Description: Putative ribosome-binding factor A, chloroplast
  misc_feature (54)..(201): Homolog of NCBI NO: 23127176 NR Description: hypothetical protein [Nostoc punctiforme]
  misc_feature (54)..(199): Homolog of NCBI NO: 17227559 NR Description: ribosome binding facror A [Nostoc sp. PCC 7120]
  misc_feature (54)..(201): Homolog of NCBI NO: 23039367 NR Description: hypothetical protein [Trichodesmium erythraeum
  misc_feature (54)..(187): Homolog of NCBI NO: 22299172 NR Description: ribosome binding factor A [Thermosynechococcus
  misc_feature (54)..(179): Homolog of NCBI NO: 16331339 NR Description: hypothetical protein [Synechocystis sp. PCC 6803]
  misc_feature (59)..(183): Homolog of NCBI NO: 37523601 NR Description: ribosome binding facror A [Gloeobacter violaceus]
  misc_feature (54)..(189): Homolog of NCBI NO: 33239584 NR Description: Ribosome-binding factor A [Prochlorococcus
MPNLLHTNQSHFFFLHHPPIYTVSSKTQAFHFPQSMAPVNLRTNLSVRRTVRCMANPRRVKMVAKQIMRELSDMLLTDTVLQHAVLPEAALGADRYLSSLTTISDVEVSNDLQVVKVYVSVFGDDRGKDVAIAGLKSKAKYVRSELGKRMKLRLTPEVRFIEDEAMERGSRVIAILDKIKAEKGSGEGKTEPSDSTEDDQDWEVDDPDEDIIYVK

SEQ ID NO: 108280 - protein, 180 aa, Arabidopsis thaliana; identical to SEQ ID NO: 47567
  peptide (1)..(180): Ceres Seq. ID no. 13653745
  misc_feature (24)..(144): Pfam Name: Ribosome-binding factor A Pfam Description: Ribosome-binding factor A
  misc_feature (1)..(180): Homolog of NCBI NO: 30690114 NR Description: expressed protein [Arabidopsis thaliana] putative protein [Arabidopsis thaliana]
  misc_feature (1)..(176): Homolog of NCBI NO: 3914555 NR Description: Putative ribosome-binding factor A, chloroplast
  misc_feature (36)..(180): Homolog of NCBI NO: 3914555 NR Description: Putative ribosome-binding factor A, chloroplast
  misc_feature (19)..(166): Homolog of NCBI NO: 23127176 NR Description: hypothetical protein [Nostoc punctiforme]
  misc_feature (19)..(164): Homolog of NCBI NO: 17227559 NR Description: ribosome binding facror A [Nostoc sp. PCC 7120]
  misc_feature (19)..(166): Homolog of NCBI NO: 23039367 NR Description: hypothetical protein [Trichodesmium erythraeum
  misc_feature (19)..(152): Homolog of NCBI NO: 22299172 NR Description: ribosome binding factor A [Thermosynechococcus
  misc_feature (19)..(144): Homolog of NCBI NO: 16331339 NR Description: hypothetical protein [Synechocystis sp. PCC 6803]
  misc_feature (24)..(148): Homolog of NCBI NO: 37523601 NR Description: ribosome binding facror A [Gloeobacter violaceus]
  misc_feature (19)..(154): Homolog of NCBI NO: 33239584 NR Description: Ribosome-binding factor A [Prochlorococcus

SEQ ID NO: 108281 - protein, 162 aa, Arabidopsis thaliana; identical to SEQ ID NO: 47568
  peptide (1)..(162): Ceres Seq. ID no. 13653746
  misc_feature (6)..(126): Pfam Name: Ribosome-binding factor A Pfam Description: Ribosome-binding factor A
  misc_feature (1)..(162): Homolog of NCBI NO: 30690114 NR Description: expressed protein [Arabidopsis thaliana] putative protein [Arabidopsis thaliana]
  misc_feature (1)..(158): Homolog of NCBI NO: 3914555 NR Description: Putative ribosome-binding factor A, chloroplast
  misc_feature (18)..(162): Homolog of NCBI NO: 3914555 NR Description: Putative ribosome-binding factor A, chloroplast
  misc_feature (1)..(148): Homolog of NCBI NO: 23127176 NR Description: hypothetical protein [Nostoc punctiforme]
  misc_feature (1)..(146): Homolog of NCBI NO: 17227559 NR Description: ribosome binding facror A [Nostoc sp. PCC 7120]
  misc_feature (1)..(148): Homolog of NCBI NO: 23039367 NR Description: hypothetical protein [Trichodesmium erythraeum
  misc_feature (1)..(134): Homolog of NCBI NO: 22299172 NR Description: ribosome binding factor A [Thermosynechococcus
  misc_feature (1)..(126): Homolog of NCBI NO: 16331339 NR Description: hypothetical protein [Synechocystis sp. PCC 6803]
  misc_feature (6)..(130): Homolog of NCBI NO: 37523601 NR Description: ribosome binding facror A [Gloeobacter violaceus]
  misc_feature (1)..(136): Homolog of NCBI NO: 33239584 NR Description: Ribosome-binding factor A [Prochlorococcus

SEQ ID NO: 108282 - DNA, 2019 bp, Arabidopsis thaliana
  misc_feature (1)..(2019): Ceres Seq. ID no. 13653751
  misc_feature: MA Experiment ID: 20000185 Result: Up-regulated in Transcription
  misc_feature: MA Experiment 20000185 PARAMETER Experiment Name: At_Roots__P Parameter: Age (day) Value: 7 vs. 21
  misc_feature: MA Experiment 20000185 PARAMETER Experiment Name: At_Roots__P Parameter: Organism Value: A. thaliana
  misc_feature: MA Experiment 20000185 PARAMETER Experiment Name: At_Roots__P Parameter: Tissue Value: Roots vs. Whole Plant
actaaagtaaaatcaagaaaaagctcctgagtactactggaaacaaaaaagcagagaacaagagaaaaaaaaaagaagaagacgactttatctttttctgggttttgttgttcttctttgactttatgggttcttttgttttagatttaggctcctacagatctgcttaaatctctgtgatcttgtctcttaattcttctgtttacccgtaatttccggaggattctcttcttgcttttccctgagcttctggatttggtcagagaagccttaagttcaaaaggatttggcttttgaagattggtgttaattaagcttctgggttttcatcagtttgtctaaaagtgagtggagtctctcatcttagtctgaagctcttttttttggatttgagcatttctggtttgagaagaatcttgtggaaaccaaagagaaatgtcgtttcgaggcattgttcaagatttgagagatgggtttgggagcttgtcaaggaggagtttcgattttaggctctcgagtcttcataaagggaaagctcagggttcttcgttccgtgagtattcgtcatcccgtgatctcttgtcgcctgtgatagttcagacaagtagatgggctaatcttcctccagagttactctttgatgtgatcaaaagattagaggaaagtgagagtaattggcctgcaagaaaacatgttgtggcttgtgcttcggtttgtcggtcttggagagctatgtgccaagagattgttttggggcctgaaatctgtgggaaactcactttccctgtttccctcaaacagggcctcgtgatgcaatgattcagtgtttcatcaaaagggataaatcaaagctaacatttcacctttttctttgtttaagtcccggtaagctgtttttaggacttagcctgcttctttatgatgttacttagtttatgtctaaatcaagttgaataatgttttttcagctctattagtggagaatgggaaatttcttctttcagctaaaagaactcgtagaactactcgaaccgagtacattatctccatggatgctgataacatctcaagatccagcaactcttacctcggaaagctcagatcaaacttccttgggacaaagttcttggtgtacgacacgcaaccaccaccaaacacatcttcgagcgcacttatcactgatcgaacaagccgaagcaggtttcactccagacgagtttctcctaaagtaccatccggaagctacaacattgctcaaatcacctatgagctcaacgtgttgggcacacgcgggccacgacgaatgcactgcatcatgaactccatcccaatttcatcgctcgaaccaggcggttcagtccctaaccaacccgagaaactcgtccctgcaccatactctctcgacgactcattccgcagtaacatctccttctccaaatcatcatttgaccaccgctccctcgatttcagcagttctagattctccgaaatgggaatatcctgcgacgacaacgaagaagaagcgagtttcagaccgttgattctaaagaacaagcagccaaggtggcacgagcagttgcaatgctggtgtttgaatttccgcggacgtgtgacagttgcatcggttaagaatttccagcttgtagcagcaagacagccgcagcctcaagggacaggtgcagcagcagcaccaacaagtgcacctgctcaccctgagcaagacaaggtgattctccagtttggtaaagtagggaaagatatgttcacaatggactataggtatccattatcggcgtttcaggcgtttgcgatatgcttaagcagctttgacaccaagcttgcttgtgaatagaagaaaccactcgtctccttgatcattcatgctaatcccttgtctctctctctcttttatctatgcttttggttttttttaggcaaatcaaaatttgtctcaatactcagttgctgtactgtgagagtcagacgtctactattaacatcctcttctctattctaaat

SEQ ID NO: 108283 - protein, 267 aa, Arabidopsis thaliana
  peptide (1)..(267): Ceres Seq. ID no. 13653752
  misc_feature (1)..(267): Pfam Name: Tub family Pfam Description: Tub family
  misc_feature (1)..(267): Homolog of NCBI NO: 15222543 NR Description: F-box containing tubby family protein
  misc_feature (1)..(254): Homolog of NCBI NO: 28188595 NR Description: unknown protein [Arabidopsis thaliana] unknown protein [Arabidopsis thaliana] unknown protein [Arabidopsis thaliana]
  misc_feature (1)..(254): Homolog of NCBI NO: 28188613 NR Description: unknown protein [Arabidopsis thaliana]
  misc_feature (1)..(254): Homolog of NCBI NO: 28188615 NR Description: unknown protein [Arabidopsis thaliana]
  misc_feature (1)..(254): Homolog of NCBI NO: 28188617 NR Description: unknown protein [Arabidopsis lyrata] unknown protein [Arabidopsis lyrata] >gi|28188621|gb|AAN46236.1| protein [Arabidopsis lyrata] >gi|28188623|gb|AAN46237.1| unknown
  misc_feature (1)..(267): Homolog of NCBI NO: 15223772 NR Description: F-box containing tubby family protein
  misc_feature (1)..(267): Homolog of NCBI NO: 38637048 NR Description: putative chain A, C-terminal domain of mouse
  misc_feature (1)..(267): Homolog of NCBI NO: 34908598 NR Description: putative tubby protein [Oryza sativa (japonica group)] >gi|21644661|dbj|BAC01219.1| putative tubby protein
  misc_feature (1)..(267): Homolog of NCBI NO: 25082857 NR Description: unknown protein [Arabidopsis thaliana]
  misc_feature (1)..(267): Homolog of NCBI NO: 18400968 NR Description: F-box containing tubby family protein thaliana] >gi|15983382|gb|AAL11559.1|AF424565_1 [Arabidopsis thaliana] >gi|18176058|gb|AAL59976.1| unknown
MDADNISRSSNSYLGKLRSNFLGTKFLVYDTQPPPNTSSSALITDRTSRSRFHSRRVSPKVPSGSYNIAQITYELNVLGTRGPRRMHCIMNSIPISSLEPGGSVPNQPEKLVPAPYSLDDSFRSNISFSKSSFDHRSLDFSSSRFSEMGISCDDNEEEASFRPLILKNKQPRWHEQLQCWCLNFRGRVTVASVKNFQLVAARQPQPQGTGAAAAPTSAPAHPEQDKVILQFGKVGKDMFTMDYRYPLSAFQAFAICLSSFDTKLACE

SEQ ID NO: 108284 - protein, 182 aa, Arabidopsis thaliana
  peptide (1)..(182): Ceres Seq. ID no. 13653753
  misc_feature (1)..(182): Pfam Name: Tub family Pfam Description: Tub family
  misc_feature (1)..(182): Homolog of NCBI NO: 15222543 NR Description: F-box containing tubby family protein
  misc_feature (1)..(169): Homolog of NCBI NO: 28188595 NR Description: unknown protein [Arabidopsis thaliana] unknown protein [Arabidopsis thaliana] unknown protein [Arabidopsis thaliana]
  misc_feature (1)..(169): Homolog of NCBI NO: 28188613 NR Description: unknown protein [Arabidopsis thaliana]
  misc_feature (1)..(169): Homolog of NCBI NO: 28188615 NR Description: unknown protein [Arabidopsis thaliana]
  misc_feature (1)..(169): Homolog of NCBI NO: 28188617 NR Description: unknown protein [Arabidopsis lyrata] unknown protein [Arabidopsis lyrata] >gi|28188621|gb|AAN46236.1| protein [Arabidopsis lyrata] >gi|28188623|gb|AAN46237.1| unknown
  misc_feature (1)..(182): Homolog of NCBI NO: 15223772 NR Description: F-box containing tubby family protein
  misc_feature (1)..(182): Homolog of NCBI NO: 38637048 NR Description: putative chain A, C-terminal domain of mouse
  misc_feature (1)..(182): Homolog of NCBI NO: 34908598 NR Description: putative tubby protein [Oryza sativa (japonica group)] >gi|21644661|dbj|BAC01219.1| putative tubby protein
  misc_feature (1)..(182): Homolog of NCBI NO: 25082857 NR Description: unknown protein [Arabidopsis thaliana]
  misc_feature (1)..(182): Homolog of NCBI NO: 18400968 NR Description: F-box containing tubby family protein thaliana] >gi|15983382|gb|AAL11559.1|AF424565_1 [Arabidopsis thaliana] >gi|18176058|gb|AAL59976.1| unknown
MHCIMNSIPISSLEPGGSVPNQPEKLVPAPYSLDDSFRSNISFSKSSFDHRSLDFSSSRFSEMGISCDDNEEEASFRPLILKNKQPRWHEQLQCWCLNFRGRVTVASVKNFQLVAARQPQPQGTGAAAAPTSAPAHPEQDKVILQFGKVGKDMFTMDYRYPLSAFQAFAICLSSFDTKLACE

SEQ ID NO: 108285 - protein, 178 aa, Arabidopsis thaliana
  peptide (1)..(178): Ceres Seq. ID no. 13653754
  misc_feature (1)..(178): Pfam Name: Tub family Pfam Description: Tub family
  misc_feature (1)..(178): Homolog of NCBI NO: 15222543 NR Description: F-box containing tubby family protein
  misc_feature (1)..(165): Homolog of NCBI NO: 28188595 NR Description: unknown protein [Arabidopsis thaliana] unknown protein [Arabidopsis thaliana] unknown protein [Arabidopsis thaliana]
  misc_feature (1)..(165): Homolog of NCBI NO: 28188613 NR Description: unknown protein [Arabidopsis thaliana]
  misc_feature (1)..(165): Homolog of NCBI NO: 28188615 NR Description: unknown protein [Arabidopsis thaliana]
  misc_feature (1)..(165): Homolog of NCBI NO: 28188617 NR Description: unknown protein [Arabidopsis lyrata] unknown protein [Arabidopsis lyrata] >gi|28188621|gb|AAN46236.1| protein [Arabidopsis lyrata] >gi|28188623|gb|AAN46237.1| unknown
  misc_feature (1)..(178): Homolog of NCBI NO: 15223772 NR Description: F-box containing tubby family protein
  misc_feature (1)..(178): Homolog of NCBI NO: 38637048 NR Description: putative chain A, C-terminal domain of mouse
  misc_feature (1)..(178): Homolog of NCBI NO: 34908598 NR Description: putative tubby protein [Oryza sativa (japonica group)] >gi|21644661|dbj|BAC01219.1| putative tubby protein
  misc_feature (1)..(178): Homolog of NCBI NO: 25082857 NR Description: unknown protein [Arabidopsis thaliana]
  misc_feature (1)..(178): Homolog of NCBI NO: 18400968 NR Description: F-box containing tubby family protein thaliana] >gi|15983382|gb|AAL11559.1|AF424565_1 [Arabidopsis thaliana] >gi|18176058|gb|AAL59976.1| unknown
MNSIPISSLEPGGSVPNQPEKLVPAPYSLDDSFRSNISFSKSSFDHRSLDFSSSRFSEMGISCDDNEEEASFRPLILKNKQPRWHEQLQCWCLNFRGRVTVASVKNFQLVAARQPQPQGTGAAAAPTSAPAHPEQDKVILQFGKVGKDMFTMDYRYPLSAFQAFAICLSSFDTKLACE

SEQ ID NO: 108286 - DNA, 2042 bp, Arabidopsis thaliana
  misc_feature (1)..(2042): Ceres Seq. ID no. 13653755
  misc_feature: MA Experiment ID: 20000171 Result: Up-regulated in Transcription
  misc_feature: MA Experiment 20000171 PARAMETER Experiment Name: At_42deg_Heat_P Parameter: Age (day) Value: 14
  misc_feature: MA Experiment 20000171 PARAMETER Experiment Name: At_42deg_Heat_P Parameter: Organism Value: A. thaliana
  misc_feature: MA Experiment 20000171 PARAMETER Experiment Name: At_42deg_Heat_P Parameter: Plant Line Value: WS
  misc_feature: MA Experiment 20000171 PARAMETER Experiment Name: At_42deg_Heat_P Parameter: Temperature (deg C) Value: 42 vs. 22
  misc_feature: MA Experiment 20000171 PARAMETER Experiment Name: At_42deg_Heat_P Parameter: Timepoint (hr) Value: 1
  misc_feature: MA Experiment 20000171 PARAMETER Experiment Name: At_42deg_Heat_P Parameter: Tissue Value: Aerial
  misc_feature: MA Experiment ID: 20000185 Result: Up-regulated in Transcription
  misc_feature: MA Experiment 20000185 PARAMETER Experiment Name: At_Roots__P Parameter: Age (day) Value: 7 vs. 21
  misc_feature: MA Experiment 20000185 PARAMETER Experiment Name: At_Roots__P Parameter: Organism Value: A. thaliana
  misc_feature: MA Experiment 20000185 PARAMETER Experiment Name: At_Roots__P Parameter: Tissue Value: Roots vs. Whole Plant
  misc_feature: MA Experiment ID: 20000439 Result: Up-regulated in Transcription
  misc_feature: MA Experiment 20000439 PARAMETER Experiment Name: At_Roots__P Parameter: Age (day) Value: 14 vs. 21
  misc_feature: MA Experiment 20000439 PARAMETER Experiment Name: At_Roots__P Parameter: Organism Value: A. thaliana
  misc_feature: MA Experiment 20000439 PARAMETER Experiment Name: At_Roots__P Parameter: Tissue Value: Roots vs. Whole Plant
  misc_feature: MA Experiment ID: 20001248 Result: Down-regulated in Transcription
  misc_feature: MA Experiment 20001248 PARAMETER Experiment Name: At_Far-red-induction_P Parameter: Age (day) Value: 7
  misc_feature: MA Experiment 20001248 PARAMETER Experiment Name: At_Far-red-induction_P Parameter: Light Value: Far-red vs. White
  misc_feature: MA Experiment 20001248 PARAMETER Experiment Name: At_Far-red-induction_P Parameter: Organism Value: A. thaliana
  misc_feature: MA Experiment 20001248 PARAMETER Experiment Name: At_Far-red-induction_P Parameter: Plant Line Value: Columbia
  misc_feature: MA Experiment 20001248 PARAMETER Experiment Name: At_Far-red-induction_P Parameter: Timepoint (hr) Value: 4
  misc_feature: MA Experiment 20001248 PARAMETER Experiment Name: At_Far-red-induction_P Parameter: Tissue Value: Whole Plant
  misc_feature: MA Experiment ID: 20001555 Result: Up-regulated in Transcription
  misc_feature: MA Experiment 20001555 PARAMETER Experiment Name: At_Drought_Soil_Dry_P Parameter: Age (day) Value: 24
  misc_feature: MA Experiment 20001555 PARAMETER Experiment Name: At_Drought_Soil_Dry_P Parameter: Organism Value: A. thaliana
  misc_feature: MA Experiment 20001555 PARAMETER Experiment Name: At_Drought_Soil_Dry_P Parameter: Plant Line Value: WS
  misc_feature: MA Experiment 20001555 PARAMETER Experiment Name: At_Drought_Soil_Dry_P Parameter: Post Timepoint (hr) Value: None
  misc_feature: MA Experiment 20001555 PARAMETER Experiment Name: At_Drought_Soil_Dry_P Parameter: Post-Treatment Value: None
  misc_feature: MA Experiment 20001555 PARAMETER Experiment Name: At_Drought_Soil_Dry_P Parameter: Timepoint (day) Value: 10
  misc_feature: MA Experiment 20001555 PARAMETER Experiment Name: At_Drought_Soil_Dry_P Parameter: Treatment Value: Drought vs. No Drought
  misc_feature: MA Experiment ID: 20001556 Result: Up-regulated in Transcription
  misc_feature: MA Experiment 20001556 PARAMETER Experiment Name: At_Drought_Soil_Dry_P Parameter: Age (day) Value: 26
  misc_feature: MA Experiment 20001556 PARAMETER Experiment Name: At_Drought_Soil_Dry_P Parameter: Organism Value: A. thaliana
  misc_feature: MA Experiment 20001556 PARAMETER Experiment Name: At_Drought_Soil_Dry_P Parameter: Plant Line Value: WS
  misc_feature: MA Experiment 20001556 PARAMETER Experiment Name: At_Drought_Soil_Dry_P Parameter: Post Timepoint (hr) Value: None
  misc_feature: MA Experiment 20001556 PARAMETER Experiment Name: At_Drought_Soil_Dry_P Parameter: Post-Treatment Value: None
  misc_feature: MA Experiment 20001556 PARAMETER Experiment Name: At_Drought_Soil_Dry_P Parameter: Timepoint (day) Value: 12
  misc_feature: MA Experiment 20001556 PARAMETER Experiment Name: At_Drought_Soil_Dry_P Parameter: Treatment Value: Drought vs. No Drought
  misc_feature: MA Experiment ID: 20001761 Result: Down-regulated in Transcription
  misc_feature: MA Experiment 20001761 PARAMETER Experiment Name: At_50mM_NH4NO3_L-to-H_P Parameter: Timepoint (hr) Value: 4
  misc_feature: MA Experiment 20001761 PARAMETER Experiment Name: At_50mM_NH4NO3_L-to-H_P Parameter: Tissue Value: Siliques
  misc_feature: MA Experiment 20001761 PARAMETER Experiment Name: At_50mM_NH4NO3_L-to-H_P Parameter: Treatment Value: 50mM NH4NO3 vs 100mM Mannitol
  misc_feature: MA Experiment ID: 20001904 Result: Up-regulated in Transcription
  misc_feature: MA Experiment 20001904 PARAMETER Experiment Name: At_Drought_Reproduction_P Parameter: Age (day) Value: 37
  misc_feature: MA Experiment 20001904 PARAMETER Experiment Name: At_Drought_Reproduction_P Parameter: Organism Value: A. thaliana
  misc_feature: MA Experiment 20001904 PARAMETER Experiment Name: At_Drought_Reproduction_P Parameter: Plant Line Value: WS
  misc_feature: MA Experiment 20001904 PARAMETER Experiment Name: At_Drought_Reproduction_P Parameter: Timepoint (day) Value: 7
  misc_feature: MA Experiment 20001904 PARAMETER Experiment Name: At_Drought_Reproduction_P Parameter: Tissue Value: Rosettes
  misc_feature: MA Experiment 20001904 PARAMETER Experiment Name: At_Drought_Reproduction_P Parameter: Treatment Value: Drought vs. No Drought
  misc_feature: MA Experiment ID: 20001905 Result: Up-regulated in Transcription
  misc_feature: MA Experiment 20001905 PARAMETER Experiment Name: At_Drought_Reproduction_P Parameter: Age (day) Value: 40
  misc_feature: MA Experiment 20001905 PARAMETER Experiment Name: At_Drought_Reproduction_P Parameter: Organism Value: A. thaliana
  misc_feature: MA Experiment 20001905 PARAMETER Experiment Name: At_Drought_Reproduction_P Parameter: Plant Line Value: WS
  misc_feature: MA Experiment 20001905 PARAMETER Experiment Name: At_Drought_Reproduction_P Parameter: Timepoint (day) Value: 10
  misc_feature: MA Experiment 20001905 PARAMETER Experiment Name: At_Drought_Reproduction_P Parameter: Tissue Value: Rosettes
  misc_feature: MA Experiment 20001905 PARAMETER Experiment Name: At_Drought_Reproduction_P Parameter: Treatment Value: Drought vs. No Drought
  misc_feature: MA Experiment ID: 20001906 Result: Up-regulated in Transcription
  misc_feature: MA Experiment 20001906 PARAMETER Experiment Name: At_Drought_Reproduction_P Parameter: Age (day) Value: 35
  misc_feature: MA Experiment 20001906 PARAMETER Experiment Name: At_Drought_Reproduction_P Parameter: Organism Value: A. thaliana
  misc_feature: MA Experiment 20001906 PARAMETER Experiment Name: At_Drought_Reproduction_P Parameter: Plant Line Value: WS
  misc_feature: MA Experiment 20001906 PARAMETER Experiment Name: At_Drought_Reproduction_P Parameter: Timepoint (day) Value: 5
  misc_feature: MA Experiment 20001906 PARAMETER Experiment Name: At_Drought_Reproduction_P Parameter: Tissue Value: Siliques
  misc_feature: MA Experiment 20001906 PARAMETER Experiment Name: At_Drought_Reproduction_P Parameter: Treatment Value: Drought vs. No Drought
  misc_feature: MA Experiment ID: 20001908 Result: Up-regulated in Transcription
  misc_feature: MA Experiment 20001908 PARAMETER Experiment Name: At_Drought_Reproduction_P Parameter: Age (day) Value: 40
  misc_feature: MA Experiment 20001908 PARAMETER Experiment Name: At_Drought_Reproduction_P Parameter: Organism Value: A. thaliana
  misc_feature: MA Experiment 20001908 PARAMETER Experiment Name: At_Drought_Reproduction_P Parameter: Plant Line Value: WS
  misc_feature: MA Experiment 20001908 PARAMETER Experiment Name: At_Drought_Reproduction_P Parameter: Timepoint (day) Value: 10
  misc_feature: MA Experiment 20001908 PARAMETER Experiment Name: At_Drought_Reproduction_P Parameter: Tissue Value: Siliques
  misc_feature: MA Experiment 20001908 PARAMETER Experiment Name: At_Drought_Reproduction_P Parameter: Treatment Value: Drought vs. No Drought
  misc_feature: Pfam Name: p450 Pfam Description: Cytochrome P450
attgctctctcttctctttgtcacaatgaatttcaattcttcttacaatctcactttcaatgacgttttcttctcttcttcttcctccagtgaccctctggtttcacggaggctgtttctcttgagagatgttcagattcttgagctccttattgcaattttcgtctttgtcgcaatacatgccttgcgtcagaagaaataccaaggtcttcccgtgtggccgtttcttgggatgcttccttctctagcttttggcctcagaggaaacatatacgagtggctatccgatgttctatgtctccagaacggaactttccaattcagaggtccctggtttagcagcctcaacagcactatcacttgtgacccaagaaacgttgagcatctccttaagaaccggttttctgtcttccctaaaggttcttactttcgagacaatctccgagacctcctaggagatggaatattcaacgcggatgatgaaacttggcagaggcagaggaaaacagcgagcattgagtttcattcagccaaattcagacaattaaccactcaatctttgtttgagctcgtgcacaagaggctcttacctgttcttgagacatcggttaagagctcatctcctatcgatctacaagacgtcttgttgaggctaacgtttgataacgtatgtatgattgcttttggagtcgatccaggatgtctcggtccagatcaaccagtgattccttttgcgaaagcctttgaggatgcgactgaagctgcggttgtgagattcgtcatgcctacttgcgtgtggaagttcatgaggtatcttgatataggaacagagaagaagcttaaggaatcaataaagggtgtggatgatttcgctgatgaagttatcaggacgaggaagaaagaactgtctcttgagggcgaaactacaaaaagatcggatctcttaactgtgtttatgggtctgagagatgagaagggagagagtttttcagacaagtttcttcgtgatatctgtgtgaacttcatacttgctgggagagatacttcttctgtggctttgagctggtttttctggttgctagagaagaacccagaggtcgaagagaagatcatggtggagatgtgtaagattctgaggcagagagatgaccatggaaatgcagagaagagtgattatgaacctgtgtttggaccagaagagatcaagaagatggattatctacaagctgctttgtctgaagctcttagattgtatccttcagttcccgtggatcacaaagaggttcaagaagacgacgtatttcctgatggaactatgttgaagaagggagacaaagttatatacgcgatttacgcaatgggtcgtatggaagctatttggggaaaagactgtcttgagtttaggccagagaggtggctaagagacggacggttcatgagtgagtcggcctacaaattcacagcctttaacggtggtccacgcctttgtcttggcaaagattttgcctattatcagatgaaatctacggcggccgcaatagtttatcggtacaaggtgaaggtggtgaatggtcacaaggtggagccgaagttggcactcacaatgtacatgaaacatggtttgatggtgaacttgatcaataggagtgtctccgagatagatcaatactatgccaagtcttttgatgagggttatattaattagtgtttttaatgttttgaagatttgttaattgattaagttaatggtctaagaagattgtgtgcttacttttagttgatttgaatttttaaagtatgttttttgtgtccactttgttattagatgatgtgtacagtctatgggttatgtgtacgtggaaatgtggaggaagttgaatgggttatatatacttatatgtggaccgattatgggttgttgttaggaaattagttggtggggcttgtaatttgataataaattaattacttggaattttaattttagtttctatcagttttggttagcacttttggaattcaatttggaaacgaactttttt

SEQ ID NO: 108287 - protein, 567 aa, Arabidopsis thaliana
  peptide (1)..(567): Ceres Seq. ID no. 13653756
  misc_feature: Pfam Name: p450 Pfam Description: Cytochrome P450
  misc_feature (9)..(567): Homolog of NCBI NO: 15237250 NR Description: cytochrome P450 family [Arabidopsis thaliana]
  misc_feature (9)..(557): Homolog of NCBI NO: 11249681 NR Description: cytochrome P450-like protein - Arabidopsis
  misc_feature (70)..(557): Homolog of NCBI NO: 30682301 NR Description: cytochrome P450 family [Arabidopsis thaliana]
  misc_feature (38)..(553): Homolog of NCBI NO: 37535524 NR Description: putative cytochrome P450 protein [Oryza sativa
  misc_feature (33)..(545): Homolog of NCBI NO: 15221776 NR Description: cytochrome P450, putative [Arabidopsis thaliana]
  misc_feature (41)..(555): Homolog of NCBI NO: 15229477 NR Description: cytochrome P450, putative [Arabidopsis thaliana]
  misc_feature (25)..(552): Homolog of NCBI NO: 15222186 NR Description: cytochrome P450 family [Arabidopsis thaliana]
  misc_feature (46)..(552): Homolog of NCBI NO: 15222187 NR Description: cytochrome P450, putative [Arabidopsis thaliana]
  misc_feature (46)..(552): Homolog of NCBI NO: 28393041 NR Description: putative cytochrome P450 [Arabidopsis thaliana]
  misc_feature (46)..(551): Homolog of NCBI NO: 15222515 NR Description: cytochrome P450, putative [Arabidopsis thaliana]
LLSLLFVTMNFNSSYNLTFNDVFFSSSSSSDPLVSRRLFLLRDVQILELLIAIFVFVAIHALRQKKYQGLPVWPFLGMLPSLAFGLRGNIYEWLSDVLCLQNGTFQFRGPWFSSLNSTITCDPRNVEHLLKNRFSVFPKGSYFRDNLRDLLGDGIFNADDETWQRQRKTASIEFHSAKFRQLTTQSLFELVHKRLLPVLETSVKSSSPIDLQDVLLRLTFDNVCMIAFGVDPGCLGPDQPVIPFAKAFEDATEAAVVRFVMPTCVWKFMRYLDIGTEKKLKESIKGVDDFADEVIRTRKKELSLEGETTKRSDLLTVFMGLRDEKGESFSDKFLRDICVNFILAGRDTSSVALSWFFWLLEKNPEVEEKIMVEMCKILRQRDDHGNAEKSDYEPVFGPEEIKKMDYLQAALSEALRLYPSVPVDHKEVQEDDVFPDGTMLKKGDKVIYAIYAMGRMEAIWGKDCLEFRPERWLRDGRFMSESAYKFTAFNGGPRLCLGKDFAYYQMKSTAAAIVYRYKVKVVNGHKVEPKLALTMYMKHGLMVNLINRSVSEIDQYYAKSFDEGYIN

SEQ ID NO: 108288 - protein, 559 aa, Arabidopsis thaliana; identical to SEQ ID NO: 82609
  peptide (1)..(559): Ceres Seq. ID no. 13653757
  misc_feature: Pfam Name: p450 Pfam Description: Cytochrome P450
  misc_feature (1)..(559): Homolog of NCBI NO: 15237250 NR Description: cytochrome P450 family [Arabidopsis thaliana]
  misc_feature (1)..(549): Homolog of NCBI NO: 11249681 NR Description: cytochrome P450-like protein - Arabidopsis
  misc_feature (62)..(549): Homolog of NCBI NO: 30682301 NR Description: cytochrome P450 family [Arabidopsis thaliana]
  misc_feature (30)..(545): Homolog of NCBI NO: 37535524 NR Description: putative cytochrome P450 protein [Oryza sativa
  misc_feature (25)..(537): Homolog of NCBI NO: 15221776 NR Description: cytochrome P450, putative [Arabidopsis thaliana]
  misc_feature (33)..(547): Homolog of NCBI NO: 15229477 NR Description: cytochrome P450, putative [Arabidopsis thaliana]
  misc_feature (17)..(544): Homolog of NCBI NO: 15222186 NR Description: cytochrome P450 family [Arabidopsis thaliana]
  misc_feature (38)..(544): Homolog of NCBI NO: 15222187 NR Description: cytochrome P450, putative [Arabidopsis thaliana]
  misc_feature (38)..(544): Homolog of NCBI NO: 28393041 NR Description: putative cytochrome P450 [Arabidopsis thaliana]
  misc_feature (38)..(543): Homolog of NCBI NO: 15222515 NR Description: cytochrome P450, putative [Arabidopsis thaliana]

SEQ ID NO: 108289 - protein, 490 aa, Arabidopsis thaliana; identical to SEQ ID NO: 82610
  peptide (1)..(490): Ceres Seq. ID no. 13653758
  misc_feature: Pfam Name: p450 Pfam Description: Cytochrome P450
  misc_feature (1)..(490): Homolog of NCBI NO: 15237250 NR Description: cytochrome P450 family [Arabidopsis thaliana]
  misc_feature (1)..(480): Homolog of NCBI NO: 11249681 NR Description: cytochrome P450-like protein - Arabidopsis
  misc_feature (1)..(480): Homolog of NCBI NO: 30682301 NR Description: cytochrome P450 family [Arabidopsis thaliana]
  misc_feature (1)..(476): Homolog of NCBI NO: 37535524 NR Description: putative cytochrome P450 protein [Oryza sativa
  misc_feature (1)..(468): Homolog of NCBI NO: 15221776 NR Description: cytochrome P450, putative [Arabidopsis thaliana]
  misc_feature (1)..(478): Homolog of NCBI NO: 15229477 NR Description: cytochrome P450, putative [Arabidopsis thaliana]
  misc_feature (1)..(475): Homolog of NCBI NO: 15222186 NR Description: cytochrome P450 family [Arabidopsis thaliana]
  misc_feature (1)..(475): Homolog of NCBI NO: 15222187 NR Description: cytochrome P450, putative [Arabidopsis thaliana]
  misc_feature (1)..(475): Homolog of NCBI NO: 28393041 NR Description: putative cytochrome P450 [Arabidopsis thaliana]
  misc_feature (1)..(474): Homolog of NCBI NO: 15222515 NR Description: cytochrome P450, putative [Arabidopsis thaliana]

SEQ ID NO: 108290 - DNA, 802 bp, Arabidopsis thaliana
  misc_feature (1)..(802): Ceres Seq. ID no. 13653759
  misc_feature: MA Experiment ID: 108434 Result: Down-regulated in Transcription
  misc_feature: MA Experiment 108434 PARAMETER Experiment Name: At_Root_Tips_cDNA_P Parameter: Tissue Value: Root Tips
  misc_feature: MA Experiment ID: 108488 Result: Down-regulated in Transcription
  misc_feature: MA Experiment ID: 108561 Result: Up-regulated in Transcription
  misc_feature: MA Experiment 108561 PARAMETER Experiment Name: At_100uM_ABA_cDNA_P Parameter: Timepoint (hr) Value: 6
  misc_feature: MA Experiment 108561 PARAMETER Experiment Name: At_100uM_ABA_cDNA_P Parameter: Tissue Value: Aerial
  misc_feature: MA Experiment 108561 PARAMETER Experiment Name: At_100uM_ABA_cDNA_P Parameter: Treatment Value: 100uM ABA vs. No Treatment
  misc_feature: MA Experiment ID: 108572 Result: Up-regulated in Transcription
  misc_feature: MA Experiment 108572 PARAMETER Experiment Name: At_Drought_cDNA_P Parameter: Timepoint (hr) Value: 1
  misc_feature: MA Experiment 108572 PARAMETER Experiment Name: At_Drought_cDNA_P Parameter: Tissue Value: Aerial
  misc_feature: MA Experiment 108572 PARAMETER Experiment Name: At_Drought_cDNA_P Parameter: Treatment Value: Drought vs. No Drought
  misc_feature: MA Experiment ID: 108573 Result: Up-regulated in Transcription
  misc_feature: MA Experiment 108573 PARAMETER Experiment Name: At_Drought_cDNA_P Parameter: Timepoint (hr) Value: 6
  misc_feature: MA Experiment 108573 PARAMETER Experiment Name: At_Drought_cDNA_P Parameter: Tissue Value: Aerial
  misc_feature: MA Experiment 108573 PARAMETER Experiment Name: At_Drought_cDNA_P Parameter: Treatment Value: Drought vs. No Drought
  misc_feature: MA Experiment ID: 108585 Result: Up-regulated in Transcription
  misc_feature: MA Experiment 108585 PARAMETER Experiment Name: At_5mM_NaNP_cDNA_P Parameter: Timepoint (hr) Value: 6
  misc_feature: MA Experiment 108585 PARAMETER Experiment Name: At_5mM_NaNP_cDNA_P Parameter: Tissue Value: Aerial
  misc_feature: MA Experiment 108585 PARAMETER Experiment Name: At_5mM_NaNP_cDNA_P Parameter: Treatment Value: null
  misc_feature: MA Experiment ID: 108605 Result: Up-regulated in Transcription
  misc_feature: MA Experiment 108605 PARAMETER Experiment Name: At_100uM_ABA_cDNA_P Parameter: Timepoint (hr) Value: 6
  misc_feature: MA Experiment 108605 PARAMETER Experiment Name: At_100uM_ABA_cDNA_P Parameter: Tissue Value: Aerial
  misc_feature: MA Experiment 108605 PARAMETER Experiment Name: At_100uM_ABA_cDNA_P Parameter: Treatment Value: 100uM ABA vs. No Treatment
  misc_feature: MA Experiment ID: 108607 Result: Up-regulated in Transcription
  misc_feature: MA Experiment 108607 PARAMETER Experiment Name: At_100uM_ABA_cDNA_P Parameter: Timepoint (hr) Value: 4
  misc_feature: MA Experiment 108607 PARAMETER Experiment Name: At_100uM_ABA_cDNA_P Parameter: Tissue Value: Aerial
  misc_feature: MA Experiment 108607 PARAMETER Experiment Name: At_100uM_ABA_cDNA_P Parameter: Treatment Value: 100uM ABA vs. No Treatment
  misc_feature: MA Experiment ID: 108608 Result: Up-regulated in Transcription
  misc_feature: MA Experiment 108608 PARAMETER Experiment Name: At_100uM_ABA_cDNA_P Parameter: Timepoint (hr) Value: 1
  misc_feature: MA Experiment 108608 PARAMETER Experiment Name: At_100uM_ABA_cDNA_P Parameter: Tissue Value: Aerial
  misc_feature: MA Experiment 108608 PARAMETER Experiment Name: At_100uM_ABA_cDNA_P Parameter: Treatment Value: 100uM ABA vs. No Treatment
  misc_feature: MA Experiment ID: 108609 Result: Up-regulated in Transcription
  misc_feature: MA Experiment 108609 PARAMETER Experiment Name: At_100uM_ABA_cDNA_P Parameter: Timepoint (hr) Value: 24
  misc_feature: MA Experiment 108609 PARAMETER Experiment Name: At_100uM_ABA_cDNA_P Parameter: Tissue Value: Aerial
  misc_feature: MA Experiment 108609 PARAMETER Experiment Name: At_100uM_ABA_cDNA_P Parameter: Treatment Value: 100uM ABA vs. No Treatment
  misc_feature: MA Experiment ID: 108668 Result: Up-regulated in Transcription
  misc_feature: MA Experiment 108668 PARAMETER Experiment Name: At_2mM_SA_cDNA_P Parameter: Plant Line Value: WS
  misc_feature: MA Experiment 108668 PARAMETER Experiment Name: At_2mM_SA_cDNA_P Parameter: Timepoint (hr) Value: 6
  misc_feature: MA Experiment 108668 PARAMETER Experiment Name: At_2mM_SA_cDNA_P Parameter: Treatment Value: 2mM SA vs. No Treatment
  misc_feature: MA Experiment ID: 20000069 Result: Up-regulated in Transcription
  misc_feature: MA Experiment 20000069 PARAMETER Experiment Name: At_100uM_ABA_Mutants_cDNA_P Parameter: Plant Line Value: CS23
  misc_feature: MA Experiment 20000069 PARAMETER Experiment Name: At_100uM_ABA_Mutants_cDNA_P Parameter: Timepoint (hr) Value: 6
  misc_feature: MA Experiment 20000069 PARAMETER Experiment Name: At_100uM_ABA_Mutants_cDNA_P Parameter: Tissue Value: Aerial
  misc_feature: MA Experiment 20000069 PARAMETER Experiment Name: At_100uM_ABA_Mutants_cDNA_P Parameter: Treatment Value: 100uM ABA vs. No Treatment
  misc_feature: MA Experiment ID: 20000070 Result: Up-regulated in Transcription
  misc_feature: MA Experiment 20000070 PARAMETER Experiment Name: At_100uM_ABA_Mutants_cDNA_P Parameter: Plant Line Value: CS24
  misc_feature: MA Experiment 20000070 PARAMETER Experiment Name: At_100uM_ABA_Mutants_cDNA_P Parameter: Timepoint (hr) Value: 6
  misc_feature: MA Experiment 20000070 PARAMETER Experiment Name: At_100uM_ABA_Mutants_cDNA_P Parameter: Tissue Value: Aerial
  misc_feature: MA Experiment 20000070 PARAMETER Experiment Name: At_100uM_ABA_Mutants_cDNA_P Parameter: Treatment Value: 100uM ABA vs. No Treatment
  misc_feature: MA Experiment ID: 20000071 Result: Up-regulated in Transcription
  misc_feature: MA Experiment 20000071 PARAMETER Experiment Name: At_100uM_ABA_Mutants_cDNA_P Parameter: Plant Line Value: CS8104
  misc_feature: MA Experiment 20000071 PARAMETER Experiment Name: At_100uM_ABA_Mutants_cDNA_P Parameter: Timepoint (hr) Value: 6
  misc_feature: MA Experiment 20000071 PARAMETER Experiment Name: At_100uM_ABA_Mutants_cDNA_P Parameter: Tissue Value: Aerial
  misc_feature: MA Experiment 20000071 PARAMETER Experiment Name: At_100uM_ABA_Mutants_cDNA_P Parameter: Treatment Value: 100uM ABA vs. No Treatment
  misc_feature: MA Experiment ID: 20000072 Result: Up-regulated in Transcription
  misc_feature: MA Experiment 20000072 PARAMETER Experiment Name: At_100uM_ABA_Mutants_cDNA_P Parameter: Plant Line Value: CS8105
  misc_feature: MA Experiment 20000072 PARAMETER Experiment Name: At_100uM_ABA_Mutants_cDNA_P Parameter: Timepoint (hr) Value: 6
  misc_feature: MA Experiment 20000072 PARAMETER Experiment Name: At_100uM_ABA_Mutants_cDNA_P Parameter: Tissue Value: Aerial
  misc_feature: MA Experiment 20000072 PARAMETER Experiment Name: At_100uM_ABA_Mutants_cDNA_P Parameter: Treatment Value: 100uM ABA vs. No Treatment
  misc_feature: MA Experiment ID: 20000086 Result: Up-regulated in Transcription
  misc_feature: MA Experiment 20000086 PARAMETER Experiment Name: At_100uM_ABA_Mutants_cDNA_P Parameter: Plant Line Value: CS22
  misc_feature: MA Experiment 20000086 PARAMETER Experiment Name: At_100uM_ABA_Mutants_cDNA_P Parameter: Timepoint (hr) Value: 6
  misc_feature: MA Experiment 20000086 PARAMETER Experiment Name: At_100uM_ABA_Mutants_cDNA_P Parameter: Tissue Value: Aerial
  misc_feature: MA Experiment 20000086 PARAMETER Experiment Name: At_100uM_ABA_Mutants_cDNA_P Parameter: Treatment Value: 100uM ABA vs. No Treatment
  misc_feature: MA Experiment ID: 20000088 Result: Up-regulated in Transcription
  misc_feature: MA Experiment 20000088 PARAMETER Experiment Name: At_100uM_ABA_Mutants_cDNA_P Parameter: Plant Line Value: Landsberg
  misc_feature: MA Experiment 20000088 PARAMETER Experiment Name: At_100uM_ABA_Mutants_cDNA_P Parameter: Timepoint (hr) Value: 6
  misc_feature: MA Experiment 20000088 PARAMETER Experiment Name: At_100uM_ABA_Mutants_cDNA_P Parameter: Tissue Value: Aerial
  misc_feature: MA Experiment 20000088 PARAMETER Experiment Name: At_100uM_ABA_Mutants_cDNA_P Parameter: Treatment Value: 100uM ABA vs. No Treatment
  misc_feature: MA Experiment ID: 20000111 Result: Down-regulated in Transcription
  misc_feature: MA Experiment 20000111 PARAMETER Experiment Name: At_42deg_Heat_cDNA_P Parameter: Temperature (deg C) Value: 42 vs. 22
  misc_feature: MA Experiment 20000111 PARAMETER Experiment Name: At_42deg_Heat_cDNA_P Parameter: Timepoint (hr) Value: 6
  misc_feature: MA Experiment 20000111 PARAMETER Experiment Name: At_42deg_Heat_cDNA_P Parameter: Tissue Value: Aerial
  misc_feature: MA Experiment ID: 20000117 Result: Up-regulated in Transcription
  misc_feature: MA Experiment 20000117 PARAMETER Experiment Name: At_100uM_ABA_Mutants_cDNA_P Parameter: Plant Line Value: Columbia
  misc_feature: MA Experiment 20000117 PARAMETER Experiment Name: At_100uM_ABA_Mutants_cDNA_P Parameter: Timepoint (hr) Value: 6
  misc_feature: MA Experiment 20000117 PARAMETER Experiment Name: At_100uM_ABA_Mutants_cDNA_P Parameter: Tissue Value: Aerial
  misc_feature: MA Experiment 20000117 PARAMETER Experiment Name: At_100uM_ABA_Mutants_cDNA_P Parameter: Treatment Value: 100uM ABA vs. No Treatment
  misc_feature: MA Experiment ID: 20000166 Result: Up-regulated in Transcription
  misc_feature: MA Experiment 20000166 PARAMETER Experiment Name: At_100uM_ABA_P Parameter: Age (day) Value: 14
  misc_feature: MA Experiment 20000166 PARAMETER Experiment Name: At_100uM_ABA_P Parameter: Organism Value: A. thaliana
  misc_feature: MA Experiment 20000166 PARAMETER Experiment Name: At_100uM_ABA_P Parameter: Plant Line Value: WS
  misc_feature: MA Experiment 20000166 PARAMETER Experiment Name: At_100uM_ABA_P Parameter: Timepoint (hr) Value: 1
  misc_feature: MA Experiment 20000166 PARAMETER Experiment Name: At_100uM_ABA_P Parameter: Tissue Value: Aerial
  misc_feature: MA Experiment 20000166 PARAMETER Experiment Name: At_100uM_ABA_P Parameter: Treatment Value: 100uM ABA vs. No Treatment
  misc_feature: MA Experiment ID: 20000169 Result: Up-regulated in Transcription
  misc_feature: MA Experiment 20000169 PARAMETER Experiment Name: At_100uM_ABA_P Parameter: Age (day) Value: 14
  misc_feature: MA Experiment 20000169 PARAMETER Experiment Name: At_100uM_ABA_P Parameter: Organism Value: A. thaliana
  misc_feature: MA Experiment 20000169 PARAMETER Experiment Name: At_100uM_ABA_P Parameter: Plant Line Value: WS
  misc_feature: MA Experiment 20000169 PARAMETER Experiment Name: At_100uM_ABA_P Parameter: Timepoint (hr) Value: 6
  misc_feature: MA Experiment 20000169 PARAMETER Experiment Name: At_100uM_ABA_P Parameter: Tissue Value: Aerial
  misc_feature: MA Experiment 20000169 PARAMETER Experiment Name: At_100uM_ABA_P Parameter: Treatment Value: 100uM ABA vs. No Treatment
  misc_feature: MA Experiment ID: 20000179 Result: Up-regulated in Transcription
  misc_feature: MA Experiment 20000179 PARAMETER Experiment Name: At_Germinating_Seeds_P Parameter: Age (hr) Value: 6 vs. 0
  misc_feature: MA Experiment 20000179 PARAMETER Experiment Name: At_Germinating_Seeds_P Parameter: Tissue Value: Germinating Seeds
  misc_feature: MA Experiment ID: 20000182 Result: Up-regulated in Transcription
  misc_feature: MA Experiment 20000182 PARAMETER Experiment Name: At_2mM_SA_P Parameter: Age (day) Value: 14
  misc_feature: MA Experiment 20000182 PARAMETER Experiment Name: At_2mM_SA_P Parameter: Organism Value: A. thaliana
  misc_feature: MA Experiment 20000182 PARAMETER Experiment Name: At_2mM_SA_P Parameter: Plant Line Value: WS
  misc_feature: MA Experiment 20000182 PARAMETER Experiment Name: At_2mM_SA_P Parameter: Timepoint (hr) Value: 6
  misc_feature: MA Experiment 20000182 PARAMETER Experiment Name: At_2mM_SA_P Parameter: Tissue Value: Aerial
  misc_feature: MA Experiment 20000182 PARAMETER Experiment Name: At_2mM_SA_P Parameter: Treatment Value: 2mM SA vs. No Treatment
  misc_feature: MA Experiment ID: 20000224 Result: Down-regulated in Transcription
  misc_feature: MA Experiment ID: 20000265 Result: Down-regulated in Transcription
  misc_feature: MA Experiment 20000265 PARAMETER Experiment Name: At_Open_Flower_P Parameter: Age (day) Value: 21
  misc_feature: MA Experiment 20000265 PARAMETER Experiment Name: At_Open_Flower_P Parameter: Plant Line Value: WS
  misc_feature: MA Experiment 20000265 PARAMETER Experiment Name: At_Open_Flower_P Parameter: Tissue Value: Closed Flower vs. Whole Plant
  misc_feature: MA Experiment ID: 20000267 Result: Up-regulated in Transcription
  misc_feature: MA Experiment 20000267 PARAMETER Experiment Name: At_Drought_P Parameter: Age (day) Value: 7
  misc_feature: MA Experiment 20000267 PARAMETER Experiment Name: At_Drought_P Parameter: Organism Value: A. thaliana
  misc_feature: MA Experiment 20000267 PARAMETER Experiment Name: At_Drought_P Parameter: Plant Line Value: WS
  misc_feature: MA Experiment 20000267 PARAMETER Experiment Name: At_Drought_P Parameter: Timepoint (hr) Value: 6
  misc_feature: MA Experiment 20000267 PARAMETER Experiment Name: At_Drought_P Parameter: Tissue Value: Whole Plant
  misc_feature: MA Experiment 20000267 PARAMETER Experiment Name: At_Drought_P Parameter: Treatment Value: Drought vs. No Drought
  misc_feature: MA Experiment ID: 20000436 Result: Up-regulated in Transcription
  misc_feature: MA Experiment 20000436 PARAMETER Experiment Name: At_Drought_P Parameter: Age (day) Value: 7
  misc_feature: MA Experiment 20000436 PARAMETER Experiment Name: At_Drought_P Parameter: Organism Value: A. thaliana
  misc_feature: MA Experiment 20000436 PARAMETER Experiment Name: At_Drought_P Parameter: Plant Line Value: WS
  misc_feature: MA Experiment 20000436 PARAMETER Experiment Name: At_Drought_P Parameter: Timepoint (hr) Value: 12
  misc_feature: MA Experiment 20000436 PARAMETER Experiment Name: At_Drought_P Parameter: Tissue Value: Whole Plant
  misc_feature: MA Experiment 20000436 PARAMETER Experiment Name: At_Drought_P Parameter: Treatment Value: Drought vs. No Drought
  misc_feature: MA Experiment ID: 20000437 Result: Up-regulated in Transcription
  misc_feature: MA Experiment 20000437 PARAMETER Experiment Name: At_Drought_P Parameter: Age (day) Value: 8
  misc_feature: MA Experiment 20000437 PARAMETER Experiment Name: At_Drought_P Parameter: Organism Value: A. thaliana
  misc_feature: MA Experiment 20000437 PARAMETER Experiment Name: At_Drought_P Parameter: Plant Line Value: WS
  misc_feature: MA Experiment 20000437 PARAMETER Experiment Name: At_Drought_P Parameter: Timepoint (hr) Value: 24
  misc_feature: MA Experiment 20000437 PARAMETER Experiment Name: At_Drought_P Parameter: Tissue Value: Whole Plant
  misc_feature: MA Experiment 20000437 PARAMETER Experiment Name: At_Drought_P Parameter: Treatment Value: Drought vs. No Drought
  misc_feature: MA Experiment ID: 20000453 Result: Up-regulated in Transcription
  misc_feature: MA Experiment 20000453 PARAMETER Experiment Name: At_100uM_ABA_P Parameter: Age (day) Value: 15
  misc_feature: MA Experiment 20000453 PARAMETER Experiment Name: At_100uM_ABA_P Parameter: Organism Value: A. thaliana
  misc_feature: MA Experiment 20000453 PARAMETER Experiment Name: At_100uM_ABA_P Parameter: Plant Line Value: WS
  misc_feature: MA Experiment 20000453 PARAMETER Experiment Name: At_100uM_ABA_P Parameter: Timepoint (hr) Value: 24
  misc_feature: MA Experiment 20000453 PARAMETER Experiment Name: At_100uM_ABA_P Parameter: Tissue Value: Aerial
  misc_feature: MA Experiment 20000453 PARAMETER Experiment Name: At_100uM_ABA_P Parameter: Treatment Value: 100uM ABA vs. No Treatment
  misc_feature: MA Experiment ID: 20001554 Result: Up-regulated in Transcription
  misc_feature: MA Experiment 20001554 PARAMETER Experiment Name: At_Drought_Soil_Dry_P Parameter: Age (day) Value: 21
  misc_feature: MA Experiment 20001554 PARAMETER Experiment Name: At_Drought_Soil_Dry_P Parameter: Organism Value: A. thaliana
  misc_feature: MA Experiment 20001554 PARAMETER Experiment Name: At_Drought_Soil_Dry_P Parameter: Plant Line Value: WS
  misc_feature: MA Experiment 20001554 PARAMETER Experiment Name: At_Drought_Soil_Dry_P Parameter: Post Timepoint (hr) Value: None
  misc_feature: MA Experiment 20001554 PARAMETER Experiment Name: At_Drought_Soil_Dry_P Parameter: Post-Treatment Value: None
  misc_feature: MA Experiment 20001554 PARAMETER Experiment Name: At_Drought_Soil_Dry_P Parameter: Timepoint (day) Value: 7
  misc_feature: MA Experiment 20001554 PARAMETER Experiment Name: At_Drought_Soil_Dry_P Parameter: Treatment Value: Drought vs. No Drought
  misc_feature: MA Experiment ID: 20001555 Result: Up-regulated in Transcription
  misc_feature: MA Experiment 20001555 PARAMETER Experiment Name: At_Drought_Soil_Dry_P Parameter: Age (day) Value: 24
  misc_feature: MA Experiment 20001555 PARAMETER Experiment Name: At_Drought_Soil_Dry_P Parameter: Organism Value: A. thaliana
  misc_feature: MA Experiment 20001555 PARAMETER Experiment Name: At_Drought_Soil_Dry_P Parameter: Plant Line Value: WS
  misc_feature: MA Experiment 20001555 PARAMETER Experiment Name: At_Drought_Soil_Dry_P Parameter: Post Timepoint (hr) Value: None
  misc_feature: MA Experiment 20001555 PARAMETER Experiment Name: At_Drought_Soil_Dry_P Parameter: Post-Treatment Value: None
  misc_feature: MA Experiment 20001555 PARAMETER Experiment Name: At_Drought_Soil_Dry_P Parameter: Timepoint (day) Value: 10
  misc_feature: MA Experiment 20001555 PARAMETER Experiment Name: At_Drought_Soil_Dry_P Parameter: Treatment Value: Drought vs. No Drought
  misc_feature: MA Experiment ID: 20001904 Result: Up-regulated in Transcription
  misc_feature: MA Experiment 20001904 PARAMETER Experiment Name: At_Drought_Reproduction_P Parameter: Age (day) Value: 37
  misc_feature: MA Experiment 20001904 PARAMETER Experiment Name: At_Drought_Reproduction_P Parameter: Organism Value: A. thaliana
  misc_feature: MA Experiment 20001904 PARAMETER Experiment Name: At_Drought_Reproduction_P Parameter: Plant Line Value: WS
  misc_feature: MA Experiment 20001904 PARAMETER Experiment Name: At_Drought_Reproduction_P Parameter: Timepoint (day) Value: 7
  misc_feature: MA Experiment 20001904 PARAMETER Experiment Name: At_Drought_Reproduction_P Parameter: Tissue Value: Rosettes
  misc_feature: MA Experiment 20001904 PARAMETER Experiment Name: At_Drought_Reproduction_P Parameter: Treatment Value: Drought vs. No Drought
  misc_feature: MA Experiment ID: 20001905 Result: Up-regulated in Transcription
  misc_feature: MA Experiment 20001905 PARAMETER Experiment Name: At_Drought_Reproduction_P Parameter: Age (day) Value: 40
  misc_feature: MA Experiment 20001905 PARAMETER Experiment Name: At_Drought_Reproduction_P Parameter: Organism Value: A. thaliana
  misc_feature: MA Experiment 20001905 PARAMETER Experiment Name: At_Drought_Reproduction_P Parameter: Plant Line Value: WS
  misc_feature: MA Experiment 20001905 PARAMETER Experiment Name: At_Drought_Reproduction_P Parameter: Timepoint (day) Value: 10
  misc_feature: MA Experiment 20001905 PARAMETER Experiment Name: At_Drought_Reproduction_P Parameter: Tissue Value: Rosettes
  misc_feature: MA Experiment 20001905 PARAMETER Experiment Name: At_Drought_Reproduction_P Parameter: Treatment Value: Drought vs. No Drought
  misc_feature: MA Experiment ID: 20001911 Result: Up-regulated in Transcription
  misc_feature: MA Experiment 20001911 PARAMETER Experiment Name: At_Drought_Reproduction_P Parameter: Age (day) Value: 40
  misc_feature: MA Experiment 20001911 PARAMETER Experiment Name: At_Drought_Reproduction_P Parameter: Organism Value: A. thaliana
  misc_feature: MA Experiment 20001911 PARAMETER Experiment Name: At_Drought_Reproduction_P Parameter: Plant Line Value: WS
  misc_feature: MA Experiment 20001911 PARAMETER Experiment Name: At_Drought_Reproduction_P Parameter: Timepoint (day) Value: 10
  misc_feature: MA Experiment 20001911 PARAMETER Experiment Name: At_Drought_Reproduction_P Parameter: Tissue Value: Flowers
  misc_feature: MA Experiment 20001911 PARAMETER Experiment Name: At_Drought_Reproduction_P Parameter: Treatment Value: Drought vs. No Drought
aaaaaaaaaaaaaaaaaaaaaacacaaactgtgaatcgttgtttgttaattctctttaaaatcgccagaagaaagagatctccgttttctacagaagaaaagcaagagagtaagaatgggatcggaacaaaacgatagcacaagcttcacgcaatcgcaagcttcagagccaaagctatgtgttaaaggatgtggtttctttggatcaccatcaaacatggatctctgttctaaatgttacagaggcatttgtgctgaggaagctcaaacagcagttgctaaagctgctgttgaaaaatctttcaagccttctcctcctcgtagtctcttcatagcagaacctcctgctgttgttgtggaacccaaacccgaaaaggcggcagttgttgttgtctcggccgagccatcttcctcggcggttcctgaggcgaacgagccatcgagacctgcacgaaccaaccggtgtttgtgttgtaacaagaaggttgggatcatggggtttaagtgcaaatgcgggagcactttctgcggcgaacatcggtacccggagactcatgattgcagctttgatttcaaagaagttggacgtggagagattgccaaagctaatcctgtggttaaggctgataaaattcaaaggttctgaaatatggaagttttttctaagtattttggtggtaattactcatttgtatttgaaccgatttgggggttgtcttggatggttttaatggattgtttccaaagggatagaggatgatgaatttggttccgtaataaagtgaatcgatgaagtttgttc

SEQ ID NO: 108291 - protein, 176 aa, Arabidopsis thaliana; identical to SEQ ID NO: 101884
  peptide (1)..(176): Ceres Seq. ID no. 13653760
  misc_feature (117)..(157): Pfam Name: AN1-like Zinc finger Pfam Description: AN1-like Zinc finger
  misc_feature (1)..(176): Homolog of NCBI NO: 15235819 NR Description: zinc finger -related protein [Arabidopsis
  misc_feature (1)..(175): Homolog of NCBI NO: 15234402 NR Description: expressed protein [Arabidopsis thaliana]
  misc_feature (1)..(175): Homolog of NCBI NO: 8778645 NR Description: F5O11.17 [Arabidopsis thaliana]
  misc_feature (1)..(175): Homolog of NCBI NO: 15221329 NR Description: expressed protein [Arabidopsis thaliana]
  misc_feature (20)..(175): Homolog of NCBI NO: 15231686 NR Description: zinc finger - like protein [Arabidopsis thaliana]
  misc_feature (13)..(175): Homolog of NCBI NO: 15225894 NR Description: zinc finger protein -related [Arabidopsis
  misc_feature (20)..(175): Homolog of NCBI NO: 18404102 NR Description: expressed protein [Arabidopsis thaliana]
  misc_feature (20)..(175): Homolog of NCBI NO: 14596167 NR Description: zinc finger-like protein [Arabidopsis thaliana]
  misc_feature (6)..(175): Homolog of NCBI NO: 18403408 NR Description: expressed protein [Arabidopsis thaliana]
  misc_feature (6)..(175): Homolog of NCBI NO: 25082726 NR Description: expressed protein [Arabidopsis thaliana]

SEQ ID NO: 108292 - protein, 142 aa, Arabidopsis thaliana; identical to SEQ ID NO: 101885
  peptide (1)..(142): Ceres Seq. ID no. 13653761
  misc_feature (83)..(123): Pfam Name: AN1-like Zinc finger Pfam Description: AN1-like Zinc finger
  misc_feature (1)..(142): Homolog of NCBI NO: 15235819 NR Description: zinc finger -related protein [Arabidopsis
  misc_feature (1)..(141): Homolog of NCBI NO: 15234402 NR Description: expressed protein [Arabidopsis thaliana]
  misc_feature (1)..(141): Homolog of NCBI NO: 8778645 NR Description: F5O11.17 [Arabidopsis thaliana]
  misc_feature (1)..(141): Homolog of NCBI NO: 15221329 NR Description: expressed protein [Arabidopsis thaliana]
  misc_feature (1)..(141): Homolog of NCBI NO: 15231686 NR Description: zinc finger - like protein [Arabidopsis thaliana]
  misc_feature (1)..(141): Homolog of NCBI NO: 15225894 NR Description: zinc finger protein -related [Arabidopsis
  misc_feature (1)..(141): Homolog of NCBI NO: 18404102 NR Description: expressed protein [Arabidopsis thaliana]
  misc_feature (1)..(141): Homolog of NCBI NO: 14596167 NR Description: zinc finger-like protein [Arabidopsis thaliana]
  misc_feature (1)..(141): Homolog of NCBI NO: 18403408 NR Description: expressed protein [Arabidopsis thaliana]
  misc_feature (1)..(141): Homolog of NCBI NO: 25082726 NR Description: expressed protein [Arabidopsis thaliana]

SEQ ID NO: 108293 - DNA, 1055 bp, Arabidopsis thaliana
  misc_feature (1)..(1055): Ceres Seq. ID no. 13653766
  misc_feature: MA Experiment ID: 20000184 Result: Down-regulated in Transcription
  misc_feature: MA Experiment 20000184 PARAMETER Experiment Name: At_Shoots__P Parameter: Age (day) Value: 7
  misc_feature: MA Experiment 20000184 PARAMETER Experiment Name: At_Shoots__P Parameter: Tissue Value: Shoots vs. Whole Plant
  misc_feature: MA Experiment ID: 20000185 Result: Down-regulated in Transcription
  misc_feature: MA Experiment 20000185 PARAMETER Experiment Name: At_Roots__P Parameter: Age (day) Value: 7 vs. 21
  misc_feature: MA Experiment 20000185 PARAMETER Experiment Name: At_Roots__P Parameter: Organism Value: A. thaliana
  misc_feature: MA Experiment 20000185 PARAMETER Experiment Name: At_Roots__P Parameter: Tissue Value: Roots vs. Whole Plant
  misc_feature: MA Experiment ID: 20000227 Result: Up-regulated in Transcription
  misc_feature: MA Experiment 20000227 PARAMETER Experiment Name: At_Root-Tips-vs-Tops_P Parameter: Tissue Value: Root Tips vs. Root Tops
  misc_feature: MA Experiment ID: 20000234 Result: Down-regulated in Transcription
  misc_feature: MA Experiment 20000234 PARAMETER Experiment Name: At_Siliques_P Parameter: Age (day) Value: 21
  misc_feature: MA Experiment 20000234 PARAMETER Experiment Name: At_Siliques_P Parameter: Organism Value: A. thaliana
  misc_feature: MA Experiment 20000234 PARAMETER Experiment Name: At_Siliques_P Parameter: Plant Line Value: WS
  misc_feature: MA Experiment 20000234 PARAMETER Experiment Name: At_Siliques_P Parameter: Tissue Value: Less Than 5mm Siliques vs. Whole Plant
  misc_feature: MA Experiment ID: 20000235 Result: Down-regulated in Transcription
  misc_feature: MA Experiment 20000235 PARAMETER Experiment Name: At_Siliques_P Parameter: Age (day) Value: 21
  misc_feature: MA Experiment 20000235 PARAMETER Experiment Name: At_Siliques_P Parameter: Organism Value: A. thaliana
  misc_feature: MA Experiment 20000235 PARAMETER Experiment Name: At_Siliques_P Parameter: Plant Line Value: WS
  misc_feature: MA Experiment 20000235 PARAMETER Experiment Name: At_Siliques_P Parameter: Tissue Value: 5-10mm Siliques vs. Whole Plant
  misc_feature: MA Experiment ID: 20000264 Result: Down-regulated in Transcription
  misc_feature: MA Experiment 20000264 PARAMETER Experiment Name: At_Open_Flower_P Parameter: Age (day) Value: 21
  misc_feature: MA Experiment 20000264 PARAMETER Experiment Name: At_Open_Flower_P Parameter: Plant Line Value: WS
  misc_feature: MA Experiment 20000264 PARAMETER Experiment Name: At_Open_Flower_P Parameter: Tissue Value: Open Flower vs. Whole Plant
  misc_feature: MA Experiment ID: 20000265 Result: Down-regulated in Transcription
  misc_feature: MA Experiment 20000265 PARAMETER Experiment Name: At_Open_Flower_P Parameter: Age (day) Value: 21
  misc_feature: MA Experiment 20000265 PARAMETER Experiment Name: At_Open_Flower_P Parameter: Plant Line Value: WS
  misc_feature: MA Experiment 20000265 PARAMETER Experiment Name: At_Open_Flower_P Parameter: Tissue Value: Closed Flower vs. Whole Plant
  misc_feature: MA Experiment ID: 20000286 Result: Down-regulated in Transcription
  misc_feature: MA Experiment 20000286 PARAMETER Experiment Name: At_Open_Flower_P Parameter: Age (day) Value: 21
  misc_feature: MA Experiment 20000286 PARAMETER Experiment Name: At_Open_Flower_P Parameter: Plant Line Value: WS
  misc_feature: MA Experiment 20000286 PARAMETER Experiment Name: At_Open_Flower_P Parameter: Tissue Value: Half Open vs. Whole Plant
  misc_feature: MA Experiment ID: 20000438 Result: Down-regulated in Transcription
  misc_feature: MA Experiment 20000438 PARAMETER Experiment Name: At_Shoots__P Parameter: Age (day) Value: 14
  misc_feature: MA Experiment 20000438 PARAMETER Experiment Name: At_Shoots__P Parameter: Tissue Value: Shoots vs. Whole Plant
  misc_feature: MA Experiment ID: 20000439 Result: Down-regulated in Transcription
  misc_feature: MA Experiment 20000439 PARAMETER Experiment Name: At_Roots__P Parameter: Age (day) Value: 14 vs. 21
  misc_feature: MA Experiment 20000439 PARAMETER Experiment Name: At_Roots__P Parameter: Organism Value: A. thaliana
  misc_feature: MA Experiment 20000439 PARAMETER Experiment Name: At_Roots__P Parameter: Tissue Value: Roots vs. Whole Plant
  misc_feature: MA Experiment ID: 20000495 Result: Down-regulated in Transcription
  misc_feature: MA Experiment 20000495 PARAMETER Experiment Name: At_Guard_Cells_P Parameter: Harvest Date Value: 8/2/2002
  misc_feature: MA Experiment 20000495 PARAMETER Experiment Name: At_Guard_Cells_P Parameter: Organism Value: A. thaliana
  misc_feature: MA Experiment 20000495 PARAMETER Experiment Name: At_Guard_Cells_P Parameter: Tissue Value: Guard Cells vs. Leaves
  misc_feature: MA Experiment ID: 20000573 Result: Up-regulated in Transcription
  misc_feature: MA Experiment 20000573 PARAMETER Experiment Name: At_100uM_ABA_Mutants__P Parameter: Organism Value: A. thaliana
  misc_feature: MA Experiment 20000573 PARAMETER Experiment Name: At_100uM_ABA_Mutants__P Parameter: Plant Line Value: CS22 vs. Ler wt
  misc_feature: MA Experiment 20000573 PARAMETER Experiment Name: At_100uM_ABA_Mutants__P Parameter: Timepoint (hr) Value: N/A
  misc_feature: MA Experiment 20000573 PARAMETER Experiment Name: At_100uM_ABA_Mutants__P Parameter: Tissue Value: Whole Plant
  misc_feature: MA Experiment 20000573 PARAMETER Experiment Name: At_100uM_ABA_Mutants__P Parameter: Treatment Value: None
  misc_feature: MA Experiment ID: 20000794 Result: Down-regulated in Transcription
  misc_feature: MA Experiment 20000794 PARAMETER Experiment Name: At_Petals_P Parameter: Age (day) Value: 23-25 days
  misc_feature: MA Experiment 20000794 PARAMETER Experiment Name: At_Petals_P Parameter: Plant Line Value: WS
  misc_feature: MA Experiment 20000794 PARAMETER Experiment Name: At_Petals_P Parameter: Tissue Value: Petals vs. Whole plant
  misc_feature: MA Experiment ID: 20001450 Result: Down-regulated in Transcription
  misc_feature: MA Experiment 20001450 PARAMETER Experiment Name: At_Far-red-induction_P Parameter: Age (day) Value: 7
  misc_feature: MA Experiment 20001450 PARAMETER Experiment Name: At_Far-red-induction_P Parameter: Light Value: Far-red vs. White
  misc_feature: MA Experiment 20001450 PARAMETER Experiment Name: At_Far-red-induction_P Parameter: Organism Value: A. thaliana
  misc_feature: MA Experiment 20001450 PARAMETER Experiment Name: At_Far-red-induction_P Parameter: Plant Line Value: Columbia
  misc_feature: MA Experiment 20001450 PARAMETER Experiment Name: At_Far-red-induction_P Parameter: Timepoint (hr) Value: 8
  misc_feature: MA Experiment 20001450 PARAMETER Experiment Name: At_Far-red-induction_P Parameter: Tissue Value: Whole Plant
atgggaatatatggagtgatgacagggaaaaaaggaaagagtgggtttggatctgcttctactgctgaagatgttactcaagccattgatgccagtcatctcactgccatcatcacaggtggaacaagtgggattggattggaggcagctagagtgttagcaatgagaggagctcatgtcatcattgccgcaagaaacccaaaagctgctaatgagtctaaagagatgattcttcagatgaaccctaatgctcgcgtcgactatctccagatcgatgtctcttccatcaaatcagtcagatccttcgttgatcagtttcttgcccttaatgttcctctcaacattctcataaacaatgcaggtgttatgttttgtcctttcaagctcaccgaagatgggattgaatcacaattcgcaacaaaccacattggtcattttctgttgacgaatctgcttctggacaaaatgaaaagtaccgcaagagaaagtggagtccaaggaaggattgtgaatctgtcatctattgctcatacttatacttactctgaaggtatcaagttccaaggcatcaatgaccctgctggatattcggagagaagggcttatggacagtccaaactctcaaacttgttgcactccaatgcactctctcgtagactacaggaagaaggtgtgaacatcactataaattcggtgcaccctggtcttgtcaccactaatctctttcgctactccggttttagcatgaaggtcttcagggctatgactttcctcttttggaaaaatatacctcagggagcagcaacaacatgctacgttgcacttcatccagatctcgaaggcgtcaccggaaagtatttcggcgactgtaacatcgttgctccgagcaaatttgctaccaacaattctctcgccgataaactttgggatttcagtgtctttctcatcgattctatctctaaataatctatcatcatcaagacaaattcttagacattcaaaatttatttatccttcttgatattgttacattaatgccatatctttttcaccac

SEQ ID NO: 108294 - protein, 321 aa, Arabidopsis thaliana; identical to SEQ ID NO: 102392
  peptide (1)..(321): Ceres Seq. ID no. 13653767
  misc_feature (1)..(321): Homolog of NCBI NO: 15224306 NR Description: short-chain dehydrogenase/reductase family [Arabidopsis thaliana] >gi|7485438|pir||T02520 probable
  misc_feature (1)..(319): Homolog of NCBI NO: 629592 NR Description: hypothetical protein - rape
  misc_feature (1)..(321): Homolog of NCBI NO: 18413950 NR Description: short-chain dehydrogenase/reductase family
  misc_feature (1)..(321): Homolog of NCBI NO: 21554820 NR Description: putativepod-specific dehydrogenase SAC25
  misc_feature (1)..(321): Homolog of NCBI NO: 20260302 NR Description: putative protein [Arabidopsis thaliana]
  misc_feature (105)..(321): Homolog of NCBI NO: 11250521 NR Description: hypothetical protein T22P11.130 - Arabidopsis >gi|7413643|emb|CAB85991.1| putative protein [Arabidopsis
  misc_feature (1)..(128): Homolog of NCBI NO: 11250521 NR Description: hypothetical protein T22P11.130 - Arabidopsis >gi|7413643|emb|CAB85991.1| putative protein [Arabidopsis
  misc_feature (1)..(321): Homolog of NCBI NO: 34895876 NR Description: P0009G03.18 [Oryza sativa (japonica
  misc_feature (9)..(318): Homolog of NCBI NO: 23297050 NR Description: unknown protein [Arabidopsis thaliana]
  misc_feature (9)..(320): Homolog of NCBI NO: 30686197 NR Description: short-chain dehydrogenase/reductase family

SEQ ID NO: 108295 - protein, 315 aa, Arabidopsis thaliana; identical to SEQ ID NO: 102393
  peptide (1)..(315): Ceres Seq. ID no. 13653768
  misc_feature (1)..(315): Homolog of NCBI NO: 15224306 NR Description: short-chain dehydrogenase/reductase family [Arabidopsis thaliana] >gi|7485438|pir||T02520 probable
  misc_feature (1)..(313): Homolog of NCBI NO: 629592 NR Description: hypothetical protein - rape
  misc_feature (1)..(315): Homolog of NCBI NO: 18413950 NR Description: short-chain dehydrogenase/reductase family
  misc_feature (1)..(315): Homolog of NCBI NO: 21554820 NR Description: putativepod-specific dehydrogenase SAC25
  misc_feature (1)..(315): Homolog of NCBI NO: 20260302 NR Description: putative protein [Arabidopsis thaliana]
  misc_feature (99)..(315): Homolog of NCBI NO: 11250521 NR Description: hypothetical protein T22P11.130 - Arabidopsis >gi|7413643|emb|CAB85991.1| putative protein [Arabidopsis
  misc_feature (1)..(122): Homolog of NCBI NO: 11250521 NR Description: hypothetical protein T22P11.130 - Arabidopsis >gi|7413643|emb|CAB85991.1| putative protein [Arabidopsis
  misc_feature (1)..(315): Homolog of NCBI NO: 34895876 NR Description: P0009G03.18 [Oryza sativa (japonica
  misc_feature (3)..(312): Homolog of NCBI NO: 23297050 NR Description: unknown protein [Arabidopsis thaliana]
  misc_feature (3)..(314): Homolog of NCBI NO: 30686197 NR Description: short-chain dehydrogenase/reductase family

SEQ ID NO: 108296 - protein, 267 aa, Arabidopsis thaliana
  peptide (1)..(267): Ceres Seq. ID no. 13653769
  misc_feature (1)..(267): Homolog of NCBI NO: 15224306 NR Description: short-chain dehydrogenase/reductase family [Arabidopsis thaliana] >gi|7485438|pir||T02520 probable
  misc_feature (1)..(265): Homolog of NCBI NO: 629592 NR Description: hypothetical protein - rape
  misc_feature (1)..(267): Homolog of NCBI NO: 18413950 NR Description: short-chain dehydrogenase/reductase family
  misc_feature (1)..(267): Homolog of NCBI NO: 21554820 NR Description: putativepod-specific dehydrogenase SAC25
  misc_feature (1)..(267): Homolog of NCBI NO: 20260302 NR Description: putative protein [Arabidopsis thaliana]
  misc_feature (51)..(267): Homolog of NCBI NO: 11250521 NR Description: hypothetical protein T22P11.130 - Arabidopsis >gi|7413643|emb|CAB85991.1| putative protein [Arabidopsis
  misc_feature (1)..(74): Homolog of NCBI NO: 11250521 NR Description: hypothetical protein T22P11.130 - Arabidopsis >gi|7413643|emb|CAB85991.1| putative protein [Arabidopsis
  misc_feature (1)..(267): Homolog of NCBI NO: 34895876 NR Description: P0009G03.18 [Oryza sativa (japonica
  misc_feature (1)..(264): Homolog of NCBI NO: 23297050 NR Description: unknown protein [Arabidopsis thaliana]
  misc_feature (1)..(266): Homolog of NCBI NO: 30686197 NR Description: short-chain dehydrogenase/reductase family
MRGAHVIIAARNPKAANESKEMILQMNPNARVDYLQIDVSSIKSVRSFVDQFLALNVPLNILINNAGVMFCPFKLTEDGIESQFATNHIGHFLLTNLLLDKMKSTARESGVQGRIVNLSSIAHTYTYSEGIKFQGINDPAGYSERRAYGQSKLSNLLHSNALSRRLQEEGVNITINSVHPGLVTTNLFRYSGFSMKVFRAMTFLFWKNIPQGAATTCYVALHPDLEGVTGKYFGDCNIVAPSKFATNNSLADKLWDFSVFLIDSISK

SEQ ID NO: 108297 - DNA, 1880 bp, Arabidopsis thaliana
  misc_feature (1)..(1880): Ceres Seq. ID no. 13653774
  misc_feature: MA Experiment ID: 20000180 Result: Up-regulated in Transcription
  misc_feature: MA Experiment 20000180 PARAMETER Experiment Name: At_Germinating_Seeds_P Parameter: Age (hr) Value: 24 vs. 0
  misc_feature: MA Experiment 20000180 PARAMETER Experiment Name: At_Germinating_Seeds_P Parameter: Tissue Value: Germinating Seeds
  misc_feature: MA Experiment ID: 20000184 Result: Up-regulated in Transcription
  misc_feature: MA Experiment 20000184 PARAMETER Experiment Name: At_Shoots__P Parameter: Age (day) Value: 7
  misc_feature: MA Experiment 20000184 PARAMETER Experiment Name: At_Shoots__P Parameter: Tissue Value: Shoots vs. Whole Plant
  misc_feature: MA Experiment ID: 20000185 Result: Down-regulated in Transcription
  misc_feature: MA Experiment 20000185 PARAMETER Experiment Name: At_Roots__P Parameter: Age (day) Value: 7 vs. 21
  misc_feature: MA Experiment 20000185 PARAMETER Experiment Name: At_Roots__P Parameter: Organism Value: A. thaliana
  misc_feature: MA Experiment 20000185 PARAMETER Experiment Name: At_Roots__P Parameter: Tissue Value: Roots vs. Whole Plant
  misc_feature: MA Experiment ID: 20000264 Result: Up-regulated in Transcription
  misc_feature: MA Experiment 20000264 PARAMETER Experiment Name: At_Open_Flower_P Parameter: Age (day) Value: 21
  misc_feature: MA Experiment 20000264 PARAMETER Experiment Name: At_Open_Flower_P Parameter: Plant Line Value: WS
  misc_feature: MA Experiment 20000264 PARAMETER Experiment Name: At_Open_Flower_P Parameter: Tissue Value: Open Flower vs. Whole Plant
  misc_feature: MA Experiment ID: 20000265 Result: Up-regulated in Transcription
  misc_feature: MA Experiment 20000265 PARAMETER Experiment Name: At_Open_Flower_P Parameter: Age (day) Value: 21
  misc_feature: MA Experiment 20000265 PARAMETER Experiment Name: At_Open_Flower_P Parameter: Plant Line Value: WS
  misc_feature: MA Experiment 20000265 PARAMETER Experiment Name: At_Open_Flower_P Parameter: Tissue Value: Closed Flower vs. Whole Plant
  misc_feature: MA Experiment ID: 20000438 Result: Up-regulated in Transcription
  misc_feature: MA Experiment 20000438 PARAMETER Experiment Name: At_Shoots__P Parameter: Age (day) Value: 14
  misc_feature: MA Experiment 20000438 PARAMETER Experiment Name: At_Shoots__P Parameter: Tissue Value: Shoots vs. Whole Plant
  misc_feature: MA Experiment ID: 20000495 Result: Down-regulated in Transcription
  misc_feature: MA Experiment 20000495 PARAMETER Experiment Name: At_Guard_Cells_P Parameter: Harvest Date Value: 8/2/2002
  misc_feature: MA Experiment 20000495 PARAMETER Experiment Name: At_Guard_Cells_P Parameter: Organism Value: A. thaliana
  misc_feature: MA Experiment 20000495 PARAMETER Experiment Name: At_Guard_Cells_P Parameter: Tissue Value: Guard Cells vs. Leaves
  misc_feature: MA Experiment ID: 20000496 Result: Down-regulated in Transcription
  misc_feature: MA Experiment 20000496 PARAMETER Experiment Name: At_Guard_Cells_P Parameter: Harvest Date Value: 7/19/2002
  misc_feature: MA Experiment 20000496 PARAMETER Experiment Name: At_Guard_Cells_P Parameter: Organism Value: Canola
  misc_feature: MA Experiment 20000496 PARAMETER Experiment Name: At_Guard_Cells_P Parameter: Tissue Value: Guard Cells vs. Leaves
  misc_feature: MA Experiment ID: 20001248 Result: Down-regulated in Transcription
  misc_feature: MA Experiment 20001248 PARAMETER Experiment Name: At_Far-red-induction_P Parameter: Age (day) Value: 7
  misc_feature: MA Experiment 20001248 PARAMETER Experiment Name: At_Far-red-induction_P Parameter: Light Value: Far-red vs. White
  misc_feature: MA Experiment 20001248 PARAMETER Experiment Name: At_Far-red-induction_P Parameter: Organism Value: A. thaliana
  misc_feature: MA Experiment 20001248 PARAMETER Experiment Name: At_Far-red-induction_P Parameter: Plant Line Value: Columbia
  misc_feature: MA Experiment 20001248 PARAMETER Experiment Name: At_Far-red-induction_P Parameter: Timepoint (hr) Value: 4
  misc_feature: MA Experiment 20001248 PARAMETER Experiment Name: At_Far-red-induction_P Parameter: Tissue Value: Whole Plant
  misc_feature: MA Experiment ID: 20001451 Result: Down-regulated in Transcription
  misc_feature: MA Experiment 20001451 PARAMETER Experiment Name: At_Far-red-induction_P Parameter: Age (day) Value: 7
  misc_feature: MA Experiment 20001451 PARAMETER Experiment Name: At_Far-red-induction_P Parameter: Light Value: Far-red vs. White
  misc_feature: MA Experiment 20001451 PARAMETER Experiment Name: At_Far-red-induction_P Parameter: Organism Value: A. thaliana
  misc_feature: MA Experiment 20001451 PARAMETER Experiment Name: At_Far-red-induction_P Parameter: Plant Line Value: Columbia
  misc_feature: MA Experiment 20001451 PARAMETER Experiment Name: At_Far-red-induction_P Parameter: Timepoint (hr) Value: 24
  misc_feature: MA Experiment 20001451 PARAMETER Experiment Name: At_Far-red-induction_P Parameter: Tissue Value: Whole Plant
  misc_feature: MA Experiment ID: 20001557 Result: Down-regulated in Transcription
  misc_feature: MA Experiment 20001557 PARAMETER Experiment Name: At_Drought_Soil_Dry_P Parameter: Age (day) Value: 27
  misc_feature: MA Experiment 20001557 PARAMETER Experiment Name: At_Drought_Soil_Dry_P Parameter: Organism Value: A. thaliana
  misc_feature: MA Experiment 20001557 PARAMETER Experiment Name: At_Drought_Soil_Dry_P Parameter: Plant Line Value: WS
  misc_feature: MA Experiment 20001557 PARAMETER Experiment Name: At_Drought_Soil_Dry_P Parameter: Post Timepoint (hr) Value: 3
  misc_feature: MA Experiment 20001557 PARAMETER Experiment Name: At_Drought_Soil_Dry_P Parameter: Post-Treatment Value: Re-Water vs. No Drought
  misc_feature: MA Experiment 20001557 PARAMETER Experiment Name: At_Drought_Soil_Dry_P Parameter: Timepoint (day) Value: 13
  misc_feature: MA Experiment 20001557 PARAMETER Experiment Name: At_Drought_Soil_Dry_P Parameter: Treatment Value: Drought vs. No Drought
  misc_feature: MA Experiment ID: 20001558 Result: Down-regulated in Transcription
  misc_feature: MA Experiment 20001558 PARAMETER Experiment Name: At_Drought_Soil_Dry_P Parameter: Age (day) Value: 27
  misc_feature: MA Experiment 20001558 PARAMETER Experiment Name: At_Drought_Soil_Dry_P Parameter: Organism Value: A. thaliana
  misc_feature: MA Experiment 20001558 PARAMETER Experiment Name: At_Drought_Soil_Dry_P Parameter: Plant Line Value: WS
  misc_feature: MA Experiment 20001558 PARAMETER Experiment Name: At_Drought_Soil_Dry_P Parameter: Post Timepoint (hr) Value: 6
  misc_feature: MA Experiment 20001558 PARAMETER Experiment Name: At_Drought_Soil_Dry_P Parameter: Post-Treatment Value: Re-Water vs. No Drought
  misc_feature: MA Experiment 20001558 PARAMETER Experiment Name: At_Drought_Soil_Dry_P Parameter: Timepoint (day) Value: 13
  misc_feature: MA Experiment 20001558 PARAMETER Experiment Name: At_Drought_Soil_Dry_P Parameter: Treatment Value: Drought vs. No Drought
  misc_feature: MA Experiment ID: 20001560 Result: Down-regulated in Transcription
  misc_feature: MA Experiment 20001560 PARAMETER Experiment Name: At_Drought_Soil_Dry_P Parameter: Age (day) Value: 28
  misc_feature: MA Experiment 20001560 PARAMETER Experiment Name: At_Drought_Soil_Dry_P Parameter: Organism Value: A. thaliana
  misc_feature: MA Experiment 20001560 PARAMETER Experiment Name: At_Drought_Soil_Dry_P Parameter: Plant Line Value: WS
  misc_feature: MA Experiment 20001560 PARAMETER Experiment Name: At_Drought_Soil_Dry_P Parameter: Post Timepoint (hr) Value: None
  misc_feature: MA Experiment 20001560 PARAMETER Experiment Name: At_Drought_Soil_Dry_P Parameter: Post-Treatment Value: None
  misc_feature: MA Experiment 20001560 PARAMETER Experiment Name: At_Drought_Soil_Dry_P Parameter: Timepoint (day) Value: 14
  misc_feature: MA Experiment 20001560 PARAMETER Experiment Name: At_Drought_Soil_Dry_P Parameter: Treatment Value: Drought vs. No Drought
tgaaagaagaaaaaaacagagaagaagaagaaaaaatctatctccgccatgaacgcgagagctcttctttgctcttcaaatattcactctctctacacttcaaatcgtccacctgaaaaaacctcttcttctcgcagcctccgtaatctcaaaccatctccaaagtcgttacgggtatggatctacccgcgaaataggtccagtgttttccgggtattagttcggagctccgacaagagtgaaagcagtaattcgtattacgtagaaggagataaagtaagtggaaacaatgacgtcgtttctgattcgcctagctctatcgtcctcccatggtgggaagagtttccgaagcggtgggtgattgtgttactctgtttctcagcttttcttctctgcaatatggacagagtgaatatgagtatagctatacttccgatgtcagctgagtatggttggaatccagcaacagttggtctgattcagtcttctttcttctggggttaccttcttacacagatagctggtggaatttgggcagacactgtaggagggaaaagggttcttggattcggtgttatttggtggtcaatcgctacaattctcactcctgtagctgctaaactcggtcttccttacttgctcgttgttcgtgctttcatgggagttggagagggtgttgcaatgcctgctatgaataatatattgtcgaagtgggttcctgtgcaagagagaagcagatcactcgcgcttgtttacagcggaatgtaccttggatctgtcaccggtttagccttttcgcctttcttgattcatcaatttggatggccttctgtgttttattctttcgggtctcttggaactgtatggttgactctgtggctaactaaggcagagagttcaccattagaagatccaacattgctccctgaagaaagaaagctaattgcagacaactgtgctagcaaagagccagtgaagtcgatcccgtggaggctgatattgtcgaaaccaccggtttgggctctcatcagttgccacttttgtcacaactggggaacattcattctcttaacatggatgccaacttattaccatcaagtgctgaagttcaaccttatggagtcaggacttctctctgtatttccatggatgacaatggcaatatctgcaaatgccggtggatggattgccgatacacttgtcagccgaggtttctctgtcacgaatgtccgcaagtttctatgatgaaattcagataatgcaaacaatagggtttcttggaccagcgttcttcctaacacagctgaaacacatagattctcctacaatggctgttttgtgcatggcttgtagtcaggggactgatgcgttttcacagtctggtctatactctaaccatcaagacatcgctccaagatactctggagtgttacttggtttgtctaatactgctggagtacttgccggagttcttggcacagctgcgactggtcacatactacaacacggttcttgggatgacgttttcacgatttcggtcggtctttacctcgttgggaccgtcatttggaacctattttcaaccggagagaagataatcgattgatccattccgagaatagtaaatagttcggctccaagacctctcatcaggtgcaacttcacctcacgccagtctctgattatacaagtatcattgcagtctgagagctagccggaatattccttttttgccagaaaattcttcaggatctttctgctcgttgatttaggccaaacgcatatgaataatactttgtagatgaaagatatacagatgattttttgtaaataaacaaagctcacactttctcaagattactcaaaatctctcttcagct

SEQ ID NO: 108298 - protein, 398 aa, Arabidopsis thaliana
  peptide (1)..(398): Ceres Seq. ID no. 13653775
  misc_feature (104)..(398): Pfam Name: Sugar (and other) transporter Pfam Description: Sugar (and other) transporter
  misc_feature (1)..(398): Homolog of NCBI NO: 15227589 NR Description: inorganic phosphate transporter, putative
  misc_feature (1)..(398): Homolog of NCBI NO: 17064976 NR Description: putative Na+-dependent inorganic phosphate
  misc_feature (1)..(398): Homolog of NCBI NO: 30684317 NR Description: inorganic phosphate transporter, putative
  misc_feature (98)..(398): Homolog of NCBI NO: 34903342 NR Description: unnamed protein product [Oryza sativa (japonica group)] >gi|6498428|dbj|BAA87831.1| unnamed protein product
  misc_feature (13)..(398): Homolog of NCBI NO: 30678625 NR Description: expressed protein [Arabidopsis thaliana]
  misc_feature (207)..(365): Homolog of NCBI NO: 7485271 NR Description: hypothetical protein A_IG005I10.nn - Arabidopsis >gi|2252847|gb|AAB62846.1| A_IG005I10.nn gene product thaliana] >gi|6049889|gb|AAF02804.1|AF195115_24 weak similarity
  misc_feature (52)..(241): Homolog of NCBI NO: 7485271 NR Description: hypothetical protein A_IG005I10.nn - Arabidopsis >gi|2252847|gb|AAB62846.1| A_IG005I10.nn gene product thaliana] >gi|6049889|gb|AAF02804.1|AF195115_24 weak similarity
  misc_feature (347)..(393): Homolog of NCBI NO: 7485271 NR Description: hypothetical protein A_IG005I10.nn - Arabidopsis >gi|2252847|gb|AAB62846.1| A_IG005I10.nn gene product thaliana] >gi|6049889|gb|AAF02804.1|AF195115_24 weak similarity
  misc_feature (112)..(398): Homolog of NCBI NO: 34908356 NR Description: P0529H11.31 [Oryza sativa (japonica
  misc_feature (94)..(398): Homolog of NCBI NO: 17064732 NR Description: putative protein [Arabidopsis thaliana]
MNARALLCSSNIHSLYTSNRPPEKTSSSRSLRNLKPSPKSLRVWIYPRNRSSVFRVLVRSSDKSESSNSYYVEGDKVSGNNDVVSDSPSSIVLPWWEEFPKRWVIVLLCFSAFLLCNMDRVNMSIAILPMSAEYGWNPATVGLIQSSFFWGYLLTQIAGGIWADTVGGKRVLGFGVIWWSIATILTPVAAKLGLPYLLVVRAFMGVGEGVAMPAMNNILSKWVPVQERSRSLALVYSGMYLGSVTGLAFSPFLIHQFGWPSVFYSFGSLGTVWLTLWLTKAESSPLEDPTLLPEERKLIADNCASKEPVKSIPWRLILSKPPVWALISCHFCHNWGTFILLTWMPTYYHQVLKFNLMESGLLSVFPWMTMAISANAGGWIADTLVSRGFSVTNVRKFL

SEQ ID NO: 108299 - protein, 281 aa, Arabidopsis thaliana
  peptide (1)..(281): Ceres Seq. ID no. 13653776
  misc_feature (1)..(281): Pfam Name: Sugar (and other) transporter Pfam Description: Sugar (and other) transporter
  misc_feature (1)..(281): Homolog of NCBI NO: 15227589 NR Description: inorganic phosphate transporter, putative
  misc_feature (1)..(281): Homolog of NCBI NO: 17064976 NR Description: putative Na+-dependent inorganic phosphate
  misc_feature (1)..(281): Homolog of NCBI NO: 30684317 NR Description: inorganic phosphate transporter, putative
  misc_feature (1)..(281): Homolog of NCBI NO: 34903342 NR Description: unnamed protein product [Oryza sativa (japonica group)] >gi|6498428|dbj|BAA87831.1| unnamed protein product
  misc_feature (1)..(281): Homolog of NCBI NO: 30678625 NR Description: expressed protein [Arabidopsis thaliana]
  misc_feature (90)..(248): Homolog of NCBI NO: 7485271 NR Description: hypothetical protein A_IG005I10.nn - Arabidopsis >gi|2252847|gb|AAB62846.1| A_IG005I10.nn gene product thaliana] >gi|6049889|gb|AAF02804.1|AF195115_24 weak similarity
  misc_feature (1)..(124): Homolog of NCBI NO: 7485271 NR Description: hypothetical protein A_IG005I10.nn - Arabidopsis >gi|2252847|gb|AAB62846.1| A_IG005I10.nn gene product thaliana] >gi|6049889|gb|AAF02804.1|AF195115_24 weak similarity
  misc_feature (230)..(276): Homolog of NCBI NO: 7485271 NR Description: hypothetical protein A_IG005I10.nn - Arabidopsis >gi|2252847|gb|AAB62846.1| A_IG005I10.nn gene product thaliana] >gi|6049889|gb|AAF02804.1|AF195115_24 weak similarity
  misc_feature (1)..(281): Homolog of NCBI NO: 34908356 NR Description: P0529H11.31 [Oryza sativa (japonica
  misc_feature (1)..(281): Homolog of NCBI NO: 17064732 NR Description: putative protein [Arabidopsis thaliana]
MDRVNMSIAILPMSAEYGWNPATVGLIQSSFFWGYLLTQIAGGIWADTVGGKRVLGFGVIWWSIATILTPVAAKLGLPYLLVVRAFMGVGEGVAMPAMNNILSKWVPVQERSRSLALVYSGMYLGSVTGLAFSPFLIHQFGWPSVFYSFGSLGTVWLTLWLTKAESSPLEDPTLLPEERKLIADNCASKEPVKSIPWRLILSKPPVWALISCHFCHNWGTFILLTWMPTYYHQVLKFNLMESGLLSVFPWMTMAISANAGGWIADTLVSRGFSVTNVRKFL

SEQ ID NO: 108300 - protein, 276 aa, Arabidopsis thaliana
  peptide (1)..(276): Ceres Seq. ID no. 13653777
  misc_feature (1)..(276): Pfam Name: Sugar (and other) transporter Pfam Description: Sugar (and other) transporter
  misc_feature (1)..(276): Homolog of NCBI NO: 15227589 NR Description: inorganic phosphate transporter, putative
  misc_feature (1)..(276): Homolog of NCBI NO: 17064976 NR Description: putative Na+-dependent inorganic phosphate
  misc_feature (1)..(276): Homolog of NCBI NO: 30684317 NR Description: inorganic phosphate transporter, putative
  misc_feature (1)..(276): Homolog of NCBI NO: 34903342 NR Description: unnamed protein product [Oryza sativa (japonica group)] >gi|6498428|dbj|BAA87831.1| unnamed protein product
  misc_feature (1)..(276): Homolog of NCBI NO: 30678625 NR Description: expressed protein [Arabidopsis thaliana]
  misc_feature (85)..(243): Homolog of NCBI NO: 7485271 NR Description: hypothetical protein A_IG005I10.nn - Arabidopsis >gi|2252847|gb|AAB62846.1| A_IG005I10.nn gene product thaliana] >gi|6049889|gb|AAF02804.1|AF195115_24 weak similarity
  misc_feature (1)..(119): Homolog of NCBI NO: 7485271 NR Description: hypothetical protein A_IG005I10.nn - Arabidopsis >gi|2252847|gb|AAB62846.1| A_IG005I10.nn gene product thaliana] >gi|6049889|gb|AAF02804.1|AF195115_24 weak similarity
  misc_feature (225)..(271): Homolog of NCBI NO: 7485271 NR Description: hypothetical protein A_IG005I10.nn - Arabidopsis >gi|2252847|gb|AAB62846.1| A_IG005I10.nn gene product thaliana] >gi|6049889|gb|AAF02804.1|AF195115_24 weak similarity
  misc_feature (1)..(276): Homolog of NCBI NO: 34908356 NR Description: P0529H11.31 [Oryza sativa (japonica
  misc_feature (1)..(276): Homolog of NCBI NO: 17064732 NR Description: putative protein [Arabidopsis thaliana]
MSIAILPMSAEYGWNPATVGLIQSSFFWGYLLTQIAGGIWADTVGGKRVLGFGVIWWSIATILTPVAAKLGLPYLLVVRAFMGVGEGVAMPAMNNILSKWVPVQERSRSLALVYSGMYLGSVTGLAFSPFLIHQFGWPSVFYSFGSLGTVWLTLWLTKAESSPLEDPTLLPEERKLIADNCASKEPVKSIPWRLILSKPPVWALISCHFCHNWGTFILLTWMPTYYHQVLKFNLMESGLLSVFPWMTMAISANAGGWIADTLVSRGFSVTNVRKFL

SEQ ID NO: 108301 - DNA, 1125 bp, Arabidopsis thaliana
  misc_feature (1)..(1125): Ceres Seq. ID no. 13653782
  misc_feature: MA Experiment ID: 108434 Result: Up-regulated in Transcription
  misc_feature: MA Experiment 108434 PARAMETER Experiment Name: At_Root_Tips_cDNA_P Parameter: Tissue Value: Root Tips
  misc_feature: MA Experiment ID: 108435 Result: Up-regulated in Transcription
  misc_feature: MA Experiment 108435 PARAMETER Experiment Name: At_stm_Mutants_cDNA_P Parameter: Plant Line Value: wt Landsburg vs stm
  misc_feature: MA Experiment 108435 PARAMETER Experiment Name: At_stm_Mutants_cDNA_P Parameter: Tissue Value: Shoot Apical Meristem Region
  misc_feature: MA Experiment ID: 20000087 Result: Down-regulated in Transcription
  misc_feature: MA Experiment 20000087 PARAMETER Experiment Name: At_100uM_ABA_Mutants_cDNA_P Parameter: Plant Line Value: WS
  misc_feature: MA Experiment 20000087 PARAMETER Experiment Name: At_100uM_ABA_Mutants_cDNA_P Parameter: Timepoint (hr) Value: 6
  misc_feature: MA Experiment 20000087 PARAMETER Experiment Name: At_100uM_ABA_Mutants_cDNA_P Parameter: Tissue Value: Aerial
  misc_feature: MA Experiment 20000087 PARAMETER Experiment Name: At_100uM_ABA_Mutants_cDNA_P Parameter: Treatment Value: 100uM ABA vs. No Treatment
  misc_feature: MA Experiment ID: 20000089 Result: Down-regulated in Transcription
  misc_feature: MA Experiment ID: 20000111 Result: Down-regulated in Transcription
  misc_feature: MA Experiment 20000111 PARAMETER Experiment Name: At_42deg_Heat_cDNA_P Parameter: Temperature (deg C) Value: 42 vs. 22
  misc_feature: MA Experiment 20000111 PARAMETER Experiment Name: At_42deg_Heat_cDNA_P Parameter: Timepoint (hr) Value: 6
  misc_feature: MA Experiment 20000111 PARAMETER Experiment Name: At_42deg_Heat_cDNA_P Parameter: Tissue Value: Aerial
  misc_feature: MA Experiment ID: 20000234 Result: Down-regulated in Transcription
  misc_feature: MA Experiment 20000234 PARAMETER Experiment Name: At_Siliques_P Parameter: Age (day) Value: 21
  misc_feature: MA Experiment 20000234 PARAMETER Experiment Name: At_Siliques_P Parameter: Organism Value: A. thaliana
  misc_feature: MA Experiment 20000234 PARAMETER Experiment Name: At_Siliques_P Parameter: Plant Line Value: WS
  misc_feature: MA Experiment 20000234 PARAMETER Experiment Name: At_Siliques_P Parameter: Tissue Value: Less Than 5mm Siliques vs. Whole Plant
  misc_feature: MA Experiment ID: 20000235 Result: Down-regulated in Transcription
  misc_feature: MA Experiment 20000235 PARAMETER Experiment Name: At_Siliques_P Parameter: Age (day) Value: 21
  misc_feature: MA Experiment 20000235 PARAMETER Experiment Name: At_Siliques_P Parameter: Organism Value: A. thaliana
  misc_feature: MA Experiment 20000235 PARAMETER Experiment Name: At_Siliques_P Parameter: Plant Line Value: WS
  misc_feature: MA Experiment 20000235 PARAMETER Experiment Name: At_Siliques_P Parameter: Tissue Value: 5-10mm Siliques vs. Whole Plant
  misc_feature: MA Experiment ID: 20000264 Result: Down-regulated in Transcription
  misc_feature: MA Experiment 20000264 PARAMETER Experiment Name: At_Open_Flower_P Parameter: Age (day) Value: 21
  misc_feature: MA Experiment 20000264 PARAMETER Experiment Name: At_Open_Flower_P Parameter: Plant Line Value: WS
  misc_feature: MA Experiment 20000264 PARAMETER Experiment Name: At_Open_Flower_P Parameter: Tissue Value: Open Flower vs. Whole Plant
  misc_feature: MA Experiment ID: 20000265 Result: Down-regulated in Transcription
  misc_feature: MA Experiment 20000265 PARAMETER Experiment Name: At_Open_Flower_P Parameter: Age (day) Value: 21
  misc_feature: MA Experiment 20000265 PARAMETER Experiment Name: At_Open_Flower_P Parameter: Plant Line Value: WS
  misc_feature: MA Experiment 20000265 PARAMETER Experiment Name: At_Open_Flower_P Parameter: Tissue Value: Closed Flower vs. Whole Plant
  misc_feature: MA Experiment ID: 20000286 Result: Down-regulated in Transcription
  misc_feature: MA Experiment 20000286 PARAMETER Experiment Name: At_Open_Flower_P Parameter: Age (day) Value: 21
  misc_feature: MA Experiment 20000286 PARAMETER Experiment Name: At_Open_Flower_P Parameter: Plant Line Value: WS
  misc_feature: MA Experiment 20000286 PARAMETER Experiment Name: At_Open_Flower_P Parameter: Tissue Value: Half Open vs. Whole Plant
  misc_feature: MA Experiment ID: 20000308 Result: Down-regulated in Transcription
  misc_feature: MA Experiment 20000308 PARAMETER Experiment Name: At_100mM_NaCl__P Parameter: Age (day) Value: 17
  misc_feature: MA Experiment 20000308 PARAMETER Experiment Name: At_100mM_NaCl__P Parameter: Organism Value: A. thaliana
  misc_feature: MA Experiment 20000308 PARAMETER Experiment Name: At_100mM_NaCl__P Parameter: Plant Line Value: WS
  misc_feature: MA Experiment 20000308 PARAMETER Experiment Name: At_100mM_NaCl__P Parameter: Timepoint (hr) Value: 72
  misc_feature: MA Experiment 20000308 PARAMETER Experiment Name: At_100mM_NaCl__P Parameter: Tissue Value: Whole Plant
  misc_feature: MA Experiment 20000308 PARAMETER Experiment Name: At_100mM_NaCl__P Parameter: Treatment Value: 100mM NaCl vs. No Treatment
  misc_feature: MA Experiment ID: 20000437 Result: Down-regulated in Transcription
  misc_feature: MA Experiment 20000437 PARAMETER Experiment Name: At_Drought_P Parameter: Age (day) Value: 8
  misc_feature: MA Experiment 20000437 PARAMETER Experiment Name: At_Drought_P Parameter: Organism Value: A. thaliana
  misc_feature: MA Experiment 20000437 PARAMETER Experiment Name: At_Drought_P Parameter: Plant Line Value: WS
  misc_feature: MA Experiment 20000437 PARAMETER Experiment Name: At_Drought_P Parameter: Timepoint (hr) Value: 24
  misc_feature: MA Experiment 20000437 PARAMETER Experiment Name: At_Drought_P Parameter: Tissue Value: Whole Plant
  misc_feature: MA Experiment 20000437 PARAMETER Experiment Name: At_Drought_P Parameter: Treatment Value: Drought vs. No Drought
  misc_feature: MA Experiment ID: 20000575 Result: Up-regulated in Transcription
  misc_feature: MA Experiment 20000575 PARAMETER Experiment Name: At_100uM_ABA_Mutants__P Parameter: Organism Value: A. thaliana
  misc_feature: MA Experiment 20000575 PARAMETER Experiment Name: At_100uM_ABA_Mutants__P Parameter: Plant Line Value: CS22
  misc_feature: MA Experiment 20000575 PARAMETER Experiment Name: At_100uM_ABA_Mutants__P Parameter: Timepoint (hr) Value: 6
  misc_feature: MA Experiment 20000575 PARAMETER Experiment Name: At_100uM_ABA_Mutants__P Parameter: Tissue Value: Whole Plant
  misc_feature: MA Experiment 20000575 PARAMETER Experiment Name: At_100uM_ABA_Mutants__P Parameter: Treatment Value: 1uM ABA vs. No Treatment
  misc_feature: MA Experiment ID: 20000576 Result: Up-regulated in Transcription
  misc_feature: MA Experiment 20000576 PARAMETER Experiment Name: At_100uM_ABA_Mutants__P Parameter: Organism Value: A. thaliana
  misc_feature: MA Experiment 20000576 PARAMETER Experiment Name: At_100uM_ABA_Mutants__P Parameter: Plant Line Value: CS23
  misc_feature: MA Experiment 20000576 PARAMETER Experiment Name: At_100uM_ABA_Mutants__P Parameter: Timepoint (hr) Value: 6
  misc_feature: MA Experiment 20000576 PARAMETER Experiment Name: At_100uM_ABA_Mutants__P Parameter: Tissue Value: Whole Plant
  misc_feature: MA Experiment 20000576 PARAMETER Experiment Name: At_100uM_ABA_Mutants__P Parameter: Treatment Value: 1uM ABA vs. No Treatment
  misc_feature: MA Experiment ID: 20000794 Result: Down-regulated in Transcription
  misc_feature: MA Experiment 20000794 PARAMETER Experiment Name: At_Petals_P Parameter: Age (day) Value: 23-25 days
  misc_feature: MA Experiment 20000794 PARAMETER Experiment Name: At_Petals_P Parameter: Plant Line Value: WS
  misc_feature: MA Experiment 20000794 PARAMETER Experiment Name: At_Petals_P Parameter: Tissue Value: Petals vs. Whole plant
  misc_feature: MA Experiment ID: 20001247 Result: Up-regulated in Transcription
  misc_feature: MA Experiment 20001247 PARAMETER Experiment Name: At_Far-red-induction_P Parameter: Age (day) Value: 7
  misc_feature: MA Experiment 20001247 PARAMETER Experiment Name: At_Far-red-induction_P Parameter: Light Value: Far-red vs. White
  misc_feature: MA Experiment 20001247 PARAMETER Experiment Name: At_Far-red-induction_P Parameter: Organism Value: A. thaliana
  misc_feature: MA Experiment 20001247 PARAMETER Experiment Name: At_Far-red-induction_P Parameter: Plant Line Value: Columbia
  misc_feature: MA Experiment 20001247 PARAMETER Experiment Name: At_Far-red-induction_P Parameter: Timepoint (hr) Value: 1
  misc_feature: MA Experiment 20001247 PARAMETER Experiment Name: At_Far-red-induction_P Parameter: Tissue Value: Whole Plant
  misc_feature: MA Experiment ID: 20001248 Result: Up-regulated in Transcription
  misc_feature: MA Experiment 20001248 PARAMETER Experiment Name: At_Far-red-induction_P Parameter: Age (day) Value: 7
  misc_feature: MA Experiment 20001248 PARAMETER Experiment Name: At_Far-red-induction_P Parameter: Light Value: Far-red vs. White
  misc_feature: MA Experiment 20001248 PARAMETER Experiment Name: At_Far-red-induction_P Parameter: Organism Value: A. thaliana
  misc_feature: MA Experiment 20001248 PARAMETER Experiment Name: At_Far-red-induction_P Parameter: Plant Line Value: Columbia
  misc_feature: MA Experiment 20001248 PARAMETER Experiment Name: At_Far-red-induction_P Parameter: Timepoint (hr) Value: 4
  misc_feature: MA Experiment 20001248 PARAMETER Experiment Name: At_Far-red-induction_P Parameter: Tissue Value: Whole Plant
  misc_feature: MA Experiment ID: 20001450 Result: Up-regulated in Transcription
  misc_feature: MA Experiment 20001450 PARAMETER Experiment Name: At_Far-red-induction_P Parameter: Age (day) Value: 7
  misc_feature: MA Experiment 20001450 PARAMETER Experiment Name: At_Far-red-induction_P Parameter: Light Value: Far-red vs. White
  misc_feature: MA Experiment 20001450 PARAMETER Experiment Name: At_Far-red-induction_P Parameter: Organism Value: A. thaliana
  misc_feature: MA Experiment 20001450 PARAMETER Experiment Name: At_Far-red-induction_P Parameter: Plant Line Value: Columbia
  misc_feature: MA Experiment 20001450 PARAMETER Experiment Name: At_Far-red-induction_P Parameter: Timepoint (hr) Value: 8
  misc_feature: MA Experiment 20001450 PARAMETER Experiment Name: At_Far-red-induction_P Parameter: Tissue Value: Whole Plant
  misc_feature: MA Experiment ID: 20001451 Result: Up-regulated in Transcription
  misc_feature: MA Experiment 20001451 PARAMETER Experiment Name: At_Far-red-induction_P Parameter: Age (day) Value: 7
  misc_feature: MA Experiment 20001451 PARAMETER Experiment Name: At_Far-red-induction_P Parameter: Light Value: Far-red vs. White
  misc_feature: MA Experiment 20001451 PARAMETER Experiment Name: At_Far-red-induction_P Parameter: Organism Value: A. thaliana
  misc_feature: MA Experiment 20001451 PARAMETER Experiment Name: At_Far-red-induction_P Parameter: Plant Line Value: Columbia
  misc_feature: MA Experiment 20001451 PARAMETER Experiment Name: At_Far-red-induction_P Parameter: Timepoint (hr) Value: 24
  misc_feature: MA Experiment 20001451 PARAMETER Experiment Name: At_Far-red-induction_P Parameter: Tissue Value: Whole Plant
  misc_feature: MA Experiment ID: 20001503 Result: Up-regulated in Transcription
  misc_feature: MA Experiment 20001503 PARAMETER Experiment Name: At_Far-red-enriched_P Parameter: Age (day) Value: 7
  misc_feature: MA Experiment 20001503 PARAMETER Experiment Name: At_Far-red-enriched_P Parameter: Light Value: Far-red enriched vs. White
  misc_feature: MA Experiment 20001503 PARAMETER Experiment Name: At_Far-red-enriched_P Parameter: Organism Value: A. thaliana
  misc_feature: MA Experiment 20001503 PARAMETER Experiment Name: At_Far-red-enriched_P Parameter: Plant Line Value: Columbia
  misc_feature: MA Experiment 20001503 PARAMETER Experiment Name: At_Far-red-enriched_P Parameter: Timepoint (day) Value: 3
  misc_feature: MA Experiment 20001503 PARAMETER Experiment Name: At_Far-red-enriched_P Parameter: Tissue Value: Whole Plant
  misc_feature: MA Experiment ID: 20001504 Result: Up-regulated in Transcription
  misc_feature: MA Experiment 20001504 PARAMETER Experiment Name: At_Far-red-enriched_P Parameter: Age (day) Value: 10
  misc_feature: MA Experiment 20001504 PARAMETER Experiment Name: At_Far-red-enriched_P Parameter: Light Value: Far-red enriched vs. White
  misc_feature: MA Experiment 20001504 PARAMETER Experiment Name: At_Far-red-enriched_P Parameter: Organism Value: A. thaliana
  misc_feature: MA Experiment 20001504 PARAMETER Experiment Name: At_Far-red-enriched_P Parameter: Plant Line Value: Columbia
  misc_feature: MA Experiment 20001504 PARAMETER Experiment Name: At_Far-red-enriched_P Parameter: Timepoint (day) Value: 6
  misc_feature: MA Experiment 20001504 PARAMETER Experiment Name: At_Far-red-enriched_P Parameter: Tissue Value: Whole Plant
  misc_feature: MA Experiment ID: 20001556 Result: Down-regulated in Transcription
  misc_feature: MA Experiment 20001556 PARAMETER Experiment Name: At_Drought_Soil_Dry_P Parameter: Age (day) Value: 26
  misc_feature: MA Experiment 20001556 PARAMETER Experiment Name: At_Drought_Soil_Dry_P Parameter: Organism Value: A. thaliana
  misc_feature: MA Experiment 20001556 PARAMETER Experiment Name: At_Drought_Soil_Dry_P Parameter: Plant Line Value: WS
  misc_feature: MA Experiment 20001556 PARAMETER Experiment Name: At_Drought_Soil_Dry_P Parameter: Post Timepoint (hr) Value: None
  misc_feature: MA Experiment 20001556 PARAMETER Experiment Name: At_Drought_Soil_Dry_P Parameter: Post-Treatment Value: None
  misc_feature: MA Experiment 20001556 PARAMETER Experiment Name: At_Drought_Soil_Dry_P Parameter: Timepoint (day) Value: 12
  misc_feature: MA Experiment 20001556 PARAMETER Experiment Name: At_Drought_Soil_Dry_P Parameter: Treatment Value: Drought vs. No Drought
  misc_feature: MA Experiment ID: 20001557 Result: Down-regulated in Transcription
  misc_feature: MA Experiment 20001557 PARAMETER Experiment Name: At_Drought_Soil_Dry_P Parameter: Age (day) Value: 27
  misc_feature: MA Experiment 20001557 PARAMETER Experiment Name: At_Drought_Soil_Dry_P Parameter: Organism Value: A. thaliana
  misc_feature: MA Experiment 20001557 PARAMETER Experiment Name: At_Drought_Soil_Dry_P Parameter: Plant Line Value: WS
  misc_feature: MA Experiment 20001557 PARAMETER Experiment Name: At_Drought_Soil_Dry_P Parameter: Post Timepoint (hr) Value: 3
  misc_feature: MA Experiment 20001557 PARAMETER Experiment Name: At_Drought_Soil_Dry_P Parameter: Post-Treatment Value: Re-Water vs. No Drought
  misc_feature: MA Experiment 20001557 PARAMETER Experiment Name: At_Drought_Soil_Dry_P Parameter: Timepoint (day) Value: 13
  misc_feature: MA Experiment 20001557 PARAMETER Experiment Name: At_Drought_Soil_Dry_P Parameter: Treatment Value: Drought vs. No Drought
  misc_feature: MA Experiment ID: 20001558 Result: Down-regulated in Transcription
  misc_feature: MA Experiment 20001558 PARAMETER Experiment Name: At_Drought_Soil_Dry_P Parameter: Age (day) Value: 27
  misc_feature: MA Experiment 20001558 PARAMETER Experiment Name: At_Drought_Soil_Dry_P Parameter: Organism Value: A. thaliana
  misc_feature: MA Experiment 20001558 PARAMETER Experiment Name: At_Drought_Soil_Dry_P Parameter: Plant Line Value: WS
  misc_feature: MA Experiment 20001558 PARAMETER Experiment Name: At_Drought_Soil_Dry_P Parameter: Post Timepoint (hr) Value: 6
  misc_feature: MA Experiment 20001558 PARAMETER Experiment Name: At_Drought_Soil_Dry_P Parameter: Post-Treatment Value: Re-Water vs. No Drought
  misc_feature: MA Experiment 20001558 PARAMETER Experiment Name: At_Drought_Soil_Dry_P Parameter: Timepoint (day) Value: 13
  misc_feature: MA Experiment 20001558 PARAMETER Experiment Name: At_Drought_Soil_Dry_P Parameter: Treatment Value: Drought vs. No Drought
  misc_feature: MA Experiment ID: 20001559 Result: Down-regulated in Transcription
  misc_feature: MA Experiment 20001559 PARAMETER Experiment Name: At_Drought_Soil_Dry_P Parameter: Age (day) Value: 28
  misc_feature: MA Experiment 20001559 PARAMETER Experiment Name: At_Drought_Soil_Dry_P Parameter: Organism Value: A. thaliana
  misc_feature: MA Experiment 20001559 PARAMETER Experiment Name: At_Drought_Soil_Dry_P Parameter: Plant Line Value: WS
  misc_feature: MA Experiment 20001559 PARAMETER Experiment Name: At_Drought_Soil_Dry_P Parameter: Post Timepoint (hr) Value: 29
  misc_feature: MA Experiment 20001559 PARAMETER Experiment Name: At_Drought_Soil_Dry_P Parameter: Post-Treatment Value: Re-Water vs. No Drought
  misc_feature: MA Experiment 20001559 PARAMETER Experiment Name: At_Drought_Soil_Dry_P Parameter: Timepoint (day) Value: 14
  misc_feature: MA Experiment 20001559 PARAMETER Experiment Name: At_Drought_Soil_Dry_P Parameter: Treatment Value: Drought vs. No Drought
  misc_feature: MA Experiment ID: 20001560 Result: Down-regulated in Transcription
  misc_feature: MA Experiment 20001560 PARAMETER Experiment Name: At_Drought_Soil_Dry_P Parameter: Age (day) Value: 28
  misc_feature: MA Experiment 20001560 PARAMETER Experiment Name: At_Drought_Soil_Dry_P Parameter: Organism Value: A. thaliana
  misc_feature: MA Experiment 20001560 PARAMETER Experiment Name: At_Drought_Soil_Dry_P Parameter: Plant Line Value: WS
  misc_feature: MA Experiment 20001560 PARAMETER Experiment Name: At_Drought_Soil_Dry_P Parameter: Post Timepoint (hr) Value: None
  misc_feature: MA Experiment 20001560 PARAMETER Experiment Name: At_Drought_Soil_Dry_P Parameter: Post-Treatment Value: None
  misc_feature: MA Experiment 20001560 PARAMETER Experiment Name: At_Drought_Soil_Dry_P Parameter: Timepoint (day) Value: 14
  misc_feature: MA Experiment 20001560 PARAMETER Experiment Name: At_Drought_Soil_Dry_P Parameter: Treatment Value: Drought vs. No Drought
  misc_feature: MA Experiment ID: 20001768 Result: Up-regulated in Transcription
  misc_feature: MA Experiment 20001768 PARAMETER Experiment Name: At_Far-red-enriched-adult_P Parameter: Age (day) Value: 28
  misc_feature: MA Experiment 20001768 PARAMETER Experiment Name: At_Far-red-enriched-adult_P Parameter: Light Value: Far-red enriched vs. White
  misc_feature: MA Experiment 20001768 PARAMETER Experiment Name: At_Far-red-enriched-adult_P Parameter: Organism Value: A. thaliana
  misc_feature: MA Experiment 20001768 PARAMETER Experiment Name: At_Far-red-enriched-adult_P Parameter: Plant Line Value: Columbia
  misc_feature: MA Experiment 20001768 PARAMETER Experiment Name: At_Far-red-enriched-adult_P Parameter: Timepoint (hr) Value: 1
  misc_feature: MA Experiment 20001768 PARAMETER Experiment Name: At_Far-red-enriched-adult_P Parameter: Tissue Value: Aerial
  misc_feature: MA Experiment ID: 20001769 Result: Up-regulated in Transcription
  misc_feature: MA Experiment 20001769 PARAMETER Experiment Name: At_Far-red-enriched-adult_P Parameter: Age (day) Value: 28
  misc_feature: MA Experiment 20001769 PARAMETER Experiment Name: At_Far-red-enriched-adult_P Parameter: Light Value: Far-red enriched vs. White
  misc_feature: MA Experiment 20001769 PARAMETER Experiment Name: At_Far-red-enriched-adult_P Parameter: Organism Value: A. thaliana
  misc_feature: MA Experiment 20001769 PARAMETER Experiment Name: At_Far-red-enriched-adult_P Parameter: Plant Line Value: Columbia
  misc_feature: MA Experiment 20001769 PARAMETER Experiment Name: At_Far-red-enriched-adult_P Parameter: Timepoint (hr) Value: 4
  misc_feature: MA Experiment 20001769 PARAMETER Experiment Name: At_Far-red-enriched-adult_P Parameter: Tissue Value: Aerial
  misc_feature: MA Experiment ID: 20001770 Result: Up-regulated in Transcription
  misc_feature: MA Experiment 20001770 PARAMETER Experiment Name: At_Far-red-enriched-adult_P Parameter: Age (day) Value: 28
  misc_feature: MA Experiment 20001770 PARAMETER Experiment Name: At_Far-red-enriched-adult_P Parameter: Light Value: Far-red enriched vs. White
  misc_feature: MA Experiment 20001770 PARAMETER Experiment Name: At_Far-red-enriched-adult_P Parameter: Organism Value: A. thaliana
  misc_feature: MA Experiment 20001770 PARAMETER Experiment Name: At_Far-red-enriched-adult_P Parameter: Plant Line Value: Columbia
  misc_feature: MA Experiment 20001770 PARAMETER Experiment Name: At_Far-red-enriched-adult_P Parameter: Timepoint (hr) Value: 8
  misc_feature: MA Experiment 20001770 PARAMETER Experiment Name: At_Far-red-enriched-adult_P Parameter: Tissue Value: Aerial
  misc_feature: MA Experiment ID: 20001771 Result: Up-regulated in Transcription
  misc_feature: MA Experiment 20001771 PARAMETER Experiment Name: At_Far-red-enriched-adult_P Parameter: Age (day) Value: 28
  misc_feature: MA Experiment 20001771 PARAMETER Experiment Name: At_Far-red-enriched-adult_P Parameter: Light Value: Far-red enriched vs. White
  misc_feature: MA Experiment 20001771 PARAMETER Experiment Name: At_Far-red-enriched-adult_P Parameter: Organism Value: A. thaliana
  misc_feature: MA Experiment 20001771 PARAMETER Experiment Name: At_Far-red-enriched-adult_P Parameter: Plant Line Value: Columbia
  misc_feature: MA Experiment 20001771 PARAMETER Experiment Name: At_Far-red-enriched-adult_P Parameter: Timepoint (hr) Value: 16
  misc_feature: MA Experiment 20001771 PARAMETER Experiment Name: At_Far-red-enriched-adult_P Parameter: Tissue Value: Aerial
  misc_feature: MA Experiment ID: 20001773 Result: Up-regulated in Transcription
  misc_feature: MA Experiment 20001773 PARAMETER Experiment Name: At_Far-red-enriched-adult_P Parameter: Age (day) Value: 30
  misc_feature: MA Experiment 20001773 PARAMETER Experiment Name: At_Far-red-enriched-adult_P Parameter: Light Value: Far-red enriched vs. White
  misc_feature: MA Experiment 20001773 PARAMETER Experiment Name: At_Far-red-enriched-adult_P Parameter: Organism Value: A. thaliana
  misc_feature: MA Experiment 20001773 PARAMETER Experiment Name: At_Far-red-enriched-adult_P Parameter: Plant Line Value: Columbia
  misc_feature: MA Experiment 20001773 PARAMETER Experiment Name: At_Far-red-enriched-adult_P Parameter: Timepoint (hr) Value: 48
  misc_feature: MA Experiment 20001773 PARAMETER Experiment Name: At_Far-red-enriched-adult_P Parameter: Tissue Value: Aerial
  misc_feature: MA Experiment ID: 20001774 Result: Up-regulated in Transcription
  misc_feature: MA Experiment 20001774 PARAMETER Experiment Name: At_Far-red-enriched-adult_P Parameter: Age (day) Value: 31
  misc_feature: MA Experiment 20001774 PARAMETER Experiment Name: At_Far-red-enriched-adult_P Parameter: Light Value: Far-red enriched vs. White
  misc_feature: MA Experiment 20001774 PARAMETER Experiment Name: At_Far-red-enriched-adult_P Parameter: Organism Value: A. thaliana
  misc_feature: MA Experiment 20001774 PARAMETER Experiment Name: At_Far-red-enriched-adult_P Parameter: Plant Line Value: Columbia
  misc_feature: MA Experiment 20001774 PARAMETER Experiment Name: At_Far-red-enriched-adult_P Parameter: Timepoint (hr) Value: 72
  misc_feature: MA Experiment 20001774 PARAMETER Experiment Name: At_Far-red-enriched-adult_P Parameter: Tissue Value: Aerial
  misc_feature: MA Experiment ID: 20001904 Result: Down-regulated in Transcription
  misc_feature: MA Experiment 20001904 PARAMETER Experiment Name: At_Drought_Reproduction_P Parameter: Age (day) Value: 37
  misc_feature: MA Experiment 20001904 PARAMETER Experiment Name: At_Drought_Reproduction_P Parameter: Organism Value: A. thaliana
  misc_feature: MA Experiment 20001904 PARAMETER Experiment Name: At_Drought_Reproduction_P Parameter: Plant Line Value: WS
  misc_feature: MA Experiment 20001904 PARAMETER Experiment Name: At_Drought_Reproduction_P Parameter: Timepoint (day) Value: 7
  misc_feature: MA Experiment 20001904 PARAMETER Experiment Name: At_Drought_Reproduction_P Parameter: Tissue Value: Rosettes
  misc_feature: MA Experiment 20001904 PARAMETER Experiment Name: At_Drought_Reproduction_P Parameter: Treatment Value: Drought vs. No Drought
tgcccccagctagtcacatactcatgattgcaaaatctctctctctctctgcctctctatatattaacctttcttcttcctttactttctcatcttctatctctcaaaagaaaagcagacaactttatttgcaaaaacagagtttttttttcttatcttgagaaagttcaacagaagatgatgttcgagaaagacgatctgggtctaagcttaggcttgaattttccaaagaaacagatcaatctcaaatcaaatccatctgtttctgttactccttcttcttcttcttttggattattcagaagatcttcatggaacgagagttttacttcttcagttccaaactcagattcgtcacaaaaagaaacaagaactttcatccgaggaatcgacgtgaacagaccaccgtctacagcggaatacggcgacgaagacgctggagtatcttcacctaacagtacagtctcaagctctacagggaaaagaagcgagagagaagaagacacagatccacaaggctcaagaggaatcagtgacgatgaagatggtgataactccaggaaaaagcttagactttccaaagatcaatctgctattcttgaagagaccttcaaagatcacagtactctcaatccgaagcagaagcaagcattggctaaacaattagggttacgagcaagacaagtggaagtttggtttcagaacagacgagcaagaacaaagctgaagcaaacggaggtagactgcgagttcttacggagatgctgcgagaatctaacggaagagaaccgtcggctacaaaaagaagtaacggaattgagagcacttaagctctctcctcagttctacatgcacatgagcccacccactactttgaccatgtgcccttcatgtgaacacgtgtcggtcccgccaccacaacctcaggctgctacgtcagcgcaccaccggtcgttgccggtcaatgcgtgggctcctgcgacgaggatatctcacggcttgacttttgacgctcttcgtcctaggtcctaagtctttttacttgcaaccaaagggcattttggtcgttttttaagtttcatggaccagatatgcatgtagttgttaacatgtatgtattttctt

SEQ ID NO: 108302 - protein, 284 aa, Arabidopsis thaliana; identical to SEQ ID NO: 37759
  peptide (1)..(284): Ceres Seq. ID no. 13653783
  misc_feature (1)..(109): Pfam Name: HD-ZIP protein N terminus Pfam Description: HD-ZIP protein N terminus
  misc_feature (1)..(284): Homolog of NCBI NO: 15235882 NR Description: homeobox-leucine zipper protein HAT4 (HD-Zip
  misc_feature (1)..(284): Homolog of NCBI NO: 22759 NR Description: HAT4 [Arabidopsis thaliana]
  misc_feature (1)..(284): Homolog of NCBI NO: 8919876 NR Description: hypothetical protein [Capsella rubella]

SEQ ID NO: 108303 - protein, 283 aa, Arabidopsis thaliana; identical to SEQ ID NO: 37760
  peptide (1)..(283): Ceres Seq. ID no. 13653784
  misc_feature (1)..(108): Pfam Name: HD-ZIP protein N terminus Pfam Description: HD-ZIP protein N terminus
  misc_feature (1)..(283): Homolog of NCBI NO: 15235882 NR Description: homeobox-leucine zipper protein HAT4 (HD-Zip
  misc_feature (1)..(283): Homolog of NCBI NO: 22759 NR Description: HAT4 [Arabidopsis thaliana]
  misc_feature (1)..(283): Homolog of NCBI NO: 8919876 NR Description: hypothetical protein [Capsella rubella]

SEQ ID NO: 108304 - DNA, 770 bp, Arabidopsis thaliana
  misc_feature (1)..(770): Ceres Seq. ID no. 13653792
  misc_feature: MA Experiment ID: 20000180 Result: Down-regulated in Transcription
  misc_feature: MA Experiment 20000180 PARAMETER Experiment Name: At_Germinating_Seeds_P Parameter: Age (hr) Value: 24 vs. 0
  misc_feature: MA Experiment 20000180 PARAMETER Experiment Name: At_Germinating_Seeds_P Parameter: Tissue Value: Germinating Seeds
  misc_feature: MA Experiment ID: 20000227 Result: Up-regulated in Transcription
  misc_feature: MA Experiment 20000227 PARAMETER Experiment Name: At_Root-Tips-vs-Tops_P Parameter: Tissue Value: Root Tips vs. Root Tops
  misc_feature: MA Experiment ID: 20000234 Result: Up-regulated in Transcription
  misc_feature: MA Experiment 20000234 PARAMETER Experiment Name: At_Siliques_P Parameter: Age (day) Value: 21
  misc_feature: MA Experiment 20000234 PARAMETER Experiment Name: At_Siliques_P Parameter: Organism Value: A. thaliana
  misc_feature: MA Experiment 20000234 PARAMETER Experiment Name: At_Siliques_P Parameter: Plant Line Value: WS
  misc_feature: MA Experiment 20000234 PARAMETER Experiment Name: At_Siliques_P Parameter: Tissue Value: Less Than 5mm Siliques vs. Whole Plant
  misc_feature: MA Experiment ID: 20000794 Result: Down-regulated in Transcription
  misc_feature: MA Experiment 20000794 PARAMETER Experiment Name: At_Petals_P Parameter: Age (day) Value: 23-25 days
  misc_feature: MA Experiment 20000794 PARAMETER Experiment Name: At_Petals_P Parameter: Plant Line Value: WS
  misc_feature: MA Experiment 20000794 PARAMETER Experiment Name: At_Petals_P Parameter: Tissue Value: Petals vs. Whole plant
  misc_feature: MA Experiment ID: 20001451 Result: Down-regulated in Transcription
  misc_feature: MA Experiment 20001451 PARAMETER Experiment Name: At_Far-red-induction_P Parameter: Age (day) Value: 7
  misc_feature: MA Experiment 20001451 PARAMETER Experiment Name: At_Far-red-induction_P Parameter: Light Value: Far-red vs. White
  misc_feature: MA Experiment 20001451 PARAMETER Experiment Name: At_Far-red-induction_P Parameter: Organism Value: A. thaliana
  misc_feature: MA Experiment 20001451 PARAMETER Experiment Name: At_Far-red-induction_P Parameter: Plant Line Value: Columbia
  misc_feature: MA Experiment 20001451 PARAMETER Experiment Name: At_Far-red-induction_P Parameter: Timepoint (hr) Value: 24
  misc_feature: MA Experiment 20001451 PARAMETER Experiment Name: At_Far-red-induction_P Parameter: Tissue Value: Whole Plant
  misc_feature: MA Experiment ID: 20001557 Result: Up-regulated in Transcription
  misc_feature: MA Experiment 20001557 PARAMETER Experiment Name: At_Drought_Soil_Dry_P Parameter: Age (day) Value: 27
  misc_feature: MA Experiment 20001557 PARAMETER Experiment Name: At_Drought_Soil_Dry_P Parameter: Organism Value: A. thaliana
  misc_feature: MA Experiment 20001557 PARAMETER Experiment Name: At_Drought_Soil_Dry_P Parameter: Plant Line Value: WS
  misc_feature: MA Experiment 20001557 PARAMETER Experiment Name: At_Drought_Soil_Dry_P Parameter: Post Timepoint (hr) Value: 3
  misc_feature: MA Experiment 20001557 PARAMETER Experiment Name: At_Drought_Soil_Dry_P Parameter: Post-Treatment Value: Re-Water vs. No Drought
  misc_feature: MA Experiment 20001557 PARAMETER Experiment Name: At_Drought_Soil_Dry_P Parameter: Timepoint (day) Value: 13
  misc_feature: MA Experiment 20001557 PARAMETER Experiment Name: At_Drought_Soil_Dry_P Parameter: Treatment Value: Drought vs. No Drought
  misc_feature: MA Experiment ID: 20001558 Result: Up-regulated in Transcription
  misc_feature: MA Experiment 20001558 PARAMETER Experiment Name: At_Drought_Soil_Dry_P Parameter: Age (day) Value: 27
  misc_feature: MA Experiment 20001558 PARAMETER Experiment Name: At_Drought_Soil_Dry_P Parameter: Organism Value: A. thaliana
  misc_feature: MA Experiment 20001558 PARAMETER Experiment Name: At_Drought_Soil_Dry_P Parameter: Plant Line Value: WS
  misc_feature: MA Experiment 20001558 PARAMETER Experiment Name: At_Drought_Soil_Dry_P Parameter: Post Timepoint (hr) Value: 6
  misc_feature: MA Experiment 20001558 PARAMETER Experiment Name: At_Drought_Soil_Dry_P Parameter: Post-Treatment Value: Re-Water vs. No Drought
  misc_feature: MA Experiment 20001558 PARAMETER Experiment Name: At_Drought_Soil_Dry_P Parameter: Timepoint (day) Value: 13
  misc_feature: MA Experiment 20001558 PARAMETER Experiment Name: At_Drought_Soil_Dry_P Parameter: Treatment Value: Drought vs. No Drought
  misc_feature: MA Experiment ID: 20001560 Result: Up-regulated in Transcription
  misc_feature: MA Experiment 20001560 PARAMETER Experiment Name: At_Drought_Soil_Dry_P Parameter: Age (day) Value: 28
  misc_feature: MA Experiment 20001560 PARAMETER Experiment Name: At_Drought_Soil_Dry_P Parameter: Organism Value: A. thaliana
  misc_feature: MA Experiment 20001560 PARAMETER Experiment Name: At_Drought_Soil_Dry_P Parameter: Plant Line Value: WS
  misc_feature: MA Experiment 20001560 PARAMETER Experiment Name: At_Drought_Soil_Dry_P Parameter: Post Timepoint (hr) Value: None
  misc_feature: MA Experiment 20001560 PARAMETER Experiment Name: At_Drought_Soil_Dry_P Parameter: Post-Treatment Value: None
  misc_feature: MA Experiment 20001560 PARAMETER Experiment Name: At_Drought_Soil_Dry_P Parameter: Timepoint (day) Value: 14
  misc_feature: MA Experiment 20001560 PARAMETER Experiment Name: At_Drought_Soil_Dry_P Parameter: Treatment Value: Drought vs. No Drought
  misc_feature: MA Experiment ID: 20001757 Result: Up-regulated in Transcription
  misc_feature: MA Experiment 20001757 PARAMETER Experiment Name: At_50mM_NH4NO3_L-to-H_P Parameter: Timepoint (hr) Value: 6
  misc_feature: MA Experiment 20001757 PARAMETER Experiment Name: At_50mM_NH4NO3_L-to-H_P Parameter: Tissue Value: Leaf
  misc_feature: MA Experiment 20001757 PARAMETER Experiment Name: At_50mM_NH4NO3_L-to-H_P Parameter: Treatment Value: 50mM NH4NO3 vs 100mM Mannitol
ctgaagcgcagcagcagccgtaagaaagaaaccgaggaagaacgatctcagtgagaggacgatcacttcgccgtcgcagtcatgggtcgaatgcatagtagaggtaagggtatctcggcatctgctttgccgtacaagcgttcatctccgagctggctcaagacaacccctcaagatgttgatgagtccatctgcaaatttgcgaagaagggtttgaccccatcgcagattggtgtcattcttcgtgactctcacggaattccacaggtgaaaagtgttactggaagcaagattctcagaattttgaaagctcatggtcttgcacctgagatccctgaggatctgtatcacttgatcaagaaagctgttgctatccgcaagcatcttgagaggaacaggaaagataaggattccaaattcaggctgattcttgtagagagcagaatccatcgtcttgctcgttactacaagaagaccaagaagctcccacccgtctggaagtacgagtctacaactgcaagcactcttgtggcttgagaagaatagagttgatcatgtccttcaagaaggaccatttcattgtctgcattgcaactcaaagctcttcttcttttgaacctatgtatctgttttcgctagttttgatgggttacaacttgctatgagattttgattttagggaacgaatttgtttatgcgaatctttccattatcgttacagcttatctttcaattaacgttaattatcgttctcagagaatttttacaga

SEQ ID NO: 108305 - protein, 151 aa, Arabidopsis thaliana; identical to SEQ ID NO: 29525
  peptide (1)..(151): Ceres Seq. ID no. 13653793
  misc_feature (1)..(151): Homolog of NCBI NO: 18411716 NR Description: 40S ribosomal protein S13 (RPS13A) [Arabidopsis
  misc_feature (1)..(151): Homolog of NCBI NO: 14190367 NR Description: AT3g60770/T4C21_180 [Arabidopsis thaliana]
  misc_feature (1)..(151): Homolog of NCBI NO: 18411224 NR Description: 40S ribosomal protein S13 (RPS13B) [Arabidopsis
  misc_feature (1)..(151): Homolog of NCBI NO: 11276609 NR Description: ribosomal protein S13-like - Arabidopsis thaliana
  misc_feature (1)..(151): Homolog of NCBI NO: 8131699 NR Description: cytoplasmic ribosomal protein S13 [Panax ginseng]
  misc_feature (1)..(151): Homolog of NCBI NO: 7440402 NR Description: ribosomal protein S13, cytosolic - Arabidopsis >gi|3193323|gb|AAC19305.1| similar to ribosomal protein S13 S15.hmm, score: 78.35); identical to Arabidopsis 40S ribosomal
  misc_feature (1)..(151): Homolog of NCBI NO: 1173198 NR Description: 40S RIBOSOMAL PROTEIN S13 >gi|480095|pir||S36423
  misc_feature (1)..(151): Homolog of NCBI NO: 464705 NR Description: 40S RIBOSOMAL PROTEIN S13 >gi|419802|pir||S30146
  misc_feature (1)..(151): Homolog of NCBI NO: 32419563 NR Description: hypothetical protein [Neurospora crassa]
  misc_feature (1)..(151): Homolog of NCBI NO: 3688434 NR Description: 40S ribosomal protein S13 [Lumbricus rubellus]

SEQ ID NO: 108306 - protein, 148 aa, Arabidopsis thaliana; identical to SEQ ID NO: 29526
  peptide (1)..(148): Ceres Seq. ID no. 13653794
  misc_feature (1)..(148): Homolog of NCBI NO: 18411716 NR Description: 40S ribosomal protein S13 (RPS13A) [Arabidopsis
  misc_feature (1)..(148): Homolog of NCBI NO: 14190367 NR Description: AT3g60770/T4C21_180 [Arabidopsis thaliana]
  misc_feature (1)..(148): Homolog of NCBI NO: 18411224 NR Description: 40S ribosomal protein S13 (RPS13B) [Arabidopsis
  misc_feature (1)..(148): Homolog of NCBI NO: 11276609 NR Description: ribosomal protein S13-like - Arabidopsis thaliana
  misc_feature (1)..(148): Homolog of NCBI NO: 8131699 NR Description: cytoplasmic ribosomal protein S13 [Panax ginseng]
  misc_feature (1)..(148): Homolog of NCBI NO: 7440402 NR Description: ribosomal protein S13, cytosolic - Arabidopsis >gi|3193323|gb|AAC19305.1| similar to ribosomal protein S13 S15.hmm, score: 78.35); identical to Arabidopsis 40S ribosomal
  misc_feature (1)..(148): Homolog of NCBI NO: 1173198 NR Description: 40S RIBOSOMAL PROTEIN S13 >gi|480095|pir||S36423
  misc_feature (1)..(148): Homolog of NCBI NO: 464705 NR Description: 40S RIBOSOMAL PROTEIN S13 >gi|419802|pir||S30146
  misc_feature (1)..(148): Homolog of NCBI NO: 32419563 NR Description: hypothetical protein [Neurospora crassa]
  misc_feature (1)..(148): Homolog of NCBI NO: 3688434 NR Description: 40S ribosomal protein S13 [Lumbricus rubellus]

SEQ ID NO: 108307 - DNA, 508 bp, Arabidopsis thaliana
  misc_feature (1)..(508): Ceres Seq. ID no. 13653819
  misc_feature: MA Experiment ID: 108435 Result: Up-regulated in Transcription
  misc_feature: MA Experiment 108435 PARAMETER Experiment Name: At_stm_Mutants_cDNA_P Parameter: Plant Line Value: wt Landsburg vs stm
  misc_feature: MA Experiment 108435 PARAMETER Experiment Name: At_stm_Mutants_cDNA_P Parameter: Tissue Value: Shoot Apical Meristem Region
  misc_feature: MA Experiment ID: 108463 Result: Up-regulated in Transcription
  misc_feature: MA Experiment 108463 PARAMETER Experiment Name: At_Germinating_Seeds_cDNA_P Parameter: Age (day) Value: 3 vs. 0
  misc_feature: MA Experiment 108463 PARAMETER Experiment Name: At_Germinating_Seeds_cDNA_P Parameter: Tissue Value: Germinating Seeds
  misc_feature: MA Experiment ID: 108609 Result: Up-regulated in Transcription
  misc_feature: MA Experiment 108609 PARAMETER Experiment Name: At_100uM_ABA_cDNA_P Parameter: Timepoint (hr) Value: 24
  misc_feature: MA Experiment 108609 PARAMETER Experiment Name: At_100uM_ABA_cDNA_P Parameter: Tissue Value: Aerial
  misc_feature: MA Experiment 108609 PARAMETER Experiment Name: At_100uM_ABA_cDNA_P Parameter: Treatment Value: 100uM ABA vs. No Treatment
  misc_feature: MA Experiment ID: 20000088 Result: Up-regulated in Transcription
  misc_feature: MA Experiment 20000088 PARAMETER Experiment Name: At_100uM_ABA_Mutants_cDNA_P Parameter: Plant Line Value: Landsberg
  misc_feature: MA Experiment 20000088 PARAMETER Experiment Name: At_100uM_ABA_Mutants_cDNA_P Parameter: Timepoint (hr) Value: 6
  misc_feature: MA Experiment 20000088 PARAMETER Experiment Name: At_100uM_ABA_Mutants_cDNA_P Parameter: Tissue Value: Aerial
  misc_feature: MA Experiment 20000088 PARAMETER Experiment Name: At_100uM_ABA_Mutants_cDNA_P Parameter: Treatment Value: 100uM ABA vs. No Treatment
  misc_feature: MA Experiment ID: 20000089 Result: Up-regulated in Transcription
  misc_feature: MA Experiment ID: 20000112 Result: Up-regulated in Transcription
  misc_feature: MA Experiment 20000112 PARAMETER Experiment Name: At_42deg_Heat_cDNA_P Parameter: Temperature (deg C) Value: 42 vs. 22
  misc_feature: MA Experiment 20000112 PARAMETER Experiment Name: At_42deg_Heat_cDNA_P Parameter: Timepoint (hr) Value: 2
  misc_feature: MA Experiment 20000112 PARAMETER Experiment Name: At_42deg_Heat_cDNA_P Parameter: Tissue Value: Aerial
actcatcacttacttaacatactaagagagttattagaacttgcaaaaaatggcttccaaggctttgattctgttaggtctcttctcagttcttctcgtcgtctccgaagtgtctgccgcaaggcaatcgggcatggtgaagccagagagtgaggaaactgtgcaacctgaaggttatggcggtggccacggaggacatggtggtcacggagggggaggaggccacggacatggaggacacaacggaggagggggccacggacttgacggatacggaggaggtggaggacactatggaggaggtggaggacactacggaggtggtggaggaggatacggaggtggaggaggacaccacggaggaggaggccacgggctaaacgaacctgttcagactaagccgggtgtttaaaactatataatatcttcactaccatgcatgattgcatatatatatatacgcttatgtattatctatatgcctataaataaaccatggtgagtttgt

SEQ ID NO: 108308 - protein, 120 aa, Arabidopsis thaliana
  peptide (1)..(120): Ceres Seq. ID no. 13653820
  misc_feature (38)..(111): Pfam Name: Herpesvirus latent membrane protein 1 (LMP1) Pfam Description: Herpesvirus latent membrane protein 1 (LMP1)
  misc_feature (1)..(120): Homolog of NCBI NO: 15224540 NR Description: glycine-rich protein [Arabidopsis thaliana]
  misc_feature (1)..(120): Homolog of NCBI NO: 21536606 NR Description: putative glycine-rich protein [Arabidopsis
  misc_feature (1)..(120): Homolog of NCBI NO: 15224547 NR Description: glycine-rich protein [Arabidopsis thaliana]
  misc_feature (1)..(107): Homolog of NCBI NO: 30678191 NR Description: glycine-rich protein [Arabidopsis thaliana]
  misc_feature (1)..(120): Homolog of NCBI NO: 9957568 NR Description: antimicrobial peptide shep-GRP [Capsella
  misc_feature (42)..(120): Homolog of NCBI NO: 30678191 NR Description: glycine-rich protein [Arabidopsis thaliana]
  misc_feature (1)..(109): Homolog of NCBI NO: 15224548 NR Description: glycine-rich protein (GRP) [Arabidopsis thaliana]
  misc_feature (1)..(107): Homolog of NCBI NO: 259447 NR Description: glycine-rich protein; atGRP [Arabidopsis thaliana]
  misc_feature (1)..(119): Homolog of NCBI NO: 18266043 NR Description: glycine-rich protein [Brassica oleracea]
  misc_feature (1)..(119): Homolog of NCBI NO: 15224559 NR Description: glycine-rich protein [Arabidopsis thaliana]
MASKALILLGLFSVLLVVSEVSAARQSGMVKPESEETVQPEGYGGGHGGHGGHGGGGGHGHGGHNGGGGHGLDGYGGGGGHYGGGGGHYGGGGGGYGGGGGHHGGGGHGLNEPVQTKPGV

SEQ ID NO: 108309 - protein, 92 aa, Arabidopsis thaliana
  peptide (1)..(92): Ceres Seq. ID no. 13653821
  misc_feature (10)..(83): Pfam Name: Herpesvirus latent membrane protein 1 (LMP1) Pfam Description: Herpesvirus latent membrane protein 1 (LMP1)
  misc_feature (1)..(92): Homolog of NCBI NO: 15224540 NR Description: glycine-rich protein [Arabidopsis thaliana]
  misc_feature (1)..(92): Homolog of NCBI NO: 21536606 NR Description: putative glycine-rich protein [Arabidopsis
  misc_feature (1)..(92): Homolog of NCBI NO: 15224547 NR Description: glycine-rich protein [Arabidopsis thaliana]
  misc_feature (1)..(79): Homolog of NCBI NO: 30678191 NR Description: glycine-rich protein [Arabidopsis thaliana]
  misc_feature (1)..(92): Homolog of NCBI NO: 9957568 NR Description: antimicrobial peptide shep-GRP [Capsella
  misc_feature (14)..(92): Homolog of NCBI NO: 30678191 NR Description: glycine-rich protein [Arabidopsis thaliana]
  misc_feature (1)..(81): Homolog of NCBI NO: 15224548 NR Description: glycine-rich protein (GRP) [Arabidopsis thaliana]
  misc_feature (1)..(79): Homolog of NCBI NO: 259447 NR Description: glycine-rich protein; atGRP [Arabidopsis thaliana]
  misc_feature (1)..(91): Homolog of NCBI NO: 18266043 NR Description: glycine-rich protein [Brassica oleracea]
  misc_feature (1)..(91): Homolog of NCBI NO: 15224559 NR Description: glycine-rich protein [Arabidopsis thaliana]
MVKPESEETVQPEGYGGGHGGHGGHGGGGGHGHGGHNGGGGHGLDGYGGGGGHYGGGGGHYGGGGGGYGGGGGHHGGGGHGLNEPVQTKPGV

SEQ ID NO: 108310 - protein, 67 aa, Arabidopsis thaliana
  peptide (1)..(67): Ceres Seq. ID no. 13653822
MAVATEDMVVTEGEEATDMEDTTEEGATDLTDTEEVEDTMEEVEDTTEVVEEDTEVEEDTTEEEATG

SEQ ID NO: 108311 - DNA, 1776 bp, Arabidopsis thaliana
  misc_feature (1)..(1776): Ceres Seq. ID no. 13653827
  misc_feature: MA Experiment ID: 108461 Result: Down-regulated in Transcription
  misc_feature: MA Experiment 108461 PARAMETER Experiment Name: At_Germinating_Seeds_cDNA_P Parameter: Age (day) Value: 1 vs. 0
  misc_feature: MA Experiment 108461 PARAMETER Experiment Name: At_Germinating_Seeds_cDNA_P Parameter: Tissue Value: Germinating Seeds
  misc_feature: MA Experiment ID: 108464 Result: Down-regulated in Transcription
  misc_feature: MA Experiment 108464 PARAMETER Experiment Name: At_Germinating_Seeds_cDNA_P Parameter: Age (day) Value: 4 vs. 0
  misc_feature: MA Experiment 108464 PARAMETER Experiment Name: At_Germinating_Seeds_cDNA_P Parameter: Tissue Value: Germinating Seeds
  misc_feature: MA Experiment ID: 20000180 Result: Down-regulated in Transcription
  misc_feature: MA Experiment 20000180 PARAMETER Experiment Name: At_Germinating_Seeds_P Parameter: Age (hr) Value: 24 vs. 0
  misc_feature: MA Experiment 20000180 PARAMETER Experiment Name: At_Germinating_Seeds_P Parameter: Tissue Value: Germinating Seeds
ttcttcttcttcttcttcttcttcttcttcctcctctctcgtcggatctctctgatttagtgatttttcaaatttcaagttttcttcacctttaattttgtgtctcgttgatctctctttggacattctgctttggattctggaggcttctcattagatctctattagtgggtttaggtcaagttcttgaaatggataaggagaaatctcctgcaccaccacctagtggaggtcttcctccaccatcgggtcgttactctgcgttttcacctaatggaagtagctttgcaatgaaagctgaatcatcttttcctcctttgactccaagtggaagcaatagctcagatgctaaccgattcagccatgatattagccgaatgccggataatccacctaagaacctaggccatcgccgagctcattcagagattcttactcttcctgatgacttaagctttgatagtgatcttggtgtggttggtgctgctgatggaccttctttctctgatgatactgacgaggacttactctatatgtatcttgatatggaaaaattcaattcttctgctacatcgacttctcaaatgggtgagccatcagaaccgacttggaggaatgaattagcctcgacttctaaccttcagagtacacccggtagctctagtgaaagaccgagaattagacaccaacacagccaatcgatggatggttcaacaactatcaagcctgagatgcttatgtcagggaatgaagatgtgtctggagttgactctaagaaagccatctctgctgctaaactttctgagcttgctctcattgatccaaaacgcgccaagaggatatgggcaaacaggcagtctgctgcgaggtcaaaagaaaggaagatgagatacattgcagagctcgagagaaaagtacagactttacaaacagaggccacatctctctcagcccagttgactctcttacagagagatacaaatggcctgggtgttgaaaacaatgagcttaaactgcgagtacaaactatggagcaacaggtccacctacaggatgctttaaatgatgcactaaaggaggaagtccagcatcttaaggtattgacggggcaaggtccatcaaatggtacatcaatgaactacggttcttttggatcaaaccagcaattctatcccaataatcagtcgatgcacactatcttagccgcacaacagttacagcagctccagatccagtcacagaaacagcaacaacaacaacagcaacaccagcaacaacaacagcagcagcagcagcaatttcactttcaacagcagcaactgtaccagcttcagcagcagcaacggcttcaacaacaggaacaacaaagcggggcttcagagctaagaagacccatgccttctcctggtcagaaagagagtgtgacatcgcctgatcgtgaaactcccttgacaaaagactgagtctagactgtgctaatgtccaatttagtaagttactcttggaaaatcttctttttcatcgcaggctcatggatttgggatttactgcattatagagttaaaaacaagacagcttagaagttgcggatttagaagttgttagtgaagcttttgttctcgtctgttggtagtttacaatcttctctttgtatgatcctaagctcttaaaaagttcttggatttggtcatttggttagaaatgggtccttagtccaagtctgtagtcgtttaaccatattcatattctttgccttttgttcattttggttacttg

SEQ ID NO: 108312 - protein, 423 aa, Arabidopsis thaliana; identical to SEQ ID NO: 41604
  peptide (1)..(423): Ceres Seq. ID no. 13653828
  misc_feature (210)..(272): Pfam Name: bZIP transcription factor Pfam Description: bZIP transcription factor
  misc_feature (1)..(423): Homolog of NCBI NO: 15221391 NR Description: bZIP protein [Arabidopsis thaliana]
  misc_feature (1)..(423): Homolog of NCBI NO: 21553831 NR Description: transcriptional activator RF2a, putative
  misc_feature (1)..(410): Homolog of NCBI NO: 15224665 NR Description: bZIP transcription factor (POSF21) [Arabidopsis >gi|30684932|ref|NP_850167.1| bZIP transcription factor (POSF21) thaliana] >gi|1172441|sp|Q04088|PF21_ARATH Possible transcription
  misc_feature (1)..(260): Homolog of NCBI NO: 30684938 NR Description: bZIP transcription factor (POSF21) [Arabidopsis
  misc_feature (90)..(397): Homolog of NCBI NO: 7489564 NR Description: probable transcription activator RF2a - rice
  misc_feature (5)..(368): Homolog of NCBI NO: 21740783 NR Description: OSJNBa0067K08.24 [Oryza sativa (japonica
  misc_feature (162)..(388): Homolog of NCBI NO: 21740783 NR Description: OSJNBa0067K08.24 [Oryza sativa (japonica
  misc_feature (155)..(379): Homolog of NCBI NO: 2921823 NR Description: shoot-forming PKSF1 [Paulownia kawakamii]
  misc_feature (157)..(381): Homolog of NCBI NO: 39579226 NR Description: bZIP transcription factor RF2b [Oryza sativa
  misc_feature (143)..(381): Homolog of NCBI NO: 34394739 NR Description: putative transcription activator RF2a [Oryza

SEQ ID NO: 108313 - protein, 390 aa, Arabidopsis thaliana; identical to SEQ ID NO: 41605
  peptide (1)..(390): Ceres Seq. ID no. 13653829
  misc_feature (177)..(239): Pfam Name: bZIP transcription factor Pfam Description: bZIP transcription factor
  misc_feature (1)..(390): Homolog of NCBI NO: 15221391 NR Description: bZIP protein [Arabidopsis thaliana]
  misc_feature (1)..(390): Homolog of NCBI NO: 21553831 NR Description: transcriptional activator RF2a, putative
  misc_feature (1)..(377): Homolog of NCBI NO: 15224665 NR Description: bZIP transcription factor (POSF21) [Arabidopsis >gi|30684932|ref|NP_850167.1| bZIP transcription factor (POSF21) thaliana] >gi|1172441|sp|Q04088|PF21_ARATH Possible transcription
  misc_feature (1)..(227): Homolog of NCBI NO: 30684938 NR Description: bZIP transcription factor (POSF21) [Arabidopsis
  misc_feature (57)..(364): Homolog of NCBI NO: 7489564 NR Description: probable transcription activator RF2a - rice
  misc_feature (1)..(335): Homolog of NCBI NO: 21740783 NR Description: OSJNBa0067K08.24 [Oryza sativa (japonica
  misc_feature (129)..(355): Homolog of NCBI NO: 21740783 NR Description: OSJNBa0067K08.24 [Oryza sativa (japonica
  misc_feature (122)..(346): Homolog of NCBI NO: 2921823 NR Description: shoot-forming PKSF1 [Paulownia kawakamii]
  misc_feature (124)..(348): Homolog of NCBI NO: 39579226 NR Description: bZIP transcription factor RF2b [Oryza sativa
  misc_feature (110)..(348): Homolog of NCBI NO: 34394739 NR Description: putative transcription activator RF2a [Oryza

SEQ ID NO: 108314 - protein, 361 aa, Arabidopsis thaliana; identical to SEQ ID NO: 41606
  peptide (1)..(361): Ceres Seq. ID no. 13653830
  misc_feature (148)..(210): Pfam Name: bZIP transcription factor Pfam Description: bZIP transcription factor
  misc_feature (1)..(361): Homolog of NCBI NO: 15221391 NR Description: bZIP protein [Arabidopsis thaliana]
  misc_feature (1)..(361): Homolog of NCBI NO: 21553831 NR Description: transcriptional activator RF2a, putative
  misc_feature (1)..(348): Homolog of NCBI NO: 15224665 NR Description: bZIP transcription factor (POSF21) [Arabidopsis >gi|30684932|ref|NP_850167.1| bZIP transcription factor (POSF21) thaliana] >gi|1172441|sp|Q04088|PF21_ARATH Possible transcription
  misc_feature (1)..(198): Homolog of NCBI NO: 30684938 NR Description: bZIP transcription factor (POSF21) [Arabidopsis
  misc_feature (28)..(335): Homolog of NCBI NO: 7489564 NR Description: probable transcription activator RF2a - rice
  misc_feature (1)..(306): Homolog of NCBI NO: 21740783 NR Description: OSJNBa0067K08.24 [Oryza sativa (japonica
  misc_feature (100)..(326): Homolog of NCBI NO: 21740783 NR Description: OSJNBa0067K08.24 [Oryza sativa (japonica
  misc_feature (93)..(317): Homolog of NCBI NO: 2921823 NR Description: shoot-forming PKSF1 [Paulownia kawakamii]
  misc_feature (95)..(319): Homolog of NCBI NO: 39579226 NR Description: bZIP transcription factor RF2b [Oryza sativa
  misc_feature (81)..(319): Homolog of NCBI NO: 34394739 NR Description: putative transcription activator RF2a [Oryza

SEQ ID NO: 108315 - DNA, 1357 bp, Arabidopsis thaliana
  misc_feature (1)..(1357): Ceres Seq. ID no. 13653838
  misc_feature: MA Experiment ID: 20000451 Result: Down-regulated in Transcription
  misc_feature: MA Experiment 20000451 PARAMETER Experiment Name: At_CS6879_Shoots-Roots_P Parameter: Age (day) Value: 14
  misc_feature: MA Experiment 20000451 PARAMETER Experiment Name: At_CS6879_Shoots-Roots_P Parameter: Organism Value: A. thaliana
  misc_feature: MA Experiment 20000451 PARAMETER Experiment Name: At_CS6879_Shoots-Roots_P Parameter: Plant Line Value: CS6879 vs. WS
  misc_feature: MA Experiment 20000451 PARAMETER Experiment Name: At_CS6879_Shoots-Roots_P Parameter: Tissue Value: Roots
  misc_feature: MA Experiment ID: 20001905 Result: Down-regulated in Transcription
  misc_feature: MA Experiment 20001905 PARAMETER Experiment Name: At_Drought_Reproduction_P Parameter: Age (day) Value: 40
  misc_feature: MA Experiment 20001905 PARAMETER Experiment Name: At_Drought_Reproduction_P Parameter: Organism Value: A. thaliana
  misc_feature: MA Experiment 20001905 PARAMETER Experiment Name: At_Drought_Reproduction_P Parameter: Plant Line Value: WS
  misc_feature: MA Experiment 20001905 PARAMETER Experiment Name: At_Drought_Reproduction_P Parameter: Timepoint (day) Value: 10
  misc_feature: MA Experiment 20001905 PARAMETER Experiment Name: At_Drought_Reproduction_P Parameter: Tissue Value: Rosettes
  misc_feature: MA Experiment 20001905 PARAMETER Experiment Name: At_Drought_Reproduction_P Parameter: Treatment Value: Drought vs. No Drought
aagaccacactactctctctatctctctttctctctatctctctctatctctctcatttcttcctgcgtcaatggcgactcaaggtcaggttatcacttgcaaagctgcggtggcttacgagccgaacaagcctctggtcatcgaagatgtgcaagtggctccacctcaagctggtgaggttcggatcaagatcctctacactgctctttgtcacaccgacgcttacacttggagcggcaaggatcctgaaggtctctttccttgtattctaggtcatgaggctgctgggattgttgagagtgttggtgaaggagtaactgaagttcaagctggagatcatgttatcccttgttatcaagctgagtgtcgtgaatgcaagttttgcaaatctgggaagactaacctttgtggcaaggtgagatctgctactggtgttgggattatgatgaatgaccgtaagtcgaggttctcggttaatgggaaacccatttatcacttcatgggtacttccacgtttagtcagtatactgttgttcatgatgttagcgtcgccaaaattgatcctactgctcctttggataaagtttgccttcttggatgtggtgttcccactggccttggagcagtttggaatactgcaaaagtagaaccagggtcaaatgttgccattttcggtcttggcactgttggacttgctgttgccgagggtgcgaaaacagctggtgcttcaaggatcattggcattgacatcgatagcaagaagtatgaaactgcaaagaagtttggtgttaacgaatttgtgaacccaaaggatcacgacaagccaattcaggaagtgattgtcgatctcactgatggcggtgttgactacagctttgagtgcatcgggaatgtctccgtgatgagagctgcattggagtgctgtcacaagggatggggaacttcggtcatagttggtgttgcagcatcaggacaagagatatcaactcgtccgttccaactcgtgactggccgtgtgtggaaaggaacagcttttggtggtttcaagagtcgaacccaagtgccttggcttgtagaaaagtacatgaacaaggagataaaagtggatgaatacataacacacaacttgaccttgggagaaatcaataaggctttcgatctattgcacgaaggtacttgccttcgttgtgtcctcgataccagcaaatgactatatgggtcctctctgctttaatctatgtgttcttgtgactttcgtcttttatcggtattgacatttcctaagagcaacagactactctactcgtgtgtgtctcgtttctatcttatgcttcaataaaatatcaattaagaccg

SEQ ID NO: 108316 - protein, 402 aa, Arabidopsis thaliana
  peptide (1)..(402): Ceres Seq. ID no. 13653839
  misc_feature (24)..(402): Homolog of NCBI NO: 15240054 NR Description: alcohol dehydrogenase class III
  misc_feature (24)..(402): Homolog of NCBI NO: 2129562 NR Description: alcohol dehydrogenase (EC 1.1.1.1) class III -
  misc_feature (24)..(402): Homolog of NCBI NO: 1498024 NR Description: glutathione-dependent formaldehyde dehydrogenase
  misc_feature (25)..(402): Homolog of NCBI NO: 3023271 NR Description: ALCOHOL DEHYDROGENASE CLASS III
  misc_feature (26)..(398): Homolog of NCBI NO: 6225010 NR Description: ALCOHOL DEHYDROGENASE CLASS III
  misc_feature (25)..(398): Homolog of NCBI NO: 3121727 NR Description: ALCOHOL DEHYDROGENASE CLASS III
  misc_feature (24)..(398): Homolog of NCBI NO: 5902742 NR Description: ALCOHOL DEHYDROGENASE CLASS III FORMALDEHYDE DEHYDROGENASE) (FDH) (FALDH) >gi|2117436|pir||JC4967
  misc_feature (24)..(398): Homolog of NCBI NO: 18858257 NR Description: alcohol dehydrogenase 5 [Danio rerio]
  misc_feature (24)..(398): Homolog of NCBI NO: 25283011 NR Description: alcohol dehydrogenase (EC 1.1.1.1) 3 - zebra fish
  misc_feature (25)..(398): Homolog of NCBI NO: 5902740 NR Description: ALCOHOL DEHYDROGENASE CLASS III H CHAIN
DHTTLSISLSLYLSLSLSFLPASMATQGQVITCKAAVAYEPNKPLVIEDVQVAPPQAGEVRIKILYTALCHTDAYTWSGKDPEGLFPCILGHEAAGIVESVGEGVTEVQAGDHVIPCYQAECRECKFCKSGKTNLCGKVRSATGVGIMMNDRKSRFSVNGKPIYHFMGTSTFSQYTVVHDVSVAKIDPTAPLDKVCLLGCGVPTGLGAVWNTAKVEPGSNVAIFGLGTVGLAVAEGAKTAGASRIIGIDIDSKKYETAKKFGVNEFVNPKDHDKPIQEVIVDLTDGGVDYSFECIGNVSVMRAALECCHKGWGTSVIVGVAASGQEISTRPFQLVTGRVWKGTAFGGFKSRTQVPWLVEKYMNKEIKVDEYITHNLTLGEINKAFDLLHEGTCLRCVLDTSK

SEQ ID NO: 108317 - protein, 379 aa, Arabidopsis thaliana; identical to SEQ ID NO: 22337
  peptide (1)..(379): Ceres Seq. ID no. 13653840
  misc_feature (1)..(379): Homolog of NCBI NO: 15240054 NR Description: alcohol dehydrogenase class III
  misc_feature (1)..(379): Homolog of NCBI NO: 2129562 NR Description: alcohol dehydrogenase (EC 1.1.1.1) class III -
  misc_feature (1)..(379): Homolog of NCBI NO: 1498024 NR Description: glutathione-dependent formaldehyde dehydrogenase
  misc_feature (2)..(379): Homolog of NCBI NO: 3023271 NR Description: ALCOHOL DEHYDROGENASE CLASS III
  misc_feature (3)..(375): Homolog of NCBI NO: 6225010 NR Description: ALCOHOL DEHYDROGENASE CLASS III
  misc_feature (2)..(375): Homolog of NCBI NO: 3121727 NR Description: ALCOHOL DEHYDROGENASE CLASS III
  misc_feature (1)..(375): Homolog of NCBI NO: 5902742 NR Description: ALCOHOL DEHYDROGENASE CLASS III FORMALDEHYDE DEHYDROGENASE) (FDH) (FALDH) >gi|2117436|pir||JC4967
  misc_feature (1)..(375): Homolog of NCBI NO: 18858257 NR Description: alcohol dehydrogenase 5 [Danio rerio]
  misc_feature (1)..(375): Homolog of NCBI NO: 25283011 NR Description: alcohol dehydrogenase (EC 1.1.1.1) 3 - zebra fish
  misc_feature (2)..(375): Homolog of NCBI NO: 5902740 NR Description: ALCOHOL DEHYDROGENASE CLASS III H CHAIN

SEQ ID NO: 108318 - protein, 255 aa, Arabidopsis thaliana; identical to SEQ ID NO: 22338
  peptide (1)..(255): Ceres Seq. ID no. 13653841
  misc_feature (1)..(255): Homolog of NCBI NO: 15240054 NR Description: alcohol dehydrogenase class III
  misc_feature (1)..(255): Homolog of NCBI NO: 2129562 NR Description: alcohol dehydrogenase (EC 1.1.1.1) class III -
  misc_feature (1)..(255): Homolog of NCBI NO: 1498024 NR Description: glutathione-dependent formaldehyde dehydrogenase
  misc_feature (1)..(255): Homolog of NCBI NO: 3023271 NR Description: ALCOHOL DEHYDROGENASE CLASS III
  misc_feature (1)..(251): Homolog of NCBI NO: 6225010 NR Description: ALCOHOL DEHYDROGENASE CLASS III
  misc_feature (1)..(251): Homolog of NCBI NO: 3121727 NR Description: ALCOHOL DEHYDROGENASE CLASS III
  misc_feature (1)..(251): Homolog of NCBI NO: 5902742 NR Description: ALCOHOL DEHYDROGENASE CLASS III FORMALDEHYDE DEHYDROGENASE) (FDH) (FALDH) >gi|2117436|pir||JC4967
  misc_feature (1)..(251): Homolog of NCBI NO: 18858257 NR Description: alcohol dehydrogenase 5 [Danio rerio]
  misc_feature (1)..(251): Homolog of NCBI NO: 25283011 NR Description: alcohol dehydrogenase (EC 1.1.1.1) 3 - zebra fish
  misc_feature (1)..(251): Homolog of NCBI NO: 5902740 NR Description: ALCOHOL DEHYDROGENASE CLASS III H CHAIN

SEQ ID NO: 108319 - DNA, 1436 bp, Arabidopsis thaliana
  misc_feature (1)..(1436): Ceres Seq. ID no. 13653846
  misc_feature: MA Experiment ID: 108434 Result: Up-regulated in Transcription
  misc_feature: MA Experiment 108434 PARAMETER Experiment Name: At_Root_Tips_cDNA_P Parameter: Tissue Value: Root Tips
  misc_feature: MA Experiment ID: 108462 Result: Down-regulated in Transcription
  misc_feature: MA Experiment 108462 PARAMETER Experiment Name: At_Germinating_Seeds_cDNA_P Parameter: Age (day) Value: 2 vs. 0
  misc_feature: MA Experiment 108462 PARAMETER Experiment Name: At_Germinating_Seeds_cDNA_P Parameter: Tissue Value: Germinating Seeds
  misc_feature: MA Experiment ID: 108463 Result: Down-regulated in Transcription
  misc_feature: MA Experiment 108463 PARAMETER Experiment Name: At_Germinating_Seeds_cDNA_P Parameter: Age (day) Value: 3 vs. 0
  misc_feature: MA Experiment 108463 PARAMETER Experiment Name: At_Germinating_Seeds_cDNA_P Parameter: Tissue Value: Germinating Seeds
  misc_feature: MA Experiment ID: 108595 Result: Down-regulated in Transcription
  misc_feature: MA Experiment 108595 PARAMETER Experiment Name: At_Ler-pi_Ovule_cDNA_P Parameter: Plant Line Value: null
  misc_feature: MA Experiment ID: 20000087 Result: Down-regulated in Transcription
  misc_feature: MA Experiment 20000087 PARAMETER Experiment Name: At_100uM_ABA_Mutants_cDNA_P Parameter: Plant Line Value: WS
  misc_feature: MA Experiment 20000087 PARAMETER Experiment Name: At_100uM_ABA_Mutants_cDNA_P Parameter: Timepoint (hr) Value: 6
  misc_feature: MA Experiment 20000087 PARAMETER Experiment Name: At_100uM_ABA_Mutants_cDNA_P Parameter: Tissue Value: Aerial
  misc_feature: MA Experiment 20000087 PARAMETER Experiment Name: At_100uM_ABA_Mutants_cDNA_P Parameter: Treatment Value: 100uM ABA vs. No Treatment
  misc_feature: MA Experiment ID: 20000117 Result: Down-regulated in Transcription
  misc_feature: MA Experiment 20000117 PARAMETER Experiment Name: At_100uM_ABA_Mutants_cDNA_P Parameter: Plant Line Value: Columbia
  misc_feature: MA Experiment 20000117 PARAMETER Experiment Name: At_100uM_ABA_Mutants_cDNA_P Parameter: Timepoint (hr) Value: 6
  misc_feature: MA Experiment 20000117 PARAMETER Experiment Name: At_100uM_ABA_Mutants_cDNA_P Parameter: Tissue Value: Aerial
  misc_feature: MA Experiment 20000117 PARAMETER Experiment Name: At_100uM_ABA_Mutants_cDNA_P Parameter: Treatment Value: 100uM ABA vs. No Treatment
  misc_feature: MA Experiment ID: 20000185 Result: Up-regulated in Transcription
  misc_feature: MA Experiment 20000185 PARAMETER Experiment Name: At_Roots__P Parameter: Age (day) Value: 7 vs. 21
  misc_feature: MA Experiment 20000185 PARAMETER Experiment Name: At_Roots__P Parameter: Organism Value: A. thaliana
  misc_feature: MA Experiment 20000185 PARAMETER Experiment Name: At_Roots__P Parameter: Tissue Value: Roots vs. Whole Plant
  misc_feature: MA Experiment ID: 20000227 Result: Up-regulated in Transcription
  misc_feature: MA Experiment 20000227 PARAMETER Experiment Name: At_Root-Tips-vs-Tops_P Parameter: Tissue Value: Root Tips vs. Root Tops
  misc_feature: MA Experiment ID: 20000234 Result: Up-regulated in Transcription
  misc_feature: MA Experiment 20000234 PARAMETER Experiment Name: At_Siliques_P Parameter: Age (day) Value: 21
  misc_feature: MA Experiment 20000234 PARAMETER Experiment Name: At_Siliques_P Parameter: Organism Value: A. thaliana
  misc_feature: MA Experiment 20000234 PARAMETER Experiment Name: At_Siliques_P Parameter: Plant Line Value: WS
  misc_feature: MA Experiment 20000234 PARAMETER Experiment Name: At_Siliques_P Parameter: Tissue Value: Less Than 5mm Siliques vs. Whole Plant
  misc_feature: MA Experiment ID: 20000235 Result: Up-regulated in Transcription
  misc_feature: MA Experiment 20000235 PARAMETER Experiment Name: At_Siliques_P Parameter: Age (day) Value: 21
  misc_feature: MA Experiment 20000235 PARAMETER Experiment Name: At_Siliques_P Parameter: Organism Value: A. thaliana
  misc_feature: MA Experiment 20000235 PARAMETER Experiment Name: At_Siliques_P Parameter: Plant Line Value: WS
  misc_feature: MA Experiment 20000235 PARAMETER Experiment Name: At_Siliques_P Parameter: Tissue Value: 5-10mm Siliques vs. Whole Plant
  misc_feature: MA Experiment ID: 20000264 Result: Up-regulated in Transcription
  misc_feature: MA Experiment 20000264 PARAMETER Experiment Name: At_Open_Flower_P Parameter: Age (day) Value: 21
  misc_feature: MA Experiment 20000264 PARAMETER Experiment Name: At_Open_Flower_P Parameter: Plant Line Value: WS
  misc_feature: MA Experiment 20000264 PARAMETER Experiment Name: At_Open_Flower_P Parameter: Tissue Value: Open Flower vs. Whole Plant
  misc_feature: MA Experiment ID: 20000437 Result: Down-regulated in Transcription
  misc_feature: MA Experiment 20000437 PARAMETER Experiment Name: At_Drought_P Parameter: Age (day) Value: 8
  misc_feature: MA Experiment 20000437 PARAMETER Experiment Name: At_Drought_P Parameter: Organism Value: A. thaliana
  misc_feature: MA Experiment 20000437 PARAMETER Experiment Name: At_Drought_P Parameter: Plant Line Value: WS
  misc_feature: MA Experiment 20000437 PARAMETER Experiment Name: At_Drought_P Parameter: Timepoint (hr) Value: 24
  misc_feature: MA Experiment 20000437 PARAMETER Experiment Name: At_Drought_P Parameter: Tissue Value: Whole Plant
  misc_feature: MA Experiment 20000437 PARAMETER Experiment Name: At_Drought_P Parameter: Treatment Value: Drought vs. No Drought
  misc_feature: MA Experiment ID: 20001451 Result: Down-regulated in Transcription
  misc_feature: MA Experiment 20001451 PARAMETER Experiment Name: At_Far-red-induction_P Parameter: Age (day) Value: 7
  misc_feature: MA Experiment 20001451 PARAMETER Experiment Name: At_Far-red-induction_P Parameter: Light Value: Far-red vs. White
  misc_feature: MA Experiment 20001451 PARAMETER Experiment Name: At_Far-red-induction_P Parameter: Organism Value: A. thaliana
  misc_feature: MA Experiment 20001451 PARAMETER Experiment Name: At_Far-red-induction_P Parameter: Plant Line Value: Columbia
  misc_feature: MA Experiment 20001451 PARAMETER Experiment Name: At_Far-red-induction_P Parameter: Timepoint (hr) Value: 24
  misc_feature: MA Experiment 20001451 PARAMETER Experiment Name: At_Far-red-induction_P Parameter: Tissue Value: Whole Plant
  misc_feature: MA Experiment ID: 20001557 Result: Up-regulated in Transcription
  misc_feature: MA Experiment 20001557 PARAMETER Experiment Name: At_Drought_Soil_Dry_P Parameter: Age (day) Value: 27
  misc_feature: MA Experiment 20001557 PARAMETER Experiment Name: At_Drought_Soil_Dry_P Parameter: Organism Value: A. thaliana
  misc_feature: MA Experiment 20001557 PARAMETER Experiment Name: At_Drought_Soil_Dry_P Parameter: Plant Line Value: WS
  misc_feature: MA Experiment 20001557 PARAMETER Experiment Name: At_Drought_Soil_Dry_P Parameter: Post Timepoint (hr) Value: 3
  misc_feature: MA Experiment 20001557 PARAMETER Experiment Name: At_Drought_Soil_Dry_P Parameter: Post-Treatment Value: Re-Water vs. No Drought
  misc_feature: MA Experiment 20001557 PARAMETER Experiment Name: At_Drought_Soil_Dry_P Parameter: Timepoint (day) Value: 13
  misc_feature: MA Experiment 20001557 PARAMETER Experiment Name: At_Drought_Soil_Dry_P Parameter: Treatment Value: Drought vs. No Drought
  misc_feature: MA Experiment ID: 20001558 Result: Up-regulated in Transcription
  misc_feature: MA Experiment 20001558 PARAMETER Experiment Name: At_Drought_Soil_Dry_P Parameter: Age (day) Value: 27
  misc_feature: MA Experiment 20001558 PARAMETER Experiment Name: At_Drought_Soil_Dry_P Parameter: Organism Value: A. thaliana
  misc_feature: MA Experiment 20001558 PARAMETER Experiment Name: At_Drought_Soil_Dry_P Parameter: Plant Line Value: WS
  misc_feature: MA Experiment 20001558 PARAMETER Experiment Name: At_Drought_Soil_Dry_P Parameter: Post Timepoint (hr) Value: 6
  misc_feature: MA Experiment 20001558 PARAMETER Experiment Name: At_Drought_Soil_Dry_P Parameter: Post-Treatment Value: Re-Water vs. No Drought
  misc_feature: MA Experiment 20001558 PARAMETER Experiment Name: At_Drought_Soil_Dry_P Parameter: Timepoint (day) Value: 13
  misc_feature: MA Experiment 20001558 PARAMETER Experiment Name: At_Drought_Soil_Dry_P Parameter: Treatment Value: Drought vs. No Drought
  misc_feature: MA Experiment ID: 20001560 Result: Up-regulated in Transcription
  misc_feature: MA Experiment 20001560 PARAMETER Experiment Name: At_Drought_Soil_Dry_P Parameter: Age (day) Value: 28
  misc_feature: MA Experiment 20001560 PARAMETER Experiment Name: At_Drought_Soil_Dry_P Parameter: Organism Value: A. thaliana
  misc_feature: MA Experiment 20001560 PARAMETER Experiment Name: At_Drought_Soil_Dry_P Parameter: Plant Line Value: WS
  misc_feature: MA Experiment 20001560 PARAMETER Experiment Name: At_Drought_Soil_Dry_P Parameter: Post Timepoint (hr) Value: None
  misc_feature: MA Experiment 20001560 PARAMETER Experiment Name: At_Drought_Soil_Dry_P Parameter: Post-Treatment Value: None
  misc_feature: MA Experiment 20001560 PARAMETER Experiment Name: At_Drought_Soil_Dry_P Parameter: Timepoint (day) Value: 14
  misc_feature: MA Experiment 20001560 PARAMETER Experiment Name: At_Drought_Soil_Dry_P Parameter: Treatment Value: Drought vs. No Drought
  misc_feature: MA Experiment ID: 20001757 Result: Up-regulated in Transcription
  misc_feature: MA Experiment 20001757 PARAMETER Experiment Name: At_50mM_NH4NO3_L-to-H_P Parameter: Timepoint (hr) Value: 6
  misc_feature: MA Experiment 20001757 PARAMETER Experiment Name: At_50mM_NH4NO3_L-to-H_P Parameter: Tissue Value: Leaf
  misc_feature: MA Experiment 20001757 PARAMETER Experiment Name: At_50mM_NH4NO3_L-to-H_P Parameter: Treatment Value: 50mM NH4NO3 vs 100mM Mannitol
gtttacagcaaaaaatcgaaaatggttgcctcagccgccgcacgacctcttgtcaccgtccaaggacttgacggtgacatgagcaccgatcaatccaccaccgtcactttaccagacgtcatgactgctccagttcgacctgacattgtcaacttcgtccacgcccaaatctccaacaacagccgtcagccttacgcagtctccaaaaaggccggtcaccaaacctccgccgagtcctggggaaccggaagagccgtgtcacgtatccctcgtgttcctggtggtggaactcaccgtgccggtcaagcagcgttcggaaacatgtgtcgtggtggtcgtatgtttgctccgactaagatctggagacgctggcaccgtcgtgtcaatgtcaacatgaagaggcacgcgattgtttctgcaatcgctgctactgctgttccagctcttgtgatggctcgtggtcacaagatcgagaatgttcctgagatgcctcttgttgttagcgactcagctgaagctgtggagaagacatcagctgcgatcaaggtattgaagcagatcggtgcttacgacgatgcggagaaagctaagaacagtattggaattcgtcctggtaaaggtaaaatgaggaatcgtcgttacatttctaggaaaggtcctcttgttgtgtttggaactgaaggagccaagattgtgaaagcttttaggaatcttcctggtgttgagctttgtcacgttgagaggcttaacttgttgaaattagcccctggtggtcaccttggtaggtttgtgatttggactaagtctgcttttgagaagcttgaatctatctatggctcgtttgagaaaccatcagagaagaagaagggttacgtcttgcctcgtgcgaagatggtgaatgctgatcttgctaggattattaactccgatgaggtacagagtgtggtgaacccgattaaggatggttccaagagagcggttctgaagaagaatccattgaagaaccttaatgtgatgttcaagttgaatccttatgctaagaccgcaaagagaatgtctctgttggctgaagcttcaagggttaaggctaagaaggagaagctcgagaagaagaggaaagtcgtcactaaggaggaggcccaagcgatcaaagcagcaggcaaggcttggtatcagactatgatttcagacagtgactacaccgagttcgataacttcaccaagtggcttggcgctagtcagtaatgatgctctcgtcatcgcaaagtctcttatatctaggcaaagattttggttttctgatttatgttcttcgtttgtattggatttatctgggattttatgttgttgagttggtaagacgatttttaagaactatgatggtgtttttcaaactcttttcaatctgtttcccttagtgctctttactcgctatt

SEQ ID NO: 108320 - protein, 414 aa, Arabidopsis thaliana
  peptide (1)..(414): Ceres Seq. ID no. 13653847
  misc_feature (33)..(277): Pfam Name: Ribosomal protein L4/L1 family Pfam Description: Ribosomal protein L4/L1 family
  misc_feature (8)..(414): Homolog of NCBI NO: 15242558 NR Description: 60S ribosomal protein L4/L1 (RPL4D) [Arabidopsis
  misc_feature (8)..(414): Homolog of NCBI NO: 26450328 NR Description: putative 60S ribosomal protein [Arabidopsis
  misc_feature (9)..(414): Homolog of NCBI NO: 15232723 NR Description: 60S ribosomal protein L4/L1 (RPL4A) [Arabidopsis
  misc_feature (9)..(414): Homolog of NCBI NO: 21593543 NR Description: 60S ribosomal protein L4-B (L1) [Arabidopsis
  misc_feature (10)..(414): Homolog of NCBI NO: 17367847 NR Description: 60S ribosomal protein L4 (L1)
  misc_feature (15)..(414): Homolog of NCBI NO: 34393487 NR Description: putative 60S ribosomal protein L4/L1 [Oryza
  misc_feature (108)..(414): Homolog of NCBI NO: 13605831 NR Description: AT5g02870/F9G14_180 [Arabidopsis thaliana]
  misc_feature (11)..(414): Homolog of NCBI NO: 34897236 NR Description: putative 60S ribosomal protein L1 [Oryza sativa
  misc_feature (57)..(414): Homolog of NCBI NO: 6441068 NR Description: 60S ribosomal protein L4 [Chlamydomonas sp. HS-5]
  misc_feature (13)..(379): Homolog of NCBI NO: 1350686 NR Description: 60S RIBOSOMAL PROTEIN L4 (L1)
VYSKKSKMVASAAARPLVTVQGLDGDMSTDQSTTVTLPDVMTAPVRPDIVNFVHAQISNNSRQPYAVSKKAGHQTSAESWGTGRAVSRIPRVPGGGTHRAGQAAFGNMCRGGRMFAPTKIWRRWHRRVNVNMKRHAIVSAIAATAVPALVMARGHKIENVPEMPLVVSDSAEAVEKTSAAIKVLKQIGAYDDAEKAKNSIGIRPGKGKMRNRRYISRKGPLVVFGTEGAKIVKAFRNLPGVELCHVERLNLLKLAPGGHLGRFVIWTKSAFEKLESIYGSFEKPSEKKKGYVLPRAKMVNADLARIINSDEVQSVVNPIKDGSKRAVLKKNPLKNLNVMFKLNPYAKTAKRMSLLAEASRVKAKKEKLEKKRKVVTKEEAQAIKAAGKAWYQTMISDSDYTEFDNFTKWLGASQ

SEQ ID NO: 108321 - protein, 407 aa, Arabidopsis thaliana; identical to SEQ ID NO: 36166
  peptide (1)..(407): Ceres Seq. ID no. 13653848
  misc_feature (26)..(270): Pfam Name: Ribosomal protein L4/L1 family Pfam Description: Ribosomal protein L4/L1 family
  misc_feature (1)..(407): Homolog of NCBI NO: 15242558 NR Description: 60S ribosomal protein L4/L1 (RPL4D) [Arabidopsis
  misc_feature (1)..(407): Homolog of NCBI NO: 26450328 NR Description: putative 60S ribosomal protein [Arabidopsis
  misc_feature (2)..(407): Homolog of NCBI NO: 15232723 NR Description: 60S ribosomal protein L4/L1 (RPL4A) [Arabidopsis
  misc_feature (2)..(407): Homolog of NCBI NO: 21593543 NR Description: 60S ribosomal protein L4-B (L1) [Arabidopsis
  misc_feature (3)..(407): Homolog of NCBI NO: 17367847 NR Description: 60S ribosomal protein L4 (L1)
  misc_feature (8)..(407): Homolog of NCBI NO: 34393487 NR Description: putative 60S ribosomal protein L4/L1 [Oryza
  misc_feature (101)..(407): Homolog of NCBI NO: 13605831 NR Description: AT5g02870/F9G14_180 [Arabidopsis thaliana]
  misc_feature (4)..(407): Homolog of NCBI NO: 34897236 NR Description: putative 60S ribosomal protein L1 [Oryza sativa
  misc_feature (50)..(407): Homolog of NCBI NO: 6441068 NR Description: 60S ribosomal protein L4 [Chlamydomonas sp. HS-5]
  misc_feature (6)..(372): Homolog of NCBI NO: 1350686 NR Description: 60S RIBOSOMAL PROTEIN L4 (L1)

SEQ ID NO: 108322 - protein, 388 aa, Arabidopsis thaliana; identical to SEQ ID NO: 36167
  peptide (1)..(388): Ceres Seq. ID no. 13653849
  misc_feature (7)..(251): Pfam Name: Ribosomal protein L4/L1 family Pfam Description: Ribosomal protein L4/L1 family
  misc_feature (1)..(388): Homolog of NCBI NO: 15242558 NR Description: 60S ribosomal protein L4/L1 (RPL4D) [Arabidopsis
  misc_feature (1)..(388): Homolog of NCBI NO: 26450328 NR Description: putative 60S ribosomal protein [Arabidopsis
  misc_feature (1)..(388): Homolog of NCBI NO: 15232723 NR Description: 60S ribosomal protein L4/L1 (RPL4A) [Arabidopsis
  misc_feature (1)..(388): Homolog of NCBI NO: 21593543 NR Description: 60S ribosomal protein L4-B (L1) [Arabidopsis
  misc_feature (1)..(388): Homolog of NCBI NO: 17367847 NR Description: 60S ribosomal protein L4 (L1)
  misc_feature (1)..(388): Homolog of NCBI NO: 34393487 NR Description: putative 60S ribosomal protein L4/L1 [Oryza
  misc_feature (82)..(388): Homolog of NCBI NO: 13605831 NR Description: AT5g02870/F9G14_180 [Arabidopsis thaliana]
  misc_feature (1)..(388): Homolog of NCBI NO: 34897236 NR Description: putative 60S ribosomal protein L1 [Oryza sativa
  misc_feature (31)..(388): Homolog of NCBI NO: 6441068 NR Description: 60S ribosomal protein L4 [Chlamydomonas sp. HS-5]
  misc_feature (1)..(353): Homolog of NCBI NO: 1350686 NR Description: 60S RIBOSOMAL PROTEIN L4 (L1)

SEQ ID NO: 108323 - DNA, 1533 bp, Arabidopsis thaliana
  misc_feature (1)..(1533): Ceres Seq. ID no. 13653871
  misc_feature: MA Experiment ID: 20000185 Result: Up-regulated in Transcription
  misc_feature: MA Experiment 20000185 PARAMETER Experiment Name: At_Roots__P Parameter: Age (day) Value: 7 vs. 21
  misc_feature: MA Experiment 20000185 PARAMETER Experiment Name: At_Roots__P Parameter: Organism Value: A. thaliana
  misc_feature: MA Experiment 20000185 PARAMETER Experiment Name: At_Roots__P Parameter: Tissue Value: Roots vs. Whole Plant
  misc_feature: MA Experiment ID: 20000265 Result: Up-regulated in Transcription
  misc_feature: MA Experiment 20000265 PARAMETER Experiment Name: At_Open_Flower_P Parameter: Age (day) Value: 21
  misc_feature: MA Experiment 20000265 PARAMETER Experiment Name: At_Open_Flower_P Parameter: Plant Line Value: WS
  misc_feature: MA Experiment 20000265 PARAMETER Experiment Name: At_Open_Flower_P Parameter: Tissue Value: Closed Flower vs. Whole Plant
  misc_feature: MA Experiment ID: 20000286 Result: Up-regulated in Transcription
  misc_feature: MA Experiment 20000286 PARAMETER Experiment Name: At_Open_Flower_P Parameter: Age (day) Value: 21
  misc_feature: MA Experiment 20000286 PARAMETER Experiment Name: At_Open_Flower_P Parameter: Plant Line Value: WS
  misc_feature: MA Experiment 20000286 PARAMETER Experiment Name: At_Open_Flower_P Parameter: Tissue Value: Half Open vs. Whole Plant
  misc_feature: MA Experiment ID: 20000437 Result: Up-regulated in Transcription
  misc_feature: MA Experiment 20000437 PARAMETER Experiment Name: At_Drought_P Parameter: Age (day) Value: 8
  misc_feature: MA Experiment 20000437 PARAMETER Experiment Name: At_Drought_P Parameter: Organism Value: A. thaliana
  misc_feature: MA Experiment 20000437 PARAMETER Experiment Name: At_Drought_P Parameter: Plant Line Value: WS
  misc_feature: MA Experiment 20000437 PARAMETER Experiment Name: At_Drought_P Parameter: Timepoint (hr) Value: 24
  misc_feature: MA Experiment 20000437 PARAMETER Experiment Name: At_Drought_P Parameter: Tissue Value: Whole Plant
  misc_feature: MA Experiment 20000437 PARAMETER Experiment Name: At_Drought_P Parameter: Treatment Value: Drought vs. No Drought
  misc_feature: MA Experiment ID: 20000439 Result: Up-regulated in Transcription
  misc_feature: MA Experiment 20000439 PARAMETER Experiment Name: At_Roots__P Parameter: Age (day) Value: 14 vs. 21
  misc_feature: MA Experiment 20000439 PARAMETER Experiment Name: At_Roots__P Parameter: Organism Value: A. thaliana
  misc_feature: MA Experiment 20000439 PARAMETER Experiment Name: At_Roots__P Parameter: Tissue Value: Roots vs. Whole Plant
  misc_feature: MA Experiment ID: 20001556 Result: Up-regulated in Transcription
  misc_feature: MA Experiment 20001556 PARAMETER Experiment Name: At_Drought_Soil_Dry_P Parameter: Age (day) Value: 26
  misc_feature: MA Experiment 20001556 PARAMETER Experiment Name: At_Drought_Soil_Dry_P Parameter: Organism Value: A. thaliana
  misc_feature: MA Experiment 20001556 PARAMETER Experiment Name: At_Drought_Soil_Dry_P Parameter: Plant Line Value: WS
  misc_feature: MA Experiment 20001556 PARAMETER Experiment Name: At_Drought_Soil_Dry_P Parameter: Post Timepoint (hr) Value: None
  misc_feature: MA Experiment 20001556 PARAMETER Experiment Name: At_Drought_Soil_Dry_P Parameter: Post-Treatment Value: None
  misc_feature: MA Experiment 20001556 PARAMETER Experiment Name: At_Drought_Soil_Dry_P Parameter: Timepoint (day) Value: 12
  misc_feature: MA Experiment 20001556 PARAMETER Experiment Name: At_Drought_Soil_Dry_P Parameter: Treatment Value: Drought vs. No Drought
  misc_feature: MA Experiment ID: 20001757 Result: Down-regulated in Transcription
  misc_feature: MA Experiment 20001757 PARAMETER Experiment Name: At_50mM_NH4NO3_L-to-H_P Parameter: Timepoint (hr) Value: 6
  misc_feature: MA Experiment 20001757 PARAMETER Experiment Name: At_50mM_NH4NO3_L-to-H_P Parameter: Tissue Value: Leaf
  misc_feature: MA Experiment 20001757 PARAMETER Experiment Name: At_50mM_NH4NO3_L-to-H_P Parameter: Treatment Value: 50mM NH4NO3 vs 100mM Mannitol
  misc_feature: MA Experiment ID: 20001904 Result: Up-regulated in Transcription
  misc_feature: MA Experiment 20001904 PARAMETER Experiment Name: At_Drought_Reproduction_P Parameter: Age (day) Value: 37
  misc_feature: MA Experiment 20001904 PARAMETER Experiment Name: At_Drought_Reproduction_P Parameter: Organism Value: A. thaliana
  misc_feature: MA Experiment 20001904 PARAMETER Experiment Name: At_Drought_Reproduction_P Parameter: Plant Line Value: WS
  misc_feature: MA Experiment 20001904 PARAMETER Experiment Name: At_Drought_Reproduction_P Parameter: Timepoint (day) Value: 7
  misc_feature: MA Experiment 20001904 PARAMETER Experiment Name: At_Drought_Reproduction_P Parameter: Tissue Value: Rosettes
  misc_feature: MA Experiment 20001904 PARAMETER Experiment Name: At_Drought_Reproduction_P Parameter: Treatment Value: Drought vs. No Drought
  misc_feature: MA Experiment ID: 20001905 Result: Up-regulated in Transcription
  misc_feature: MA Experiment 20001905 PARAMETER Experiment Name: At_Drought_Reproduction_P Parameter: Age (day) Value: 40
  misc_feature: MA Experiment 20001905 PARAMETER Experiment Name: At_Drought_Reproduction_P Parameter: Organism Value: A. thaliana
  misc_feature: MA Experiment 20001905 PARAMETER Experiment Name: At_Drought_Reproduction_P Parameter: Plant Line Value: WS
  misc_feature: MA Experiment 20001905 PARAMETER Experiment Name: At_Drought_Reproduction_P Parameter: Timepoint (day) Value: 10
  misc_feature: MA Experiment 20001905 PARAMETER Experiment Name: At_Drought_Reproduction_P Parameter: Tissue Value: Rosettes
  misc_feature: MA Experiment 20001905 PARAMETER Experiment Name: At_Drought_Reproduction_P Parameter: Treatment Value: Drought vs. No Drought
aactcccgtatttgattctttcttcaagatatcaatcaagatcaagagtaagacagagacacaaaggcgagagctatgtcgtcgtcggtggatttcgtgacggaacaggggagatgcggcgacgatggtaacggcgccggagagacagtaaagaatggcgaaattgatcatttgctttccgaaccgtcggctccgactatttctctccctacggaatctttcctcagagcagcgacgttactcaagaaccaggttgtggaggccacgtggaaaggtggtgtcgaagctcttgcctctggttcgggtccagtgctggatccgactgtgtacacaggactactcggcacagcgttcacctgcttgaagtcgtacgaggtaacgcggaaccatcaagatctgctaacttgcgcagagataatcgacacgtgtgccaacgttgcgcgtgccacaaccaggcacgtgacatttttatgtggaagaggaggagtttgtacgcttggtgcaattgtagccaattacagaggggaccaatcaaagcgtgacttcttcctcggtctttttcttgagcttgcagaagagagagagttaccagcaggaccagaggaaggaggatttgggatgtcatatgaccttctctatggaagagcgggtttcctttgggctgctctgttcctaaaccgatatctcggccaaggaactgttcctgaccatctcttatcacccattgttgcagccatcttagccggtgggcgagttggagctgcagatcatgaagcttgtcctctgttatacaggtttcacggaacgcgattttggggtgctgcgaatggattagctggaatcttgtatgtattgctgcattttccactatcggaagaggatgttaaagatgttcaagggacattgaggtatatgatgagtaataggtttccgaacagcggaaactacccgtgcagcgaagggaatccgagggataagctagtccaatgggctcatggagcaaccggcatggccattactttggctaaagcatctcaggtgtttcccaaggaaagggatttccgcgaagcagccattgaagcaggagaagtagtgtggaagagtggcttggtgaagaaggtaggtttagctgatggagttgctggtaatgcctacgctttcttatccctttatcgcttaaccggagatgttgtatatgaagagagagcaaaagcgtttgcgagttacttgtgccgtgatgcgatagagctcgtgaatatgacaagccaagaaacagaacatgattattcgctattccggggactagctggaccagtatgcctctggttcgatcttgtgtcgccggtagattctaagtttcctggttatgagatataatttaaaaccaggtaaccgtaggttcttttatgactatctctttgtgaaaggatcttaggttctccggtttattccactttctataatctattgaagtaacttgagatttgggagaaacattcatagaaaacaagaataaaagtaacatgaaaagat

SEQ ID NO: 108324 - protein, 433 aa, Arabidopsis thaliana
  peptide (1)..(433): Ceres Seq. ID no. 13653872
  misc_feature (56)..(433): Pfam Name: Lanthionine synthetase C-like protein Pfam Description: Lanthionine synthetase C-like protein
  misc_feature (1)..(433): Homolog of NCBI NO: 15238395 NR Description: G protein-coupled receptor-related protein
  misc_feature (1)..(433): Homolog of NCBI NO: 15451140 NR Description: G protein-coupled receptor-like protein
  misc_feature (2)..(433): Homolog of NCBI NO: 8489877 NR Description: putative 7-transmembrane G-protein-coupled
  misc_feature (79)..(433): Homolog of NCBI NO: 15219126 NR Description: G protein-coupled receptor -related [Arabidopsis
  misc_feature (79)..(433): Homolog of NCBI NO: 37535720 NR Description: putative lanthionine synthetase [Oryza sativa
  misc_feature (69)..(433): Homolog of NCBI NO: 25411993 NR Description: hypothetical protein At2g20770 [imported] - thaliana >gi|4454471|gb|AAD20918.1| hypothetical protein
  misc_feature (69)..(433): Homolog of NCBI NO: 30681129 NR Description: expressed protein [Arabidopsis thaliana] unknown protein [Arabidopsis thaliana]
  misc_feature (81)..(433): Homolog of NCBI NO: 19526936 NR Description: RIKEN cDNA 1700003F10 [Mus musculus]
  misc_feature (81)..(433): Homolog of NCBI NO: 8923911 NR Description: LanC lantibiotic synthetase component C-like 2; specific adriamycin sensitivity protein; LanC (bacterial
  misc_feature (81)..(433): Homolog of NCBI NO: 19584353 NR Description: hypothetical protein [Homo sapiens]
MSSSVDFVTEQGRCGDDGNGAGETVKNGEIDHLLSEPSAPTISLPTESFLRAATLLKNQVVEATWKGGVEALASGSGPVLDPTVYTGLLGTAFTCLKSYEVTRNHQDLLTCAEIIDTCANVARATTRHVTFLCGRGGVCTLGAIVANYRGDQSKRDFFLGLFLELAEERELPAGPEEGGFGMSYDLLYGRAGFLWAALFLNRYLGQGTVPDHLLSPIVAAILAGGRVGAADHEACPLLYRFHGTRFWGAANGLAGILYVLLHFPLSEEDVKDVQGTLRYMMSNRFPNSGNYPCSEGNPRDKLVQWAHGATGMAITLAKASQVFPKERDFREAAIEAGEVVWKSGLVKKVGLADGVAGNAYAFLSLYRLTGDVVYEERAKAFASYLCRDAIELVNMTSQETEHDYSLFRGLAGPVCLWFDLVSPVDSKFPGYEI

SEQ ID NO: 108325 - protein, 252 aa, Arabidopsis thaliana; identical to SEQ ID NO: 45429
  peptide (1)..(252): Ceres Seq. ID no. 13653873
  misc_feature (1)..(252): Pfam Name: Lanthionine synthetase C-like protein Pfam Description: Lanthionine synthetase C-like protein
  misc_feature (1)..(252): Homolog of NCBI NO: 15238395 NR Description: G protein-coupled receptor-related protein
  misc_feature (1)..(252): Homolog of NCBI NO: 15451140 NR Description: G protein-coupled receptor-like protein
  misc_feature (1)..(252): Homolog of NCBI NO: 8489877 NR Description: putative 7-transmembrane G-protein-coupled
  misc_feature (1)..(252): Homolog of NCBI NO: 15219126 NR Description: G protein-coupled receptor -related [Arabidopsis
  misc_feature (1)..(252): Homolog of NCBI NO: 37535720 NR Description: putative lanthionine synthetase [Oryza sativa
  misc_feature (1)..(252): Homolog of NCBI NO: 25411993 NR Description: hypothetical protein At2g20770 [imported] - thaliana >gi|4454471|gb|AAD20918.1| hypothetical protein
  misc_feature (1)..(252): Homolog of NCBI NO: 30681129 NR Description: expressed protein [Arabidopsis thaliana] unknown protein [Arabidopsis thaliana]
  misc_feature (1)..(252): Homolog of NCBI NO: 19526936 NR Description: RIKEN cDNA 1700003F10 [Mus musculus]
  misc_feature (1)..(252): Homolog of NCBI NO: 8923911 NR Description: LanC lantibiotic synthetase component C-like 2; specific adriamycin sensitivity protein; LanC (bacterial
  misc_feature (1)..(252): Homolog of NCBI NO: 19584353 NR Description: hypothetical protein [Homo sapiens]

SEQ ID NO: 108326 - DNA, 1395 bp, Arabidopsis thaliana
  misc_feature (1)..(1395): Ceres Seq. ID no. 13653874
  misc_feature: MA Experiment ID: 20000179 Result: Up-regulated in Transcription
  misc_feature: MA Experiment 20000179 PARAMETER Experiment Name: At_Germinating_Seeds_P Parameter: Age (hr) Value: 6 vs. 0
  misc_feature: MA Experiment 20000179 PARAMETER Experiment Name: At_Germinating_Seeds_P Parameter: Tissue Value: Germinating Seeds
  misc_feature: MA Experiment ID: 20001451 Result: Down-regulated in Transcription
  misc_feature: MA Experiment 20001451 PARAMETER Experiment Name: At_Far-red-induction_P Parameter: Age (day) Value: 7
  misc_feature: MA Experiment 20001451 PARAMETER Experiment Name: At_Far-red-induction_P Parameter: Light Value: Far-red vs. White
  misc_feature: MA Experiment 20001451 PARAMETER Experiment Name: At_Far-red-induction_P Parameter: Organism Value: A. thaliana
  misc_feature: MA Experiment 20001451 PARAMETER Experiment Name: At_Far-red-induction_P Parameter: Plant Line Value: Columbia
  misc_feature: MA Experiment 20001451 PARAMETER Experiment Name: At_Far-red-induction_P Parameter: Timepoint (hr) Value: 24
  misc_feature: MA Experiment 20001451 PARAMETER Experiment Name: At_Far-red-induction_P Parameter: Tissue Value: Whole Plant
atggctgctcgtatcgggatcttctccgtcttcgtagctgtattgttatctatttctgcattttcctcagctcaggatctccagatcgtaaatgccgagcgaaggattgatttaagctcacatatcgtgaaggccttcttgactctcaaggttgaaaatattgggaaagatcctgctgcagaaatgcttcttgctttcccacctacccagatcaagaatttggctatggtacaagccctggcaactactggcaagaagaagaagaaaacttatttgccattagatgtaaaaccaactgaacaacctgatgcaccaaatgacactggatactaccgtgttacgtttattagccccttaggtccgggtgaaactgtttcacttgaggtgctttacatattgactcattccttggaacctttcccagtggagataacccagtcagaatctcaattggtttactatcatgatagtgcagtgatattgtcaccgtatcatgttaagcaacagacaacttttattaagactcctagtactagagtagagtcgttcactagcattgaacctgctaaccgggctggcaaagagatcaaatatggaccatatgaaaatcgtgcttcatactcttacacacctgtcatcattcacttcgagaataacagtccatttgctgttgttgaggagcttgtgcgtgaaattgagatttcacactggggtagccttcagattacagaaaattataggttgactcatgggggagcgaggcataagggtgttttctcaagggttgattatcaatctaaacgatcggtcagtggtgcatcctctttcaatgcgctccttgcagtcctacctcccagagtgaactctgtctactacagggatgagataggaaacatctctacttcacatttgcgtacaggctttagaaagtcagaacttgaatttgaaccccgctacccattatttggagggtggagtgcaacttttatcatcggctatagagttccattggaagactatctctttgaagcatctgatggcagacgttacttgaactttacctttgggtgcccgctcgtcgaaactattgttaacaagttgactatcaaagtcgtgcttcctgaaggatcaaaggacccttctgctgttttgccctttacagtcaatcaagagttgcaggtcaaatactcataccttgacattgtgggaagaaccgtggttgtgttgcaaaaagataacgtagttcccactcacaacgtacccttccaggtgtactatacattcaaaccaatatacatgctagcggaaccattcatgcttgtatcggctttcttcttagtatttgtggcttcgcttgcgtatgtacacatcgatctcaatatcgtcaggaagtag

SEQ ID NO: 108327 - protein, 464 aa, Arabidopsis thaliana
  peptide (1)..(464): Ceres Seq. ID no. 13653875
  misc_feature (26)..(456): Pfam Name: Ribophorin I Pfam Description: Ribophorin I
  misc_feature (1)..(464): Homolog of NCBI NO: 15226341 NR Description: ribophorin I -related [Arabidopsis thaliana]
  misc_feature (14)..(461): Homolog of NCBI NO: 7489438 NR Description: ribophorin I homolog - barley (fragment)
  misc_feature (5)..(461): Homolog of NCBI NO: 15223039 NR Description: ribophorin I
  misc_feature (4)..(463): Homolog of NCBI NO: 28277278 NR Description: Similar to ribophorin I [Xenopus laevis]
  misc_feature (1)..(463): Homolog of NCBI NO: 40674542 NR Description: Unknown (protein for MGC:76266) [Silurana
  misc_feature (11)..(463): Homolog of NCBI NO: 28175644 NR Description: Similar to ribophorin I [Xenopus laevis]
  misc_feature (19)..(463): Homolog of NCBI NO: 4506675 NR Description: ribophorin I [Homo sapiens]
  misc_feature (22)..(463): Homolog of NCBI NO: 9857227 NR Description: ribophorin I [Sus scrofa]
  misc_feature (4)..(461): Homolog of NCBI NO: 17542502 NR Description: Glycotransferase [Caenorhabditis elegans]
  misc_feature (19)..(463): Homolog of NCBI NO: 38512106 NR Description: Ribophorin I [Rattus norvegicus]
MAARIGIFSVFVAVLLSISAFSSAQDLQIVNAERRIDLSSHIVKAFLTLKVENIGKDPAAEMLLAFPPTQIKNLAMVQALATTGKKKKKTYLPLDVKPTEQPDAPNDTGYYRVTFISPLGPGETVSLEVLYILTHSLEPFPVEITQSESQLVYYHDSAVILSPYHVKQQTTFIKTPSTRVESFTSIEPANRAGKEIKYGPYENRASYSYTPVIIHFENNSPFAVVEELVREIEISHWGSLQITENYRLTHGGARHKGVFSRVDYQSKRSVSGASSFNALLAVLPPRVNSVYYRDEIGNISTSHLRTGFRKSELEFEPRYPLFGGWSATFIIGYRVPLEDYLFEASDGRRYLNFTFGCPLVETIVNKLTIKVVLPEGSKDPSAVLPFTVNQELQVKYSYLDIVGRTVVVLQKDNVVPTHNVPFQVYYTFKPIYMLAEPFMLVSAFFLVFVASLAYVHIDLNIVRK

SEQ ID NO: 108328 - protein, 403 aa, Arabidopsis thaliana
  peptide (1)..(403): Ceres Seq. ID no. 13653876
  misc_feature (1)..(395): Pfam Name: Ribophorin I Pfam Description: Ribophorin I
  misc_feature (1)..(403): Homolog of NCBI NO: 15226341 NR Description: ribophorin I -related [Arabidopsis thaliana]
  misc_feature (1)..(400): Homolog of NCBI NO: 7489438 NR Description: ribophorin I homolog - barley (fragment)
  misc_feature (1)..(400): Homolog of NCBI NO: 15223039 NR Description: ribophorin I
  misc_feature (1)..(402): Homolog of NCBI NO: 28277278 NR Description: Similar to ribophorin I [Xenopus laevis]
  misc_feature (1)..(402): Homolog of NCBI NO: 40674542 NR Description: Unknown (protein for MGC:76266) [Silurana
  misc_feature (1)..(402): Homolog of NCBI NO: 28175644 NR Description: Similar to ribophorin I [Xenopus laevis]
  misc_feature (1)..(402): Homolog of NCBI NO: 4506675 NR Description: ribophorin I [Homo sapiens]
  misc_feature (1)..(402): Homolog of NCBI NO: 9857227 NR Description: ribophorin I [Sus scrofa]
  misc_feature (1)..(400): Homolog of NCBI NO: 17542502 NR Description: Glycotransferase [Caenorhabditis elegans]
  misc_feature (1)..(402): Homolog of NCBI NO: 38512106 NR Description: Ribophorin I [Rattus norvegicus]
MLLAFPPTQIKNLAMVQALATTGKKKKKTYLPLDVKPTEQPDAPNDTGYYRVTFISPLGPGETVSLEVLYILTHSLEPFPVEITQSESQLVYYHDSAVILSPYHVKQQTTFIKTPSTRVESFTSIEPANRAGKEIKYGPYENRASYSYTPVIIHFENNSPFAVVEELVREIEISHWGSLQITENYRLTHGGARHKGVFSRVDYQSKRSVSGASSFNALLAVLPPRVNSVYYRDEIGNISTSHLRTGFRKSELEFEPRYPLFGGWSATFIIGYRVPLEDYLFEASDGRRYLNFTFGCPLVETIVNKLTIKVVLPEGSKDPSAVLPFTVNQELQVKYSYLDIVGRTVVVLQKDNVVPTHNVPFQVYYTFKPIYMLAEPFMLVSAFFLVFVASLAYVHIDLNIVRK

SEQ ID NO: 108329 - protein, 389 aa, Arabidopsis thaliana
  peptide (1)..(389): Ceres Seq. ID no. 13653877
  misc_feature (1)..(381): Pfam Name: Ribophorin I Pfam Description: Ribophorin I
  misc_feature (1)..(389): Homolog of NCBI NO: 15226341 NR Description: ribophorin I -related [Arabidopsis thaliana]
  misc_feature (1)..(386): Homolog of NCBI NO: 7489438 NR Description: ribophorin I homolog - barley (fragment)
  misc_feature (1)..(386): Homolog of NCBI NO: 15223039 NR Description: ribophorin I
  misc_feature (1)..(388): Homolog of NCBI NO: 28277278 NR Description: Similar to ribophorin I [Xenopus laevis]
  misc_feature (1)..(388): Homolog of NCBI NO: 40674542 NR Description: Unknown (protein for MGC:76266) [Silurana
  misc_feature (1)..(388): Homolog of NCBI NO: 28175644 NR Description: Similar to ribophorin I [Xenopus laevis]
  misc_feature (1)..(388): Homolog of NCBI NO: 4506675 NR Description: ribophorin I [Homo sapiens]
  misc_feature (1)..(388): Homolog of NCBI NO: 9857227 NR Description: ribophorin I [Sus scrofa]
  misc_feature (1)..(386): Homolog of NCBI NO: 17542502 NR Description: Glycotransferase [Caenorhabditis elegans]
  misc_feature (1)..(388): Homolog of NCBI NO: 38512106 NR Description: Ribophorin I [Rattus norvegicus]
MVQALATTGKKKKKTYLPLDVKPTEQPDAPNDTGYYRVTFISPLGPGETVSLEVLYILTHSLEPFPVEITQSESQLVYYHDSAVILSPYHVKQQTTFIKTPSTRVESFTSIEPANRAGKEIKYGPYENRASYSYTPVIIHFENNSPFAVVEELVREIEISHWGSLQITENYRLTHGGARHKGVFSRVDYQSKRSVSGASSFNALLAVLPPRVNSVYYRDEIGNISTSHLRTGFRKSELEFEPRYPLFGGWSATFIIGYRVPLEDYLFEASDGRRYLNFTFGCPLVETIVNKLTIKVVLPEGSKDPSAVLPFTVNQELQVKYSYLDIVGRTVVVLQKDNVVPTHNVPFQVYYTFKPIYMLAEPFMLVSAFFLVFVASLAYVHIDLNIVRK

SEQ ID NO: 108330 - DNA, 1100 bp, Arabidopsis thaliana
  misc_feature (1)..(1100): Ceres Seq. ID no. 13653878
  misc_feature: MA Experiment ID: 20000179 Result: Up-regulated in Transcription
  misc_feature: MA Experiment 20000179 PARAMETER Experiment Name: At_Germinating_Seeds_P Parameter: Age (hr) Value: 6 vs. 0
  misc_feature: MA Experiment 20000179 PARAMETER Experiment Name: At_Germinating_Seeds_P Parameter: Tissue Value: Germinating Seeds
  misc_feature: MA Experiment ID: 20000180 Result: Up-regulated in Transcription
  misc_feature: MA Experiment 20000180 PARAMETER Experiment Name: At_Germinating_Seeds_P Parameter: Age (hr) Value: 24 vs. 0
  misc_feature: MA Experiment 20000180 PARAMETER Experiment Name: At_Germinating_Seeds_P Parameter: Tissue Value: Germinating Seeds
  misc_feature: MA Experiment ID: 20000185 Result: Down-regulated in Transcription
  misc_feature: MA Experiment 20000185 PARAMETER Experiment Name: At_Roots__P Parameter: Age (day) Value: 7 vs. 21
  misc_feature: MA Experiment 20000185 PARAMETER Experiment Name: At_Roots__P Parameter: Organism Value: A. thaliana
  misc_feature: MA Experiment 20000185 PARAMETER Experiment Name: At_Roots__P Parameter: Tissue Value: Roots vs. Whole Plant
  misc_feature: MA Experiment ID: 20000227 Result: Down-regulated in Transcription
  misc_feature: MA Experiment 20000227 PARAMETER Experiment Name: At_Root-Tips-vs-Tops_P Parameter: Tissue Value: Root Tips vs. Root Tops
  misc_feature: MA Experiment ID: 20000436 Result: Down-regulated in Transcription
  misc_feature: MA Experiment 20000436 PARAMETER Experiment Name: At_Drought_P Parameter: Age (day) Value: 7
  misc_feature: MA Experiment 20000436 PARAMETER Experiment Name: At_Drought_P Parameter: Organism Value: A. thaliana
  misc_feature: MA Experiment 20000436 PARAMETER Experiment Name: At_Drought_P Parameter: Plant Line Value: WS
  misc_feature: MA Experiment 20000436 PARAMETER Experiment Name: At_Drought_P Parameter: Timepoint (hr) Value: 12
  misc_feature: MA Experiment 20000436 PARAMETER Experiment Name: At_Drought_P Parameter: Tissue Value: Whole Plant
  misc_feature: MA Experiment 20000436 PARAMETER Experiment Name: At_Drought_P Parameter: Treatment Value: Drought vs. No Drought
  misc_feature: MA Experiment ID: 20000437 Result: Down-regulated in Transcription
  misc_feature: MA Experiment 20000437 PARAMETER Experiment Name: At_Drought_P Parameter: Age (day) Value: 8
  misc_feature: MA Experiment 20000437 PARAMETER Experiment Name: At_Drought_P Parameter: Organism Value: A. thaliana
  misc_feature: MA Experiment 20000437 PARAMETER Experiment Name: At_Drought_P Parameter: Plant Line Value: WS
  misc_feature: MA Experiment 20000437 PARAMETER Experiment Name: At_Drought_P Parameter: Timepoint (hr) Value: 24
  misc_feature: MA Experiment 20000437 PARAMETER Experiment Name: At_Drought_P Parameter: Tissue Value: Whole Plant
  misc_feature: MA Experiment 20000437 PARAMETER Experiment Name: At_Drought_P Parameter: Treatment Value: Drought vs. No Drought
  misc_feature: MA Experiment ID: 20000439 Result: Down-regulated in Transcription
  misc_feature: MA Experiment 20000439 PARAMETER Experiment Name: At_Roots__P Parameter: Age (day) Value: 14 vs. 21
  misc_feature: MA Experiment 20000439 PARAMETER Experiment Name: At_Roots__P Parameter: Organism Value: A. thaliana
  misc_feature: MA Experiment 20000439 PARAMETER Experiment Name: At_Roots__P Parameter: Tissue Value: Roots vs. Whole Plant
  misc_feature: MA Experiment ID: 20001451 Result: Down-regulated in Transcription
  misc_feature: MA Experiment 20001451 PARAMETER Experiment Name: At_Far-red-induction_P Parameter: Age (day) Value: 7
  misc_feature: MA Experiment 20001451 PARAMETER Experiment Name: At_Far-red-induction_P Parameter: Light Value: Far-red vs. White
  misc_feature: MA Experiment 20001451 PARAMETER Experiment Name: At_Far-red-induction_P Parameter: Organism Value: A. thaliana
  misc_feature: MA Experiment 20001451 PARAMETER Experiment Name: At_Far-red-induction_P Parameter: Plant Line Value: Columbia
  misc_feature: MA Experiment 20001451 PARAMETER Experiment Name: At_Far-red-induction_P Parameter: Timepoint (hr) Value: 24
  misc_feature: MA Experiment 20001451 PARAMETER Experiment Name: At_Far-red-induction_P Parameter: Tissue Value: Whole Plant
  misc_feature: MA Experiment ID: 20001557 Result: Down-regulated in Transcription
  misc_feature: MA Experiment 20001557 PARAMETER Experiment Name: At_Drought_Soil_Dry_P Parameter: Age (day) Value: 27
  misc_feature: MA Experiment 20001557 PARAMETER Experiment Name: At_Drought_Soil_Dry_P Parameter: Organism Value: A. thaliana
  misc_feature: MA Experiment 20001557 PARAMETER Experiment Name: At_Drought_Soil_Dry_P Parameter: Plant Line Value: WS
  misc_feature: MA Experiment 20001557 PARAMETER Experiment Name: At_Drought_Soil_Dry_P Parameter: Post Timepoint (hr) Value: 3
  misc_feature: MA Experiment 20001557 PARAMETER Experiment Name: At_Drought_Soil_Dry_P Parameter: Post-Treatment Value: Re-Water vs. No Drought
  misc_feature: MA Experiment 20001557 PARAMETER Experiment Name: At_Drought_Soil_Dry_P Parameter: Timepoint (day) Value: 13
  misc_feature: MA Experiment 20001557 PARAMETER Experiment Name: At_Drought_Soil_Dry_P Parameter: Treatment Value: Drought vs. No Drought
  misc_feature: MA Experiment ID: 20001906 Result: Down-regulated in Transcription
  misc_feature: MA Experiment 20001906 PARAMETER Experiment Name: At_Drought_Reproduction_P Parameter: Age (day) Value: 35
  misc_feature: MA Experiment 20001906 PARAMETER Experiment Name: At_Drought_Reproduction_P Parameter: Organism Value: A. thaliana
  misc_feature: MA Experiment 20001906 PARAMETER Experiment Name: At_Drought_Reproduction_P Parameter: Plant Line Value: WS
  misc_feature: MA Experiment 20001906 PARAMETER Experiment Name: At_Drought_Reproduction_P Parameter: Timepoint (day) Value: 5
  misc_feature: MA Experiment 20001906 PARAMETER Experiment Name: At_Drought_Reproduction_P Parameter: Tissue Value: Siliques
  misc_feature: MA Experiment 20001906 PARAMETER Experiment Name: At_Drought_Reproduction_P Parameter: Treatment Value: Drought vs. No Drought
  misc_feature: MA Experiment ID: 20001908 Result: Down-regulated in Transcription
  misc_feature: MA Experiment 20001908 PARAMETER Experiment Name: At_Drought_Reproduction_P Parameter: Age (day) Value: 40
  misc_feature: MA Experiment 20001908 PARAMETER Experiment Name: At_Drought_Reproduction_P Parameter: Organism Value: A. thaliana
  misc_feature: MA Experiment 20001908 PARAMETER Experiment Name: At_Drought_Reproduction_P Parameter: Plant Line Value: WS
  misc_feature: MA Experiment 20001908 PARAMETER Experiment Name: At_Drought_Reproduction_P Parameter: Timepoint (day) Value: 10
  misc_feature: MA Experiment 20001908 PARAMETER Experiment Name: At_Drought_Reproduction_P Parameter: Tissue Value: Siliques
  misc_feature: MA Experiment 20001908 PARAMETER Experiment Name: At_Drought_Reproduction_P Parameter: Treatment Value: Drought vs. No Drought
aaaggctcttcttcttcttcgtcatcactactactactcctctctaacgttttcctcattcttcttaattccgatttttgagtgatggctatggcctctgcttctggttctgctctttgcttcactgatgcttctagctctcttgctttaagacgcgattgtggagctctttgcttgcctcctaggacagttacgtttggatttgtcgataaacctcttgtcaatctcgagcgattaagattatccactttgaagattagagcatcaaatgctactgctgtggagaatggaaagcaagaaggaagtgctgctgattctgataaagttccaactccagttgttataatcgaccaagattctgaccctgatgcaaccgttcttgaagttacattcggagatcgtcttggagctttacttgacactatgaatgcgctcaaaaacttgggattgaatgtcgtcaaggcaaatgtttaccttgattcttccggcaagcacaacaaatttgccattactagagcagatagtggaagaaaagtagaagaccctgaattgcttgaggccattcgtctcacagtcataaacaatctgcttgagtttcatcctgaatcaagttctcagttggcaatgggagcagcttttggtgttcttcctccaactgaaccgattgacgtggacatagcaacacatataaccattgaagatgatggaccagaccgcagtttactcttcatagaatcagcggatagacctggactattagttgagctggtgaagatcatttcagatatcagcgtcgctgttgaatctggagaattcgacaccgagggtttgttggctaaggtgaagtttcatgtaagctacaggaacaaagccctaatcaagcctctccagcaggtccttgctaatagtctgaggtacttcttgaggcgtccatcaactgacgagtcaagtttctgattatgcccatttttcaaaatctcaagtctcattcctcgtgactactatttttaccacttttttttttttttacatttgaccaaaataagctgcttcatacacctgtaatagtaacattatgcatcattcatccaatttacttt

SEQ ID NO: 108331 - protein, 290 aa, Arabidopsis thaliana; identical to SEQ ID NO: 49145
  peptide (1)..(290): Ceres Seq. ID no. 13653879
  misc_feature (212)..(281): Pfam Name: ACT domain Pfam Description: ACT domain
  misc_feature (1)..(290): Homolog of NCBI NO: 18394414 NR Description: expressed protein [Arabidopsis thaliana]
  misc_feature (74)..(290): Homolog of NCBI NO: 15238305 NR Description: ACT domain-containing protein [Arabidopsis
  misc_feature (74)..(290): Homolog of NCBI NO: 21592963 NR Description: unknown [Arabidopsis thaliana]
  misc_feature (84)..(198): Homolog of NCBI NO: 25370627 NR Description: protein F4N2.2 [imported] - Arabidopsis thaliana
  misc_feature (210)..(290): Homolog of NCBI NO: 25370627 NR Description: protein F4N2.2 [imported] - Arabidopsis thaliana
  misc_feature (84)..(198): Homolog of NCBI NO: 15221589 NR Description: uridylyltransferase-related [Arabidopsis
  misc_feature (210)..(290): Homolog of NCBI NO: 15221589 NR Description: uridylyltransferase-related [Arabidopsis

SEQ ID NO: 108332 - protein, 288 aa, Arabidopsis thaliana; identical to SEQ ID NO: 49146
  peptide (1)..(288): Ceres Seq. ID no. 13653880
  misc_feature (210)..(279): Pfam Name: ACT domain Pfam Description: ACT domain
  misc_feature (1)..(288): Homolog of NCBI NO: 18394414 NR Description: expressed protein [Arabidopsis thaliana]
  misc_feature (72)..(288): Homolog of NCBI NO: 15238305 NR Description: ACT domain-containing protein [Arabidopsis
  misc_feature (72)..(288): Homolog of NCBI NO: 21592963 NR Description: unknown [Arabidopsis thaliana]
  misc_feature (82)..(196): Homolog of NCBI NO: 25370627 NR Description: protein F4N2.2 [imported] - Arabidopsis thaliana
  misc_feature (208)..(288): Homolog of NCBI NO: 25370627 NR Description: protein F4N2.2 [imported] - Arabidopsis thaliana
  misc_feature (82)..(196): Homolog of NCBI NO: 15221589 NR Description: uridylyltransferase-related [Arabidopsis
  misc_feature (208)..(288): Homolog of NCBI NO: 15221589 NR Description: uridylyltransferase-related [Arabidopsis

SEQ ID NO: 108333 - protein, 177 aa, Arabidopsis thaliana; identical to SEQ ID NO: 49147
  peptide (1)..(177): Ceres Seq. ID no. 13653881
  misc_feature (99)..(168): Pfam Name: ACT domain Pfam Description: ACT domain
  misc_feature (1)..(177): Homolog of NCBI NO: 18394414 NR Description: expressed protein [Arabidopsis thaliana]
  misc_feature (1)..(177): Homolog of NCBI NO: 15238305 NR Description: ACT domain-containing protein [Arabidopsis
  misc_feature (1)..(177): Homolog of NCBI NO: 21592963 NR Description: unknown [Arabidopsis thaliana]
  misc_feature (1)..(85): Homolog of NCBI NO: 25370627 NR Description: protein F4N2.2 [imported] - Arabidopsis thaliana
  misc_feature (97)..(177): Homolog of NCBI NO: 25370627 NR Description: protein F4N2.2 [imported] - Arabidopsis thaliana
  misc_feature (1)..(85): Homolog of NCBI NO: 15221589 NR Description: uridylyltransferase-related [Arabidopsis
  misc_feature (97)..(177): Homolog of NCBI NO: 15221589 NR Description: uridylyltransferase-related [Arabidopsis

SEQ ID NO: 108334 - DNA, 1274 bp, Arabidopsis thaliana
  misc_feature (1)..(1274): Ceres Seq. ID no. 13653882
  misc_feature: MA Experiment ID: 20000169 Result: Down-regulated in Transcription
  misc_feature: MA Experiment 20000169 PARAMETER Experiment Name: At_100uM_ABA_P Parameter: Age (day) Value: 14
  misc_feature: MA Experiment 20000169 PARAMETER Experiment Name: At_100uM_ABA_P Parameter: Organism Value: A. thaliana
  misc_feature: MA Experiment 20000169 PARAMETER Experiment Name: At_100uM_ABA_P Parameter: Plant Line Value: WS
  misc_feature: MA Experiment 20000169 PARAMETER Experiment Name: At_100uM_ABA_P Parameter: Timepoint (hr) Value: 6
  misc_feature: MA Experiment 20000169 PARAMETER Experiment Name: At_100uM_ABA_P Parameter: Tissue Value: Aerial
  misc_feature: MA Experiment 20000169 PARAMETER Experiment Name: At_100uM_ABA_P Parameter: Treatment Value: 100uM ABA vs. No Treatment
  misc_feature: MA Experiment ID: 20000184 Result: Up-regulated in Transcription
  misc_feature: MA Experiment 20000184 PARAMETER Experiment Name: At_Shoots__P Parameter: Age (day) Value: 7
  misc_feature: MA Experiment 20000184 PARAMETER Experiment Name: At_Shoots__P Parameter: Tissue Value: Shoots vs. Whole Plant
  misc_feature: MA Experiment ID: 20000185 Result: Down-regulated in Transcription
  misc_feature: MA Experiment 20000185 PARAMETER Experiment Name: At_Roots__P Parameter: Age (day) Value: 7 vs. 21
  misc_feature: MA Experiment 20000185 PARAMETER Experiment Name: At_Roots__P Parameter: Organism Value: A. thaliana
  misc_feature: MA Experiment 20000185 PARAMETER Experiment Name: At_Roots__P Parameter: Tissue Value: Roots vs. Whole Plant
  misc_feature: MA Experiment ID: 20000437 Result: Down-regulated in Transcription
  misc_feature: MA Experiment 20000437 PARAMETER Experiment Name: At_Drought_P Parameter: Age (day) Value: 8
  misc_feature: MA Experiment 20000437 PARAMETER Experiment Name: At_Drought_P Parameter: Organism Value: A. thaliana
  misc_feature: MA Experiment 20000437 PARAMETER Experiment Name: At_Drought_P Parameter: Plant Line Value: WS
  misc_feature: MA Experiment 20000437 PARAMETER Experiment Name: At_Drought_P Parameter: Timepoint (hr) Value: 24
  misc_feature: MA Experiment 20000437 PARAMETER Experiment Name: At_Drought_P Parameter: Tissue Value: Whole Plant
  misc_feature: MA Experiment 20000437 PARAMETER Experiment Name: At_Drought_P Parameter: Treatment Value: Drought vs. No Drought
  misc_feature: MA Experiment ID: 20000438 Result: Up-regulated in Transcription
  misc_feature: MA Experiment 20000438 PARAMETER Experiment Name: At_Shoots__P Parameter: Age (day) Value: 14
  misc_feature: MA Experiment 20000438 PARAMETER Experiment Name: At_Shoots__P Parameter: Tissue Value: Shoots vs. Whole Plant
  misc_feature: MA Experiment ID: 20000439 Result: Down-regulated in Transcription
  misc_feature: MA Experiment 20000439 PARAMETER Experiment Name: At_Roots__P Parameter: Age (day) Value: 14 vs. 21
  misc_feature: MA Experiment 20000439 PARAMETER Experiment Name: At_Roots__P Parameter: Organism Value: A. thaliana
  misc_feature: MA Experiment 20000439 PARAMETER Experiment Name: At_Roots__P Parameter: Tissue Value: Roots vs. Whole Plant
  misc_feature: MA Experiment ID: 20000574 Result: Down-regulated in Transcription
  misc_feature: MA Experiment 20000574 PARAMETER Experiment Name: At_100uM_ABA_Mutants__P Parameter: Organism Value: A. thaliana
  misc_feature: MA Experiment 20000574 PARAMETER Experiment Name: At_100uM_ABA_Mutants__P Parameter: Plant Line Value: CS23 vs. Ler wt
  misc_feature: MA Experiment 20000574 PARAMETER Experiment Name: At_100uM_ABA_Mutants__P Parameter: Timepoint (hr) Value: N/A
  misc_feature: MA Experiment 20000574 PARAMETER Experiment Name: At_100uM_ABA_Mutants__P Parameter: Tissue Value: Whole Plant
  misc_feature: MA Experiment 20000574 PARAMETER Experiment Name: At_100uM_ABA_Mutants__P Parameter: Treatment Value: None
  misc_feature: MA Experiment ID: 20000794 Result: Down-regulated in Transcription
  misc_feature: MA Experiment 20000794 PARAMETER Experiment Name: At_Petals_P Parameter: Age (day) Value: 23-25 days
  misc_feature: MA Experiment 20000794 PARAMETER Experiment Name: At_Petals_P Parameter: Plant Line Value: WS
  misc_feature: MA Experiment 20000794 PARAMETER Experiment Name: At_Petals_P Parameter: Tissue Value: Petals vs. Whole plant
  misc_feature: MA Experiment ID: 20001248 Result: Up-regulated in Transcription
  misc_feature: MA Experiment 20001248 PARAMETER Experiment Name: At_Far-red-induction_P Parameter: Age (day) Value: 7
  misc_feature: MA Experiment 20001248 PARAMETER Experiment Name: At_Far-red-induction_P Parameter: Light Value: Far-red vs. White
  misc_feature: MA Experiment 20001248 PARAMETER Experiment Name: At_Far-red-induction_P Parameter: Organism Value: A. thaliana
  misc_feature: MA Experiment 20001248 PARAMETER Experiment Name: At_Far-red-induction_P Parameter: Plant Line Value: Columbia
  misc_feature: MA Experiment 20001248 PARAMETER Experiment Name: At_Far-red-induction_P Parameter: Timepoint (hr) Value: 4
  misc_feature: MA Experiment 20001248 PARAMETER Experiment Name: At_Far-red-induction_P Parameter: Tissue Value: Whole Plant
  misc_feature: MA Experiment ID: 20001560 Result: Down-regulated in Transcription
  misc_feature: MA Experiment 20001560 PARAMETER Experiment Name: At_Drought_Soil_Dry_P Parameter: Age (day) Value: 28
  misc_feature: MA Experiment 20001560 PARAMETER Experiment Name: At_Drought_Soil_Dry_P Parameter: Organism Value: A. thaliana
  misc_feature: MA Experiment 20001560 PARAMETER Experiment Name: At_Drought_Soil_Dry_P Parameter: Plant Line Value: WS
  misc_feature: MA Experiment 20001560 PARAMETER Experiment Name: At_Drought_Soil_Dry_P Parameter: Post Timepoint (hr) Value: None
  misc_feature: MA Experiment 20001560 PARAMETER Experiment Name: At_Drought_Soil_Dry_P Parameter: Post-Treatment Value: None
  misc_feature: MA Experiment 20001560 PARAMETER Experiment Name: At_Drought_Soil_Dry_P Parameter: Timepoint (day) Value: 14
  misc_feature: MA Experiment 20001560 PARAMETER Experiment Name: At_Drought_Soil_Dry_P Parameter: Treatment Value: Drought vs. No Drought
  misc_feature: MA Experiment ID: 20001757 Result: Up-regulated in Transcription
  misc_feature: MA Experiment 20001757 PARAMETER Experiment Name: At_50mM_NH4NO3_L-to-H_P Parameter: Timepoint (hr) Value: 6
  misc_feature: MA Experiment 20001757 PARAMETER Experiment Name: At_50mM_NH4NO3_L-to-H_P Parameter: Tissue Value: Leaf
  misc_feature: MA Experiment 20001757 PARAMETER Experiment Name: At_50mM_NH4NO3_L-to-H_P Parameter: Treatment Value: 50mM NH4NO3 vs 100mM Mannitol
  misc_feature: MA Experiment ID: 20001904 Result: Down-regulated in Transcription
  misc_feature: MA Experiment 20001904 PARAMETER Experiment Name: At_Drought_Reproduction_P Parameter: Age (day) Value: 37
  misc_feature: MA Experiment 20001904 PARAMETER Experiment Name: At_Drought_Reproduction_P Parameter: Organism Value: A. thaliana
  misc_feature: MA Experiment 20001904 PARAMETER Experiment Name: At_Drought_Reproduction_P Parameter: Plant Line Value: WS
  misc_feature: MA Experiment 20001904 PARAMETER Experiment Name: At_Drought_Reproduction_P Parameter: Timepoint (day) Value: 7
  misc_feature: MA Experiment 20001904 PARAMETER Experiment Name: At_Drought_Reproduction_P Parameter: Tissue Value: Rosettes
  misc_feature: MA Experiment 20001904 PARAMETER Experiment Name: At_Drought_Reproduction_P Parameter: Treatment Value: Drought vs. No Drought
  misc_feature: MA Experiment ID: 20001905 Result: Down-regulated in Transcription
  misc_feature: MA Experiment 20001905 PARAMETER Experiment Name: At_Drought_Reproduction_P Parameter: Age (day) Value: 40
  misc_feature: MA Experiment 20001905 PARAMETER Experiment Name: At_Drought_Reproduction_P Parameter: Organism Value: A. thaliana
  misc_feature: MA Experiment 20001905 PARAMETER Experiment Name: At_Drought_Reproduction_P Parameter: Plant Line Value: WS
  misc_feature: MA Experiment 20001905 PARAMETER Experiment Name: At_Drought_Reproduction_P Parameter: Timepoint (day) Value: 10
  misc_feature: MA Experiment 20001905 PARAMETER Experiment Name: At_Drought_Reproduction_P Parameter: Tissue Value: Rosettes
  misc_feature: MA Experiment 20001905 PARAMETER Experiment Name: At_Drought_Reproduction_P Parameter: Treatment Value: Drought vs. No Drought
actgctgcacaagtgtagaggcagtggcacaacatctttaagaaagagagagagaaagagtcatttattcatttcctcgcttaaaaatcttgagcacccagacagaattcttctttcttctttctggggttgagaaaaatgagtgaaagagatgatggattggggctaagtttgagcttgagtttaggttttaatcaaaaggacccgtcttcgaggttaaatccaatgcctctggcttcttatgcatcttcatcacacatgcagcatatgcagcagagcaattataaccatcctcaaaagattcagaacacttggattaacatgtttcagtcatcagagagaaactcggacatgagatcgtttctccggggaatagacgtgaacagagctccatcgacggtggtggttgacgtggaggatgaaggcgccggagtttcgtctccgaacagcaccgtctcaagcgtgatgagcgggaagaagagcgagcgagagctaatggctgcggcaggtgcagttggaggaggtagagtagaagataatgagattgagagagcttcttgctcgctcggcggtggtagcgacgatgaagacggtagcgggaacggagatgacagttcgaggaagaaactccgattgtctaaagaacaagctttggttcttgaagaaacttttaaagaacatagtacactcaatccgaagcaaaagatggctttggctaagcaattgaatctgaggacgagacaagttgaagtgtggttccaaaaccgaagggcaaggacgaagctgaagcaaacggaagtagactgtgaatatcttaagagatgttgcgagaatctaacggatgagaatcggagattgcaaaaggaagtgagtgagcttagggctttaaagctttctccacacttatacatgcacatgaaacctcccactactctcacaatgtgtccttcttgcgagcgagtcgctgttacgtcatcttcgtcatcggtggctcctcctgtgatgaattcatcgtctccgatgggtccgatgagtccgtgggctgccatgcctctacggcaacgacctgctgctggttctcattagagtttaattagtctaaagataataggtttggtgatttgtttttattatattgttgaacggacttggaagttcttttcaagagttggtcccatgctcttctttcctttgttttattcagtttctatttatagctgaattctggataatggaaaatctactaatattattgtccaattattagtttgggg

SEQ ID NO: 108335 - protein, 315 aa, Arabidopsis thaliana
  peptide (1)..(315): Ceres Seq. ID no. 13653883
  misc_feature (1)..(120): Pfam Name: HD-ZIP protein N terminus Pfam Description: HD-ZIP protein N terminus
  misc_feature (1)..(315): Homolog of NCBI NO: 15232311 NR Description: homeobox-leucine zipper protein HAT3 [Arabidopsis
  misc_feature (1)..(315): Homolog of NCBI NO: 25453563 NR Description: homeobox protein HAT3 [imported] - Arabidopsis >gi|549889|gb|AAA56904.1| homeobox protein
  misc_feature (1)..(309): Homolog of NCBI NO: 15225368 NR Description: homeobox-leucine zipper protein Athb-4
  misc_feature (12)..(311): Homolog of NCBI NO: 18034437 NR Description: homeodomain leucine zipper protein CPHB-3
  misc_feature (65)..(304): Homolog of NCBI NO: 25457630 NR Description: homeobox protein THOM1 [imported] - tomato
  misc_feature (59)..(304): Homolog of NCBI NO: 15236076 NR Description: homeobox-leucine zipper protein HAT1 (HD-Zip
  misc_feature (59)..(304): Homolog of NCBI NO: 21592922 NR Description: homeobox-leucine zipper protein HAT1 (hd-zip
  misc_feature (71)..(303): Homolog of NCBI NO: 15238078 NR Description: homeobox-leucine zipper protein HAT2 (HD-ZIP
  misc_feature (94)..(309): Homolog of NCBI NO: 25487873 NR Description: homeobox-leucine zipper protein [imported] -
MSERDDGLGLSLSLSLGFNQKDPSSRLNPMPLASYASSSHMQHMQQSNYNHPQKIQNTWINMFQSSERNSDMRSFLRGIDVNRAPSTVVVDVEDEGAGVSSPNSTVSSVMSGKKSERELMAAAGAVGGGRVEDNEIERASCSLGGGSDDEDGSGNGDDSSRKKLRLSKEQALVLEETFKEHSTLNPKQKMALAKQLNLRTRQVEVWFQNRRARTKLKQTEVDCEYLKRCCENLTDENRRLQKEVSELRALKLSPHLYMHMKPPTTLTMCPSCERVAVTSSSSSVAPPVMNSSSPMGPMSPWAAMPLRQRPAAGSH

SEQ ID NO: 108336 - protein, 286 aa, Arabidopsis thaliana
  peptide (1)..(286): Ceres Seq. ID no. 13653884
  misc_feature (1)..(91): Pfam Name: HD-ZIP protein N terminus Pfam Description: HD-ZIP protein N terminus
  misc_feature (1)..(286): Homolog of NCBI NO: 15232311 NR Description: homeobox-leucine zipper protein HAT3 [Arabidopsis
  misc_feature (1)..(286): Homolog of NCBI NO: 25453563 NR Description: homeobox protein HAT3 [imported] - Arabidopsis >gi|549889|gb|AAA56904.1| homeobox protein
  misc_feature (1)..(280): Homolog of NCBI NO: 15225368 NR Description: homeobox-leucine zipper protein Athb-4
  misc_feature (1)..(282): Homolog of NCBI NO: 18034437 NR Description: homeodomain leucine zipper protein CPHB-3
  misc_feature (36)..(275): Homolog of NCBI NO: 25457630 NR Description: homeobox protein THOM1 [imported] - tomato
  misc_feature (30)..(275): Homolog of NCBI NO: 15236076 NR Description: homeobox-leucine zipper protein HAT1 (HD-Zip
  misc_feature (30)..(275): Homolog of NCBI NO: 21592922 NR Description: homeobox-leucine zipper protein HAT1 (hd-zip
  misc_feature (42)..(274): Homolog of NCBI NO: 15238078 NR Description: homeobox-leucine zipper protein HAT2 (HD-ZIP
  misc_feature (65)..(280): Homolog of NCBI NO: 25487873 NR Description: homeobox-leucine zipper protein [imported] -
MPLASYASSSHMQHMQQSNYNHPQKIQNTWINMFQSSERNSDMRSFLRGIDVNRAPSTVVVDVEDEGAGVSSPNSTVSSVMSGKKSERELMAAAGAVGGGRVEDNEIERASCSLGGGSDDEDGSGNGDDSSRKKLRLSKEQALVLEETFKEHSTLNPKQKMALAKQLNLRTRQVEVWFQNRRARTKLKQTEVDCEYLKRCCENLTDENRRLQKEVSELRALKLSPHLYMHMKPPTTLTMCPSCERVAVTSSSSSVAPPVMNSSSPMGPMSPWAAMPLRQRPAAGSH

SEQ ID NO: 108337 - protein, 275 aa, Arabidopsis thaliana
  peptide (1)..(275): Ceres Seq. ID no. 13653885
  misc_feature (1)..(80): Pfam Name: HD-ZIP protein N terminus Pfam Description: HD-ZIP protein N terminus
  misc_feature (1)..(275): Homolog of NCBI NO: 15232311 NR Description: homeobox-leucine zipper protein HAT3 [Arabidopsis
  misc_feature (1)..(275): Homolog of NCBI NO: 25453563 NR Description: homeobox protein HAT3 [imported] - Arabidopsis >gi|549889|gb|AAA56904.1| homeobox protein
  misc_feature (1)..(269): Homolog of NCBI NO: 15225368 NR Description: homeobox-leucine zipper protein Athb-4
  misc_feature (1)..(271): Homolog of NCBI NO: 18034437 NR Description: homeodomain leucine zipper protein CPHB-3
  misc_feature (25)..(264): Homolog of NCBI NO: 25457630 NR Description: homeobox protein THOM1 [imported] - tomato
  misc_feature (19)..(264): Homolog of NCBI NO: 15236076 NR Description: homeobox-leucine zipper protein HAT1 (HD-Zip
  misc_feature (19)..(264): Homolog of NCBI NO: 21592922 NR Description: homeobox-leucine zipper protein HAT1 (hd-zip
  misc_feature (31)..(263): Homolog of NCBI NO: 15238078 NR Description: homeobox-leucine zipper protein HAT2 (HD-ZIP
  misc_feature (54)..(269): Homolog of NCBI NO: 25487873 NR Description: homeobox-leucine zipper protein [imported] -
MQHMQQSNYNHPQKIQNTWINMFQSSERNSDMRSFLRGIDVNRAPSTVVVDVEDEGAGVSSPNSTVSSVMSGKKSERELMAAAGAVGGGRVEDNEIERASCSLGGGSDDEDGSGNGDDSSRKKLRLSKEQALVLEETFKEHSTLNPKQKMALAKQLNLRTRQVEVWFQNRRARTKLKQTEVDCEYLKRCCENLTDENRRLQKEVSELRALKLSPHLYMHMKPPTTLTMCPSCERVAVTSSSSSVAPPVMNSSSPMGPMSPWAAMPLRQRPAAGSH

SEQ ID NO: 108338 - DNA, 1233 bp, Arabidopsis thaliana
  misc_feature (1)..(1233): Ceres Seq. ID no. 13653890
  misc_feature: MA Experiment ID: 20000214 Result: Down-regulated in Transcription
  misc_feature: MA Experiment 20000214 PARAMETER Experiment Name: At_4deg_Cold_P Parameter: Timepoint (hr) Value: 6
  misc_feature: MA Experiment ID: 20000437 Result: Down-regulated in Transcription
  misc_feature: MA Experiment 20000437 PARAMETER Experiment Name: At_Drought_P Parameter: Age (day) Value: 8
  misc_feature: MA Experiment 20000437 PARAMETER Experiment Name: At_Drought_P Parameter: Organism Value: A. thaliana
  misc_feature: MA Experiment 20000437 PARAMETER Experiment Name: At_Drought_P Parameter: Plant Line Value: WS
  misc_feature: MA Experiment 20000437 PARAMETER Experiment Name: At_Drought_P Parameter: Timepoint (hr) Value: 24
  misc_feature: MA Experiment 20000437 PARAMETER Experiment Name: At_Drought_P Parameter: Tissue Value: Whole Plant
  misc_feature: MA Experiment 20000437 PARAMETER Experiment Name: At_Drought_P Parameter: Treatment Value: Drought vs. No Drought
  misc_feature: MA Experiment ID: 20000794 Result: Down-regulated in Transcription
  misc_feature: MA Experiment 20000794 PARAMETER Experiment Name: At_Petals_P Parameter: Age (day) Value: 23-25 days
  misc_feature: MA Experiment 20000794 PARAMETER Experiment Name: At_Petals_P Parameter: Plant Line Value: WS
  misc_feature: MA Experiment 20000794 PARAMETER Experiment Name: At_Petals_P Parameter: Tissue Value: Petals vs. Whole plant
  misc_feature: MA Experiment ID: 20001905 Result: Down-regulated in Transcription
  misc_feature: MA Experiment 20001905 PARAMETER Experiment Name: At_Drought_Reproduction_P Parameter: Age (day) Value: 40
  misc_feature: MA Experiment 20001905 PARAMETER Experiment Name: At_Drought_Reproduction_P Parameter: Organism Value: A. thaliana
  misc_feature: MA Experiment 20001905 PARAMETER Experiment Name: At_Drought_Reproduction_P Parameter: Plant Line Value: WS
  misc_feature: MA Experiment 20001905 PARAMETER Experiment Name: At_Drought_Reproduction_P Parameter: Timepoint (day) Value: 10
  misc_feature: MA Experiment 20001905 PARAMETER Experiment Name: At_Drought_Reproduction_P Parameter: Tissue Value: Rosettes
  misc_feature: MA Experiment 20001905 PARAMETER Experiment Name: At_Drought_Reproduction_P Parameter: Treatment Value: Drought vs. No Drought
atgggcaactgcggtactagagacgaggctgccgtcttcactcctcaagctcaagcccaacagctccagaagaagcactcccgatccgtctcagatctgagcgatccatccactcctcgcttccgagacgactctcgcactcctatttcgtatgcccaagtcatcccctttactttgtttgagcttgagaccatcaccaagagcttccgcccagattatatactcggagaaggtggtttcggtaccgtctacaagggttacattgatgacaatctccgcgtcggcctcaagtctctccctgttgccgtcaaggtccttaacaaggagggactccagggtcaccgtgaatggcttacagaggtcaacttcctcggccaactccgtcatcccaacctcgtcaagcttattggttactgctgcgaggacgatcaccgattacttgtttatgagttcatgctgcgaggcagtcttgagaatcacctatttcgaaaaaccacagctccgctatcttggtctagaaggatgatgattgctcttggagctgcgaaaggccttgctttcctccacaatgctgaaagaccggttatttatagggatttcaagacttccaatatactgcttgactccgactacaccgccaagctttcagattttggcttagctaaagctggaccccagggtgatgaaacccatgtatcaactcgagttatgggtacttatggctatgctgccccagaatatgtgatgactggacacttgacggccagaagtgatgtatacagctttggagttgttcttctagagatgttgacaggaagaaaatcagtggataagacaagacctagcaaagagcagaacttggttgattgggctcggccaaagctgaatgataaaagaaaactgctgcagataattgacccaagactggagaaccaatactctgtcagggcagctcagaaggcatgcagcttggcgtattattgtcttagccagaacccgaaagctaggccattgatgagcgatgtggttgagactttggaacctttgcagtgtactggtgatgccctgatcccttgtgcaactactacagctggagctgcatttgcaatgggaggggtgcctgattacagaatgcaccggaggtttgcaaagaacgttgggccaggtgcaatttgccggtcacccaatccaaattattcaccgggtggacctgcagcatgcagagttcggtga

SEQ ID NO: 108339 - protein, 410 aa, Arabidopsis thaliana; identical to SEQ ID NO: 107711
  peptide (1)..(410): Ceres Seq. ID no. 13653891
  misc_feature (69)..(346): Pfam Name: Protein kinase domain Pfam Description: Protein kinase domain
  misc_feature (1)..(410): Homolog of NCBI NO: 30679085 NR Description: protein kinase family [Arabidopsis thaliana]
  misc_feature (1)..(410): Homolog of NCBI NO: 9542860 NR Description: protein kinase-like protein [Arabidopsis thaliana]
  misc_feature (15)..(363): Homolog of NCBI NO: 15225019 NR Description: protein kinase, putative [Arabidopsis thaliana]
  misc_feature (9)..(355): Homolog of NCBI NO: 22325532 NR Description: protein kinase, putative [Arabidopsis thaliana]
  misc_feature (9)..(355): Homolog of NCBI NO: 25287636 NR Description: probable protein kinase [imported] - Arabidopsis >gi|3805765|gb|AAC69121.1| putative protein kinase [Arabidopsis
  misc_feature (15)..(350): Homolog of NCBI NO: 30013675 NR Description: Avr9/Cf-9 rapidly elicited protein 264 [Nicotiana
  misc_feature (9)..(355): Homolog of NCBI NO: 19423982 NR Description: putative protein kinase [Arabidopsis thaliana]
  misc_feature (1)..(358): Homolog of NCBI NO: 15241220 NR Description: protein kinase, putative [Arabidopsis thaliana]
  misc_feature (109)..(354): Homolog of NCBI NO: 27436752 NR Description: Putative serine/threonine protein kinase [Oryza
  misc_feature (17)..(118): Homolog of NCBI NO: 27436752 NR Description: Putative serine/threonine protein kinase [Oryza

SEQ ID NO: 108340 - protein, 259 aa, Arabidopsis thaliana; identical to SEQ ID NO: 107712
  peptide (1)..(259): Ceres Seq. ID no. 13653892
  misc_feature (1)..(195): Pfam Name: Protein kinase domain Pfam Description: Protein kinase domain
  misc_feature (1)..(259): Homolog of NCBI NO: 30679085 NR Description: protein kinase family [Arabidopsis thaliana]
  misc_feature (1)..(259): Homolog of NCBI NO: 9542860 NR Description: protein kinase-like protein [Arabidopsis thaliana]
  misc_feature (1)..(212): Homolog of NCBI NO: 15225019 NR Description: protein kinase, putative [Arabidopsis thaliana]
  misc_feature (1)..(204): Homolog of NCBI NO: 22325532 NR Description: protein kinase, putative [Arabidopsis thaliana]
  misc_feature (1)..(204): Homolog of NCBI NO: 25287636 NR Description: probable protein kinase [imported] - Arabidopsis >gi|3805765|gb|AAC69121.1| putative protein kinase [Arabidopsis
  misc_feature (1)..(199): Homolog of NCBI NO: 30013675 NR Description: Avr9/Cf-9 rapidly elicited protein 264 [Nicotiana
  misc_feature (1)..(204): Homolog of NCBI NO: 19423982 NR Description: putative protein kinase [Arabidopsis thaliana]
  misc_feature (1)..(207): Homolog of NCBI NO: 15241220 NR Description: protein kinase, putative [Arabidopsis thaliana]
  misc_feature (1)..(203): Homolog of NCBI NO: 27436752 NR Description: Putative serine/threonine protein kinase [Oryza
  misc_feature (1)..(199): Homolog of NCBI NO: 22773239 NR Description: Putative protein kinase [Oryza sativa (japonica

SEQ ID NO: 108341 - protein, 236 aa, Arabidopsis thaliana; identical to SEQ ID NO: 71405
  peptide (1)..(236): Ceres Seq. ID no. 13653893
  misc_feature (1)..(172): Pfam Name: Protein kinase domain Pfam Description: Protein kinase domain
  misc_feature (1)..(236): Homolog of NCBI NO: 30679085 NR Description: protein kinase family [Arabidopsis thaliana]
  misc_feature (1)..(236): Homolog of NCBI NO: 9542860 NR Description: protein kinase-like protein [Arabidopsis thaliana]
  misc_feature (1)..(189): Homolog of NCBI NO: 15225019 NR Description: protein kinase, putative [Arabidopsis thaliana]
  misc_feature (1)..(181): Homolog of NCBI NO: 22325532 NR Description: protein kinase, putative [Arabidopsis thaliana]
  misc_feature (1)..(181): Homolog of NCBI NO: 25287636 NR Description: probable protein kinase [imported] - Arabidopsis >gi|3805765|gb|AAC69121.1| putative protein kinase [Arabidopsis
  misc_feature (1)..(176): Homolog of NCBI NO: 30013675 NR Description: Avr9/Cf-9 rapidly elicited protein 264 [Nicotiana
  misc_feature (1)..(181): Homolog of NCBI NO: 19423982 NR Description: putative protein kinase [Arabidopsis thaliana]
  misc_feature (1)..(184): Homolog of NCBI NO: 15241220 NR Description: protein kinase, putative [Arabidopsis thaliana]
  misc_feature (1)..(180): Homolog of NCBI NO: 27436752 NR Description: Putative serine/threonine protein kinase [Oryza
  misc_feature (1)..(176): Homolog of NCBI NO: 22773239 NR Description: Putative protein kinase [Oryza sativa (japonica

SEQ ID NO: 108342 - DNA, 679 bp, Arabidopsis thaliana
  misc_feature (1)..(679): Ceres Seq. ID no. 13653894
  misc_feature: MA Experiment ID: 20000306 Result: Up-regulated in Transcription
  misc_feature: MA Experiment 20000306 PARAMETER Experiment Name: At_Germinating_Seeds_Sub_P Parameter: Age (hr) Value: 6 vs. 0
  misc_feature: MA Experiment 20000306 PARAMETER Experiment Name: At_Germinating_Seeds_Sub_P Parameter: Organism Value: A. thaliana
  misc_feature: MA Experiment 20000306 PARAMETER Experiment Name: At_Germinating_Seeds_Sub_P Parameter: Plant Line Value: WS
  misc_feature: MA Experiment 20000306 PARAMETER Experiment Name: At_Germinating_Seeds_Sub_P Parameter: Tissue Value: Germinating Seeds
  misc_feature: MA Experiment ID: 20000307 Result: Up-regulated in Transcription
  misc_feature: MA Experiment 20000307 PARAMETER Experiment Name: At_Germinating_Seeds_Sub_P Parameter: Age (hr) Value: 24 vs. 0
  misc_feature: MA Experiment 20000307 PARAMETER Experiment Name: At_Germinating_Seeds_Sub_P Parameter: Organism Value: A. thaliana
  misc_feature: MA Experiment 20000307 PARAMETER Experiment Name: At_Germinating_Seeds_Sub_P Parameter: Plant Line Value: WS
  misc_feature: MA Experiment 20000307 PARAMETER Experiment Name: At_Germinating_Seeds_Sub_P Parameter: Tissue Value: Germinating Seeds
  misc_feature: MA Experiment ID: 20000328 Result: Down-regulated in Transcription
  misc_feature: MA Experiment 20000328 PARAMETER Experiment Name: At_42deg_Heat_Sub_P Parameter: Age (day) Value: 14
  misc_feature: MA Experiment 20000328 PARAMETER Experiment Name: At_42deg_Heat_Sub_P Parameter: Organism Value: A. thaliana
  misc_feature: MA Experiment 20000328 PARAMETER Experiment Name: At_42deg_Heat_Sub_P Parameter: Plant Line Value: WS
  misc_feature: MA Experiment 20000328 PARAMETER Experiment Name: At_42deg_Heat_Sub_P Parameter: Temperature (deg C) Value: 42 vs. 22
  misc_feature: MA Experiment 20000328 PARAMETER Experiment Name: At_42deg_Heat_Sub_P Parameter: Timepoint (hr) Value: 6
  misc_feature: MA Experiment 20000328 PARAMETER Experiment Name: At_42deg_Heat_Sub_P Parameter: Tissue Value: Aerial
gtcaagaacaaagacgattcgattgaattctccataagaggtccgacccgaattcgaaaacccgtaagaaccgaatcgaagatgagcaaggatggtttgagcaacgaccaagtctcatcaatgaaggaagcattcatgctattcgacacagacggcgacggcaaaatcgcaccgtcggagctcggaatcttaatgcggtcactcggcggcaatccaacagaatcacaactcaaatcaatcataacgacggagaatctctcgtctccgttcgatttcaatcgattcctagatctaatggcgaaacatctgaaaacagagccgttcgatcgccagcttcgtgatgcgttcaaagtgcttgacaaggaaggtactggattcgttgctgtggcagatctgagacatatacttacgagtatcggtgagaaattgcagccgagtgagtttgatgagtggatcaaagaggttgatgttggatctgatggtaagatccggtatgaggattttattgctagaatggttgctaagtaagatctaaatctgtgaaaatttgaattctttagattagaacaaatcttaggatttgttcagaaagtgtttaattgttaatgtaattgggaatttggtcataattaagctgtgttatttgaaaagatggttcctttatgatattgaattctgc

SEQ ID NO: 108343 - protein, 175 aa, Arabidopsis thaliana
  peptide (1)..(175): Ceres Seq. ID no. 13653895
  misc_feature (147)..(175): Pfam Name: EF hand Pfam Description: EF hand
  misc_feature (1)..(174): Homolog of NCBI NO: 6630454 NR Description: F23N19.18 [Arabidopsis thaliana]
  misc_feature (28)..(175): Homolog of NCBI NO: 15221593 NR Description: calmodulin, putative [Arabidopsis thaliana] putative calmodulin protein [Arabidopsis thaliana]
  misc_feature (28)..(175): Homolog of NCBI NO: 25402719 NR Description: protein F5O11.4 [imported] - Arabidopsis thaliana
  misc_feature (28)..(175): Homolog of NCBI NO: 15221284 NR Description: calmodulin, putative [Arabidopsis thaliana] At1g12310/F5O11_2 [Arabidopsis thaliana]
  misc_feature (28)..(175): Homolog of NCBI NO: 28629126 NR Description: putative serine/threonine kinase [Vitis vinifera]
  misc_feature (33)..(175): Homolog of NCBI NO: 29367559 NR Description: putative serine/threonine kinase [Oryza sativa
  misc_feature (31)..(175): Homolog of NCBI NO: 115530 NR Description: Calmodulin >gi|71679|pir||MCUTG calmodulin -
  misc_feature (31)..(175): Homolog of NCBI NO: 115531 NR Description: Calmodulin >gi|71680|pir||MCUTC calmodulin -
  misc_feature (31)..(175): Homolog of NCBI NO: 162030 NR Description: calmodulin A >gi|162031|gb|AAA30175.1| calmodulin
  misc_feature (31)..(175): Homolog of NCBI NO: 4959168 NR Description: calmodulin mutant SYNCAM62 [synthetic construct]
VKNKDDSIEFSIRGPTRIRKPVRTESKMSKDGLSNDQVSSMKEAFMLFDTDGDGKIAPSELGILMRSLGGNPTESQLKSIITTENLSSPFDFNRFLDLMAKHLKTEPFDRQLRDAFKVLDKEGTGFVAVADLRHILTSIGEKLQPSEFDEWIKEVDVGSDGKIRYEDFIARMVAK

SEQ ID NO: 108344 - protein, 148 aa, Arabidopsis thaliana; identical to SEQ ID NO: 98419
  peptide (1)..(148): Ceres Seq. ID no. 13653896
  misc_feature (120)..(148): Pfam Name: EF hand Pfam Description: EF hand
  misc_feature (1)..(147): Homolog of NCBI NO: 6630454 NR Description: F23N19.18 [Arabidopsis thaliana]
  misc_feature (1)..(148): Homolog of NCBI NO: 15221593 NR Description: calmodulin, putative [Arabidopsis thaliana] putative calmodulin protein [Arabidopsis thaliana]
  misc_feature (1)..(148): Homolog of NCBI NO: 25402719 NR Description: protein F5O11.4 [imported] - Arabidopsis thaliana
  misc_feature (1)..(148): Homolog of NCBI NO: 15221284 NR Description: calmodulin, putative [Arabidopsis thaliana] At1g12310/F5O11_2 [Arabidopsis thaliana]
  misc_feature (1)..(148): Homolog of NCBI NO: 28629126 NR Description: putative serine/threonine kinase [Vitis vinifera]
  misc_feature (6)..(148): Homolog of NCBI NO: 29367559 NR Description: putative serine/threonine kinase [Oryza sativa
  misc_feature (4)..(148): Homolog of NCBI NO: 115530 NR Description: Calmodulin >gi|71679|pir||MCUTG calmodulin -
  misc_feature (4)..(148): Homolog of NCBI NO: 115531 NR Description: Calmodulin >gi|71680|pir||MCUTC calmodulin -
  misc_feature (4)..(148): Homolog of NCBI NO: 162030 NR Description: calmodulin A >gi|162031|gb|AAA30175.1| calmodulin
  misc_feature (4)..(148): Homolog of NCBI NO: 4959168 NR Description: calmodulin mutant SYNCAM62 [synthetic construct]

SEQ ID NO: 108345 - protein, 135 aa, Arabidopsis thaliana; identical to SEQ ID NO: 98420
  peptide (1)..(135): Ceres Seq. ID no. 13653897
  misc_feature (107)..(135): Pfam Name: EF hand Pfam Description: EF hand
  misc_feature (1)..(134): Homolog of NCBI NO: 6630454 NR Description: F23N19.18 [Arabidopsis thaliana]
  misc_feature (1)..(135): Homolog of NCBI NO: 15221593 NR Description: calmodulin, putative [Arabidopsis thaliana] putative calmodulin protein [Arabidopsis thaliana]
  misc_feature (1)..(135): Homolog of NCBI NO: 25402719 NR Description: protein F5O11.4 [imported] - Arabidopsis thaliana
  misc_feature (1)..(135): Homolog of NCBI NO: 15221284 NR Description: calmodulin, putative [Arabidopsis thaliana] At1g12310/F5O11_2 [Arabidopsis thaliana]
  misc_feature (1)..(135): Homolog of NCBI NO: 28629126 NR Description: putative serine/threonine kinase [Vitis vinifera]
  misc_feature (1)..(135): Homolog of NCBI NO: 29367559 NR Description: putative serine/threonine kinase [Oryza sativa
  misc_feature (1)..(135): Homolog of NCBI NO: 115530 NR Description: Calmodulin >gi|71679|pir||MCUTG calmodulin -
  misc_feature (1)..(135): Homolog of NCBI NO: 115531 NR Description: Calmodulin >gi|71680|pir||MCUTC calmodulin -
  misc_feature (1)..(135): Homolog of NCBI NO: 162030 NR Description: calmodulin A >gi|162031|gb|AAA30175.1| calmodulin
  misc_feature (1)..(135): Homolog of NCBI NO: 4959168 NR Description: calmodulin mutant SYNCAM62 [synthetic construct]

SEQ ID NO: 108346 - DNA, 2250 bp, Arabidopsis thaliana
  misc_feature (1)..(2250): Ceres Seq. ID no. 13653898
  misc_feature: MA Experiment ID: 20000171 Result: Down-regulated in Transcription
  misc_feature: MA Experiment 20000171 PARAMETER Experiment Name: At_42deg_Heat_P Parameter: Age (day) Value: 14
  misc_feature: MA Experiment 20000171 PARAMETER Experiment Name: At_42deg_Heat_P Parameter: Organism Value: A. thaliana
  misc_feature: MA Experiment 20000171 PARAMETER Experiment Name: At_42deg_Heat_P Parameter: Plant Line Value: WS
  misc_feature: MA Experiment 20000171 PARAMETER Experiment Name: At_42deg_Heat_P Parameter: Temperature (deg C) Value: 42 vs. 22
  misc_feature: MA Experiment 20000171 PARAMETER Experiment Name: At_42deg_Heat_P Parameter: Timepoint (hr) Value: 1
  misc_feature: MA Experiment 20000171 PARAMETER Experiment Name: At_42deg_Heat_P Parameter: Tissue Value: Aerial
  misc_feature: MA Experiment ID: 20000184 Result: Up-regulated in Transcription
  misc_feature: MA Experiment 20000184 PARAMETER Experiment Name: At_Shoots__P Parameter: Age (day) Value: 7
  misc_feature: MA Experiment 20000184 PARAMETER Experiment Name: At_Shoots__P Parameter: Tissue Value: Shoots vs. Whole Plant
  misc_feature: MA Experiment ID: 20000185 Result: Down-regulated in Transcription
  misc_feature: MA Experiment 20000185 PARAMETER Experiment Name: At_Roots__P Parameter: Age (day) Value: 7 vs. 21
  misc_feature: MA Experiment 20000185 PARAMETER Experiment Name: At_Roots__P Parameter: Organism Value: A. thaliana
  misc_feature: MA Experiment 20000185 PARAMETER Experiment Name: At_Roots__P Parameter: Tissue Value: Roots vs. Whole Plant
  misc_feature: MA Experiment ID: 20000437 Result: Down-regulated in Transcription
  misc_feature: MA Experiment 20000437 PARAMETER Experiment Name: At_Drought_P Parameter: Age (day) Value: 8
  misc_feature: MA Experiment 20000437 PARAMETER Experiment Name: At_Drought_P Parameter: Organism Value: A. thaliana
  misc_feature: MA Experiment 20000437 PARAMETER Experiment Name: At_Drought_P Parameter: Plant Line Value: WS
  misc_feature: MA Experiment 20000437 PARAMETER Experiment Name: At_Drought_P Parameter: Timepoint (hr) Value: 24
  misc_feature: MA Experiment 20000437 PARAMETER Experiment Name: At_Drought_P Parameter: Tissue Value: Whole Plant
  misc_feature: MA Experiment 20000437 PARAMETER Experiment Name: At_Drought_P Parameter: Treatment Value: Drought vs. No Drought
  misc_feature: MA Experiment ID: 20001905 Result: Down-regulated in Transcription
  misc_feature: MA Experiment 20001905 PARAMETER Experiment Name: At_Drought_Reproduction_P Parameter: Age (day) Value: 40
  misc_feature: MA Experiment 20001905 PARAMETER Experiment Name: At_Drought_Reproduction_P Parameter: Organism Value: A. thaliana
  misc_feature: MA Experiment 20001905 PARAMETER Experiment Name: At_Drought_Reproduction_P Parameter: Plant Line Value: WS
  misc_feature: MA Experiment 20001905 PARAMETER Experiment Name: At_Drought_Reproduction_P Parameter: Timepoint (day) Value: 10
  misc_feature: MA Experiment 20001905 PARAMETER Experiment Name: At_Drought_Reproduction_P Parameter: Tissue Value: Rosettes
  misc_feature: MA Experiment 20001905 PARAMETER Experiment Name: At_Drought_Reproduction_P Parameter: Treatment Value: Drought vs. No Drought
tggtagtagcagtgaaaaacaaaagcaatccaatcccaaacccatttgctcttaagattcttcacatagagaagtcacatgttccttcttcttcttccttcatcatccccaaacacacacaaactaaaaaaaaggcaaaaccctagatccaagatcagacctaatctaatcgaaactcatagctgaaaaatgaagagagatcatcaccaattccaaggtcgattgtccaaccacgggacttcttcttcatcatcatcaatctctaaagataagatgatgatggtgaaaaaagaagaagacggtggaggtaacatggacgacgagcttctcgctgttttaggttacaaagttaggtcatcggagatggcggaggttgctttgaaactcgaacaattagagacgatgatgagtaatgttcaagaagatggtttatctcatctcgcgacggatactgttcattataatccgtcggagctttattcttggcttgataatatgctctctgagcttaatcctcctcctcttccggcgagttctaacggtttagatccggttcttccttcgccggagatttgtggttttccggcttcggattatgaccttaaagtcattcccggaaacgcgatttatcagtttccggcgattgattcttcgtcttcgtcgaataatcagaacaagcgtttgaaatcatgctcgagtcctgattctatggttacatcgacttcgacgggtacgcagattggtggagtcataggaacgacggtgacgacaaccaccacgacaacgacggcggcgggtgagtcaactcgttctgttatcctggttgactcgcaagagaacggtgttcgtttagtccacgcgcttatggcttgtgcagaagcaatccagcagaacaatttgactctagcggaagctcttgtgaagcaaatcggatgcttagctgtgtctcaagccggagctatgagaaaagtggctacttacttcgccgaagctttagcgcggcggatctaccgtctctctccgccgcagaatcagatcgatcattgtctctccgatactcttcagatgcacttttacgagacttgtccttatcttaaattcgctcacttcacggcgaaccaagcgattctcgaagcttttgaaggtaagaagagagtacacgtcattgatttctcgatgaaccaaggtcttcaatggcctgcacttatgcaagctcttgcgcttcgagaaggaggtcctccaactttccggttaaccggaattggtccaccggcgccggataattctgatcatcttcatgaagttggttgtaaattagctcagcttgcggaggcgattcacgtagaattcgaataccgtggattcgttgctaacagcttagccgatctcgatgcttcgatgcttgagcttagaccgagcgatacggaagctgttgcggtgaactctgtttttgagctacataagctcttaggtcgtcccggtgggatagagaaagttctcggcgttgtgaaacagattaaaccggtgattttcacggtggttgagcaagaatcgaaccataacggaccggttttcttagaccggtttactgaatcgttacattattattcgactctgtttgattcgttggaaggagttccgaatagtcaagacaaagtcatgtctgaagtttacttagggaaacagatttgtaatctggtggcttgtgaaggtcctgacagagtcgagagacacgaaacgttgagtcaatggggaaaccggtttggttcgtccggtttagcgccggcacatcttgggtctaacgcgtttaagcaagcgagtatgcttttgtctgtgtttaatagtggccaaggttatcgtgtggaggagagtaatggatgtttgatgttgggttggcacactcgtccactcattaccacctccgcttggaaactctcgacggcggcgtactgagtttgactcgaagcatacgacggtggtggagtcgagtcgagtgaatttgagattgagatcagtggaccggtgatgacatatgttcggaccaagacctaaaccgaactgaatcgaaccgttttgccttttgtttattttatttattttcgttcacttgtttaaaattcttatatatatcgttttggtaggtcatttttaatttatgcctttttgggatcaatttttaataggctgagtttgtatttattaataaattatctttatgaattttaaactaaaactatgttttaatctcat

SEQ ID NO: 108347 - protein, 587 aa, Arabidopsis thaliana; identical to SEQ ID NO: 45017
  peptide (1)..(587): Ceres Seq. ID no. 13653899
  misc_feature (195)..(490): Pfam Name: GRAS family transcription factor Pfam Description: GRAS family transcription factor
  misc_feature (1)..(587): Homolog of NCBI NO: 15226311 NR Description: gibberellin response modulator (RGA1)
  misc_feature (1)..(587): Homolog of NCBI NO: 15529230 NR Description: At2g01570/F2I9.19 [Arabidopsis thaliana]
  misc_feature (1)..(587): Homolog of NCBI NO: 2339978 NR Description: RGA1 protein [Arabidopsis thaliana]
  misc_feature (1)..(587): Homolog of NCBI NO: 2569940 NR Description: GRS protein [Arabidopsis thaliana]
  misc_feature (134)..(584): Homolog of NCBI NO: 15223951 NR Description: gibberellin response modulator (GAI/RGA2)
  misc_feature (1)..(110): Homolog of NCBI NO: 15223951 NR Description: gibberellin response modulator (GAI/RGA2)
  misc_feature (134)..(584): Homolog of NCBI NO: 2569938 NR Description: GAI [Arabidopsis thaliana]
  misc_feature (26)..(110): Homolog of NCBI NO: 2569938 NR Description: GAI [Arabidopsis thaliana]
  misc_feature (134)..(584): Homolog of NCBI NO: 2339980 NR Description: RGA2 protein [Arabidopsis thaliana]
  misc_feature (26)..(110): Homolog of NCBI NO: 2339980 NR Description: RGA2 protein [Arabidopsis thaliana]

SEQ ID NO: 108348 - protein, 559 aa, Arabidopsis thaliana; identical to SEQ ID NO: 45018
  peptide (1)..(559): Ceres Seq. ID no. 13653900
  misc_feature (167)..(462): Pfam Name: GRAS family transcription factor Pfam Description: GRAS family transcription factor
  misc_feature (1)..(559): Homolog of NCBI NO: 15226311 NR Description: gibberellin response modulator (RGA1)
  misc_feature (1)..(559): Homolog of NCBI NO: 15529230 NR Description: At2g01570/F2I9.19 [Arabidopsis thaliana]
  misc_feature (1)..(559): Homolog of NCBI NO: 2339978 NR Description: RGA1 protein [Arabidopsis thaliana]
  misc_feature (1)..(559): Homolog of NCBI NO: 2569940 NR Description: GRS protein [Arabidopsis thaliana]
  misc_feature (106)..(556): Homolog of NCBI NO: 15223951 NR Description: gibberellin response modulator (GAI/RGA2)
  misc_feature (1)..(82): Homolog of NCBI NO: 15223951 NR Description: gibberellin response modulator (GAI/RGA2)
  misc_feature (106)..(556): Homolog of NCBI NO: 2569938 NR Description: GAI [Arabidopsis thaliana]
  misc_feature (1)..(82): Homolog of NCBI NO: 2569938 NR Description: GAI [Arabidopsis thaliana]
  misc_feature (106)..(556): Homolog of NCBI NO: 2339980 NR Description: RGA2 protein [Arabidopsis thaliana]
  misc_feature (1)..(82): Homolog of NCBI NO: 2339980 NR Description: RGA2 protein [Arabidopsis thaliana]

SEQ ID NO: 108349 - protein, 558 aa, Arabidopsis thaliana; identical to SEQ ID NO: 45019
  peptide (1)..(558): Ceres Seq. ID no. 13653901
  misc_feature (166)..(461): Pfam Name: GRAS family transcription factor Pfam Description: GRAS family transcription factor
  misc_feature (1)..(558): Homolog of NCBI NO: 15226311 NR Description: gibberellin response modulator (RGA1)
  misc_feature (1)..(558): Homolog of NCBI NO: 15529230 NR Description: At2g01570/F2I9.19 [Arabidopsis thaliana]
  misc_feature (1)..(558): Homolog of NCBI NO: 2339978 NR Description: RGA1 protein [Arabidopsis thaliana]
  misc_feature (1)..(558): Homolog of NCBI NO: 2569940 NR Description: GRS protein [Arabidopsis thaliana]
  misc_feature (105)..(555): Homolog of NCBI NO: 15223951 NR Description: gibberellin response modulator (GAI/RGA2)
  misc_feature (1)..(81): Homolog of NCBI NO: 15223951 NR Description: gibberellin response modulator (GAI/RGA2)
  misc_feature (105)..(555): Homolog of NCBI NO: 2569938 NR Description: GAI [Arabidopsis thaliana]
  misc_feature (1)..(81): Homolog of NCBI NO: 2569938 NR Description: GAI [Arabidopsis thaliana]
  misc_feature (105)..(555): Homolog of NCBI NO: 2339980 NR Description: RGA2 protein [Arabidopsis thaliana]
  misc_feature (1)..(81): Homolog of NCBI NO: 2339980 NR Description: RGA2 protein [Arabidopsis thaliana]

SEQ ID NO: 108350 - DNA, 1130 bp, Arabidopsis thaliana
  misc_feature (1)..(1130): Ceres Seq. ID no. 13653918
  misc_feature: MA Experiment ID: 20000113 Result: Down-regulated in Transcription
  misc_feature: MA Experiment 20000113 PARAMETER Experiment Name: At_42deg_Heat_cDNA_P Parameter: Temperature (deg C) Value: 42 vs. 22
  misc_feature: MA Experiment 20000113 PARAMETER Experiment Name: At_42deg_Heat_cDNA_P Parameter: Timepoint (hr) Value: 8
  misc_feature: MA Experiment 20000113 PARAMETER Experiment Name: At_42deg_Heat_cDNA_P Parameter: Tissue Value: Aerial
  misc_feature: MA Experiment ID: 20000171 Result: Down-regulated in Transcription
  misc_feature: MA Experiment 20000171 PARAMETER Experiment Name: At_42deg_Heat_P Parameter: Age (day) Value: 14
  misc_feature: MA Experiment 20000171 PARAMETER Experiment Name: At_42deg_Heat_P Parameter: Organism Value: A. thaliana
  misc_feature: MA Experiment 20000171 PARAMETER Experiment Name: At_42deg_Heat_P Parameter: Plant Line Value: WS
  misc_feature: MA Experiment 20000171 PARAMETER Experiment Name: At_42deg_Heat_P Parameter: Temperature (deg C) Value: 42 vs. 22
  misc_feature: MA Experiment 20000171 PARAMETER Experiment Name: At_42deg_Heat_P Parameter: Timepoint (hr) Value: 1
  misc_feature: MA Experiment 20000171 PARAMETER Experiment Name: At_42deg_Heat_P Parameter: Tissue Value: Aerial
  misc_feature: MA Experiment ID: 20000173 Result: Down-regulated in Transcription
  misc_feature: MA Experiment 20000173 PARAMETER Experiment Name: At_42deg_Heat_P Parameter: Age (day) Value: 14
  misc_feature: MA Experiment 20000173 PARAMETER Experiment Name: At_42deg_Heat_P Parameter: Organism Value: A. thaliana
  misc_feature: MA Experiment 20000173 PARAMETER Experiment Name: At_42deg_Heat_P Parameter: Plant Line Value: WS
  misc_feature: MA Experiment 20000173 PARAMETER Experiment Name: At_42deg_Heat_P Parameter: Temperature (deg C) Value: 42 vs. 22
  misc_feature: MA Experiment 20000173 PARAMETER Experiment Name: At_42deg_Heat_P Parameter: Timepoint (hr) Value: 6
  misc_feature: MA Experiment 20000173 PARAMETER Experiment Name: At_42deg_Heat_P Parameter: Tissue Value: Aerial
  misc_feature: MA Experiment ID: 20000184 Result: Down-regulated in Transcription
  misc_feature: MA Experiment 20000184 PARAMETER Experiment Name: At_Shoots__P Parameter: Age (day) Value: 7
  misc_feature: MA Experiment 20000184 PARAMETER Experiment Name: At_Shoots__P Parameter: Tissue Value: Shoots vs. Whole Plant
  misc_feature: MA Experiment ID: 20000496 Result: Down-regulated in Transcription
  misc_feature: MA Experiment 20000496 PARAMETER Experiment Name: At_Guard_Cells_P Parameter: Harvest Date Value: 7/19/2002
  misc_feature: MA Experiment 20000496 PARAMETER Experiment Name: At_Guard_Cells_P Parameter: Organism Value: Canola
  misc_feature: MA Experiment 20000496 PARAMETER Experiment Name: At_Guard_Cells_P Parameter: Tissue Value: Guard Cells vs. Leaves
  misc_feature: MA Experiment ID: 20001451 Result: Down-regulated in Transcription
  misc_feature: MA Experiment 20001451 PARAMETER Experiment Name: At_Far-red-induction_P Parameter: Age (day) Value: 7
  misc_feature: MA Experiment 20001451 PARAMETER Experiment Name: At_Far-red-induction_P Parameter: Light Value: Far-red vs. White
  misc_feature: MA Experiment 20001451 PARAMETER Experiment Name: At_Far-red-induction_P Parameter: Organism Value: A. thaliana
  misc_feature: MA Experiment 20001451 PARAMETER Experiment Name: At_Far-red-induction_P Parameter: Plant Line Value: Columbia
  misc_feature: MA Experiment 20001451 PARAMETER Experiment Name: At_Far-red-induction_P Parameter: Timepoint (hr) Value: 24
  misc_feature: MA Experiment 20001451 PARAMETER Experiment Name: At_Far-red-induction_P Parameter: Tissue Value: Whole Plant
tttcatgaaaaaccaatctagggttttgaactctgaattgggggattttgacctttcagttttgtgggatcaaattttgaatttcgagggttatggttcctactgtttcagaccaatggatatggatggttaccacaaacggagcgccggtttaaacccttgtaaacactccggtttctcacattcatcaagacccatggctccaggaatttaccgttacccagaagtgaaatcttcgttgcggagacaagttcatgcgcctgtgcggatactcaatagcggtcgagatcgtagcacacgacaaggttctggtaatgtgttgggaacctttctcacaaggaacaatgacatgtggaaaagaaatgcacttgattcgtctttacgctatagaacggatagagaagtaattgatgttgatgatgagcttggagatgttgaaatgatatctgatgatacaagtagggagggtgtcgaaaacgtggctatggaggtggacgaggtggaagagaaggcggagatgggaaatggattgttttctgaggttgccagtctgaaaaatgggagcttgagggtgggtgaatgttctaaagctaatagtagttcactcgttgtgaatcgccctgtgactgatgtcacaagttttgaagcatacagaaaggttcttgagagtgctgtgaaccggacttctaaactgaaagacagaggctttgttgatttttttaaagagagaggtcgtgctttactacgaagcttgtcttccttttggagacaagatgaagaaccagtagaggttgtacaacgtgaggcatttgtacctctttctagagaggaggagacagcagtcaggcgtgcattctcagctaatgattcaaacatcttggttactcataagaactcaaatattgatattaccgggaaaatcttgaggtgccttaaaccaggcaaatggttgaacgatgaggtcattaatctttatatggtattgctgaaagaaagggaagctagagaaccaaagaagtttcttaaatgtcattttttcaatacatttttcttcactaagttagttaattcggcgactggatacaactatggtgcagtgagaagatggacttcaatgaagaggttgggct

SEQ ID NO: 108351 - protein, 376 aa, Arabidopsis thaliana
  peptide (1)..(376): Ceres Seq. ID no. 13653919
  misc_feature (2)..(375): Homolog of NCBI NO: 30680058 NR Description: Ulp1 protease family [Arabidopsis thaliana]
  misc_feature (2)..(375): Homolog of NCBI NO: 26450144 NR Description: unknown protein [Arabidopsis thaliana]
  misc_feature (37)..(375): Homolog of NCBI NO: 6728998 NR Description: hypothetical protein [Arabidopsis thaliana]
  misc_feature (46)..(375): Homolog of NCBI NO: 18414542 NR Description: Ulp1 protease family [Arabidopsis thaliana] Unknown protein [Arabidopsis thaliana]
  misc_feature (57)..(375): Homolog of NCBI NO: 2326343 NR Description: G14587-5 [Arabidopsis thaliana]
  misc_feature (57)..(375): Homolog of NCBI NO: 7485126 NR Description: hypothetical protein - Arabidopsis thaliana
  misc_feature (57)..(375): Homolog of NCBI NO: 25371728 NR Description: hypothetical protein AT4g15880 [imported] - thaliana >gi|5281021|emb|CAB45994.1| hypothetical protein thaliana] >gi|7268336|emb|CAB78630.1| hypothetical protein
  misc_feature (46)..(375): Homolog of NCBI NO: 34787206 NR Description: SUMO protease [Arabidopsis thaliana]
  misc_feature (217)..(375): Homolog of NCBI NO: 34915036 NR Description: P0458A05.23 [Oryza sativa (japonica
  misc_feature (281)..(375): Homolog of NCBI NO: 15236895 NR Description: Ulp1 protease family [Arabidopsis thaliana]
FMKNQSRVLNSELGDFDLSVLWDQILNFEGYGSYCFRPMDMDGYHKRSAGLNPCKHSGFSHSSRPMAPGIYRYPEVKSSLRRQVHAPVRILNSGRDRSTRQGSGNVLGTFLTRNNDMWKRNALDSSLRYRTDREVIDVDDELGDVEMISDDTSREGVENVAMEVDEVEEKAEMGNGLFSEVASLKNGSLRVGECSKANSSSLVVNRPVTDVTSFEAYRKVLESAVNRTSKLKDRGFVDFFKERGRALLRSLSSFWRQDEEPVEVVQREAFVPLSREEETAVRRAFSANDSNILVTHKNSNIDITGKILRCLKPGKWLNDEVINLYMVLLKEREAREPKKFLKCHFFNTFFFTKLVNSATGYNYGAVRRWTSMKRLG

SEQ ID NO: 108352 - protein, 375 aa, Arabidopsis thaliana
  peptide (1)..(375): Ceres Seq. ID no. 13653920
  misc_feature (1)..(374): Homolog of NCBI NO: 30680058 NR Description: Ulp1 protease family [Arabidopsis thaliana]
  misc_feature (1)..(374): Homolog of NCBI NO: 26450144 NR Description: unknown protein [Arabidopsis thaliana]
  misc_feature (36)..(374): Homolog of NCBI NO: 6728998 NR Description: hypothetical protein [Arabidopsis thaliana]
  misc_feature (45)..(374): Homolog of NCBI NO: 18414542 NR Description: Ulp1 protease family [Arabidopsis thaliana] Unknown protein [Arabidopsis thaliana]
  misc_feature (56)..(374): Homolog of NCBI NO: 2326343 NR Description: G14587-5 [Arabidopsis thaliana]
  misc_feature (56)..(374): Homolog of NCBI NO: 7485126 NR Description: hypothetical protein - Arabidopsis thaliana
  misc_feature (56)..(374): Homolog of NCBI NO: 25371728 NR Description: hypothetical protein AT4g15880 [imported] - thaliana >gi|5281021|emb|CAB45994.1| hypothetical protein thaliana] >gi|7268336|emb|CAB78630.1| hypothetical protein
  misc_feature (45)..(374): Homolog of NCBI NO: 34787206 NR Description: SUMO protease [Arabidopsis thaliana]
  misc_feature (216)..(374): Homolog of NCBI NO: 34915036 NR Description: P0458A05.23 [Oryza sativa (japonica
  misc_feature (280)..(374): Homolog of NCBI NO: 15236895 NR Description: Ulp1 protease family [Arabidopsis thaliana]
MKNQSRVLNSELGDFDLSVLWDQILNFEGYGSYCFRPMDMDGYHKRSAGLNPCKHSGFSHSSRPMAPGIYRYPEVKSSLRRQVHAPVRILNSGRDRSTRQGSGNVLGTFLTRNNDMWKRNALDSSLRYRTDREVIDVDDELGDVEMISDDTSREGVENVAMEVDEVEEKAEMGNGLFSEVASLKNGSLRVGECSKANSSSLVVNRPVTDVTSFEAYRKVLESAVNRTSKLKDRGFVDFFKERGRALLRSLSSFWRQDEEPVEVVQREAFVPLSREEETAVRRAFSANDSNILVTHKNSNIDITGKILRCLKPGKWLNDEVINLYMVLLKEREAREPKKFLKCHFFNTFFFTKLVNSATGYNYGAVRRWTSMKRLG

SEQ ID NO: 108353 - protein, 338 aa, Arabidopsis thaliana
  peptide (1)..(338): Ceres Seq. ID no. 13653921
  misc_feature (1)..(337): Homolog of NCBI NO: 30680058 NR Description: Ulp1 protease family [Arabidopsis thaliana]
  misc_feature (1)..(337): Homolog of NCBI NO: 26450144 NR Description: unknown protein [Arabidopsis thaliana]
  misc_feature (1)..(337): Homolog of NCBI NO: 6728998 NR Description: hypothetical protein [Arabidopsis thaliana]
  misc_feature (8)..(337): Homolog of NCBI NO: 18414542 NR Description: Ulp1 protease family [Arabidopsis thaliana] Unknown protein [Arabidopsis thaliana]
  misc_feature (19)..(337): Homolog of NCBI NO: 2326343 NR Description: G14587-5 [Arabidopsis thaliana]
  misc_feature (19)..(337): Homolog of NCBI NO: 25371728 NR Description: hypothetical protein AT4g15880 [imported] - thaliana >gi|5281021|emb|CAB45994.1| hypothetical protein thaliana] >gi|7268336|emb|CAB78630.1| hypothetical protein
  misc_feature (19)..(337): Homolog of NCBI NO: 7485126 NR Description: hypothetical protein - Arabidopsis thaliana
  misc_feature (8)..(337): Homolog of NCBI NO: 34787206 NR Description: SUMO protease [Arabidopsis thaliana]
  misc_feature (179)..(337): Homolog of NCBI NO: 34915036 NR Description: P0458A05.23 [Oryza sativa (japonica
  misc_feature (243)..(337): Homolog of NCBI NO: 15236895 NR Description: Ulp1 protease family [Arabidopsis thaliana]
MDMDGYHKRSAGLNPCKHSGFSHSSRPMAPGIYRYPEVKSSLRRQVHAPVRILNSGRDRSTRQGSGNVLGTFLTRNNDMWKRNALDSSLRYRTDREVIDVDDELGDVEMISDDTSREGVENVAMEVDEVEEKAEMGNGLFSEVASLKNGSLRVGECSKANSSSLVVNRPVTDVTSFEAYRKVLESAVNRTSKLKDRGFVDFFKERGRALLRSLSSFWRQDEEPVEVVQREAFVPLSREEETAVRRAFSANDSNILVTHKNSNIDITGKILRCLKPGKWLNDEVINLYMVLLKEREAREPKKFLKCHFFNTFFFTKLVNSATGYNYGAVRRWTSMKRLG

SEQ ID NO: 108354 - DNA, 833 bp, Arabidopsis thaliana
  misc_feature (1)..(833): Ceres Seq. ID no. 13653929
  misc_feature: MA Experiment ID: 108434 Result: Up-regulated in Transcription
  misc_feature: MA Experiment 108434 PARAMETER Experiment Name: At_Root_Tips_cDNA_P Parameter: Tissue Value: Root Tips
  misc_feature: MA Experiment ID: 108462 Result: Down-regulated in Transcription
  misc_feature: MA Experiment 108462 PARAMETER Experiment Name: At_Germinating_Seeds_cDNA_P Parameter: Age (day) Value: 2 vs. 0
  misc_feature: MA Experiment 108462 PARAMETER Experiment Name: At_Germinating_Seeds_cDNA_P Parameter: Tissue Value: Germinating Seeds
  misc_feature: MA Experiment ID: 108463 Result: Down-regulated in Transcription
  misc_feature: MA Experiment 108463 PARAMETER Experiment Name: At_Germinating_Seeds_cDNA_P Parameter: Age (day) Value: 3 vs. 0
  misc_feature: MA Experiment 108463 PARAMETER Experiment Name: At_Germinating_Seeds_cDNA_P Parameter: Tissue Value: Germinating Seeds
  misc_feature: MA Experiment ID: 108464 Result: Down-regulated in Transcription
  misc_feature: MA Experiment 108464 PARAMETER Experiment Name: At_Germinating_Seeds_cDNA_P Parameter: Age (day) Value: 4 vs. 0
  misc_feature: MA Experiment 108464 PARAMETER Experiment Name: At_Germinating_Seeds_cDNA_P Parameter: Tissue Value: Germinating Seeds
  misc_feature: MA Experiment ID: 108488 Result: Up-regulated in Transcription
  misc_feature: MA Experiment ID: 108573 Result: Down-regulated in Transcription
  misc_feature: MA Experiment 108573 PARAMETER Experiment Name: At_Drought_cDNA_P Parameter: Timepoint (hr) Value: 6
  misc_feature: MA Experiment 108573 PARAMETER Experiment Name: At_Drought_cDNA_P Parameter: Tissue Value: Aerial
  misc_feature: MA Experiment 108573 PARAMETER Experiment Name: At_Drought_cDNA_P Parameter: Treatment Value: Drought vs. No Drought
  misc_feature: MA Experiment ID: 20000227 Result: Up-regulated in Transcription
  misc_feature: MA Experiment 20000227 PARAMETER Experiment Name: At_Root-Tips-vs-Tops_P Parameter: Tissue Value: Root Tips vs. Root Tops
  misc_feature: MA Experiment ID: 20000234 Result: Up-regulated in Transcription
  misc_feature: MA Experiment 20000234 PARAMETER Experiment Name: At_Siliques_P Parameter: Age (day) Value: 21
  misc_feature: MA Experiment 20000234 PARAMETER Experiment Name: At_Siliques_P Parameter: Organism Value: A. thaliana
  misc_feature: MA Experiment 20000234 PARAMETER Experiment Name: At_Siliques_P Parameter: Plant Line Value: WS
  misc_feature: MA Experiment 20000234 PARAMETER Experiment Name: At_Siliques_P Parameter: Tissue Value: Less Than 5mm Siliques vs. Whole Plant
  misc_feature: MA Experiment ID: 20000437 Result: Down-regulated in Transcription
  misc_feature: MA Experiment 20000437 PARAMETER Experiment Name: At_Drought_P Parameter: Age (day) Value: 8
  misc_feature: MA Experiment 20000437 PARAMETER Experiment Name: At_Drought_P Parameter: Organism Value: A. thaliana
  misc_feature: MA Experiment 20000437 PARAMETER Experiment Name: At_Drought_P Parameter: Plant Line Value: WS
  misc_feature: MA Experiment 20000437 PARAMETER Experiment Name: At_Drought_P Parameter: Timepoint (hr) Value: 24
  misc_feature: MA Experiment 20000437 PARAMETER Experiment Name: At_Drought_P Parameter: Tissue Value: Whole Plant
  misc_feature: MA Experiment 20000437 PARAMETER Experiment Name: At_Drought_P Parameter: Treatment Value: Drought vs. No Drought
  misc_feature: MA Experiment ID: 20001557 Result: Up-regulated in Transcription
  misc_feature: MA Experiment 20001557 PARAMETER Experiment Name: At_Drought_Soil_Dry_P Parameter: Age (day) Value: 27
  misc_feature: MA Experiment 20001557 PARAMETER Experiment Name: At_Drought_Soil_Dry_P Parameter: Organism Value: A. thaliana
  misc_feature: MA Experiment 20001557 PARAMETER Experiment Name: At_Drought_Soil_Dry_P Parameter: Plant Line Value: WS
  misc_feature: MA Experiment 20001557 PARAMETER Experiment Name: At_Drought_Soil_Dry_P Parameter: Post Timepoint (hr) Value: 3
  misc_feature: MA Experiment 20001557 PARAMETER Experiment Name: At_Drought_Soil_Dry_P Parameter: Post-Treatment Value: Re-Water vs. No Drought
  misc_feature: MA Experiment 20001557 PARAMETER Experiment Name: At_Drought_Soil_Dry_P Parameter: Timepoint (day) Value: 13
  misc_feature: MA Experiment 20001557 PARAMETER Experiment Name: At_Drought_Soil_Dry_P Parameter: Treatment Value: Drought vs. No Drought
  misc_feature: MA Experiment ID: 20001558 Result: Up-regulated in Transcription
  misc_feature: MA Experiment 20001558 PARAMETER Experiment Name: At_Drought_Soil_Dry_P Parameter: Age (day) Value: 27
  misc_feature: MA Experiment 20001558 PARAMETER Experiment Name: At_Drought_Soil_Dry_P Parameter: Organism Value: A. thaliana
  misc_feature: MA Experiment 20001558 PARAMETER Experiment Name: At_Drought_Soil_Dry_P Parameter: Plant Line Value: WS
  misc_feature: MA Experiment 20001558 PARAMETER Experiment Name: At_Drought_Soil_Dry_P Parameter: Post Timepoint (hr) Value: 6
  misc_feature: MA Experiment 20001558 PARAMETER Experiment Name: At_Drought_Soil_Dry_P Parameter: Post-Treatment Value: Re-Water vs. No Drought
  misc_feature: MA Experiment 20001558 PARAMETER Experiment Name: At_Drought_Soil_Dry_P Parameter: Timepoint (day) Value: 13
  misc_feature: MA Experiment 20001558 PARAMETER Experiment Name: At_Drought_Soil_Dry_P Parameter: Treatment Value: Drought vs. No Drought
  misc_feature: MA Experiment ID: 20001560 Result: Up-regulated in Transcription
  misc_feature: MA Experiment 20001560 PARAMETER Experiment Name: At_Drought_Soil_Dry_P Parameter: Age (day) Value: 28
  misc_feature: MA Experiment 20001560 PARAMETER Experiment Name: At_Drought_Soil_Dry_P Parameter: Organism Value: A. thaliana
  misc_feature: MA Experiment 20001560 PARAMETER Experiment Name: At_Drought_Soil_Dry_P Parameter: Plant Line Value: WS
  misc_feature: MA Experiment 20001560 PARAMETER Experiment Name: At_Drought_Soil_Dry_P Parameter: Post Timepoint (hr) Value: None
  misc_feature: MA Experiment 20001560 PARAMETER Experiment Name: At_Drought_Soil_Dry_P Parameter: Post-Treatment Value: None
  misc_feature: MA Experiment 20001560 PARAMETER Experiment Name: At_Drought_Soil_Dry_P Parameter: Timepoint (day) Value: 14
  misc_feature: MA Experiment 20001560 PARAMETER Experiment Name: At_Drought_Soil_Dry_P Parameter: Treatment Value: Drought vs. No Drought
  misc_feature: MA Experiment ID: 20001757 Result: Up-regulated in Transcription
  misc_feature: MA Experiment 20001757 PARAMETER Experiment Name: At_50mM_NH4NO3_L-to-H_P Parameter: Timepoint (hr) Value: 6
  misc_feature: MA Experiment 20001757 PARAMETER Experiment Name: At_50mM_NH4NO3_L-to-H_P Parameter: Tissue Value: Leaf
  misc_feature: MA Experiment 20001757 PARAMETER Experiment Name: At_50mM_NH4NO3_L-to-H_P Parameter: Treatment Value: 50mM NH4NO3 vs 100mM Mannitol
atatacttcagtctagagccgcgcaagaagacgattctctctcttgagttgaagaaatgaagcacaacaatgttatccccaatggtcacttcaaaaagcactggcagaattatgtcaagacatggttcaaccagcctgccaggaaaaccagaagaagaattgcgaggcaaaagaaggctgtgaagatcttccctcgtccaacttctggacctctccgccctgttgtgcatggtcagactcttaagtacaacatgaaggtcagaaccggtaaaggattcactcttgaagagctcaaggctgctggtatcccaaagaagttggcgcctacaattggtattgctgttgaccatcgtcgcaagaaccgatctttggagggtcttcaaacaaatgtccagaggctgaaaacctacaagaccaagttagtcattttcccgcgtcgtgcccgcaaggtcaaggctggtgactctacaccagaagagttggctaatgctacccaagttcaaggagactacttgcctattgtacgtgagaagcctaccatggaactcgtcaagctgacttcagaaatgaagtctttcaaggcttttgacaagatacgccttgagcgcactaacaagaggcatgccggagctagagccaagagagccgcagaggctgagaaagaagagaagaagtgaggtcgttcttcttaggtagaagaaacttttatcttatcaacttttggaactgaattttgtgtatcagactgtcttttctttcatcagtttttatccttaaatctttgattttgctgctaccttgcttctcttgatttatggaaaagaccgtatctc

SEQ ID NO: 108355 - protein, 206 aa, Arabidopsis thaliana [sequence omitted]

SEQ ID NO: 108356 - protein, 141 aa, Arabidopsis thaliana; identical to SEQ ID NO: 25776
  peptide (1)..(141): Ceres Seq. ID no. 13653931
  misc_feature (1)..(118): Pfam Name: Ribosomal protein L13e Pfam Description: Ribosomal protein L13e
  misc_feature (1)..(141): Homolog of NCBI NO: 15229064 NR Description: 60S ribosomal protein L13 (RPL13B)/breast basic
  misc_feature (1)..(141): Homolog of NCBI NO: 21537149 NR Description: 60S ribosomal protein L13, BBC1 protein
  misc_feature (1)..(141): Homolog of NCBI NO: 730449 NR Description: 60S RIBOSOMAL PROTEIN L13-1 (COLD INDUCED PROTEIN >gi|398918|emb|CAA80341.1| cold induced protein (BnC24A)
  misc_feature (1)..(141): Homolog of NCBI NO: 730450 NR Description: 60S RIBOSOMAL PROTEIN L13-2 (COLD INDUCED PROTEIN >gi|398922|emb|CAA80343.1| cold induced protein (BnC24B)
  misc_feature (1)..(141): Homolog of NCBI NO: 7441103 NR Description: ribosomal protein L13.B, cytosolic - rape
  misc_feature (1)..(141): Homolog of NCBI NO: 7441102 NR Description: ribosomal protein L13.A, cytosolic - rape
  misc_feature (1)..(141): Homolog of NCBI NO: 15237847 NR Description: 60S ribosomal protein L13 (RPL13D) [Arabidopsis >gi|10176857|dbj|BAB10063.1| 60S ribosomal protein L13 thaliana] >gi|14190435|gb|AAK55698.1|AF378895_1 AT5g23900/MRO11_6
  misc_feature (1)..(141): Homolog of NCBI NO: 34897952 NR Description: ESTs AU077873(S1878),D40121(S1878) correspond to region of the predicted gene.~Similar to Arabidopsis thaliana 60S
  misc_feature (1)..(141): Homolog of NCBI NO: 18873677 NR Description: putative cold-induced protein [Oryza sativa
  misc_feature (1)..(141): Homolog of NCBI NO: 12580867 NR Description: 60S ribosomal protein L13E [Picea abies]

SEQ ID NO: 108357 - DNA, 1079 bp, Arabidopsis thaliana
  misc_feature (1)..(1079): Ceres Seq. ID no. 13667104
  misc_feature: MA Experiment ID: 20000173 Result: Up-regulated in Transcription
  misc_feature: MA Experiment 20000173 PARAMETER Experiment Name: At_42deg_Heat_P Parameter: Age (day) Value: 14
  misc_feature: MA Experiment 20000173 PARAMETER Experiment Name: At_42deg_Heat_P Parameter: Organism Value: A. thaliana
  misc_feature: MA Experiment 20000173 PARAMETER Experiment Name: At_42deg_Heat_P Parameter: Plant Line Value: WS
  misc_feature: MA Experiment 20000173 PARAMETER Experiment Name: At_42deg_Heat_P Parameter: Temperature (deg C) Value: 42 vs. 22
  misc_feature: MA Experiment 20000173 PARAMETER Experiment Name: At_42deg_Heat_P Parameter: Timepoint (hr) Value: 6
  misc_feature: MA Experiment 20000173 PARAMETER Experiment Name: At_42deg_Heat_P Parameter: Tissue Value: Aerial
  misc_feature: MA Experiment ID: 20000179 Result: Down-regulated in Transcription
  misc_feature: MA Experiment 20000179 PARAMETER Experiment Name: At_Germinating_Seeds_P Parameter: Age (hr) Value: 6 vs. 0
  misc_feature: MA Experiment 20000179 PARAMETER Experiment Name: At_Germinating_Seeds_P Parameter: Tissue Value: Germinating Seeds
  misc_feature: MA Experiment ID: 20000180 Result: Down-regulated in Transcription
  misc_feature: MA Experiment 20000180 PARAMETER Experiment Name: At_Germinating_Seeds_P Parameter: Age (hr) Value: 24 vs. 0
  misc_feature: MA Experiment 20000180 PARAMETER Experiment Name: At_Germinating_Seeds_P Parameter: Tissue Value: Germinating Seeds
  misc_feature: MA Experiment ID: 20000184 Result: Down-regulated in Transcription
  misc_feature: MA Experiment 20000184 PARAMETER Experiment Name: At_Shoots__P Parameter: Age (day) Value: 7
  misc_feature: MA Experiment 20000184 PARAMETER Experiment Name: At_Shoots__P Parameter: Tissue Value: Shoots vs. Whole Plant
  misc_feature: MA Experiment ID: 20000794 Result: Up-regulated in Transcription
  misc_feature: MA Experiment 20000794 PARAMETER Experiment Name: At_Petals_P Parameter: Age (day) Value: 23-25 days
  misc_feature: MA Experiment 20000794 PARAMETER Experiment Name: At_Petals_P Parameter: Plant Line Value: WS
  misc_feature: MA Experiment 20000794 PARAMETER Experiment Name: At_Petals_P Parameter: Tissue Value: Petals vs. Whole plant
  misc_feature: MA Experiment ID: 20001905 Result: Up-regulated in Transcription
  misc_feature: MA Experiment 20001905 PARAMETER Experiment Name: At_Drought_Reproduction_P Parameter: Age (day) Value: 40
  misc_feature: MA Experiment 20001905 PARAMETER Experiment Name: At_Drought_Reproduction_P Parameter: Organism Value: A. thaliana
  misc_feature: MA Experiment 20001905 PARAMETER Experiment Name: At_Drought_Reproduction_P Parameter: Plant Line Value: WS
  misc_feature: MA Experiment 20001905 PARAMETER Experiment Name: At_Drought_Reproduction_P Parameter: Timepoint (day) Value: 10
  misc_feature: MA Experiment 20001905 PARAMETER Experiment Name: At_Drought_Reproduction_P Parameter: Tissue Value: Rosettes
  misc_feature: MA Experiment 20001905 PARAMETER Experiment Name: At_Drought_Reproduction_P Parameter: Treatment Value: Drought vs. No Drought
  misc_feature: MA Experiment ID: 20001911 Result: Up-regulated in Transcription
  misc_feature: MA Experiment 20001911 PARAMETER Experiment Name: At_Drought_Reproduction_P Parameter: Age (day) Value: 40
  misc_feature: MA Experiment 20001911 PARAMETER Experiment Name: At_Drought_Reproduction_P Parameter: Organism Value: A. thaliana
  misc_feature: MA Experiment 20001911 PARAMETER Experiment Name: At_Drought_Reproduction_P Parameter: Plant Line Value: WS
  misc_feature: MA Experiment 20001911 PARAMETER Experiment Name: At_Drought_Reproduction_P Parameter: Timepoint (day) Value: 10
  misc_feature: MA Experiment 20001911 PARAMETER Experiment Name: At_Drought_Reproduction_P Parameter: Tissue Value: Flowers
  misc_feature: MA Experiment 20001911 PARAMETER Experiment Name: At_Drought_Reproduction_P Parameter: Treatment Value: Drought vs. No Drought
cggcctaccccattggaagtgtcatgaaaaagaacgtcaaagtggtaagaagaacgaatcctcaagtgaaggtgaaccagcaaatgttactgatacagtcggagaccatgttgttgatgctagcaatctgtctagctccatagatccttccagtagtggttcgcatgtacatgatcctgaatttgatgttatctttcttcatggcttgcgtggtgggccctttaaaacttggcgaattgctgaggataaatcttctaccaaatctggcttggtggagaagattgaccaggaagcaggaaagctgggaacattttggccgagcgagtggctttcaaatgatttccctcaagctcgcttgtttacccttaaatacaagtatgggaggtcttgtcgtgaagcagattctacacaaagcaaaggaagaaaaacttgataaactagtcaataacactgctggagttgtattctacagttgcccacattttggcagcaagctagcagatatgccgtggagaatgggtcttgtgttacgcccggctccatctataggagagctacgaagtggttctccaagactagttgagctcaatgacttgcttcgccagctccataagaaaggggttgttgaagtccttagtttctgtgagacaaaagtaaccccaatcgtggaaggctatggaggatgggcttttcggatggaaatcgtgccaattgaatcagcatacccaggatttggtgaacttgttgtgttggagtcaacagaccatataaattcatgtaaaccactgagccgctcggatccttcgtatacagaggcgttgcagttcctgcgcaagctcagcgcacagcgattaaaacctcatgttaaacgggaacctgggatacatgattgattaaccatggttaggttaaccgaagatgaaccaaaggtcattggttttggctaattgacgctatagtttttttcatttcttgtgtgtacataacaagaaccacgcttaggctcttttgtttcattttacacattgtttcatctgtattactggattacacaattggaagtaaatataaagattctc

SEQ ID NO: 108358 - protein, 242 aa, Arabidopsis thaliana
  peptide (1)..(242): Ceres Seq. ID no. 13667105
  misc_feature (68)..(231): Homolog of NCBI NO: 28893415 NR Description: serine active site containing 1 [Mus musculus]
  misc_feature (68)..(231): Homolog of NCBI NO: 14042785 NR Description: unnamed protein product [Homo sapiens]
  misc_feature (68)..(231): Homolog of NCBI NO: 40254995 NR Description: hypothetical protein FLJ14917 [Homo sapiens]
  misc_feature (71)..(232): Homolog of NCBI NO: 15291485 NR Description: GH23377p [Drosophila melanogaster]
  misc_feature (71)..(232): Homolog of NCBI NO: 20129595 NR Description: CG10383-PA [Drosophila melanogaster]
  misc_feature (71)..(222): Homolog of NCBI NO: 37523664 NR Description: hypothetical protein gll4095 [Gloeobacter
  misc_feature (71)..(215): Homolog of NCBI NO: 31198289 NR Description: ENSANGP00000019766 [Anopheles gambiae]
  misc_feature (71)..(227): Homolog of NCBI NO: 23041874 NR Description: hypothetical protein [Trichodesmium erythraeum
  misc_feature (71)..(224): Homolog of NCBI NO: 23041969 NR Description: hypothetical protein [Trichodesmium erythraeum
MYMILNLMLSFFMACVVGPLKLGELLRINLLPNLAWWRRLTRKQESWEHFGRASGFQMISLKLACLPLNTSMGGLVVKQILHKAKEEKLDKLVNNTAGVVFYSCPHFGSKLADMPWRMGLVLRPAPSIGELRSGSPRLVELNDLLRQLHKKGVVEVLSFCETKVTPIVEGYGGWAFRMEIVPIESAYPGFGELVVLESTDHINSCKPLSRSDPSYTEALQFLRKLSAQRLKPHVKREPGIHD

SEQ ID NO: 108359 - protein, 240 aa, Arabidopsis thaliana
  peptide (1)..(240): Ceres Seq. ID no. 13667106
  misc_feature (66)..(229): Homolog of NCBI NO: 28893415 NR Description: serine active site containing 1 [Mus musculus]
  misc_feature (66)..(229): Homolog of NCBI NO: 14042785 NR Description: unnamed protein product [Homo sapiens]
  misc_feature (66)..(229): Homolog of NCBI NO: 40254995 NR Description: hypothetical protein FLJ14917 [Homo sapiens]
  misc_feature (69)..(230): Homolog of NCBI NO: 15291485 NR Description: GH23377p [Drosophila melanogaster]
  misc_feature (69)..(230): Homolog of NCBI NO: 20129595 NR Description: CG10383-PA [Drosophila melanogaster]
  misc_feature (69)..(220): Homolog of NCBI NO: 37523664 NR Description: hypothetical protein gll4095 [Gloeobacter
  misc_feature (69)..(213): Homolog of NCBI NO: 31198289 NR Description: ENSANGP00000019766 [Anopheles gambiae]
  misc_feature (69)..(225): Homolog of NCBI NO: 23041874 NR Description: hypothetical protein [Trichodesmium erythraeum
  misc_feature (69)..(222): Homolog of NCBI NO: 23041969 NR Description: hypothetical protein [Trichodesmium erythraeum
MILNLMLSFFMACVVGPLKLGELLRINLLPNLAWWRRLTRKQESWEHFGRASGFQMISLKLACLPLNTSMGGLVVKQILHKAKEEKLDKLVNNTAGVVFYSCPHFGSKLADMPWRMGLVLRPAPSIGELRSGSPRLVELNDLLRQLHKKGVVEVLSFCETKVTPIVEGYGGWAFRMEIVPIESAYPGFGELVVLESTDHINSCKPLSRSDPSYTEALQFLRKLSAQRLKPHVKREPGIHD

SEQ ID NO: 108360 - protein, 235 aa, Arabidopsis thaliana
  peptide (1)..(235): Ceres Seq. ID no. 13667107
  misc_feature (61)..(224): Homolog of NCBI NO: 28893415 NR Description: serine active site containing 1 [Mus musculus]
  misc_feature (61)..(224): Homolog of NCBI NO: 14042785 NR Description: unnamed protein product [Homo sapiens]
  misc_feature (61)..(224): Homolog of NCBI NO: 40254995 NR Description: hypothetical protein FLJ14917 [Homo sapiens]
  misc_feature (64)..(225): Homolog of NCBI NO: 15291485 NR Description: GH23377p [Drosophila melanogaster]
  misc_feature (64)..(225): Homolog of NCBI NO: 20129595 NR Description: CG10383-PA [Drosophila melanogaster]
  misc_feature (64)..(215): Homolog of NCBI NO: 37523664 NR Description: hypothetical protein gll4095 [Gloeobacter
  misc_feature (64)..(208): Homolog of NCBI NO: 31198289 NR Description: ENSANGP00000019766 [Anopheles gambiae]
  misc_feature (64)..(220): Homolog of NCBI NO: 23041874 NR Description: hypothetical protein [Trichodesmium erythraeum
  misc_feature (64)..(217): Homolog of NCBI NO: 23041969 NR Description: hypothetical protein [Trichodesmium erythraeum
MLSFFMACVVGPLKLGELLRINLLPNLAWWRRLTRKQESWEHFGRASGFQMISLKLACLPLNTSMGGLVVKQILHKAKEEKLDKLVNNTAGVVFYSCPHFGSKLADMPWRMGLVLRPAPSIGELRSGSPRLVELNDLLRQLHKKGVVEVLSFCETKVTPIVEGYGGWAFRMEIVPIESAYPGFGELVVLESTDHINSCKPLSRSDPSYTEALQFLRKLSAQRLKPHVKREPGIHD

SEQ ID NO: 108361 - DNA, 1403 bp, Arabidopsis thaliana
  misc_feature (1)..(1403): Ceres Seq. ID no. 13667108
  misc_feature: MA Experiment ID: 20000173 Result: Up-regulated in Transcription
  misc_feature: MA Experiment 20000173 PARAMETER Experiment Name: At_42deg_Heat_P Parameter: Age (day) Value: 14
  misc_feature: MA Experiment 20000173 PARAMETER Experiment Name: At_42deg_Heat_P Parameter: Organism Value: A. thaliana
  misc_feature: MA Experiment 20000173 PARAMETER Experiment Name: At_42deg_Heat_P Parameter: Plant Line Value: WS
  misc_feature: MA Experiment 20000173 PARAMETER Experiment Name: At_42deg_Heat_P Parameter: Temperature (deg C) Value: 42 vs. 22
  misc_feature: MA Experiment 20000173 PARAMETER Experiment Name: At_42deg_Heat_P Parameter: Timepoint (hr) Value: 6
  misc_feature: MA Experiment 20000173 PARAMETER Experiment Name: At_42deg_Heat_P Parameter: Tissue Value: Aerial
  misc_feature: MA Experiment ID: 20000179 Result: Down-regulated in Transcription
  misc_feature: MA Experiment 20000179 PARAMETER Experiment Name: At_Germinating_Seeds_P Parameter: Age (hr) Value: 6 vs. 0
  misc_feature: MA Experiment 20000179 PARAMETER Experiment Name: At_Germinating_Seeds_P Parameter: Tissue Value: Germinating Seeds
  misc_feature: MA Experiment ID: 20000180 Result: Down-regulated in Transcription
  misc_feature: MA Experiment 20000180 PARAMETER Experiment Name: At_Germinating_Seeds_P Parameter: Age (hr) Value: 24 vs. 0
  misc_feature: MA Experiment 20000180 PARAMETER Experiment Name: At_Germinating_Seeds_P Parameter: Tissue Value: Germinating Seeds
  misc_feature: MA Experiment ID: 20000184 Result: Down-regulated in Transcription
  misc_feature: MA Experiment 20000184 PARAMETER Experiment Name: At_Shoots__P Parameter: Age (day) Value: 7
  misc_feature: MA Experiment 20000184 PARAMETER Experiment Name: At_Shoots__P Parameter: Tissue Value: Shoots vs. Whole Plant
  misc_feature: MA Experiment ID: 20000794 Result: Up-regulated in Transcription
  misc_feature: MA Experiment 20000794 PARAMETER Experiment Name: At_Petals_P Parameter: Age (day) Value: 23-25 days
  misc_feature: MA Experiment 20000794 PARAMETER Experiment Name: At_Petals_P Parameter: Plant Line Value: WS
  misc_feature: MA Experiment 20000794 PARAMETER Experiment Name: At_Petals_P Parameter: Tissue Value: Petals vs. Whole plant
  misc_feature: MA Experiment ID: 20001905 Result: Up-regulated in Transcription
  misc_feature: MA Experiment 20001905 PARAMETER Experiment Name: At_Drought_Reproduction_P Parameter: Age (day) Value: 40
  misc_feature: MA Experiment 20001905 PARAMETER Experiment Name: At_Drought_Reproduction_P Parameter: Organism Value: A. thaliana
  misc_feature: MA Experiment 20001905 PARAMETER Experiment Name: At_Drought_Reproduction_P Parameter: Plant Line Value: WS
  misc_feature: MA Experiment 20001905 PARAMETER Experiment Name: At_Drought_Reproduction_P Parameter: Timepoint (day) Value: 10
  misc_feature: MA Experiment 20001905 PARAMETER Experiment Name: At_Drought_Reproduction_P Parameter: Tissue Value: Rosettes
  misc_feature: MA Experiment 20001905 PARAMETER Experiment Name: At_Drought_Reproduction_P Parameter: Treatment Value: Drought vs. No Drought
  misc_feature: MA Experiment ID: 20001911 Result: Up-regulated in Transcription
  misc_feature: MA Experiment 20001911 PARAMETER Experiment Name: At_Drought_Reproduction_P Parameter: Age (day) Value: 40
  misc_feature: MA Experiment 20001911 PARAMETER Experiment Name: At_Drought_Reproduction_P Parameter: Organism Value: A. thaliana
  misc_feature: MA Experiment 20001911 PARAMETER Experiment Name: At_Drought_Reproduction_P Parameter: Plant Line Value: WS
  misc_feature: MA Experiment 20001911 PARAMETER Experiment Name: At_Drought_Reproduction_P Parameter: Timepoint (day) Value: 10
  misc_feature: MA Experiment 20001911 PARAMETER Experiment Name: At_Drought_Reproduction_P Parameter: Tissue Value: Flowers
  misc_feature: MA Experiment 20001911 PARAMETER Experiment Name: At_Drought_Reproduction_P Parameter: Treatment Value: Drought vs. No Drought
  misc_feature: Pfam Name: DUF676 Pfam Description: Putative serine esterase (DUF676)
aatggcttgatgattgtgcaaaaggaaatatttcctgttgcaatgaccctaagacacaaagttatgcaagagcttctctgttaaatgtatattgcaatcagcaagatggtagtggatcaggagacggtggcagttccaagccagacatctctaacatgaacagcaactgtcctcgctatggagacatgatatttttaattaatcccggcctaccccattggaagtgtcatgaaaaagaacgtcaaagtggtaagaagaacgaatcctcaagtgaaggtgaaccagcaaatgttactgatacagtcggagaccatgttgttgatgctagcaatctgtctagctccatagatccttccagtagtggttcgcatgtacatgatcctgaatttgatgttatctttcttcatggcttgcgtggtgggccctttaaaacttggcgaattgctgaggataaatcttctaccaaatctggcttggtggagaagattgaccaggaagcaggaaagctgggaacattttggccgagcgagtggctttcaaatgatttccctcaagctcgcttgtttacccttaaatacaagacaaacctcacggaatggtctggagctagcttgccacttcaggaagttagttctatgatattggaaaagctcgtctcagcaggcattggagaccgacctgttgtttttgtgactcacagtatgggaggtcttgtcgtgaagcagattctacacaaagcaaaggaagaaaaacttgataaactagtcaataacactgctggagttgtattctacagttgcccacattttggcagcaagctagcagatatgccgtggagaatgggtcttgtgttacgcccggctccatctataggagagctacgaagtggttctccaagactagttgagctcaatgacttgcttcgccagctccataagaaaggggttgttgaagtccttagtttctgtgagacaaaagtaaccccaatcgtggaaggctatggaggatgggcttttcggatggaaatcgtgccaattgaatcagcatacccaggatttggtgaacttgttgtgttggagtcaacagaccatataaattcatgtaaaccactgagccgctcggatccttcgtatacagaggcgttgcagttcctgcgcaagctcagcgcacagcgattaaaacctcatgttaaacgggaacctgggatacatgattgattaaccatggttaggttaaccgaagatgaaccaaaggtcattggttttggctaattgacgctatagtttttttcatttcttgtgtgtacataacaagaaccacgcttaggctcttttgtttcattttacacattgtttcatctgtattactggattacacaattggaagtaaatataaagattctc

SEQ ID NO: 108362 - protein, 404 aa, Arabidopsis thaliana
  peptide (1)..(404): Ceres Seq. ID no. 13667109
  misc_feature: Pfam Name: DUF676 Pfam Description: Putative serine esterase (DUF676)
  misc_feature (1)..(239): Homolog of NCBI NO: 15235327 NR Description: hypothetical protein [Arabidopsis thaliana]
  misc_feature (130)..(393): Homolog of NCBI NO: 14042785 NR Description: unnamed protein product [Homo sapiens]
  misc_feature (130)..(393): Homolog of NCBI NO: 40254995 NR Description: hypothetical protein FLJ14917 [Homo sapiens]
  misc_feature (130)..(393): Homolog of NCBI NO: 28893415 NR Description: serine active site containing 1 [Mus musculus]
  misc_feature (121)..(384): Homolog of NCBI NO: 37523664 NR Description: hypothetical protein gll4095 [Gloeobacter
  misc_feature (173)..(394): Homolog of NCBI NO: 15291485 NR Description: GH23377p [Drosophila melanogaster]
  misc_feature (127)..(161): Homolog of NCBI NO: 15291485 NR Description: GH23377p [Drosophila melanogaster]
  misc_feature (173)..(394): Homolog of NCBI NO: 20129595 NR Description: CG10383-PA [Drosophila melanogaster]
  misc_feature (127)..(161): Homolog of NCBI NO: 20129595 NR Description: CG10383-PA [Drosophila melanogaster]
  misc_feature (87)..(377): Homolog of NCBI NO: 31198289 NR Description: ENSANGP00000019766 [Anopheles gambiae]
WLDDCAKGNISCCNDPKTQSYARASLLNVYCNQQDGSGSGDGGSSKPDISNMNSNCPRYGDMIFLINPGLPHWKCHEKERQSGKKNESSSEGEPANVTDTVGDHVVDASNLSSSIDPSSSGSHVHDPEFDVIFLHGLRGGPFKTWRIAEDKSSTKSGLVEKIDQEAGKLGTFWPSEWLSNDFPQARLFTLKYKTNLTEWSGASLPLQEVSSMILEKLVSAGIGDRPVVFVTHSMGGLVVKQILHKAKEEKLDKLVNNTAGVVFYSCPHFGSKLADMPWRMGLVLRPAPSIGELRSGSPRLVELNDLLRQLHKKGVVEVLSFCETKVTPIVEGYGGWAFRMEIVPIESAYPGFGELVVLESTDHINSCKPLSRSDPSYTEALQFLRKLSAQRLKPHVKREPGIHD

SEQ ID NO: 108363 - protein, 353 aa, Arabidopsis thaliana
  peptide (1)..(353): Ceres Seq. ID no. 13667110
  misc_feature: Pfam Name: DUF676 Pfam Description: Putative serine esterase (DUF676)
  misc_feature (1)..(188): Homolog of NCBI NO: 15235327 NR Description: hypothetical protein [Arabidopsis thaliana]
  misc_feature (79)..(342): Homolog of NCBI NO: 14042785 NR Description: unnamed protein product [Homo sapiens]
  misc_feature (79)..(342): Homolog of NCBI NO: 40254995 NR Description: hypothetical protein FLJ14917 [Homo sapiens]
  misc_feature (79)..(342): Homolog of NCBI NO: 28893415 NR Description: serine active site containing 1 [Mus musculus]
  misc_feature (70)..(333): Homolog of NCBI NO: 37523664 NR Description: hypothetical protein gll4095 [Gloeobacter
  misc_feature (122)..(343): Homolog of NCBI NO: 15291485 NR Description: GH23377p [Drosophila melanogaster]
  misc_feature (76)..(110): Homolog of NCBI NO: 15291485 NR Description: GH23377p [Drosophila melanogaster]
  misc_feature (122)..(343): Homolog of NCBI NO: 20129595 NR Description: CG10383-PA [Drosophila melanogaster]
  misc_feature (76)..(110): Homolog of NCBI NO: 20129595 NR Description: CG10383-PA [Drosophila melanogaster]
  misc_feature (36)..(326): Homolog of NCBI NO: 31198289 NR Description: ENSANGP00000019766 [Anopheles gambiae]
MNSNCPRYGDMIFLINPGLPHWKCHEKERQSGKKNESSSEGEPANVTDTVGDHVVDASNLSSSIDPSSSGSHVHDPEFDVIFLHGLRGGPFKTWRIAEDKSSTKSGLVEKIDQEAGKLGTFWPSEWLSNDFPQARLFTLKYKTNLTEWSGASLPLQEVSSMILEKLVSAGIGDRPVVFVTHSMGGLVVKQILHKAKEEKLDKLVNNTAGVVFYSCPHFGSKLADMPWRMGLVLRPAPSIGELRSGSPRLVELNDLLRQLHKKGVVEVLSFCETKVTPIVEGYGGWAFRMEIVPIESAYPGFGELVVLESTDHINSCKPLSRSDPSYTEALQFLRKLSAQRLKPHVKREPGIHD

SEQ ID NO: 108364 - protein, 343 aa, Arabidopsis thaliana
  peptide (1)..(343): Ceres Seq. ID no. 13667111
  misc_feature: Pfam Name: DUF676 Pfam Description: Putative serine esterase (DUF676)
  misc_feature (1)..(178): Homolog of NCBI NO: 15235327 NR Description: hypothetical protein [Arabidopsis thaliana]
  misc_feature (69)..(332): Homolog of NCBI NO: 14042785 NR Description: unnamed protein product [Homo sapiens]
  misc_feature (69)..(332): Homolog of NCBI NO: 40254995 NR Description: hypothetical protein FLJ14917 [Homo sapiens]
  misc_feature (69)..(332): Homolog of NCBI NO: 28893415 NR Description: serine active site containing 1 [Mus musculus]
  misc_feature (60)..(323): Homolog of NCBI NO: 37523664 NR Description: hypothetical protein gll4095 [Gloeobacter
  misc_feature (112)..(333): Homolog of NCBI NO: 15291485 NR Description: GH23377p [Drosophila melanogaster]
  misc_feature (66)..(100): Homolog of NCBI NO: 15291485 NR Description: GH23377p [Drosophila melanogaster]
  misc_feature (112)..(333): Homolog of NCBI NO: 20129595 NR Description: CG10383-PA [Drosophila melanogaster]
  misc_feature (66)..(100): Homolog of NCBI NO: 20129595 NR Description: CG10383-PA [Drosophila melanogaster]
  misc_feature (26)..(316): Homolog of NCBI NO: 31198289 NR Description: ENSANGP00000019766 [Anopheles gambiae]
MIFLINPGLPHWKCHEKERQSGKKNESSSEGEPANVTDTVGDHVVDASNLSSSIDPSSSGSHVHDPEFDVIFLHGLRGGPFKTWRIAEDKSSTKSGLVEKIDQEAGKLGTFWPSEWLSNDFPQARLFTLKYKTNLTEWSGASLPLQEVSSMILEKLVSAGIGDRPVVFVTHSMGGLVVKQILHKAKEEKLDKLVNNTAGVVFYSCPHFGSKLADMPWRMGLVLRPAPSIGELRSGSPRLVELNDLLRQLHKKGVVEVLSFCETKVTPIVEGYGGWAFRMEIVPIESAYPGFGELVVLESTDHINSCKPLSRSDPSYTEALQFLRKLSAQRLKPHVKREPGIHD

SEQ ID NO: 108365 - DNA, 1542 bp, Arabidopsis thaliana
  misc_feature (1)..(1542): Ceres Seq. ID no. 13667128
  misc_feature: MA Experiment ID: 108434 Result: Up-regulated in Transcription
  misc_feature: MA Experiment 108434 PARAMETER Experiment Name: At_Root_Tips_cDNA_P Parameter: Tissue Value: Root Tips
  misc_feature: MA Experiment ID: 108463 Result: Up-regulated in Transcription
  misc_feature: MA Experiment 108463 PARAMETER Experiment Name: At_Germinating_Seeds_cDNA_P Parameter: Age (day) Value: 3 vs. 0
  misc_feature: MA Experiment 108463 PARAMETER Experiment Name: At_Germinating_Seeds_cDNA_P Parameter: Tissue Value: Germinating Seeds
  misc_feature: MA Experiment ID: 108464 Result: Up-regulated in Transcription
  misc_feature: MA Experiment 108464 PARAMETER Experiment Name: At_Germinating_Seeds_cDNA_P Parameter: Age (day) Value: 4 vs. 0
  misc_feature: MA Experiment 108464 PARAMETER Experiment Name: At_Germinating_Seeds_cDNA_P Parameter: Tissue Value: Germinating Seeds
  misc_feature: MA Experiment ID: 108489 Result: Down-regulated in Transcription
  misc_feature: MA Experiment ID: 108585 Result: Down-regulated in Transcription
  misc_feature: MA Experiment 108585 PARAMETER Experiment Name: At_5mM_NaNP_cDNA_P Parameter: Timepoint (hr) Value: 6
  misc_feature: MA Experiment 108585 PARAMETER Experiment Name: At_5mM_NaNP_cDNA_P Parameter: Tissue Value: Aerial
  misc_feature: MA Experiment 108585 PARAMETER Experiment Name: At_5mM_NaNP_cDNA_P Parameter: Treatment Value: null
  misc_feature: MA Experiment ID: 108595 Result: Down-regulated in Transcription
  misc_feature: MA Experiment 108595 PARAMETER Experiment Name: At_Ler-pi_Ovule_cDNA_P Parameter: Plant Line Value: null
  misc_feature: MA Experiment ID: 108607 Result: Down-regulated in Transcription
  misc_feature: MA Experiment 108607 PARAMETER Experiment Name: At_100uM_ABA_cDNA_P Parameter: Timepoint (hr) Value: 4
  misc_feature: MA Experiment 108607 PARAMETER Experiment Name: At_100uM_ABA_cDNA_P Parameter: Tissue Value: Aerial
  misc_feature: MA Experiment 108607 PARAMETER Experiment Name: At_100uM_ABA_cDNA_P Parameter: Treatment Value: 100uM ABA vs. No Treatment
  misc_feature: MA Experiment ID: 20000070 Result: Down-regulated in Transcription
  misc_feature: MA Experiment 20000070 PARAMETER Experiment Name: At_100uM_ABA_Mutants_cDNA_P Parameter: Plant Line Value: CS24
  misc_feature: MA Experiment 20000070 PARAMETER Experiment Name: At_100uM_ABA_Mutants_cDNA_P Parameter: Timepoint (hr) Value: 6
  misc_feature: MA Experiment 20000070 PARAMETER Experiment Name: At_100uM_ABA_Mutants_cDNA_P Parameter: Tissue Value: Aerial
  misc_feature: MA Experiment 20000070 PARAMETER Experiment Name: At_100uM_ABA_Mutants_cDNA_P Parameter: Treatment Value: 100uM ABA vs. No Treatment
  misc_feature: MA Experiment ID: 20000087 Result: Down-regulated in Transcription
  misc_feature: MA Experiment 20000087 PARAMETER Experiment Name: At_100uM_ABA_Mutants_cDNA_P Parameter: Plant Line Value: WS
  misc_feature: MA Experiment 20000087 PARAMETER Experiment Name: At_100uM_ABA_Mutants_cDNA_P Parameter: Timepoint (hr) Value: 6
  misc_feature: MA Experiment 20000087 PARAMETER Experiment Name: At_100uM_ABA_Mutants_cDNA_P Parameter: Tissue Value: Aerial
  misc_feature: MA Experiment 20000087 PARAMETER Experiment Name: At_100uM_ABA_Mutants_cDNA_P Parameter: Treatment Value: 100uM ABA vs. No Treatment
  misc_feature: MA Experiment ID: 20000088 Result: Down-regulated in Transcription
  misc_feature: MA Experiment 20000088 PARAMETER Experiment Name: At_100uM_ABA_Mutants_cDNA_P Parameter: Plant Line Value: Landsberg
  misc_feature: MA Experiment 20000088 PARAMETER Experiment Name: At_100uM_ABA_Mutants_cDNA_P Parameter: Timepoint (hr) Value: 6
  misc_feature: MA Experiment 20000088 PARAMETER Experiment Name: At_100uM_ABA_Mutants_cDNA_P Parameter: Tissue Value: Aerial
  misc_feature: MA Experiment 20000088 PARAMETER Experiment Name: At_100uM_ABA_Mutants_cDNA_P Parameter: Treatment Value: 100uM ABA vs. No Treatment
  misc_feature: MA Experiment ID: 20000090 Result: Down-regulated in Transcription
  misc_feature: MA Experiment ID: 20000111 Result: Down-regulated in Transcription
  misc_feature: MA Experiment 20000111 PARAMETER Experiment Name: At_42deg_Heat_cDNA_P Parameter: Temperature (deg C) Value: 42 vs. 22
  misc_feature: MA Experiment 20000111 PARAMETER Experiment Name: At_42deg_Heat_cDNA_P Parameter: Timepoint (hr) Value: 6
  misc_feature: MA Experiment 20000111 PARAMETER Experiment Name: At_42deg_Heat_cDNA_P Parameter: Tissue Value: Aerial
  misc_feature: MA Experiment ID: 20000113 Result: Down-regulated in Transcription
  misc_feature: MA Experiment 20000113 PARAMETER Experiment Name: At_42deg_Heat_cDNA_P Parameter: Temperature (deg C) Value: 42 vs. 22
  misc_feature: MA Experiment 20000113 PARAMETER Experiment Name: At_42deg_Heat_cDNA_P Parameter: Timepoint (hr) Value: 8
  misc_feature: MA Experiment 20000113 PARAMETER Experiment Name: At_42deg_Heat_cDNA_P Parameter: Tissue Value: Aerial
  misc_feature: MA Experiment ID: 20000185 Result: Up-regulated in Transcription
  misc_feature: MA Experiment 20000185 PARAMETER Experiment Name: At_Roots__P Parameter: Age (day) Value: 7 vs. 21
  misc_feature: MA Experiment 20000185 PARAMETER Experiment Name: At_Roots__P Parameter: Organism Value: A. thaliana
  misc_feature: MA Experiment 20000185 PARAMETER Experiment Name: At_Roots__P Parameter: Tissue Value: Roots vs. Whole Plant
  misc_feature: MA Experiment ID: 20000437 Result: Down-regulated in Transcription
  misc_feature: MA Experiment 20000437 PARAMETER Experiment Name: At_Drought_P Parameter: Age (day) Value: 8
  misc_feature: MA Experiment 20000437 PARAMETER Experiment Name: At_Drought_P Parameter: Organism Value: A. thaliana
  misc_feature: MA Experiment 20000437 PARAMETER Experiment Name: At_Drought_P Parameter: Plant Line Value: WS
  misc_feature: MA Experiment 20000437 PARAMETER Experiment Name: At_Drought_P Parameter: Timepoint (hr) Value: 24
  misc_feature: MA Experiment 20000437 PARAMETER Experiment Name: At_Drought_P Parameter: Tissue Value: Whole Plant
  misc_feature: MA Experiment 20000437 PARAMETER Experiment Name: At_Drought_P Parameter: Treatment Value: Drought vs. No Drought
  misc_feature: MA Experiment ID: 20000438 Result: Up-regulated in Transcription
  misc_feature: MA Experiment 20000438 PARAMETER Experiment Name: At_Shoots__P Parameter: Age (day) Value: 14
  misc_feature: MA Experiment 20000438 PARAMETER Experiment Name: At_Shoots__P Parameter: Tissue Value: Shoots vs. Whole Plant
  misc_feature: MA Experiment ID: 20000527 Result: Down-regulated in Transcription
  misc_feature: MA Experiment 20000527 PARAMETER Experiment Name: At_10percent_PEG_P Parameter: Age (day) Value: 20
  misc_feature: MA Experiment 20000527 PARAMETER Experiment Name: At_10percent_PEG_P Parameter: Organism Value: A. thaliana
  misc_feature: MA Experiment 20000527 PARAMETER Experiment Name: At_10percent_PEG_P Parameter: Plant Line Value: WS
  misc_feature: MA Experiment 20000527 PARAMETER Experiment Name: At_10percent_PEG_P Parameter: Timepoint (day) Value: 20
  misc_feature: MA Experiment 20000527 PARAMETER Experiment Name: At_10percent_PEG_P Parameter: Tissue Value: Whole Plant
  misc_feature: MA Experiment 20000527 PARAMETER Experiment Name: At_10percent_PEG_P Parameter: Treatment Value: 10percent PEG vs. No Treatment
  misc_feature: MA Experiment ID: 20000573 Result: Down-regulated in Transcription
  misc_feature: MA Experiment 20000573 PARAMETER Experiment Name: At_100uM_ABA_Mutants__P Parameter: Organism Value: A. thaliana
  misc_feature: MA Experiment 20000573 PARAMETER Experiment Name: At_100uM_ABA_Mutants__P Parameter: Plant Line Value: CS22 vs. Ler wt
  misc_feature: MA Experiment 20000573 PARAMETER Experiment Name: At_100uM_ABA_Mutants__P Parameter: Timepoint (hr) Value: N/A
  misc_feature: MA Experiment 20000573 PARAMETER Experiment Name: At_100uM_ABA_Mutants__P Parameter: Tissue Value: Whole Plant
  misc_feature: MA Experiment 20000573 PARAMETER Experiment Name: At_100uM_ABA_Mutants__P Parameter: Treatment Value: None
  misc_feature: MA Experiment ID: 20000574 Result: Down-regulated in Transcription
  misc_feature: MA Experiment 20000574 PARAMETER Experiment Name: At_100uM_ABA_Mutants__P Parameter: Organism Value: A. thaliana
  misc_feature: MA Experiment 20000574 PARAMETER Experiment Name: At_100uM_ABA_Mutants__P Parameter: Plant Line Value: CS23 vs. Ler wt
  misc_feature: MA Experiment 20000574 PARAMETER Experiment Name: At_100uM_ABA_Mutants__P Parameter: Timepoint (hr) Value: N/A
  misc_feature: MA Experiment 20000574 PARAMETER Experiment Name: At_100uM_ABA_Mutants__P Parameter: Tissue Value: Whole Plant
  misc_feature: MA Experiment 20000574 PARAMETER Experiment Name: At_100uM_ABA_Mutants__P Parameter: Treatment Value: None
  misc_feature: MA Experiment ID: 20000794 Result: Down-regulated in Transcription
  misc_feature: MA Experiment 20000794 PARAMETER Experiment Name: At_Petals_P Parameter: Age (day) Value: 23-25 days
  misc_feature: MA Experiment 20000794 PARAMETER Experiment Name: At_Petals_P Parameter: Plant Line Value: WS
  misc_feature: MA Experiment 20000794 PARAMETER Experiment Name: At_Petals_P Parameter: Tissue Value: Petals vs. Whole plant
  misc_feature: MA Experiment ID: 20001450 Result: Up-regulated in Transcription
  misc_feature: MA Experiment 20001450 PARAMETER Experiment Name: At_Far-red-induction_P Parameter: Age (day) Value: 7
  misc_feature: MA Experiment 20001450 PARAMETER Experiment Name: At_Far-red-induction_P Parameter: Light Value: Far-red vs. White
  misc_feature: MA Experiment 20001450 PARAMETER Experiment Name: At_Far-red-induction_P Parameter: Organism Value: A. thaliana
  misc_feature: MA Experiment 20001450 PARAMETER Experiment Name: At_Far-red-induction_P Parameter: Plant Line Value: Columbia
  misc_feature: MA Experiment 20001450 PARAMETER Experiment Name: At_Far-red-induction_P Parameter: Timepoint (hr) Value: 8
  misc_feature: MA Experiment 20001450 PARAMETER Experiment Name: At_Far-red-induction_P Parameter: Tissue Value: Whole Plant
  misc_feature: MA Experiment ID: 20001555 Result: Down-regulated in Transcription
  misc_feature: MA Experiment 20001555 PARAMETER Experiment Name: At_Drought_Soil_Dry_P Parameter: Age (day) Value: 24
  misc_feature: MA Experiment 20001555 PARAMETER Experiment Name: At_Drought_Soil_Dry_P Parameter: Organism Value: A. thaliana
  misc_feature: MA Experiment 20001555 PARAMETER Experiment Name: At_Drought_Soil_Dry_P Parameter: Plant Line Value: WS
  misc_feature: MA Experiment 20001555 PARAMETER Experiment Name: At_Drought_Soil_Dry_P Parameter: Post Timepoint (hr) Value: None
  misc_feature: MA Experiment 20001555 PARAMETER Experiment Name: At_Drought_Soil_Dry_P Parameter: Post-Treatment Value: None
  misc_feature: MA Experiment 20001555 PARAMETER Experiment Name: At_Drought_Soil_Dry_P Parameter: Timepoint (day) Value: 10
  misc_feature: MA Experiment 20001555 PARAMETER Experiment Name: At_Drought_Soil_Dry_P Parameter: Treatment Value: Drought vs. No Drought
  misc_feature: MA Experiment ID: 20001556 Result: Down-regulated in Transcription
  misc_feature: MA Experiment 20001556 PARAMETER Experiment Name: At_Drought_Soil_Dry_P Parameter: Age (day) Value: 26
  misc_feature: MA Experiment 20001556 PARAMETER Experiment Name: At_Drought_Soil_Dry_P Parameter: Organism Value: A. thaliana
  misc_feature: MA Experiment 20001556 PARAMETER Experiment Name: At_Drought_Soil_Dry_P Parameter: Plant Line Value: WS
  misc_feature: MA Experiment 20001556 PARAMETER Experiment Name: At_Drought_Soil_Dry_P Parameter: Post Timepoint (hr) Value: None
  misc_feature: MA Experiment 20001556 PARAMETER Experiment Name: At_Drought_Soil_Dry_P Parameter: Post-Treatment Value: None
  misc_feature: MA Experiment 20001556 PARAMETER Experiment Name: At_Drought_Soil_Dry_P Parameter: Timepoint (day) Value: 12
  misc_feature: MA Experiment 20001556 PARAMETER Experiment Name: At_Drought_Soil_Dry_P Parameter: Treatment Value: Drought vs. No Drought
  misc_feature: MA Experiment ID: 20001557 Result: Down-regulated in Transcription
  misc_feature: MA Experiment 20001557 PARAMETER Experiment Name: At_Drought_Soil_Dry_P Parameter: Age (day) Value: 27
  misc_feature: MA Experiment 20001557 PARAMETER Experiment Name: At_Drought_Soil_Dry_P Parameter: Organism Value: A. thaliana
  misc_feature: MA Experiment 20001557 PARAMETER Experiment Name: At_Drought_Soil_Dry_P Parameter: Plant Line Value: WS
  misc_feature: MA Experiment 20001557 PARAMETER Experiment Name: At_Drought_Soil_Dry_P Parameter: Post Timepoint (hr) Value: 3
  misc_feature: MA Experiment 20001557 PARAMETER Experiment Name: At_Drought_Soil_Dry_P Parameter: Post-Treatment Value: Re-Water vs. No Drought
  misc_feature: MA Experiment 20001557 PARAMETER Experiment Name: At_Drought_Soil_Dry_P Parameter: Timepoint (day) Value: 13
  misc_feature: MA Experiment 20001557 PARAMETER Experiment Name: At_Drought_Soil_Dry_P Parameter: Treatment Value: Drought vs. No Drought
  misc_feature: MA Experiment ID: 20001558 Result: Down-regulated in Transcription
  misc_feature: MA Experiment 20001558 PARAMETER Experiment Name: At_Drought_Soil_Dry_P Parameter: Age (day) Value: 27
  misc_feature: MA Experiment 20001558 PARAMETER Experiment Name: At_Drought_Soil_Dry_P Parameter: Organism Value: A. thaliana
  misc_feature: MA Experiment 20001558 PARAMETER Experiment Name: At_Drought_Soil_Dry_P Parameter: Plant Line Value: WS
  misc_feature: MA Experiment 20001558 PARAMETER Experiment Name: At_Drought_Soil_Dry_P Parameter: Post Timepoint (hr) Value: 6
  misc_feature: MA Experiment 20001558 PARAMETER Experiment Name: At_Drought_Soil_Dry_P Parameter: Post-Treatment Value: Re-Water vs. No Drought
  misc_feature: MA Experiment 20001558 PARAMETER Experiment Name: At_Drought_Soil_Dry_P Parameter: Timepoint (day) Value: 13
  misc_feature: MA Experiment 20001558 PARAMETER Experiment Name: At_Drought_Soil_Dry_P Parameter: Treatment Value: Drought vs. No Drought
  misc_feature: MA Experiment ID: 20001559 Result: Down-regulated in Transcription
  misc_feature: MA Experiment 20001559 PARAMETER Experiment Name: At_Drought_Soil_Dry_P Parameter: Age (day) Value: 28
  misc_feature: MA Experiment 20001559 PARAMETER Experiment Name: At_Drought_Soil_Dry_P Parameter: Organism Value: A. thaliana
  misc_feature: MA Experiment 20001559 PARAMETER Experiment Name: At_Drought_Soil_Dry_P Parameter: Plant Line Value: WS
  misc_feature: MA Experiment 20001559 PARAMETER Experiment Name: At_Drought_Soil_Dry_P Parameter: Post Timepoint (hr) Value: 29
  misc_feature: MA Experiment 20001559 PARAMETER Experiment Name: At_Drought_Soil_Dry_P Parameter: Post-Treatment Value: Re-Water vs. No Drought
  misc_feature: MA Experiment 20001559 PARAMETER Experiment Name: At_Drought_Soil_Dry_P Parameter: Timepoint (day) Value: 14
  misc_feature: MA Experiment 20001559 PARAMETER Experiment Name: At_Drought_Soil_Dry_P Parameter: Treatment Value: Drought vs. No Drought
  misc_feature: MA Experiment ID: 20001560 Result: Down-regulated in Transcription
  misc_feature: MA Experiment 20001560 PARAMETER Experiment Name: At_Drought_Soil_Dry_P Parameter: Age (day) Value: 28
  misc_feature: MA Experiment 20001560 PARAMETER Experiment Name: At_Drought_Soil_Dry_P Parameter: Organism Value: A. thaliana
  misc_feature: MA Experiment 20001560 PARAMETER Experiment Name: At_Drought_Soil_Dry_P Parameter: Plant Line Value: WS
  misc_feature: MA Experiment 20001560 PARAMETER Experiment Name: At_Drought_Soil_Dry_P Parameter: Post Timepoint (hr) Value: None
  misc_feature: MA Experiment 20001560 PARAMETER Experiment Name: At_Drought_Soil_Dry_P Parameter: Post-Treatment Value: None
  misc_feature: MA Experiment 20001560 PARAMETER Experiment Name: At_Drought_Soil_Dry_P Parameter: Timepoint (day) Value: 14
  misc_feature: MA Experiment 20001560 PARAMETER Experiment Name: At_Drought_Soil_Dry_P Parameter: Treatment Value: Drought vs. No Drought
  misc_feature: MA Experiment ID: 20001905 Result: Down-regulated in Transcription
  misc_feature: MA Experiment 20001905 PARAMETER Experiment Name: At_Drought_Reproduction_P Parameter: Age (day) Value: 40
  misc_feature: MA Experiment 20001905 PARAMETER Experiment Name: At_Drought_Reproduction_P Parameter: Organism Value: A. thaliana
  misc_feature: MA Experiment 20001905 PARAMETER Experiment Name: At_Drought_Reproduction_P Parameter: Plant Line Value: WS
  misc_feature: MA Experiment 20001905 PARAMETER Experiment Name: At_Drought_Reproduction_P Parameter: Timepoint (day) Value: 10
  misc_feature: MA Experiment 20001905 PARAMETER Experiment Name: At_Drought_Reproduction_P Parameter: Tissue Value: Rosettes
  misc_feature: MA Experiment 20001905 PARAMETER Experiment Name: At_Drought_Reproduction_P Parameter: Treatment Value: Drought vs. No Drought
tacgtcagggtttagtcttactatcatttcttgattttggtatcaaatttatctagttttcactgttctttactaaatttttattttgtctcttatctactttagagtttagaagttccatattaaaaattttagttatgaaacaatataaccaaaaaattgccaagattgttcttgaatcttacttgtgcattgtaaatagagtctgttagcaaactttgaccattgagtattttgtgctttgtgtctagattcttgaatcttattctatggttattggacttcataaatccattttgttctttagtagttggtacccaaatattgatttttcaatagtttcagaaaacagaccaacatggaagatcggtgcttgatcaagaacgatatcactgaattgattggtaacacaccaatggtgtatctgaacaatgttgttgatggttgcgtggctcgtatcgctgcgaagcttgagatgatggagccttgttctagcgtcaaagacagaatcgcgtatagtatgatcaaagatgcagaagacaaaggattgattactcccggaaagagtacattgatagagccaactgctggtaacaccgggattggtttagcttgcatgggagctgcaagaggctataaagtgatccttgtgatgccttcaactatgagcttagagagaagaatcattctgagggcactaggtgcagagcttcatctctcggaccagcgcataggccttaaaggaatgttggagaaaactgaagcgattttaagcaaaactcctggtggttacattccacaacaatttgaaaatcctgcaaaccccgagattcattaccgaaccacgggaccggaaatatggagagattcagccgggaaagtagatatattggtcgctggcgtagggactggtggaactgctactggagtagggaagttcctcaaggagcagaacaaagacatcaaggtttgtgtggtggaaccagtagaaagtccggtacttagcggaggtcaaccaggtccacatttgattcagggaattggctctggtatcgtcccattcaatttggacttaaccattgttgatgaaattattcaagtggcaggtgaagaggctattgaaacagccaagcttcttgccctcaaagaaggattactggtgggaatatcctctggagccgcagcagcggctgcgttaaaggttgcaaagcggccagaaaacgcggggaaactcattgtggtggtttttcctagtggaggagaacgttatttatcgactaaactgttcgattcgattagatatgaagcagagaatttgcctattgaatgaatgttggacgtgtgccggtttcgtgtgtaataagagacgttcgttccaagagtccaagatttcaatttgcttattactggtcaatgtgaaatgtataaaaagttgcatattcgattatgaataattttagttgactacttccattgcaattcttggtcgaaaacatgaattttaataaaacagaataatctacatgaacgtttcattgactc

SEQ ID NO: 108366 - protein, 323 aa, Arabidopsis thaliana; identical to SEQ ID NO: 75872
  peptide (1)..(323): Ceres Seq. ID no. 13667129
  misc_feature (11)..(300): Pfam Name: Pyridoxal-phosphate dependent enzyme Pfam Description: Pyridoxal-phosphate dependent enzyme
  misc_feature (1)..(323): Homolog of NCBI NO: 15241111 NR Description: cysteine synthase (O-acetylserine
  misc_feature (1)..(323): Homolog of NCBI NO: 21553635 NR Description: cysteine synthase [Arabidopsis thaliana]
  misc_feature (1)..(323): Homolog of NCBI NO: 2245144 NR Description: O-acetylserine(thiol) lyase [Brassica juncea]
  misc_feature (1)..(323): Homolog of NCBI NO: 15241112 NR Description: cysteine synthase (O-acetylserine
  misc_feature (2)..(323): Homolog of NCBI NO: 21593263 NR Description: putative cysteine synthase [Arabidopsis thaliana]
  misc_feature (1)..(323): Homolog of NCBI NO: 12322845 NR Description: putative cysteine synthase; 39489-37437
  misc_feature (2)..(323): Homolog of NCBI NO: 18397061 NR Description: cysteine synthase (O-acetylserine
  misc_feature (7)..(323): Homolog of NCBI NO: 38350579 NR Description: cysteine synthase [Nicotiana plumbaginifolia]
  misc_feature (1)..(323): Homolog of NCBI NO: 2493895 NR Description: Cysteine synthase (O-acetylserine sulfhydrylase)

SEQ ID NO: 108367 - protein, 304 aa, Arabidopsis thaliana; identical to SEQ ID NO: 75873
  peptide (1)..(304): Ceres Seq. ID no. 13667130
  misc_feature (1)..(281): Pfam Name: Pyridoxal-phosphate dependent enzyme Pfam Description: Pyridoxal-phosphate dependent enzyme
  misc_feature (1)..(304): Homolog of NCBI NO: 15241111 NR Description: cysteine synthase (O-acetylserine
  misc_feature (1)..(304): Homolog of NCBI NO: 21553635 NR Description: cysteine synthase [Arabidopsis thaliana]
  misc_feature (1)..(304): Homolog of NCBI NO: 2245144 NR Description: O-acetylserine(thiol) lyase [Brassica juncea]
  misc_feature (1)..(304): Homolog of NCBI NO: 15241112 NR Description: cysteine synthase (O-acetylserine
  misc_feature (1)..(304): Homolog of NCBI NO: 21593263 NR Description: putative cysteine synthase [Arabidopsis thaliana]
  misc_feature (1)..(304): Homolog of NCBI NO: 12322845 NR Description: putative cysteine synthase; 39489-37437
  misc_feature (1)..(304): Homolog of NCBI NO: 18397061 NR Description: cysteine synthase (O-acetylserine
  misc_feature (1)..(304): Homolog of NCBI NO: 38350579 NR Description: cysteine synthase [Nicotiana plumbaginifolia]
  misc_feature (1)..(304): Homolog of NCBI NO: 2493895 NR Description: Cysteine synthase (O-acetylserine sulfhydrylase)

SEQ ID NO: 108368 - protein, 284 aa, Arabidopsis thaliana; identical to SEQ ID NO: 75874
  peptide (1)..(284): Ceres Seq. ID no. 13667131
  misc_feature (1)..(261): Pfam Name: Pyridoxal-phosphate dependent enzyme Pfam Description: Pyridoxal-phosphate dependent enzyme
  misc_feature (1)..(284): Homolog of NCBI NO: 15241111 NR Description: cysteine synthase (O-acetylserine
  misc_feature (1)..(284): Homolog of NCBI NO: 21553635 NR Description: cysteine synthase [Arabidopsis thaliana]
  misc_feature (1)..(284): Homolog of NCBI NO: 2245144 NR Description: O-acetylserine(thiol) lyase [Brassica juncea]
  misc_feature (1)..(284): Homolog of NCBI NO: 15241112 NR Description: cysteine synthase (O-acetylserine
  misc_feature (1)..(284): Homolog of NCBI NO: 21593263 NR Description: putative cysteine synthase [Arabidopsis thaliana]
  misc_feature (1)..(284): Homolog of NCBI NO: 12322845 NR Description: putative cysteine synthase; 39489-37437
  misc_feature (1)..(284): Homolog of NCBI NO: 18397061 NR Description: cysteine synthase (O-acetylserine
  misc_feature (1)..(284): Homolog of NCBI NO: 38350579 NR Description: cysteine synthase [Nicotiana plumbaginifolia]
  misc_feature (1)..(284): Homolog of NCBI NO: 2493895 NR Description: Cysteine synthase (O-acetylserine sulfhydrylase)

SEQ ID NO: 108369 - DNA, 1281 bp, Arabidopsis thaliana
  misc_feature (1)..(1281): Ceres Seq. ID no. 13667195
  misc_feature: MA Experiment ID: 108435 Result: Up-regulated in Transcription
  misc_feature: MA Experiment 108435 PARAMETER Experiment Name: At_stm_Mutants_cDNA_P Parameter: Plant Line Value: wt Landsburg vs stm
  misc_feature: MA Experiment 108435 PARAMETER Experiment Name: At_stm_Mutants_cDNA_P Parameter: Tissue Value: Shoot Apical Meristem Region
  misc_feature: MA Experiment ID: 108463 Result: Down-regulated in Transcription
  misc_feature: MA Experiment 108463 PARAMETER Experiment Name: At_Germinating_Seeds_cDNA_P Parameter: Age (day) Value: 3 vs. 0
  misc_feature: MA Experiment 108463 PARAMETER Experiment Name: At_Germinating_Seeds_cDNA_P Parameter: Tissue Value: Germinating Seeds
  misc_feature: MA Experiment ID: 108464 Result: Down-regulated in Transcription
  misc_feature: MA Experiment 108464 PARAMETER Experiment Name: At_Germinating_Seeds_cDNA_P Parameter: Age (day) Value: 4 vs. 0
  misc_feature: MA Experiment 108464 PARAMETER Experiment Name: At_Germinating_Seeds_cDNA_P Parameter: Tissue Value: Germinating Seeds
  misc_feature: MA Experiment ID: 108501 Result: Down-regulated in Transcription
  misc_feature: MA Experiment 108501 PARAMETER Experiment Name: At_ap2_floral_buds_cDNA_P Parameter: Plant Line Value: ap2 (Ler.)
  misc_feature: MA Experiment 108501 PARAMETER Experiment Name: At_ap2_floral_buds_cDNA_P Parameter: Tissue Value: Closed Flower
  misc_feature: MA Experiment ID: 20000089 Result: Down-regulated in Transcription
  misc_feature: MA Experiment ID: 20000111 Result: Up-regulated in Transcription
  misc_feature: MA Experiment 20000111 PARAMETER Experiment Name: At_42deg_Heat_cDNA_P Parameter: Temperature (deg C) Value: 42 vs. 22
  misc_feature: MA Experiment 20000111 PARAMETER Experiment Name: At_42deg_Heat_cDNA_P Parameter: Timepoint (hr) Value: 6
  misc_feature: MA Experiment 20000111 PARAMETER Experiment Name: At_42deg_Heat_cDNA_P Parameter: Tissue Value: Aerial
  misc_feature: MA Experiment ID: 20000117 Result: Down-regulated in Transcription
  misc_feature: MA Experiment 20000117 PARAMETER Experiment Name: At_100uM_ABA_Mutants_cDNA_P Parameter: Plant Line Value: Columbia
  misc_feature: MA Experiment 20000117 PARAMETER Experiment Name: At_100uM_ABA_Mutants_cDNA_P Parameter: Timepoint (hr) Value: 6
  misc_feature: MA Experiment 20000117 PARAMETER Experiment Name: At_100uM_ABA_Mutants_cDNA_P Parameter: Tissue Value: Aerial
  misc_feature: MA Experiment 20000117 PARAMETER Experiment Name: At_100uM_ABA_Mutants_cDNA_P Parameter: Treatment Value: 100uM ABA vs. No Treatment
actctctctctatctctatatatcgacacaccataaaagttgttctttctctccgtttccttagcctctgcatctgggcgattttctctttctatctccctacaccttagggagtactgatcctaaactcatcatctttctatgccttcctcttttctttcacttattttcttttctattttttttctttcttactttgcgtaaaactagcgagtcaaaaataaagacacttgcatgatcctaatataatattatatattgtaattagagaaagagagagaagagaagaaagaaagtggcagtagattcttatggattttggtataaagaaacatgaaaaaatgggtttgaccgaagaaactttgaggacgctttttgtatgcaaccccaaatagcagcttaaagaaagcagagaggatcttcttttatttcccctctgagcaacagaagccattattcaaagaaaggcttctttaatttactcgcagggagagggaaaagagaaaaaattgaaaaactccattttcaagtcattaaaatggcatcttcttcaacaaactcaccatgcgccgcttgcaaattcctccggcgaaaatgtcaaccggaatgtgtattcgcgccctatttcccaccggaccagccacaaaaattcgcaaacgttcacaaagtgtttggagcaagtaacgtgacaaagctcctcaacgagcttcacccttcacaacgtgaagacgcagtgaactctttggcctatgaagccgacatgcgcctccgtgaccctgtctacggctgcgtcggcgtcatctctctcctccaacatcagcttcgtcagcttcagatagatctcagctgtgctaaatctgagctctctaagtaccaaagcctcggtatcctcgccgccactcatcagagtcttggcatcaacttactcgccggagcagcagatggaacagccaccgccgtgagagaccactatcaccaccaccagttttttcctagagaacaaatgtttggtggcttggatgttccggccggtaacaactacgacggtgggattcttgccattggacagatcactcagtttcagcagccgagagccgccgctggagatgatggtcgccgtactgttgatccgtcttgagattttagggttttggtggtgttcatcttcgtcgatcgcttggtgatgagaaaactataattttaagaaaatatttgatgtggaaaaccaaaatattttaaacgtatggtacgtctctcttaatgacattaatttcggttttt

SEQ ID NO: 108370 - protein, 199 aa, Arabidopsis thaliana; identical to SEQ ID NO: 29134
  peptide (1)..(199): Ceres Seq. ID no. 13667196
  misc_feature (9)..(109): Pfam Name: Protein of unknown function DUF260 Pfam Description: Protein of unknown function DUF260
  misc_feature (1)..(199): Homolog of NCBI NO: 15218746 NR Description: lateral organ boundaries (LOB) domain protein 6 [Arabidopsis thaliana] >gi|29427552|sp|O04479|LBD6_ARATH LOB protein 6 (ASYMMETRIC LEAVES2) >gi|25404562|pir||C96681
  misc_feature (2)..(128): Homolog of NCBI NO: 34907508 NR Description: B1099D03.24 [Oryza sativa (japonica
  misc_feature (1)..(152): Homolog of NCBI NO: 15240110 NR Description: lateral organ boundaries (LOB) domain family thaliana] >gi|29428002|sp|Q9FKZ3|LB36_ARATH Putative LOB domain
  misc_feature (1)..(112): Homolog of NCBI NO: 15242624 NR Description: lateral organ boundaries (LOB) protein thaliana] >gi|30697777|ref|NP_851252.1| lateral organ boundaries protein [Arabidopsis thaliana] >gi|30697779|ref|NP_851253.1|
  misc_feature (1)..(112): Homolog of NCBI NO: 34896184 NR Description: contains ESTs C98868(E3203),C98869(E3203)~similar Arabidopsis thaliana chromosome 5, MDC12.5~unknown protein [Oryza
  misc_feature (1)..(112): Homolog of NCBI NO: 18405472 NR Description: lateral organ boundaries (LOB) domain protein 25 [Arabidopsis thaliana] >gi|17227166|gb|AAL38037.1|AF447892_1 LOB
  misc_feature (1)..(112): Homolog of NCBI NO: 21618134 NR Description: unknown [Arabidopsis thaliana]
  misc_feature (1)..(112): Homolog of NCBI NO: 29427827 NR Description: LOB domain protein 25
  misc_feature (3)..(112): Homolog of NCBI NO: 9294470 NR Description: gb|AAB60912.1~gene_id:MGF10.6~similar to unknown
  misc_feature (7)..(112): Homolog of NCBI NO: 15227870 NR Description: lateral organ boundaries (LOB) domain family thaliana] >gi|29427575|sp|O64836|LB10_ARATH Putative LOB domain

SEQ ID NO: 108371 - protein, 125 aa, Arabidopsis thaliana; identical to SEQ ID NO: 29135
  peptide (1)..(125): Ceres Seq. ID no. 13667197
  misc_feature (1)..(125): Homolog of NCBI NO: 15218746 NR Description: lateral organ boundaries (LOB) domain protein 6 [Arabidopsis thaliana] >gi|29427552|sp|O04479|LBD6_ARATH LOB protein 6 (ASYMMETRIC LEAVES2) >gi|25404562|pir||C96681
  misc_feature (1)..(54): Homolog of NCBI NO: 34907508 NR Description: B1099D03.24 [Oryza sativa (japonica
  misc_feature (1)..(78): Homolog of NCBI NO: 15240110 NR Description: lateral organ boundaries (LOB) domain family thaliana] >gi|29428002|sp|Q9FKZ3|LB36_ARATH Putative LOB domain
  misc_feature (1)..(38): Homolog of NCBI NO: 15242624 NR Description: lateral organ boundaries (LOB) protein thaliana] >gi|30697777|ref|NP_851252.1| lateral organ boundaries protein [Arabidopsis thaliana] >gi|30697779|ref|NP_851253.1|
  misc_feature (1)..(38): Homolog of NCBI NO: 34896184 NR Description: contains ESTs C98868(E3203),C98869(E3203)~similar Arabidopsis thaliana chromosome 5, MDC12.5~unknown protein [Oryza
  misc_feature (1)..(38): Homolog of NCBI NO: 18405472 NR Description: lateral organ boundaries (LOB) domain protein 25 [Arabidopsis thaliana] >gi|17227166|gb|AAL38037.1|AF447892_1 LOB
  misc_feature (1)..(38): Homolog of NCBI NO: 21618134 NR Description: unknown [Arabidopsis thaliana]
  misc_feature (1)..(38): Homolog of NCBI NO: 29427827 NR Description: LOB domain protein 25
  misc_feature (1)..(38): Homolog of NCBI NO: 9294470 NR Description: gb|AAB60912.1~gene_id:MGF10.6~similar to unknown
  misc_feature (1)..(38): Homolog of NCBI NO: 15227870 NR Description: lateral organ boundaries (LOB) domain family thaliana] >gi|29427575|sp|O64836|LB10_ARATH Putative LOB domain

SEQ ID NO: 108372 - DNA, 2312 bp, Arabidopsis thaliana
  misc_feature (1)..(2312): Ceres Seq. ID no. 13667279
  misc_feature: MA Experiment ID: 20000169 Result: Up-regulated in Transcription
  misc_feature: MA Experiment 20000169 PARAMETER Experiment Name: At_100uM_ABA_P Parameter: Age (day) Value: 14
  misc_feature: MA Experiment 20000169 PARAMETER Experiment Name: At_100uM_ABA_P Parameter: Organism Value: A. thaliana
  misc_feature: MA Experiment 20000169 PARAMETER Experiment Name: At_100uM_ABA_P Parameter: Plant Line Value: WS
  misc_feature: MA Experiment 20000169 PARAMETER Experiment Name: At_100uM_ABA_P Parameter: Timepoint (hr) Value: 6
  misc_feature: MA Experiment 20000169 PARAMETER Experiment Name: At_100uM_ABA_P Parameter: Tissue Value: Aerial
  misc_feature: MA Experiment 20000169 PARAMETER Experiment Name: At_100uM_ABA_P Parameter: Treatment Value: 100uM ABA vs. No Treatment
  misc_feature: MA Experiment ID: 20000184 Result: Down-regulated in Transcription
  misc_feature: MA Experiment 20000184 PARAMETER Experiment Name: At_Shoots__P Parameter: Age (day) Value: 7
  misc_feature: MA Experiment 20000184 PARAMETER Experiment Name: At_Shoots__P Parameter: Tissue Value: Shoots vs. Whole Plant
  misc_feature: MA Experiment ID: 20000269 Result: Down-regulated in Transcription
  misc_feature: MA Experiment 20000269 PARAMETER Experiment Name: At_1mM_KNO3_L-vs-H_Roots_P Parameter: Age (day) Value: 7,10,12
  misc_feature: MA Experiment 20000269 PARAMETER Experiment Name: At_1mM_KNO3_L-vs-H_Roots_P Parameter: Organism Value: A. thaliana
  misc_feature: MA Experiment 20000269 PARAMETER Experiment Name: At_1mM_KNO3_L-vs-H_Roots_P Parameter: Plant Line Value: WS
  misc_feature: MA Experiment 20000269 PARAMETER Experiment Name: At_1mM_KNO3_L-vs-H_Roots_P Parameter: Timepoint (day) Value: 7,10,12
  misc_feature: MA Experiment 20000269 PARAMETER Experiment Name: At_1mM_KNO3_L-vs-H_Roots_P Parameter: Tissue Value: Roots
  misc_feature: MA Experiment 20000269 PARAMETER Experiment Name: At_1mM_KNO3_L-vs-H_Roots_P Parameter: Treatment Value: 1mM KNO3 vs. 50mM KNO3
  misc_feature: MA Experiment ID: 20000437 Result: Up-regulated in Transcription
  misc_feature: MA Experiment 20000437 PARAMETER Experiment Name: At_Drought_P Parameter: Age (day) Value: 8
  misc_feature: MA Experiment 20000437 PARAMETER Experiment Name: At_Drought_P Parameter: Organism Value: A. thaliana
  misc_feature: MA Experiment 20000437 PARAMETER Experiment Name: At_Drought_P Parameter: Plant Line Value: WS
  misc_feature: MA Experiment 20000437 PARAMETER Experiment Name: At_Drought_P Parameter: Timepoint (hr) Value: 24
  misc_feature: MA Experiment 20000437 PARAMETER Experiment Name: At_Drought_P Parameter: Tissue Value: Whole Plant
  misc_feature: MA Experiment 20000437 PARAMETER Experiment Name: At_Drought_P Parameter: Treatment Value: Drought vs. No Drought
  misc_feature: MA Experiment ID: 20000451 Result: Down-regulated in Transcription
  misc_feature: MA Experiment 20000451 PARAMETER Experiment Name: At_CS6879_Shoots-Roots_P Parameter: Age (day) Value: 14
  misc_feature: MA Experiment 20000451 PARAMETER Experiment Name: At_CS6879_Shoots-Roots_P Parameter: Organism Value: A. thaliana
  misc_feature: MA Experiment 20000451 PARAMETER Experiment Name: At_CS6879_Shoots-Roots_P Parameter: Plant Line Value: CS6879 vs. WS
  misc_feature: MA Experiment 20000451 PARAMETER Experiment Name: At_CS6879_Shoots-Roots_P Parameter: Tissue Value: Roots
  misc_feature: MA Experiment ID: 20000794 Result: Up-regulated in Transcription
  misc_feature: MA Experiment 20000794 PARAMETER Experiment Name: At_Petals_P Parameter: Age (day) Value: 23-25 days
  misc_feature: MA Experiment 20000794 PARAMETER Experiment Name: At_Petals_P Parameter: Plant Line Value: WS
  misc_feature: MA Experiment 20000794 PARAMETER Experiment Name: At_Petals_P Parameter: Tissue Value: Petals vs. Whole plant
  misc_feature: MA Experiment ID: 20001450 Result: Up-regulated in Transcription
  misc_feature: MA Experiment 20001450 PARAMETER Experiment Name: At_Far-red-induction_P Parameter: Age (day) Value: 7
  misc_feature: MA Experiment 20001450 PARAMETER Experiment Name: At_Far-red-induction_P Parameter: Light Value: Far-red vs. White
  misc_feature: MA Experiment 20001450 PARAMETER Experiment Name: At_Far-red-induction_P Parameter: Organism Value: A. thaliana
  misc_feature: MA Experiment 20001450 PARAMETER Experiment Name: At_Far-red-induction_P Parameter: Plant Line Value: Columbia
  misc_feature: MA Experiment 20001450 PARAMETER Experiment Name: At_Far-red-induction_P Parameter: Timepoint (hr) Value: 8
  misc_feature: MA Experiment 20001450 PARAMETER Experiment Name: At_Far-red-induction_P Parameter: Tissue Value: Whole Plant
  misc_feature: MA Experiment ID: 20001557 Result: Down-regulated in Transcription
  misc_feature: MA Experiment 20001557 PARAMETER Experiment Name: At_Drought_Soil_Dry_P Parameter: Age (day) Value: 27
  misc_feature: MA Experiment 20001557 PARAMETER Experiment Name: At_Drought_Soil_Dry_P Parameter: Organism Value: A. thaliana
  misc_feature: MA Experiment 20001557 PARAMETER Experiment Name: At_Drought_Soil_Dry_P Parameter: Plant Line Value: WS
  misc_feature: MA Experiment 20001557 PARAMETER Experiment Name: At_Drought_Soil_Dry_P Parameter: Post Timepoint (hr) Value: 3
  misc_feature: MA Experiment 20001557 PARAMETER Experiment Name: At_Drought_Soil_Dry_P Parameter: Post-Treatment Value: Re-Water vs. No Drought
  misc_feature: MA Experiment 20001557 PARAMETER Experiment Name: At_Drought_Soil_Dry_P Parameter: Timepoint (day) Value: 13
  misc_feature: MA Experiment 20001557 PARAMETER Experiment Name: At_Drought_Soil_Dry_P Parameter: Treatment Value: Drought vs. No Drought
  misc_feature: MA Experiment ID: 20001560 Result: Down-regulated in Transcription
  misc_feature: MA Experiment 20001560 PARAMETER Experiment Name: At_Drought_Soil_Dry_P Parameter: Age (day) Value: 28
  misc_feature: MA Experiment 20001560 PARAMETER Experiment Name: At_Drought_Soil_Dry_P Parameter: Organism Value: A. thaliana
  misc_feature: MA Experiment 20001560 PARAMETER Experiment Name: At_Drought_Soil_Dry_P Parameter: Plant Line Value: WS
  misc_feature: MA Experiment 20001560 PARAMETER Experiment Name: At_Drought_Soil_Dry_P Parameter: Post Timepoint (hr) Value: None
  misc_feature: MA Experiment 20001560 PARAMETER Experiment Name: At_Drought_Soil_Dry_P Parameter: Post-Treatment Value: None
  misc_feature: MA Experiment 20001560 PARAMETER Experiment Name: At_Drought_Soil_Dry_P Parameter: Timepoint (day) Value: 14
  misc_feature: MA Experiment 20001560 PARAMETER Experiment Name: At_Drought_Soil_Dry_P Parameter: Treatment Value: Drought vs. No Drought
  misc_feature: MA Experiment ID: 20001904 Result: Up-regulated in Transcription
  misc_feature: MA Experiment 20001904 PARAMETER Experiment Name: At_Drought_Reproduction_P Parameter: Age (day) Value: 37
  misc_feature: MA Experiment 20001904 PARAMETER Experiment Name: At_Drought_Reproduction_P Parameter: Organism Value: A. thaliana
  misc_feature: MA Experiment 20001904 PARAMETER Experiment Name: At_Drought_Reproduction_P Parameter: Plant Line Value: WS
  misc_feature: MA Experiment 20001904 PARAMETER Experiment Name: At_Drought_Reproduction_P Parameter: Timepoint (day) Value: 7
  misc_feature: MA Experiment 20001904 PARAMETER Experiment Name: At_Drought_Reproduction_P Parameter: Tissue Value: Rosettes
  misc_feature: MA Experiment 20001904 PARAMETER Experiment Name: At_Drought_Reproduction_P Parameter: Treatment Value: Drought vs. No Drought
  misc_feature: MA Experiment ID: 20001905 Result: Up-regulated in Transcription
  misc_feature: MA Experiment 20001905 PARAMETER Experiment Name: At_Drought_Reproduction_P Parameter: Age (day) Value: 40
  misc_feature: MA Experiment 20001905 PARAMETER Experiment Name: At_Drought_Reproduction_P Parameter: Organism Value: A. thaliana
  misc_feature: MA Experiment 20001905 PARAMETER Experiment Name: At_Drought_Reproduction_P Parameter: Plant Line Value: WS
  misc_feature: MA Experiment 20001905 PARAMETER Experiment Name: At_Drought_Reproduction_P Parameter: Timepoint (day) Value: 10
  misc_feature: MA Experiment 20001905 PARAMETER Experiment Name: At_Drought_Reproduction_P Parameter: Tissue Value: Rosettes
  misc_feature: MA Experiment 20001905 PARAMETER Experiment Name: At_Drought_Reproduction_P Parameter: Treatment Value: Drought vs. No Drought
gcggccgccacggaaacaagcaattcgatcaaacgtgaaagcaatatttaagatttttgtctcatactctaagcaagcaatatccaaataaacattcttatacctccactcctcctctgtctgattccttcacccaattcttgtctcgtttccatcaatccattgtctttgattccagaggttcttggtttatttggatgtggtgattatggatatggagtcttggaagttgctcagaagtgtttgtgtgctttcttttctccttggctcttgttttgtgtatcaaagccttcgtgttgttgatgctcaagaagatccaaaaccagccgtgactttgcaagtagatgcttctaatggaggtggacgacccattcctgaaacgctatttgggattttcttcgaggagatcaaccatgctggtgccggtggattatgggccgaacttgttagcaacagagggtttgaagctggtgggcaaaacacaccctctaatatttggccatggtccattgttggtgatcattcatccatatatgtagctacagaccgttcatcatgttttgaacggaataaaatcgcactgagaatggatgtgctttgtgatagcaaaggttgtccatcgggaggtgtcggagtttataaccctggttactggggcatgaatattgaagaaggaaagaagtacaaggtggctctttatgtgcgttcgactggtgatatcgatttgtctgtgtcgttgacgagctcgaatggatcacggactcttgcttctgaaaagatcatagcttctgcttctgatgtttcgaaatggattaaaaaagaggttcttttggaggcaaaagcgaccgatcctagtgcaagacttcagttaacaacaaccaagaaagggtcaatatggattgaccaagtctcggccatgccagtggatactcacaagggacatggttttagaaacgatcttttccacctgatggccgatataaaaccccgtttcatccggttcccaggtggttgttttgtcgagggtgaatggttaagtaatgccttccgctggaaagaaaccgtaggaccttgggaagagagaccgggccattttggtgatgtttggaagtattggaccgatgatggccttggccactttgagttctttcaaatggcagaagacatcggtgcagccccgatatgggtgtttaacaacgggataagtcacaatgatgaagttgaaactgccagtatcatgccctttgttcaagaagcactcgacggtatcgagtttgcccgaggagatgccaattctacttggggatctgttcgagctaaaatgggacgccaagaaccttttgaacttaaatacgttgctattggaaatgaagattgtgggaaaacttactacagaggaaactacattgtgttctatgatgctatcaagaaagcctatccagatatcaaaatcatctccaactgcgatggatcctctcatccactcgaccacccagctgattactatgactatcacatttacacttctgctagcaatttgttttccatgtatcatcaatttgatggcacttcacgcaaaggtccaaaggcttttgtcagtgaatatgctgttactggaaaagatgctggtacaggaagccttcttgcctctcttgcagaagctgcgtttctcattggtcttgaaaagaatagtgacattgttgacatggcaagttatgctccactctttgtgaacacaaatgatagacggtggaaccctgatgcaatagtcttcaactcctctcatctatatggaacacctagctattgggttcaacggttttttgcagagtcaagcggagcaactcttctcacttcaacactcaagggaaactctacttctcttgttgcatctgctatctcttggaaaaacaatggcaaagattacatacgcataaaggctgtaaacttcggagctaactcagaaaatatgcaagtgttggtaactggattggacccgaacgtgatgagagtttcgggatcaaagaagacagtacttacctctaccaatgtgatggatgaaaattccttctcacagccagagaaggttgtaccacatgaaagcttgctagagttggcagaggaggatatgaccgttgttctcccgccacattccttttcttcattcgatttgttgaaggaatctgcaaagataagaatgccaatctctgattcttcttcccatcagaaaactaccactgtgtgaagagaaacaatgacaaggaagtatcaactttcatgtcaaaagtctctttgtggttcaaagcggccgc

SEQ ID NO: 108373 - protein, 678 aa, Arabidopsis thaliana
  peptide (1)..(678): Ceres Seq. ID no. 13667280
  misc_feature (77)..(238): Pfam Name: Carbohydrate binding domain Pfam Description: Carbohydrate binding domain
  misc_feature (1)..(678): Homolog of NCBI NO: 22327075 NR Description: glycosyl hydrolase family 51 [Arabidopsis >gi|17380938|gb|AAL36281.1| putative arabinosidase [Arabidopsis >gi|29824173|gb|AAP04047.1| unknown protein [Arabidopsis
  misc_feature (3)..(671): Homolog of NCBI NO: 33151175 NR Description: alpha-L-arabinofuranosidase [Malus x domestica]
  misc_feature (3)..(659): Homolog of NCBI NO: 16417958 NR Description: arabinosidase ARA-1 [Lycopersicon esculentum]
  misc_feature (13)..(655): Homolog of NCBI NO: 13398414 NR Description: arabinoxylan arabinofuranohydrolase isoenzyme
  misc_feature (10)..(662): Homolog of NCBI NO: 13398412 NR Description: arabinoxylan arabinofuranohydrolase isoenzyme
  misc_feature (346)..(678): Homolog of NCBI NO: 5107819 NR Description: contains similarity to arabinosidase [Arabidopsis
  misc_feature (127)..(319): Homolog of NCBI NO: 5107819 NR Description: contains similarity to arabinosidase [Arabidopsis
  misc_feature (13)..(655): Homolog of NCBI NO: 38347003 NR Description: OSJNBb0058J09.4 [Oryza sativa (japonica
  misc_feature (43)..(661): Homolog of NCBI NO: 22324432 NR Description: putative arabinoxylan narabinofuranohydrolase
  misc_feature (52)..(552): Homolog of NCBI NO: 29345778 NR Description: alpha-L-arabinofuranosidase A precursor
MDMESWKLLRSVCVLSFLLGSCFVYQSLRVVDAQEDPKPAVTLQVDASNGGGRPIPETLFGIFFEEINHAGAGGLWAELVSNRGFEAGGQNTPSNIWPWSIVGDHSSIYVATDRSSCFERNKIALRMDVLCDSKGCPSGGVGVYNPGYWGMNIEEGKKYKVALYVRSTGDIDLSVSLTSSNGSRTLASEKIIASASDVSKWIKKEVLLEAKATDPSARLQLTTTKKGSIWIDQVSAMPVDTHKGHGFRNDLFHLMADIKPRFIRFPGGCFVEGEWLSNAFRWKETVGPWEERPGHFGDVWKYWTDDGLGHFEFFQMAEDIGAAPIWVFNNGISHNDEVETASIMPFVQEALDGIEFARGDANSTWGSVRAKMGRQEPFELKYVAIGNEDCGKTYYRGNYIVFYDAIKKAYPDIKIISNCDGSSHPLDHPADYYDYHIYTSASNLFSMYHQFDGTSRKGPKAFVSEYAVTGKDAGTGSLLASLAEAAFLIGLEKNSDIVDMASYAPLFVNTNDRRWNPDAIVFNSSHLYGTPSYWVQRFFAESSGATLLTSTLKGNSTSLVASAISWKNNGKDYIRIKAVNFGANSENMQVLVTGLDPNVMRVSGSKKTVLTSTNVMDENSFSQPEKVVPHESLLELAEEDMTVVLPPHSFSSFDLLKESAKIRMPISDSSSHQKTTTV

SEQ ID NO: 108374 - protein, 676 aa, Arabidopsis thaliana
  peptide (1)..(676): Ceres Seq. ID no. 13667281
  misc_feature (75)..(236): Pfam Name: Carbohydrate binding domain Pfam Description: Carbohydrate binding domain
  misc_feature (1)..(676): Homolog of NCBI NO: 22327075 NR Description: glycosyl hydrolase family 51 [Arabidopsis >gi|17380938|gb|AAL36281.1| putative arabinosidase [Arabidopsis >gi|29824173|gb|AAP04047.1| unknown protein [Arabidopsis
  misc_feature (1)..(669): Homolog of NCBI NO: 33151175 NR Description: alpha-L-arabinofuranosidase [Malus x domestica]
  misc_feature (1)..(657): Homolog of NCBI NO: 16417958 NR Description: arabinosidase ARA-1 [Lycopersicon esculentum]
  misc_feature (11)..(653): Homolog of NCBI NO: 13398414 NR Description: arabinoxylan arabinofuranohydrolase isoenzyme
  misc_feature (8)..(660): Homolog of NCBI NO: 13398412 NR Description: arabinoxylan arabinofuranohydrolase isoenzyme
  misc_feature (344)..(676): Homolog of NCBI NO: 5107819 NR Description: contains similarity to arabinosidase [Arabidopsis
  misc_feature (125)..(317): Homolog of NCBI NO: 5107819 NR Description: contains similarity to arabinosidase [Arabidopsis
  misc_feature (11)..(653): Homolog of NCBI NO: 38347003 NR Description: OSJNBb0058J09.4 [Oryza sativa (japonica
  misc_feature (41)..(659): Homolog of NCBI NO: 22324432 NR Description: putative arabinoxylan narabinofuranohydrolase
  misc_feature (50)..(550): Homolog of NCBI NO: 29345778 NR Description: alpha-L-arabinofuranosidase A precursor
MESWKLLRSVCVLSFLLGSCFVYQSLRVVDAQEDPKPAVTLQVDASNGGGRPIPETLFGIFFEEINHAGAGGLWAELVSNRGFEAGGQNTPSNIWPWSIVGDHSSIYVATDRSSCFERNKIALRMDVLCDSKGCPSGGVGVYNPGYWGMNIEEGKKYKVALYVRSTGDIDLSVSLTSSNGSRTLASEKIIASASDVSKWIKKEVLLEAKATDPSARLQLTTTKKGSIWIDQVSAMPVDTHKGHGFRNDLFHLMADIKPRFIRFPGGCFVEGEWLSNAFRWKETVGPWEERPGHFGDVWKYWTDDGLGHFEFFQMAEDIGAAPIWVFNNGISHNDEVETASIMPFVQEALDGIEFARGDANSTWGSVRAKMGRQEPFELKYVAIGNEDCGKTYYRGNYIVFYDAIKKAYPDIKIISNCDGSSHPLDHPADYYDYHIYTSASNLFSMYHQFDGTSRKGPKAFVSEYAVTGKDAGTGSLLASLAEAAFLIGLEKNSDIVDMASYAPLFVNTNDRRWNPDAIVFNSSHLYGTPSYWVQRFFAESSGATLLTSTLKGNSTSLVASAISWKNNGKDYIRIKAVNFGANSENMQVLVTGLDPNVMRVSGSKKTVLTSTNVMDENSFSQPEKVVPHESLLELAEEDMTVVLPPHSFSSFDLLKESAKIRMPISDSSSHQKTTTV

SEQ ID NO: 108375 - protein, 552 aa, Arabidopsis thaliana
  peptide (1)..(552): Ceres Seq. ID no. 13667282
  misc_feature (1)..(112): Pfam Name: Carbohydrate binding domain Pfam Description: Carbohydrate binding domain
  misc_feature (1)..(552): Homolog of NCBI NO: 22327075 NR Description: glycosyl hydrolase family 51 [Arabidopsis >gi|17380938|gb|AAL36281.1| putative arabinosidase [Arabidopsis >gi|29824173|gb|AAP04047.1| unknown protein [Arabidopsis
  misc_feature (1)..(545): Homolog of NCBI NO: 33151175 NR Description: alpha-L-arabinofuranosidase [Malus x domestica]
  misc_feature (1)..(533): Homolog of NCBI NO: 16417958 NR Description: arabinosidase ARA-1 [Lycopersicon esculentum]
  misc_feature (1)..(529): Homolog of NCBI NO: 13398414 NR Description: arabinoxylan arabinofuranohydrolase isoenzyme
  misc_feature (1)..(536): Homolog of NCBI NO: 13398412 NR Description: arabinoxylan arabinofuranohydrolase isoenzyme
  misc_feature (220)..(552): Homolog of NCBI NO: 5107819 NR Description: contains similarity to arabinosidase [Arabidopsis
  misc_feature (1)..(193): Homolog of NCBI NO: 5107819 NR Description: contains similarity to arabinosidase [Arabidopsis
  misc_feature (1)..(529): Homolog of NCBI NO: 38347003 NR Description: OSJNBb0058J09.4 [Oryza sativa (japonica
  misc_feature (1)..(535): Homolog of NCBI NO: 22324432 NR Description: putative arabinoxylan narabinofuranohydrolase
  misc_feature (1)..(426): Homolog of NCBI NO: 29345778 NR Description: alpha-L-arabinofuranosidase A precursor
MDVLCDSKGCPSGGVGVYNPGYWGMNIEEGKKYKVALYVRSTGDIDLSVSLTSSNGSRTLASEKIIASASDVSKWIKKEVLLEAKATDPSARLQLTTTKKGSIWIDQVSAMPVDTHKGHGFRNDLFHLMADIKPRFIRFPGGCFVEGEWLSNAFRWKETVGPWEERPGHFGDVWKYWTDDGLGHFEFFQMAEDIGAAPIWVFNNGISHNDEVETASIMPFVQEALDGIEFARGDANSTWGSVRAKMGRQEPFELKYVAIGNEDCGKTYYRGNYIVFYDAIKKAYPDIKIISNCDGSSHPLDHPADYYDYHIYTSASNLFSMYHQFDGTSRKGPKAFVSEYAVTGKDAGTGSLLASLAEAAFLIGLEKNSDIVDMASYAPLFVNTNDRRWNPDAIVFNSSHLYGTPSYWVQRFFAESSGATLLTSTLKGNSTSLVASAISWKNNGKDYIRIKAVNFGANSENMQVLVTGLDPNVMRVSGSKKTVLTSTNVMDENSFSQPEKVVPHESLLELAEEDMTVVLPPHSFSSFDLLKESAKIRMPISDSSSHQKTTTV

SEQ ID NO: 108376 - DNA, 1735 bp, Arabidopsis thaliana
  misc_feature (1)..(1735): Ceres Seq. ID no. 13667293
  misc_feature: MA Experiment ID: 20000306 Result: Up-regulated in Transcription
  misc_feature: MA Experiment 20000306 PARAMETER Experiment Name: At_Germinating_Seeds_Sub_P Parameter: Age (hr) Value: 6 vs. 0
  misc_feature: MA Experiment 20000306 PARAMETER Experiment Name: At_Germinating_Seeds_Sub_P Parameter: Organism Value: A. thaliana
  misc_feature: MA Experiment 20000306 PARAMETER Experiment Name: At_Germinating_Seeds_Sub_P Parameter: Plant Line Value: WS
  misc_feature: MA Experiment 20000306 PARAMETER Experiment Name: At_Germinating_Seeds_Sub_P Parameter: Tissue Value: Germinating Seeds
  misc_feature: MA Experiment ID: 20000307 Result: Up-regulated in Transcription
  misc_feature: MA Experiment 20000307 PARAMETER Experiment Name: At_Germinating_Seeds_Sub_P Parameter: Age (hr) Value: 24 vs. 0
  misc_feature: MA Experiment 20000307 PARAMETER Experiment Name: At_Germinating_Seeds_Sub_P Parameter: Organism Value: A. thaliana
  misc_feature: MA Experiment 20000307 PARAMETER Experiment Name: At_Germinating_Seeds_Sub_P Parameter: Plant Line Value: WS
  misc_feature: MA Experiment 20000307 PARAMETER Experiment Name: At_Germinating_Seeds_Sub_P Parameter: Tissue Value: Germinating Seeds
  misc_feature: MA Experiment ID: 20000314 Result: Up-regulated in Transcription
  misc_feature: MA Experiment 20000314 PARAMETER Experiment Name: At_14day_Shoots-Roots_Sub_P Parameter: Age (day) Value: 14
  misc_feature: MA Experiment 20000314 PARAMETER Experiment Name: At_14day_Shoots-Roots_Sub_P Parameter: Organism Value: A. thaliana
  misc_feature: MA Experiment 20000314 PARAMETER Experiment Name: At_14day_Shoots-Roots_Sub_P Parameter: Plant Line Value: WS
  misc_feature: MA Experiment 20000314 PARAMETER Experiment Name: At_14day_Shoots-Roots_Sub_P Parameter: Tissue Value: Roots vs. Whole Plant
  misc_feature: MA Experiment ID: 20000355 Result: Up-regulated in Transcription
  misc_feature: MA Experiment 20000355 PARAMETER Experiment Name: At_Siliques_Sub_P Parameter: Age (day) Value: 21
  misc_feature: MA Experiment 20000355 PARAMETER Experiment Name: At_Siliques_Sub_P Parameter: Organism Value: A. thaliana
  misc_feature: MA Experiment 20000355 PARAMETER Experiment Name: At_Siliques_Sub_P Parameter: Plant Line Value: WS
  misc_feature: MA Experiment 20000355 PARAMETER Experiment Name: At_Siliques_Sub_P Parameter: Tissue Value: Less Than 5mm Siliques vs. Whole Plant
ccggtccggaaattcccgggtcgacccacgcgtccggtacgacgtgtgtgggttggtaaaaacactctgttatcaactcctgctgtatcagctgtgattcgtgaaagatcaggggctgatggatcgaaagcaactggagcatttatcttaacagcaagccacaatcctggtggccctactgaggattttggaatcaaatacaatatggaaaatggaggacctgctcctgaatcaatcactgataaaatttacgagaacactaagacaatcaaggagtacccaatagcacaagatctgcccaatgttgatatttctgctgttggtgtaaccagttttgaaggacctgaaggaaaatttgatgttgaagtttttgattccgcagatgactacgttaaattaatgaagtcaatcttcgattttgaagccatccggaaattgctatcatctccaaagtttacattctgctatgatgcattgcatggagttgctggagcctatgcacatcgcatctttgtcgaagaactcggtgcgcaagaaagcgcattattgaactgcactcccaaggaggactttggaggagggcatccggatcccaatttgacctatgctaaggagcttgtggcacgaatgggattaggtaaatccgacactggaggtgaacctccagagtttggcgccgctgctgatggtgatgcagaccgtaacatgatccttggtaaaaggttctttgtaactccttcggattcagttgccataattgctgcaaatgctattggtgccatcccgtacttcagctctggtttgaaaggtgttgcaaggagcatgccaacctcagctgctcttgatgtcgttgcaaaaagcttgaatttgaagttctttgaggttccaacaggctggaagttttttggtaatctgatggatgctgggatgtgttctgtttgtggagaagaaagttttggaactggctcggatcatatccgtgagaaagacggaatatgggcagttcttgcatggatgtctatacttgctcacaagaacaagggaaatattgacggtaacgctaaactggtgtcagttgaagacattgtccgccagcattgggctacctacggtcgtcactattacactcgttacgactatgagaatgtagacgcaggtaaagctaaggaactgatggagcatttggtcaaattgcaatcttcaattcctgaagttaacaagattgtgaaaggaattcgttcggacgtggcaagcgtcgccagtgctgatgaattcgagtacaaagatccagttgatggatccatttcgaagcaccagggaatccgttacttgtttgaagacggatcacgacttgttttccgtctctctggaactggctcagaaggagcaaccatccggctttacatcgaacagtacgaaaaggatgcttcaaaaaccggccgagaatcccaggaagctttgtctcctctggttgacttagctctaaagctgtcgaagatggaagagttcacaggccgatcagcccccaccgtcataacataagaagggtcaagctcaacgactcaaaccattcaccttttcgtctatatgatgttttcttcttatactatccaagttacattataagaataattagtctcagggagaatttgtatttctcatcagaattctgaacaaccaagactgatttcttgagttgttgtgaggcttatacttgtacggatttggctttctc

SEQ ID NO: 108377 - protein, 513 aa, Arabidopsis thaliana
  peptide (1)..(513): Ceres Seq. ID no. 13667294
  misc_feature (245)..(370): Pfam Name: Phosphoglucomutase/phosphomannomutase, Pfam Description: Phosphoglucomutase/phosphomannomutase,
  misc_feature (1)..(513): Homolog of NCBI NO: 26185954 NR Description: cytosolic phosphoglucomutase [Arabidopsis
  misc_feature (13)..(513): Homolog of NCBI NO: 15220668 NR Description: phosphoglucomutase -related [Arabidopsis >gi|16649113|gb|AAL24408.1| phosphoglucomutase [Arabidopsis >gi|20148521|gb|AAM10151.1| phosphoglucomutase [Arabidopsis
  misc_feature (13)..(513): Homolog of NCBI NO: 12643355 NR Description: Probable phosphoglucomutase, cytoplasmic 1 phosphomutase 1) (PGM 1) >gi|25292702|pir||B86366
  misc_feature (13)..(513): Homolog of NCBI NO: 15223226 NR Description: phosphoglucomutase -related [Arabidopsis >gi|12585324|sp|Q9SGC1|PGM2_ARATH Probable phosphoglucomutase,
  misc_feature (13)..(513): Homolog of NCBI NO: 12585330 NR Description: Phosphoglucomutase, cytoplasmic (Glucose (PGM) >gi|4234941|gb|AAD13031.1| cytosolic phosphoglucomutase
  misc_feature (13)..(513): Homolog of NCBI NO: 12585296 NR Description: Phosphoglucomutase, cytoplasmic (Glucose (PGM) >gi|6272281|emb|CAB60127.1| cytosolic phosphoglucomutase
  misc_feature (13)..(513): Homolog of NCBI NO: 12585310 NR Description: Phosphoglucomutase, cytoplasmic 2 (Glucose
  misc_feature (13)..(513): Homolog of NCBI NO: 13324798 NR Description: phosphoglucomutase [Oryza sativa]
  misc_feature (13)..(513): Homolog of NCBI NO: 12585309 NR Description: Phosphoglucomutase, cytoplasmic 1 (Glucose
  misc_feature (13)..(513): Homolog of NCBI NO: 12585316 NR Description: Phosphoglucomutase, cytoplasmic (Glucose (PGM) >gi|8250624|emb|CAB93681.1| cytosolic phosphoglucomutase
PVRKFPGRPTRPVRRVWVGKNTLLSTPAVSAVIRERSGADGSKATGAFILTASHNPGGPTEDFGIKYNMENGGPAPESITDKIYENTKTIKEYPIAQDLPNVDISAVGVTSFEGPEGKFDVEVFDSADDYVKLMKSIFDFEAIRKLLSSPKFTFCYDALHGVAGAYAHRIFVEELGAQESALLNCTPKEDFGGGHPDPNLTYAKELVARMGLGKSDTGGEPPEFGAAADGDADRNMILGKRFFVTPSDSVAIIAANAIGAIPYFSSGLKGVARSMPTSAALDVVAKSLNLKFFEVPTGWKFFGNLMDAGMCSVCGEESFGTGSDHIREKDGIWAVLAWMSILAHKNKGNIDGNAKLVSVEDIVRQHWATYGRHYYTRYDYENVDAGKAKELMEHLVKLQSSIPEVNKIVKGIRSDVASVASADEFEYKDPVDGSISKHQGIRYLFEDGSRLVFRLSGTGSEGATIRLYIEQYEKDASKTGRESQEALSPLVDLALKLSKMEEFTGRSAPTVIT

SEQ ID NO: 108378 - protein, 445 aa, Arabidopsis thaliana
  peptide (1)..(445): Ceres Seq. ID no. 13667295
  misc_feature (177)..(302): Pfam Name: Phosphoglucomutase/phosphomannomutase, Pfam Description: Phosphoglucomutase/phosphomannomutase,
  misc_feature (1)..(445): Homolog of NCBI NO: 26185954 NR Description: cytosolic phosphoglucomutase [Arabidopsis
  misc_feature (1)..(445): Homolog of NCBI NO: 15220668 NR Description: phosphoglucomutase -related [Arabidopsis >gi|16649113|gb|AAL24408.1| phosphoglucomutase [Arabidopsis >gi|20148521|gb|AAM10151.1| phosphoglucomutase [Arabidopsis
  misc_feature (1)..(445): Homolog of NCBI NO: 12643355 NR Description: Probable phosphoglucomutase, cytoplasmic 1 phosphomutase 1) (PGM 1) >gi|25292702|pir||B86366
  misc_feature (1)..(445): Homolog of NCBI NO: 15223226 NR Description: phosphoglucomutase -related [Arabidopsis >gi|12585324|sp|Q9SGC1|PGM2_ARATH Probable phosphoglucomutase,
  misc_feature (1)..(445): Homolog of NCBI NO: 12585330 NR Description: Phosphoglucomutase, cytoplasmic (Glucose (PGM) >gi|4234941|gb|AAD13031.1| cytosolic phosphoglucomutase
  misc_feature (1)..(445): Homolog of NCBI NO: 12585296 NR Description: Phosphoglucomutase, cytoplasmic (Glucose (PGM) >gi|6272281|emb|CAB60127.1| cytosolic phosphoglucomutase
  misc_feature (1)..(445): Homolog of NCBI NO: 12585310 NR Description: Phosphoglucomutase, cytoplasmic 2 (Glucose
  misc_feature (1)..(445): Homolog of NCBI NO: 13324798 NR Description: phosphoglucomutase [Oryza sativa]
  misc_feature (1)..(445): Homolog of NCBI NO: 12585309 NR Description: Phosphoglucomutase, cytoplasmic 1 (Glucose
  misc_feature (1)..(445): Homolog of NCBI NO: 12585316 NR Description: Phosphoglucomutase, cytoplasmic (Glucose (PGM) >gi|8250624|emb|CAB93681.1| cytosolic phosphoglucomutase
MENGGPAPESITDKIYENTKTIKEYPIAQDLPNVDISAVGVTSFEGPEGKFDVEVFDSADDYVKLMKSIFDFEAIRKLLSSPKFTFCYDALHGVAGAYAHRIFVEELGAQESALLNCTPKEDFGGGHPDPNLTYAKELVARMGLGKSDTGGEPPEFGAAADGDADRNMILGKRFFVTPSDSVAIIAANAIGAIPYFSSGLKGVARSMPTSAALDVVAKSLNLKFFEVPTGWKFFGNLMDAGMCSVCGEESFGTGSDHIREKDGIWAVLAWMSILAHKNKGNIDGNAKLVSVEDIVRQHWATYGRHYYTRYDYENVDAGKAKELMEHLVKLQSSIPEVNKIVKGIRSDVASVASADEFEYKDPVDGSISKHQGIRYLFEDGSRLVFRLSGTGSEGATIRLYIEQYEKDASKTGRESQEALSPLVDLALKLSKMEEFTGRSAPTVIT

SEQ ID NO: 108379 - protein, 380 aa, Arabidopsis thaliana
  peptide (1)..(380): Ceres Seq. ID no. 13667296
  misc_feature (112)..(237): Pfam Name: Phosphoglucomutase/phosphomannomutase, Pfam Description: Phosphoglucomutase/phosphomannomutase,
  misc_feature (1)..(380): Homolog of NCBI NO: 26185954 NR Description: cytosolic phosphoglucomutase [Arabidopsis
  misc_feature (1)..(380): Homolog of NCBI NO: 15220668 NR Description: phosphoglucomutase -related [Arabidopsis >gi|16649113|gb|AAL24408.1| phosphoglucomutase [Arabidopsis >gi|20148521|gb|AAM10151.1| phosphoglucomutase [Arabidopsis
  misc_feature (1)..(380): Homolog of NCBI NO: 12643355 NR Description: Probable phosphoglucomutase, cytoplasmic 1 phosphomutase 1) (PGM 1) >gi|25292702|pir||B86366
  misc_feature (1)..(380): Homolog of NCBI NO: 15223226 NR Description: phosphoglucomutase -related [Arabidopsis >gi|12585324|sp|Q9SGC1|PGM2_ARATH Probable phosphoglucomutase,
  misc_feature (1)..(380): Homolog of NCBI NO: 12585330 NR Description: Phosphoglucomutase, cytoplasmic (Glucose (PGM) >gi|4234941|gb|AAD13031.1| cytosolic phosphoglucomutase
  misc_feature (1)..(380): Homolog of NCBI NO: 12585296 NR Description: Phosphoglucomutase, cytoplasmic (Glucose (PGM) >gi|6272281|emb|CAB60127.1| cytosolic phosphoglucomutase
  misc_feature (1)..(380): Homolog of NCBI NO: 12585310 NR Description: Phosphoglucomutase, cytoplasmic 2 (Glucose
  misc_feature (1)..(380): Homolog of NCBI NO: 13324798 NR Description: phosphoglucomutase [Oryza sativa]
  misc_feature (1)..(380): Homolog of NCBI NO: 12585309 NR Description: Phosphoglucomutase, cytoplasmic 1 (Glucose
  misc_feature (1)..(380): Homolog of NCBI NO: 12585316 NR Description: Phosphoglucomutase, cytoplasmic (Glucose (PGM) >gi|8250624|emb|CAB93681.1| cytosolic phosphoglucomutase
MKSIFDFEAIRKLLSSPKFTFCYDALHGVAGAYAHRIFVEELGAQESALLNCTPKEDFGGGHPDPNLTYAKELVARMGLGKSDTGGEPPEFGAAADGDADRNMILGKRFFVTPSDSVAIIAANAIGAIPYFSSGLKGVARSMPTSAALDVVAKSLNLKFFEVPTGWKFFGNLMDAGMCSVCGEESFGTGSDHIREKDGIWAVLAWMSILAHKNKGNIDGNAKLVSVEDIVRQHWATYGRHYYTRYDYENVDAGKAKELMEHLVKLQSSIPEVNKIVKGIRSDVASVASADEFEYKDPVDGSISKHQGIRYLFEDGSRLVFRLSGTGSEGATIRLYIEQYEKDASKTGRESQEALSPLVDLALKLSKMEEFTGRSAPTVIT

SEQ ID NO: 108380 - DNA, 1211 bp, Arabidopsis thaliana
  misc_feature (1)..(1211): Ceres Seq. ID no. 13667301
  misc_feature: MA Experiment ID: 108462 Result: Down-regulated in Transcription
  misc_feature: MA Experiment 108462 PARAMETER Experiment Name: At_Germinating_Seeds_cDNA_P Parameter: Age (day) Value: 2 vs. 0
  misc_feature: MA Experiment 108462 PARAMETER Experiment Name: At_Germinating_Seeds_cDNA_P Parameter: Tissue Value: Germinating Seeds
  misc_feature: MA Experiment ID: 108463 Result: Down-regulated in Transcription
  misc_feature: MA Experiment 108463 PARAMETER Experiment Name: At_Germinating_Seeds_cDNA_P Parameter: Age (day) Value: 3 vs. 0
  misc_feature: MA Experiment 108463 PARAMETER Experiment Name: At_Germinating_Seeds_cDNA_P Parameter: Tissue Value: Germinating Seeds
  misc_feature: MA Experiment ID: 108464 Result: Down-regulated in Transcription
  misc_feature: MA Experiment 108464 PARAMETER Experiment Name: At_Germinating_Seeds_cDNA_P Parameter: Age (day) Value: 4 vs. 0
  misc_feature: MA Experiment 108464 PARAMETER Experiment Name: At_Germinating_Seeds_cDNA_P Parameter: Tissue Value: Germinating Seeds
  misc_feature: MA Experiment ID: 108573 Result: Down-regulated in Transcription
  misc_feature: MA Experiment 108573 PARAMETER Experiment Name: At_Drought_cDNA_P Parameter: Timepoint (hr) Value: 6
  misc_feature: MA Experiment 108573 PARAMETER Experiment Name: At_Drought_cDNA_P Parameter: Tissue Value: Aerial
  misc_feature: MA Experiment 108573 PARAMETER Experiment Name: At_Drought_cDNA_P Parameter: Treatment Value: Drought vs. No Drought
  misc_feature: MA Experiment ID: 20000173 Result: Down-regulated in Transcription
  misc_feature: MA Experiment 20000173 PARAMETER Experiment Name: At_42deg_Heat_P Parameter: Age (day) Value: 14
  misc_feature: MA Experiment 20000173 PARAMETER Experiment Name: At_42deg_Heat_P Parameter: Organism Value: A. thaliana
  misc_feature: MA Experiment 20000173 PARAMETER Experiment Name: At_42deg_Heat_P Parameter: Plant Line Value: WS
  misc_feature: MA Experiment 20000173 PARAMETER Experiment Name: At_42deg_Heat_P Parameter: Temperature (deg C) Value: 42 vs. 22
  misc_feature: MA Experiment 20000173 PARAMETER Experiment Name: At_42deg_Heat_P Parameter: Timepoint (hr) Value: 6
  misc_feature: MA Experiment 20000173 PARAMETER Experiment Name: At_42deg_Heat_P Parameter: Tissue Value: Aerial
  misc_feature: MA Experiment ID: 20001905 Result: Down-regulated in Transcription
  misc_feature: MA Experiment 20001905 PARAMETER Experiment Name: At_Drought_Reproduction_P Parameter: Age (day) Value: 40
  misc_feature: MA Experiment 20001905 PARAMETER Experiment Name: At_Drought_Reproduction_P Parameter: Organism Value: A. thaliana
  misc_feature: MA Experiment 20001905 PARAMETER Experiment Name: At_Drought_Reproduction_P Parameter: Plant Line Value: WS
  misc_feature: MA Experiment 20001905 PARAMETER Experiment Name: At_Drought_Reproduction_P Parameter: Timepoint (day) Value: 10
  misc_feature: MA Experiment 20001905 PARAMETER Experiment Name: At_Drought_Reproduction_P Parameter: Tissue Value: Rosettes
  misc_feature: MA Experiment 20001905 PARAMETER Experiment Name: At_Drought_Reproduction_P Parameter: Treatment Value: Drought vs. No Drought
  misc_feature: MA Experiment ID: 20001911 Result: Down-regulated in Transcription
  misc_feature: MA Experiment 20001911 PARAMETER Experiment Name: At_Drought_Reproduction_P Parameter: Age (day) Value: 40
  misc_feature: MA Experiment 20001911 PARAMETER Experiment Name: At_Drought_Reproduction_P Parameter: Organism Value: A. thaliana
  misc_feature: MA Experiment 20001911 PARAMETER Experiment Name: At_Drought_Reproduction_P Parameter: Plant Line Value: WS
  misc_feature: MA Experiment 20001911 PARAMETER Experiment Name: At_Drought_Reproduction_P Parameter: Timepoint (day) Value: 10
  misc_feature: MA Experiment 20001911 PARAMETER Experiment Name: At_Drought_Reproduction_P Parameter: Tissue Value: Flowers
  misc_feature: MA Experiment 20001911 PARAMETER Experiment Name: At_Drought_Reproduction_P Parameter: Treatment Value: Drought vs. No Drought
gcacgaggaatttgggaatggacggagaagagcttaccgagcaggagactgccttgtacgaccgccagattagggtttggggcgctaatgctcagagaagattgaccaaagctcatatcttggtatctggaattaaggggactgttgctgagttttgcaagaacattgtgctggcaggagttggttcagtgactttaatggatgatcgtttagcaaacatggaggccttgaacgctaactttttgattccgcctgatgaaaatgtttacagtggcaaaactgtggctgagatttgtagtgattcactcaaggatttcaaccctatggtccgtgtttccgtagagaaaggtgatttgtcaatgcttggcactgatttttttgagcagtttgatgtcgtagttataggctatggttctcgtgctaccaaaaaatatgtcaatgaaaaatgtcggaagttaaagaaacgtgtcgcattctatacagtcgattgtagagactcatgtggtgaaatctttgtggacctccaagattacaagtacacaaagaaaaagcttgaagagatggtggaatgcgaactaaattttccaagttttcaggaagctatatcggtaccatggaaaccgattcctcggagaacagcaaagctctactttgctatgagagtaatagaagtgtttgaagagagtgaagggcgtaaacatggagaatgttcgctactcgatcttgccagagtcttggaaatcaaaaagcaactctgtgaggcaaactctgtgagcgagagccatataccagatattctcttggagagacttatcactggtactactgaattcccgccagtttgtgccattgtgggaggaatattagcacaggaggtgatcaaagcagtatcaggcaaaggagacccgttgaaaaacttcttctactatgatggtgaagatgggaaaggtgtgatggaagacatttccgactcttttacctcttaaaccagtgggccttgatttagtttaaactctataatctctgagattccatgtatatctcaatcgtttgttttttgccttcacattatgaacaaatttaatgcagaatttagtggaggatcagttgtgattttcctccggtaaaatcattttcagttattgacatttgaattgttcaatttcaaatttcaaatattataattcaattcaaagactagctaagttttt

SEQ ID NO: 108381 - protein, 327 aa, Arabidopsis thaliana
  peptide (1)..(327): Ceres Seq. ID no. 13667302
  misc_feature (35)..(173): Pfam Name: ThiF family Pfam Description: ThiF family
  misc_feature (6)..(327): Homolog of NCBI NO: 18416454 NR Description: SUMO activating enzyme, putative [Arabidopsis
  misc_feature (6)..(327): Homolog of NCBI NO: 7488411 NR Description: ubiquitin-activating enzyme homolog F13M23.80 -
  misc_feature (6)..(322): Homolog of NCBI NO: 22652852 NR Description: SUMO activating enzyme 1b [Arabidopsis thaliana]
  misc_feature (6)..(322): Homolog of NCBI NO: 18423184 NR Description: SUMO activating enzyme 1b (SAE1b) [Arabidopsis >gi|30695915|ref|NP_568732.2| SUMO activating enzyme 1b (SAE1b) thaliana] >gi|8777391|dbj|BAA96981.1| ubiquitin activating enzyme
  misc_feature (6)..(322): Homolog of NCBI NO: 30695912 NR Description: SUMO activating enzyme 1b (SAE1b) [Arabidopsis
  misc_feature (6)..(322): Homolog of NCBI NO: 21554965 NR Description: ubiquitin activating enzyme [Arabidopsis thaliana]
  misc_feature (4)..(322): Homolog of NCBI NO: 3647283 NR Description: ubiquitin activating enzyme [Lycopersicon
  misc_feature (89)..(323): Homolog of NCBI NO: 25494393 NR Description: probable ubiquitin activating enzyme 2 [imported] Picea mariana (fragment) >gi|2982309|gb|AAC32140.1| probable
  misc_feature (8)..(183): Homolog of NCBI NO: 4885585 NR Description: SUMO-1 activating enzyme subunit 1; SUMO-1
  misc_feature (173)..(319): Homolog of NCBI NO: 4885585 NR Description: SUMO-1 activating enzyme subunit 1; SUMO-1
TRNLGMDGEELTEQETALYDRQIRVWGANAQRRLTKAHILVSGIKGTVAEFCKNIVLAGVGSVTLMDDRLANMEALNANFLIPPDENVYSGKTVAEICSDSLKDFNPMVRVSVEKGDLSMLGTDFFEQFDVVVIGYGSRATKKYVNEKCRKLKKRVAFYTVDCRDSCGEIFVDLQDYKYTKKKLEEMVECELNFPSFQEAISVPWKPIPRRTAKLYFAMRVIEVFEESEGRKHGECSLLDLARVLEIKKQLCEANSVSESHIPDILLERLITGTTEFPPVCAIVGGILAQEVIKAVSGKGDPLKNFFYYDGEDGKGVMEDISDSFTS

SEQ ID NO: 108382 - protein, 322 aa, Arabidopsis thaliana; identical to SEQ ID NO: 36030
  peptide (1)..(322): Ceres Seq. ID no. 13667303
  misc_feature (30)..(168): Pfam Name: ThiF family Pfam Description: ThiF family
  misc_feature (1)..(322): Homolog of NCBI NO: 18416454 NR Description: SUMO activating enzyme, putative [Arabidopsis
  misc_feature (1)..(322): Homolog of NCBI NO: 7488411 NR Description: ubiquitin-activating enzyme homolog F13M23.80 -
  misc_feature (1)..(317): Homolog of NCBI NO: 22652852 NR Description: SUMO activating enzyme 1b [Arabidopsis thaliana]
  misc_feature (1)..(317): Homolog of NCBI NO: 18423184 NR Description: SUMO activating enzyme 1b (SAE1b) [Arabidopsis >gi|30695915|ref|NP_568732.2| SUMO activating enzyme 1b (SAE1b) thaliana] >gi|8777391|dbj|BAA96981.1| ubiquitin activating enzyme
  misc_feature (1)..(317): Homolog of NCBI NO: 30695912 NR Description: SUMO activating enzyme 1b (SAE1b) [Arabidopsis
  misc_feature (1)..(317): Homolog of NCBI NO: 21554965 NR Description: ubiquitin activating enzyme [Arabidopsis thaliana]
  misc_feature (1)..(317): Homolog of NCBI NO: 3647283 NR Description: ubiquitin activating enzyme [Lycopersicon
  misc_feature (84)..(318): Homolog of NCBI NO: 25494393 NR Description: probable ubiquitin activating enzyme 2 [imported] Picea mariana (fragment) >gi|2982309|gb|AAC32140.1| probable
  misc_feature (3)..(178): Homolog of NCBI NO: 4885585 NR Description: SUMO-1 activating enzyme subunit 1; SUMO-1
  misc_feature (168)..(314): Homolog of NCBI NO: 4885585 NR Description: SUMO-1 activating enzyme subunit 1; SUMO-1

SEQ ID NO: 108383 - protein, 262 aa, Arabidopsis thaliana; identical to SEQ ID NO: 36031
  peptide (1)..(262): Ceres Seq. ID no. 13667304
  misc_feature (1)..(108): Pfam Name: ThiF family Pfam Description: ThiF family
  misc_feature (1)..(262): Homolog of NCBI NO: 18416454 NR Description: SUMO activating enzyme, putative [Arabidopsis
  misc_feature (1)..(262): Homolog of NCBI NO: 7488411 NR Description: ubiquitin-activating enzyme homolog F13M23.80 -
  misc_feature (1)..(257): Homolog of NCBI NO: 22652852 NR Description: SUMO activating enzyme 1b [Arabidopsis thaliana]
  misc_feature (1)..(257): Homolog of NCBI NO: 18423184 NR Description: SUMO activating enzyme 1b (SAE1b) [Arabidopsis >gi|30695915|ref|NP_568732.2| SUMO activating enzyme 1b (SAE1b) thaliana] >gi|8777391|dbj|BAA96981.1| ubiquitin activating enzyme
  misc_feature (1)..(257): Homolog of NCBI NO: 30695912 NR Description: SUMO activating enzyme 1b (SAE1b) [Arabidopsis
  misc_feature (1)..(257): Homolog of NCBI NO: 21554965 NR Description: ubiquitin activating enzyme [Arabidopsis thaliana]
  misc_feature (1)..(257): Homolog of NCBI NO: 3647283 NR Description: ubiquitin activating enzyme [Lycopersicon
  misc_feature (24)..(258): Homolog of NCBI NO: 25494393 NR Description: probable ubiquitin activating enzyme 2 [imported] Picea mariana (fragment) >gi|2982309|gb|AAC32140.1| probable
  misc_feature (1)..(118): Homolog of NCBI NO: 4885585 NR Description: SUMO-1 activating enzyme subunit 1; SUMO-1
  misc_feature (108)..(254): Homolog of NCBI NO: 4885585 NR Description: SUMO-1 activating enzyme subunit 1; SUMO-1

SEQ ID NO: 108384 - DNA, 2127 bp, Arabidopsis thaliana
  misc_feature (1)..(2127): Ceres Seq. ID no. 13667313
  misc_feature: MA Experiment ID: 20000179 Result: Up-regulated in Transcription
  misc_feature: MA Experiment 20000179 PARAMETER Experiment Name: At_Germinating_Seeds_P Parameter: Age (hr) Value: 6 vs. 0
  misc_feature: MA Experiment 20000179 PARAMETER Experiment Name: At_Germinating_Seeds_P Parameter: Tissue Value: Germinating Seeds
  misc_feature: MA Experiment ID: 20000180 Result: Up-regulated in Transcription
  misc_feature: MA Experiment 20000180 PARAMETER Experiment Name: At_Germinating_Seeds_P Parameter: Age (hr) Value: 24 vs. 0
  misc_feature: MA Experiment 20000180 PARAMETER Experiment Name: At_Germinating_Seeds_P Parameter: Tissue Value: Germinating Seeds
  misc_feature: MA Experiment ID: 20000184 Result: Up-regulated in Transcription
  misc_feature: MA Experiment 20000184 PARAMETER Experiment Name: At_Shoots__P Parameter: Age (day) Value: 7
  misc_feature: MA Experiment 20000184 PARAMETER Experiment Name: At_Shoots__P Parameter: Tissue Value: Shoots vs. Whole Plant
  misc_feature: MA Experiment ID: 20000185 Result: Down-regulated in Transcription
  misc_feature: MA Experiment 20000185 PARAMETER Experiment Name: At_Roots__P Parameter: Age (day) Value: 7 vs. 21
  misc_feature: MA Experiment 20000185 PARAMETER Experiment Name: At_Roots__P Parameter: Organism Value: A. thaliana
  misc_feature: MA Experiment 20000185 PARAMETER Experiment Name: At_Roots__P Parameter: Tissue Value: Roots vs. Whole Plant
  misc_feature: MA Experiment ID: 20000438 Result: Up-regulated in Transcription
  misc_feature: MA Experiment 20000438 PARAMETER Experiment Name: At_Shoots__P Parameter: Age (day) Value: 14
  misc_feature: MA Experiment 20000438 PARAMETER Experiment Name: At_Shoots__P Parameter: Tissue Value: Shoots vs. Whole Plant
  misc_feature: MA Experiment ID: 20000439 Result: Down-regulated in Transcription
  misc_feature: MA Experiment 20000439 PARAMETER Experiment Name: At_Roots__P Parameter: Age (day) Value: 14 vs. 21
  misc_feature: MA Experiment 20000439 PARAMETER Experiment Name: At_Roots__P Parameter: Organism Value: A. thaliana
  misc_feature: MA Experiment 20000439 PARAMETER Experiment Name: At_Roots__P Parameter: Tissue Value: Roots vs. Whole Plant
  misc_feature: MA Experiment ID: 20000495 Result: Down-regulated in Transcription
  misc_feature: MA Experiment 20000495 PARAMETER Experiment Name: At_Guard_Cells_P Parameter: Harvest Date Value: 8/2/2002
  misc_feature: MA Experiment 20000495 PARAMETER Experiment Name: At_Guard_Cells_P Parameter: Organism Value: A. thaliana
  misc_feature: MA Experiment 20000495 PARAMETER Experiment Name: At_Guard_Cells_P Parameter: Tissue Value: Guard Cells vs. Leaves
  misc_feature: MA Experiment ID: 20001560 Result: Down-regulated in Transcription
  misc_feature: MA Experiment 20001560 PARAMETER Experiment Name: At_Drought_Soil_Dry_P Parameter: Age (day) Value: 28
  misc_feature: MA Experiment 20001560 PARAMETER Experiment Name: At_Drought_Soil_Dry_P Parameter: Organism Value: A. thaliana
  misc_feature: MA Experiment 20001560 PARAMETER Experiment Name: At_Drought_Soil_Dry_P Parameter: Plant Line Value: WS
  misc_feature: MA Experiment 20001560 PARAMETER Experiment Name: At_Drought_Soil_Dry_P Parameter: Post Timepoint (hr) Value: None
  misc_feature: MA Experiment 20001560 PARAMETER Experiment Name: At_Drought_Soil_Dry_P Parameter: Post-Treatment Value: None
  misc_feature: MA Experiment 20001560 PARAMETER Experiment Name: At_Drought_Soil_Dry_P Parameter: Timepoint (day) Value: 14
  misc_feature: MA Experiment 20001560 PARAMETER Experiment Name: At_Drought_Soil_Dry_P Parameter: Treatment Value: Drought vs. No Drought
tacgtcagggttctactatcttcaatttcatcttcgccgctagctttagctgtagtggacgaaccagcttctccgtctgtcgttatagaatctcaagctgtgaagccatcgacgccatcgccattgttcattcagaacgagatacttaaggctcctagtcctaaatcatcggatctcccagaaggatcacagtggcgatacagcgagtttcttaacgctgtgaagaaagggaaagtcgagagagttagattcagcaaagatggttctgtttgttcagcttactgccgtcgacaatcgccgtgcttcagtcatcgtcccttaactgaccctgaccttattgatatcttggctatgaacggagttgatatatccgtctctgaaggagaatcctcaggcaatgacttgttcactgtcattggaaacttgattttctcgcttttggcctttggtggactcttcttgcttttcaggcgagctcagggaggccctggtggtggtcctggtggcttgggtggtcctatggatttcggacgttctaaatccaagttccaggaagtgcctgagactggtgtatcatttgcagatgttgctggggctgatcaagctaagttggagttacaggaagttgtggatttcttgaagaatcctgataagtacacagccttgggtgctaagattcctaaagggtgtttgcttgttggaccgcctggtacgggtaagacactcctggctagggcggtggctggggaagctggagtgccgttcttctcttgcgcggcctcggagttcgtagagctttttgtgggtgtgggtgcatcgagagttagggatttgttcgagaaggctaagtctaaagccccttgtattgtattcattgatagagttgacgctgtgggtaggcagagaggagctgggatgggaggaggaaatgatgagagagaacagactattaatcagctgttgacagagatggatggattttctggcaactctggtgtgatagttttggcagctacgaataggccggacgttcttgattcggctttgttgaggcctggaaagtttgatcgacaggtcacggtggataggcctgatgtggctggcagagtcaagattcttcaggttcattctagggggaaggcactcggtaaagatgtggactttgacaaggttgccagaaggtcccctggtttcacgggtgctgacttacaaaacctgatgaatgaagcggcgattcttgcggctaggcgtgagcttaaggaaataagcaaggatgaaatctctgatgctcttgagaggatcattgctggacctgagaagaagaatgcagttgtctctgaagagaagaagagacttgttgcataccatgaggctggtcatgctctaggtgggtgctcttatccagaatataatccggttgcaaagatttctatcattcctcgtggccaagctggtgggctcactttttttgctccaagcgaagaaagacttgagtctggattgtacagtaggagctaccttgagaatcaaatggcttgttcacttggcggaagggttgcagaggaggtgatctttggggatgagaatgtgacgactggagcatcaaatgatttcatgcaggtgtctcgtgtggcacgtcaaatgattgagagatttgggttcagcaaaaagattggacaagttgctgttggtggccctggtggaaatcccttcatgggtcaacaaatgtcatcacagaaagattactcaatggcaactgcggatattgtagatgctgaggtgcgagagttagttgagaaggcatacaagagagcaacggagatcataacaactcatattgatatcctacacaagcttgcacagctcctgatcgagaaagaaactgttgcaggtgaagattcatgagtctctttattgacggccaagctgagttgtatatttcttgattcctcaaagttgccattgcttagtgcttacaataccataagctaataagtatattcgtgttcatatgtgtcaccgattcattactttccaatcagtatatttggtgtatattccgttgttttagtgaatctaaatatactttgtaatgcaatgcaatttgtttaaagaaaagtaacttgg

SEQ ID NO: 108385 - protein, 634 aa, Arabidopsis thaliana
  peptide (1)..(634): Ceres Seq. ID no. 13667314
  misc_feature (422)..(633): Pfam Name: Peptidase family M41 Pfam Description: Peptidase family M41
  misc_feature (4)..(633): Homolog of NCBI NO: 18402995 NR Description: chloroplast FtsH protease [Arabidopsis thaliana] Cell division protein ftsH homolog 1, chloroplast precursor
  misc_feature (4)..(633): Homolog of NCBI NO: 1483215 NR Description: chloroplast FtsH protease [Arabidopsis thaliana]
  misc_feature (5)..(633): Homolog of NCBI NO: 18422193 NR Description: FtsH protease, putative [Arabidopsis thaliana] Cell division protein ftsH homolog 2, chloroplast precursor
  misc_feature (4)..(633): Homolog of NCBI NO: 17865457 NR Description: Cell division protein ftsH homolog, chloroplast (DS9) >gi|5804782|dbj|BAA33755.2| chloroplast FtsH protease
  misc_feature (2)..(633): Homolog of NCBI NO: 17865463 NR Description: Cell division protein ftsH homolog, chloroplast >gi|13183728|gb|AAK15322.1|AF332134_1 FtsH protease [Medicago
  misc_feature (4)..(626): Homolog of NCBI NO: 2492515 NR Description: Cell division protein ftsH homolog, chloroplast
  misc_feature (60)..(633): Homolog of NCBI NO: 17228756 NR Description: cell division protein [Nostoc sp. PCC 7120]
  misc_feature (60)..(633): Homolog of NCBI NO: 23129565 NR Description: hypothetical protein [Nostoc punctiforme]
  misc_feature (42)..(633): Homolog of NCBI NO: 33239707 NR Description: Cell division protein FtsH [Prochlorococcus subsp. marinus str. CCMP1375] >gi|33237232|gb|AAP99301.1| Cell protein FtsH [Prochlorococcus marinus subsp. marinus str.
  misc_feature (63)..(633): Homolog of NCBI NO: 30684767 NR Description: FtsH protease (VAR2) [Arabidopsis thaliana]
YVRVLLSSISSSPLALAVVDEPASPSVVIESQAVKPSTPSPLFIQNEILKAPSPKSSDLPEGSQWRYSEFLNAVKKGKVERVRFSKDGSVCSAYCRRQSPCFSHRPLTDPDLIDILAMNGVDISVSEGESSGNDLFTVIGNLIFSLLAFGGLFLLFRRAQGGPGGGPGGLGGPMDFGRSKSKFQEVPETGVSFADVAGADQAKLELQEVVDFLKNPDKYTALGAKIPKGCLLVGPPGTGKTLLARAVAGEAGVPFFSCAASEFVELFVGVGASRVRDLFEKAKSKAPCIVFIDRVDAVGRQRGAGMGGGNDEREQTINQLLTEMDGFSGNSGVIVLAATNRPDVLDSALLRPGKFDRQVTVDRPDVAGRVKILQVHSRGKALGKDVDFDKVARRSPGFTGADLQNLMNEAAILAARRELKEISKDEISDALERIIAGPEKKNAVVSEEKKRLVAYHEAGHALGGCSYPEYNPVAKISIIPRGQAGGLTFFAPSEERLESGLYSRSYLENQMACSLGGRVAEEVIFGDENVTTGASNDFMQVSRVARQMIERFGFSKKIGQVAVGGPGGNPFMGQQMSSQKDYSMATADIVDAEVRELVEKAYKRATEIITTHIDILHKLAQLLIEKETVAGEDS

SEQ ID NO: 108386 - protein, 517 aa, Arabidopsis thaliana
  peptide (1)..(517): Ceres Seq. ID no. 13667315
  misc_feature (305)..(516): Pfam Name: Peptidase family M41 Pfam Description: Peptidase family M41
  misc_feature (1)..(516): Homolog of NCBI NO: 18402995 NR Description: chloroplast FtsH protease [Arabidopsis thaliana] Cell division protein ftsH homolog 1, chloroplast precursor
  misc_feature (1)..(516): Homolog of NCBI NO: 1483215 NR Description: chloroplast FtsH protease [Arabidopsis thaliana]
  misc_feature (1)..(516): Homolog of NCBI NO: 18422193 NR Description: FtsH protease, putative [Arabidopsis thaliana] Cell division protein ftsH homolog 2, chloroplast precursor
  misc_feature (1)..(516): Homolog of NCBI NO: 17865457 NR Description: Cell division protein ftsH homolog, chloroplast (DS9) >gi|5804782|dbj|BAA33755.2| chloroplast FtsH protease
  misc_feature (1)..(516): Homolog of NCBI NO: 17865463 NR Description: Cell division protein ftsH homolog, chloroplast >gi|13183728|gb|AAK15322.1|AF332134_1 FtsH protease [Medicago
  misc_feature (1)..(509): Homolog of NCBI NO: 2492515 NR Description: Cell division protein ftsH homolog, chloroplast
  misc_feature (1)..(516): Homolog of NCBI NO: 17228756 NR Description: cell division protein [Nostoc sp. PCC 7120]
  misc_feature (1)..(516): Homolog of NCBI NO: 23129565 NR Description: hypothetical protein [Nostoc punctiforme]
  misc_feature (1)..(516): Homolog of NCBI NO: 33239707 NR Description: Cell division protein FtsH [Prochlorococcus subsp. marinus str. CCMP1375] >gi|33237232|gb|AAP99301.1| Cell protein FtsH [Prochlorococcus marinus subsp. marinus str.
  misc_feature (1)..(516): Homolog of NCBI NO: 30684767 NR Description: FtsH protease (VAR2) [Arabidopsis thaliana]
MNGVDISVSEGESSGNDLFTVIGNLIFSLLAFGGLFLLFRRAQGGPGGGPGGLGGPMDFGRSKSKFQEVPETGVSFADVAGADQAKLELQEVVDFLKNPDKYTALGAKIPKGCLLVGPPGTGKTLLARAVAGEAGVPFFSCAASEFVELFVGVGASRVRDLFEKAKSKAPCIVFIDRVDAVGRQRGAGMGGGNDEREQTINQLLTEMDGFSGNSGVIVLAATNRPDVLDSALLRPGKFDRQVTVDRPDVAGRVKILQVHSRGKALGKDVDFDKVARRSPGFTGADLQNLMNEAAILAARRELKEISKDEISDALERIIAGPEKKNAVVSEEKKRLVAYHEAGHALGGCSYPEYNPVAKISIIPRGQAGGLTFFAPSEERLESGLYSRSYLENQMACSLGGRVAEEVIFGDENVTTGASNDFMQVSRVARQMIERFGFSKKIGQVAVGGPGGNPFMGQQMSSQKDYSMATADIVDAEVRELVEKAYKRATEIITTHIDILHKLAQLLIEKETVAGEDS

SEQ ID NO: 108387 - protein, 461 aa, Arabidopsis thaliana
  peptide (1)..(461): Ceres Seq. ID no. 13667316
  misc_feature (249)..(460): Pfam Name: Peptidase family M41 Pfam Description: Peptidase family M41
  misc_feature (1)..(460): Homolog of NCBI NO: 18402995 NR Description: chloroplast FtsH protease [Arabidopsis thaliana] Cell division protein ftsH homolog 1, chloroplast precursor
  misc_feature (1)..(460): Homolog of NCBI NO: 1483215 NR Description: chloroplast FtsH protease [Arabidopsis thaliana]
  misc_feature (1)..(460): Homolog of NCBI NO: 18422193 NR Description: FtsH protease, putative [Arabidopsis thaliana] Cell division protein ftsH homolog 2, chloroplast precursor
  misc_feature (1)..(460): Homolog of NCBI NO: 17865457 NR Description: Cell division protein ftsH homolog, chloroplast (DS9) >gi|5804782|dbj|BAA33755.2| chloroplast FtsH protease
  misc_feature (1)..(460): Homolog of NCBI NO: 17865463 NR Description: Cell division protein ftsH homolog, chloroplast >gi|13183728|gb|AAK15322.1|AF332134_1 FtsH protease [Medicago
  misc_feature (1)..(453): Homolog of NCBI NO: 2492515 NR Description: Cell division protein ftsH homolog, chloroplast
  misc_feature (1)..(460): Homolog of NCBI NO: 17228756 NR Description: cell division protein [Nostoc sp. PCC 7120]
  misc_feature (1)..(460): Homolog of NCBI NO: 23129565 NR Description: hypothetical protein [Nostoc punctiforme]
  misc_feature (1)..(460): Homolog of NCBI NO: 33239707 NR Description: Cell division protein FtsH [Prochlorococcus subsp. marinus str. CCMP1375] >gi|33237232|gb|AAP99301.1| Cell protein FtsH [Prochlorococcus marinus subsp. marinus str.
  misc_feature (1)..(460): Homolog of NCBI NO: 30684767 NR Description: FtsH protease (VAR2) [Arabidopsis thaliana]
MDFGRSKSKFQEVPETGVSFADVAGADQAKLELQEVVDFLKNPDKYTALGAKIPKGCLLVGPPGTGKTLLARAVAGEAGVPFFSCAASEFVELFVGVGASRVRDLFEKAKSKAPCIVFIDRVDAVGRQRGAGMGGGNDEREQTINQLLTEMDGFSGNSGVIVLAATNRPDVLDSALLRPGKFDRQVTVDRPDVAGRVKILQVHSRGKALGKDVDFDKVARRSPGFTGADLQNLMNEAAILAARRELKEISKDEISDALERIIAGPEKKNAVVSEEKKRLVAYHEAGHALGGCSYPEYNPVAKISIIPRGQAGGLTFFAPSEERLESGLYSRSYLENQMACSLGGRVAEEVIFGDENVTTGASNDFMQVSRVARQMIERFGFSKKIGQVAVGGPGGNPFMGQQMSSQKDYSMATADIVDAEVRELVEKAYKRATEIITTHIDILHKLAQLLIEKETVAGEDS

SEQ ID NO: 108388 - DNA, 1180 bp, Arabidopsis thaliana
  misc_feature (1)..(1180): Ceres Seq. ID no. 13667333
  misc_feature: MA Experiment ID: 20000169 Result: Up-regulated in Transcription
  misc_feature: MA Experiment 20000169 PARAMETER Experiment Name: At_100uM_ABA_P Parameter: Age (day) Value: 14
  misc_feature: MA Experiment 20000169 PARAMETER Experiment Name: At_100uM_ABA_P Parameter: Organism Value: A. thaliana
  misc_feature: MA Experiment 20000169 PARAMETER Experiment Name: At_100uM_ABA_P Parameter: Plant Line Value: WS
  misc_feature: MA Experiment 20000169 PARAMETER Experiment Name: At_100uM_ABA_P Parameter: Timepoint (hr) Value: 6
  misc_feature: MA Experiment 20000169 PARAMETER Experiment Name: At_100uM_ABA_P Parameter: Tissue Value: Aerial
  misc_feature: MA Experiment 20000169 PARAMETER Experiment Name: At_100uM_ABA_P Parameter: Treatment Value: 100uM ABA vs. No Treatment
  misc_feature: MA Experiment ID: 20000171 Result: Up-regulated in Transcription
  misc_feature: MA Experiment 20000171 PARAMETER Experiment Name: At_42deg_Heat_P Parameter: Age (day) Value: 14
  misc_feature: MA Experiment 20000171 PARAMETER Experiment Name: At_42deg_Heat_P Parameter: Organism Value: A. thaliana
  misc_feature: MA Experiment 20000171 PARAMETER Experiment Name: At_42deg_Heat_P Parameter: Plant Line Value: WS
  misc_feature: MA Experiment 20000171 PARAMETER Experiment Name: At_42deg_Heat_P Parameter: Temperature (deg C) Value: 42 vs. 22
  misc_feature: MA Experiment 20000171 PARAMETER Experiment Name: At_42deg_Heat_P Parameter: Timepoint (hr) Value: 1
  misc_feature: MA Experiment 20000171 PARAMETER Experiment Name: At_42deg_Heat_P Parameter: Tissue Value: Aerial
  misc_feature: MA Experiment ID: 20000173 Result: Up-regulated in Transcription
  misc_feature: MA Experiment 20000173 PARAMETER Experiment Name: At_42deg_Heat_P Parameter: Age (day) Value: 14
  misc_feature: MA Experiment 20000173 PARAMETER Experiment Name: At_42deg_Heat_P Parameter: Organism Value: A. thaliana
  misc_feature: MA Experiment 20000173 PARAMETER Experiment Name: At_42deg_Heat_P Parameter: Plant Line Value: WS
  misc_feature: MA Experiment 20000173 PARAMETER Experiment Name: At_42deg_Heat_P Parameter: Temperature (deg C) Value: 42 vs. 22
  misc_feature: MA Experiment 20000173 PARAMETER Experiment Name: At_42deg_Heat_P Parameter: Timepoint (hr) Value: 6
  misc_feature: MA Experiment 20000173 PARAMETER Experiment Name: At_42deg_Heat_P Parameter: Tissue Value: Aerial
  misc_feature: MA Experiment ID: 20000184 Result: Up-regulated in Transcription
  misc_feature: MA Experiment 20000184 PARAMETER Experiment Name: At_Shoots__P Parameter: Age (day) Value: 7
  misc_feature: MA Experiment 20000184 PARAMETER Experiment Name: At_Shoots__P Parameter: Tissue Value: Shoots vs. Whole Plant
  misc_feature: MA Experiment ID: 20000436 Result: Up-regulated in Transcription
  misc_feature: MA Experiment 20000436 PARAMETER Experiment Name: At_Drought_P Parameter: Age (day) Value: 7
  misc_feature: MA Experiment 20000436 PARAMETER Experiment Name: At_Drought_P Parameter: Organism Value: A. thaliana
  misc_feature: MA Experiment 20000436 PARAMETER Experiment Name: At_Drought_P Parameter: Plant Line Value: WS
  misc_feature: MA Experiment 20000436 PARAMETER Experiment Name: At_Drought_P Parameter: Timepoint (hr) Value: 12
  misc_feature: MA Experiment 20000436 PARAMETER Experiment Name: At_Drought_P Parameter: Tissue Value: Whole Plant
  misc_feature: MA Experiment 20000436 PARAMETER Experiment Name: At_Drought_P Parameter: Treatment Value: Drought vs. No Drought
  misc_feature: MA Experiment ID: 20000794 Result: Up-regulated in Transcription
  misc_feature: MA Experiment 20000794 PARAMETER Experiment Name: At_Petals_P Parameter: Age (day) Value: 23-25 days
  misc_feature: MA Experiment 20000794 PARAMETER Experiment Name: At_Petals_P Parameter: Plant Line Value: WS
  misc_feature: MA Experiment 20000794 PARAMETER Experiment Name: At_Petals_P Parameter: Tissue Value: Petals vs. Whole plant
  misc_feature: MA Experiment ID: 20001248 Result: Down-regulated in Transcription
  misc_feature: MA Experiment 20001248 PARAMETER Experiment Name: At_Far-red-induction_P Parameter: Age (day) Value: 7
  misc_feature: MA Experiment 20001248 PARAMETER Experiment Name: At_Far-red-induction_P Parameter: Light Value: Far-red vs. White
  misc_feature: MA Experiment 20001248 PARAMETER Experiment Name: At_Far-red-induction_P Parameter: Organism Value: A. thaliana
  misc_feature: MA Experiment 20001248 PARAMETER Experiment Name: At_Far-red-induction_P Parameter: Plant Line Value: Columbia
  misc_feature: MA Experiment 20001248 PARAMETER Experiment Name: At_Far-red-induction_P Parameter: Timepoint (hr) Value: 4
  misc_feature: MA Experiment 20001248 PARAMETER Experiment Name: At_Far-red-induction_P Parameter: Tissue Value: Whole Plant
  misc_feature: MA Experiment ID: 20001557 Result: Up-regulated in Transcription
  misc_feature: MA Experiment 20001557 PARAMETER Experiment Name: At_Drought_Soil_Dry_P Parameter: Age (day) Value: 27
  misc_feature: MA Experiment 20001557 PARAMETER Experiment Name: At_Drought_Soil_Dry_P Parameter: Organism Value: A. thaliana
  misc_feature: MA Experiment 20001557 PARAMETER Experiment Name: At_Drought_Soil_Dry_P Parameter: Plant Line Value: WS
  misc_feature: MA Experiment 20001557 PARAMETER Experiment Name: At_Drought_Soil_Dry_P Parameter: Post Timepoint (hr) Value: 3
  misc_feature: MA Experiment 20001557 PARAMETER Experiment Name: At_Drought_Soil_Dry_P Parameter: Post-Treatment Value: Re-Water vs. No Drought
  misc_feature: MA Experiment 20001557 PARAMETER Experiment Name: At_Drought_Soil_Dry_P Parameter: Timepoint (day) Value: 13
  misc_feature: MA Experiment 20001557 PARAMETER Experiment Name: At_Drought_Soil_Dry_P Parameter: Treatment Value: Drought vs. No Drought
  misc_feature: MA Experiment ID: 20001558 Result: Up-regulated in Transcription
  misc_feature: MA Experiment 20001558 PARAMETER Experiment Name: At_Drought_Soil_Dry_P Parameter: Age (day) Value: 27
  misc_feature: MA Experiment 20001558 PARAMETER Experiment Name: At_Drought_Soil_Dry_P Parameter: Organism Value: A. thaliana
  misc_feature: MA Experiment 20001558 PARAMETER Experiment Name: At_Drought_Soil_Dry_P Parameter: Plant Line Value: WS
  misc_feature: MA Experiment 20001558 PARAMETER Experiment Name: At_Drought_Soil_Dry_P Parameter: Post Timepoint (hr) Value: 6
  misc_feature: MA Experiment 20001558 PARAMETER Experiment Name: At_Drought_Soil_Dry_P Parameter: Post-Treatment Value: Re-Water vs. No Drought
  misc_feature: MA Experiment 20001558 PARAMETER Experiment Name: At_Drought_Soil_Dry_P Parameter: Timepoint (day) Value: 13
  misc_feature: MA Experiment 20001558 PARAMETER Experiment Name: At_Drought_Soil_Dry_P Parameter: Treatment Value: Drought vs. No Drought
  misc_feature: MA Experiment ID: 20001905 Result: Up-regulated in Transcription
  misc_feature: MA Experiment 20001905 PARAMETER Experiment Name: At_Drought_Reproduction_P Parameter: Age (day) Value: 40
  misc_feature: MA Experiment 20001905 PARAMETER Experiment Name: At_Drought_Reproduction_P Parameter: Organism Value: A. thaliana
  misc_feature: MA Experiment 20001905 PARAMETER Experiment Name: At_Drought_Reproduction_P Parameter: Plant Line Value: WS
  misc_feature: MA Experiment 20001905 PARAMETER Experiment Name: At_Drought_Reproduction_P Parameter: Timepoint (day) Value: 10
  misc_feature: MA Experiment 20001905 PARAMETER Experiment Name: At_Drought_Reproduction_P Parameter: Tissue Value: Rosettes
  misc_feature: MA Experiment 20001905 PARAMETER Experiment Name: At_Drought_Reproduction_P Parameter: Treatment Value: Drought vs. No Drought
agggggcccaaaactggacccccccggggggccctcaagactaagggatccccccgggctcagggaataaagaaaaagctcacaactttaacctttctggagagagaagaacaaaagagggagagggagagaaatggaaggcaaagaagaagatgtacgagtgggagctaacaagttcccggagaggcaacccatcggtacatcggctcagtccaccgacaaggactacaaagagccacctcctgcgccactgttcgagcccggcgagctcagctcatggtctttctacagagccggaatagctgagtttatcgctactttcttgtttctctacatcactgttttgactgtaatgggagttaagagagcaccaaacatgtgtgcttctgttggaatccaaggtatcgcttgggcttttggtggcatgatctttgctcttgtctactgtactgctggaatttcaggtggacacatcaaccctgctgtaacattcggtctgttcttggctcggaagttatctctgaccagagcagtgttctacatgattatgcaatgtcttggagccatctgtggtgccggagtcgtcaaaggtttccagccaacgccgtaccagactctcggtggtggtgctaacaccgttgctcatggctacaccaaaggttctggccttggtgctgaaatcatcggaacattcgttctcgtctacactgtcttctccgccaccgacgccaagagaagcgcccgtgactcacacgtcccgattttggcgccgctcccaatcggatttgcagtgttcttggtacacttggcaacaataccgatcaccgggaccggaatcaacccagctagaagtcttggagccgcaattatctacaacaaggaccactcttgggatgaccattggattttctgggttggaccattcattggagcagctctagcagcactatatcaccagattgtcatcagagcgattcctttcaagagcaagagttagagacacacagaaagattccacggtccagaatttgttctttagtagtttctttgcttatctatctaatgtagcttgtgttttgcaatgtaatgagcctttcaagaatatgtatttgggatttctaatcagcttttgtctatgtaaaaaccatggtttatctttaaatgttgtttgaggttggcc

SEQ ID NO: 108389 - protein, 287 aa, Arabidopsis thaliana; identical to SEQ ID NO: 29005
  peptide (1)..(287): Ceres Seq. ID no. 13667334
  misc_feature (45)..(274): Pfam Name: Major intrinsic protein Pfam Description: Major intrinsic protein
  misc_feature (1)..(287): Homolog of NCBI NO: 18411332 NR Description: transmembrane protein (MIP family) [Arabidopsis >gi|535780|dbj|BAA05654.1| transmembrane protein [Arabidopsis >gi|20466718|gb|AAM20676.1| probable plasma membrane intrinsic
  misc_feature (1)..(287): Homolog of NCBI NO: 7441247 NR Description: probable plasma membrane intrinsic protein 1c - thaliana >gi|2252825|gb|AAB62824.1| Similar to transmembrane coded for by A. thaliana cDNA H37637; coded for by A. for by A.
  misc_feature (1)..(287): Homolog of NCBI NO: 2373401 NR Description: transmembrane protein [Arabidopsis thaliana]
  misc_feature (1)..(287): Homolog of NCBI NO: 15223438 NR Description: plasma membrane intrinsic protein 1c [Arabidopsis >gi|1175012|sp|Q08733|WC1C_ARATH Plasma membrane intrinsic
  misc_feature (1)..(287): Homolog of NCBI NO: 17065068 NR Description: plasma membrane intrinsic protein 1C protein B) [Arabidopsis thaliana] >gi|25083740|gb|AAN72112.1| membrane intrinsic protein 1C (transmembrane protein B)
  misc_feature (1)..(287): Homolog of NCBI NO: 472875 NR Description: plasma membrane intrinsic protein 1c [Arabidopsis
  misc_feature (1)..(287): Homolog of NCBI NO: 15233109 NR Description: plasma membrane intrinsic protein 1A [Arabidopsis >gi|21431895|sp|P43285|WC1A_ARATH Plasma membrane intrinsic
  misc_feature (1)..(287): Homolog of NCBI NO: 3551131 NR Description: plasma membrane aquaporin (PAQ1) [Raphanus
  misc_feature (1)..(287): Homolog of NCBI NO: 15236485 NR Description: major intrinsic protein (MIP) family [Arabidopsis
  misc_feature (1)..(287): Homolog of NCBI NO: 10799095 NR Description: aquaporin PIP1b2 [Brassica oleracea]

SEQ ID NO: 108390 - protein, 214 aa, Arabidopsis thaliana; identical to SEQ ID NO: 29006
  peptide (1)..(214): Ceres Seq. ID no. 13667335
  misc_feature (1)..(201): Pfam Name: Major intrinsic protein Pfam Description: Major intrinsic protein
  misc_feature (1)..(214): Homolog of NCBI NO: 18411332 NR Description: transmembrane protein (MIP family) [Arabidopsis >gi|535780|dbj|BAA05654.1| transmembrane protein [Arabidopsis >gi|20466718|gb|AAM20676.1| probable plasma membrane intrinsic
  misc_feature (1)..(214): Homolog of NCBI NO: 7441247 NR Description: probable plasma membrane intrinsic protein 1c - thaliana >gi|2252825|gb|AAB62824.1| Similar to transmembrane coded for by A. thaliana cDNA H37637; coded for by A. for by A.
  misc_feature (1)..(214): Homolog of NCBI NO: 2373401 NR Description: transmembrane protein [Arabidopsis thaliana]
  misc_feature (1)..(214): Homolog of NCBI NO: 15223438 NR Description: plasma membrane intrinsic protein 1c [Arabidopsis >gi|1175012|sp|Q08733|WC1C_ARATH Plasma membrane intrinsic
  misc_feature (1)..(214): Homolog of NCBI NO: 17065068 NR Description: plasma membrane intrinsic protein 1C protein B) [Arabidopsis thaliana] >gi|25083740|gb|AAN72112.1| membrane intrinsic protein 1C (transmembrane protein B)
  misc_feature (1)..(214): Homolog of NCBI NO: 472875 NR Description: plasma membrane intrinsic protein 1c [Arabidopsis
  misc_feature (1)..(214): Homolog of NCBI NO: 15233109 NR Description: plasma membrane intrinsic protein 1A [Arabidopsis >gi|21431895|sp|P43285|WC1A_ARATH Plasma membrane intrinsic
  misc_feature (1)..(214): Homolog of NCBI NO: 3551131 NR Description: plasma membrane aquaporin (PAQ1) [Raphanus
  misc_feature (1)..(214): Homolog of NCBI NO: 15236485 NR Description: major intrinsic protein (MIP) family [Arabidopsis
  misc_feature (1)..(214): Homolog of NCBI NO: 10799095 NR Description: aquaporin PIP1b2 [Brassica oleracea]

SEQ ID NO: 108391 - protein, 206 aa, Arabidopsis thaliana; identical to SEQ ID NO: 29007
  peptide (1)..(206): Ceres Seq. ID no. 13667336
  misc_feature (1)..(193): Pfam Name: Major intrinsic protein Pfam Description: Major intrinsic protein
  misc_feature (1)..(206): Homolog of NCBI NO: 18411332 NR Description: transmembrane protein (MIP family) [Arabidopsis >gi|535780|dbj|BAA05654.1| transmembrane protein [Arabidopsis >gi|20466718|gb|AAM20676.1| probable plasma membrane intrinsic
  misc_feature (1)..(206): Homolog of NCBI NO: 7441247 NR Description: probable plasma membrane intrinsic protein 1c - thaliana >gi|2252825|gb|AAB62824.1| Similar to transmembrane coded for by A. thaliana cDNA H37637; coded for by A. for by A.
  misc_feature (1)..(206): Homolog of NCBI NO: 2373401 NR Description: transmembrane protein [Arabidopsis thaliana]
  misc_feature (1)..(206): Homolog of NCBI NO: 15223438 NR Description: plasma membrane intrinsic protein 1c [Arabidopsis >gi|1175012|sp|Q08733|WC1C_ARATH Plasma membrane intrinsic
  misc_feature (1)..(206): Homolog of NCBI NO: 17065068 NR Description: plasma membrane intrinsic protein 1C protein B) [Arabidopsis thaliana] >gi|25083740|gb|AAN72112.1| membrane intrinsic protein 1C (transmembrane protein B)
  misc_feature (1)..(206): Homolog of NCBI NO: 472875 NR Description: plasma membrane intrinsic protein 1c [Arabidopsis
  misc_feature (1)..(206): Homolog of NCBI NO: 15233109 NR Description: plasma membrane intrinsic protein 1A [Arabidopsis >gi|21431895|sp|P43285|WC1A_ARATH Plasma membrane intrinsic
  misc_feature (1)..(206): Homolog of NCBI NO: 3551131 NR Description: plasma membrane aquaporin (PAQ1) [Raphanus
  misc_feature (1)..(206): Homolog of NCBI NO: 15236485 NR Description: major intrinsic protein (MIP) family [Arabidopsis
  misc_feature (1)..(206): Homolog of NCBI NO: 10799095 NR Description: aquaporin PIP1b2 [Brassica oleracea]

SEQ ID NO: 108392 - DNA, 930 bp, Arabidopsis thaliana
  misc_feature (1)..(930): Ceres Seq. ID no. 13667345
  misc_feature: MA Experiment ID: 108434 Result: Down-regulated in Transcription
  misc_feature: MA Experiment 108434 PARAMETER Experiment Name: At_Root_Tips_cDNA_P Parameter: Tissue Value: Root Tips
  misc_feature: MA Experiment ID: 108461 Result: Up-regulated in Transcription
  misc_feature: MA Experiment 108461 PARAMETER Experiment Name: At_Germinating_Seeds_cDNA_P Parameter: Age (day) Value: 1 vs. 0
  misc_feature: MA Experiment 108461 PARAMETER Experiment Name: At_Germinating_Seeds_cDNA_P Parameter: Tissue Value: Germinating Seeds
  misc_feature: MA Experiment ID: 108462 Result: Up-regulated in Transcription
  misc_feature: MA Experiment 108462 PARAMETER Experiment Name: At_Germinating_Seeds_cDNA_P Parameter: Age (day) Value: 2 vs. 0
  misc_feature: MA Experiment 108462 PARAMETER Experiment Name: At_Germinating_Seeds_cDNA_P Parameter: Tissue Value: Germinating Seeds
  misc_feature: MA Experiment ID: 108463 Result: Up-regulated in Transcription
  misc_feature: MA Experiment 108463 PARAMETER Experiment Name: At_Germinating_Seeds_cDNA_P Parameter: Age (day) Value: 3 vs. 0
  misc_feature: MA Experiment 108463 PARAMETER Experiment Name: At_Germinating_Seeds_cDNA_P Parameter: Tissue Value: Germinating Seeds
  misc_feature: MA Experiment ID: 108488 Result: Up-regulated in Transcription
  misc_feature: MA Experiment ID: 108594 Result: Down-regulated in Transcription
  misc_feature: MA Experiment 108594 PARAMETER Experiment Name: At_Ler-rhl_Root_cDNA_P Parameter: Plant Line Value: null
  misc_feature: MA Experiment ID: 108595 Result: Down-regulated in Transcription
  misc_feature: MA Experiment 108595 PARAMETER Experiment Name: At_Ler-pi_Ovule_cDNA_P Parameter: Plant Line Value: null
  misc_feature: MA Experiment ID: 20000072 Result: Down-regulated in Transcription
  misc_feature: MA Experiment 20000072 PARAMETER Experiment Name: At_100uM_ABA_Mutants_cDNA_P Parameter: Plant Line Value: CS8105
  misc_feature: MA Experiment 20000072 PARAMETER Experiment Name: At_100uM_ABA_Mutants_cDNA_P Parameter: Timepoint (hr) Value: 6
  misc_feature: MA Experiment 20000072 PARAMETER Experiment Name: At_100uM_ABA_Mutants_cDNA_P Parameter: Tissue Value: Aerial
  misc_feature: MA Experiment 20000072 PARAMETER Experiment Name: At_100uM_ABA_Mutants_cDNA_P Parameter: Treatment Value: 100uM ABA vs. No Treatment
  misc_feature: MA Experiment ID: 20000086 Result: Down-regulated in Transcription
  misc_feature: MA Experiment 20000086 PARAMETER Experiment Name: At_100uM_ABA_Mutants_cDNA_P Parameter: Plant Line Value: CS22
  misc_feature: MA Experiment 20000086 PARAMETER Experiment Name: At_100uM_ABA_Mutants_cDNA_P Parameter: Timepoint (hr) Value: 6
  misc_feature: MA Experiment 20000086 PARAMETER Experiment Name: At_100uM_ABA_Mutants_cDNA_P Parameter: Tissue Value: Aerial
  misc_feature: MA Experiment 20000086 PARAMETER Experiment Name: At_100uM_ABA_Mutants_cDNA_P Parameter: Treatment Value: 100uM ABA vs. No Treatment
  misc_feature: MA Experiment ID: 20000087 Result: Down-regulated in Transcription
  misc_feature: MA Experiment 20000087 PARAMETER Experiment Name: At_100uM_ABA_Mutants_cDNA_P Parameter: Plant Line Value: WS
  misc_feature: MA Experiment 20000087 PARAMETER Experiment Name: At_100uM_ABA_Mutants_cDNA_P Parameter: Timepoint (hr) Value: 6
  misc_feature: MA Experiment 20000087 PARAMETER Experiment Name: At_100uM_ABA_Mutants_cDNA_P Parameter: Tissue Value: Aerial
  misc_feature: MA Experiment 20000087 PARAMETER Experiment Name: At_100uM_ABA_Mutants_cDNA_P Parameter: Treatment Value: 100uM ABA vs. No Treatment
  misc_feature: MA Experiment ID: 20000117 Result: Down-regulated in Transcription
  misc_feature: MA Experiment 20000117 PARAMETER Experiment Name: At_100uM_ABA_Mutants_cDNA_P Parameter: Plant Line Value: Columbia
  misc_feature: MA Experiment 20000117 PARAMETER Experiment Name: At_100uM_ABA_Mutants_cDNA_P Parameter: Timepoint (hr) Value: 6
  misc_feature: MA Experiment 20000117 PARAMETER Experiment Name: At_100uM_ABA_Mutants_cDNA_P Parameter: Tissue Value: Aerial
  misc_feature: MA Experiment 20000117 PARAMETER Experiment Name: At_100uM_ABA_Mutants_cDNA_P Parameter: Treatment Value: 100uM ABA vs. No Treatment
  misc_feature: MA Experiment ID: 20000179 Result: Up-regulated in Transcription
  misc_feature: MA Experiment 20000179 PARAMETER Experiment Name: At_Germinating_Seeds_P Parameter: Age (hr) Value: 6 vs. 0
  misc_feature: MA Experiment 20000179 PARAMETER Experiment Name: At_Germinating_Seeds_P Parameter: Tissue Value: Germinating Seeds
  misc_feature: MA Experiment ID: 20000180 Result: Up-regulated in Transcription
  misc_feature: MA Experiment 20000180 PARAMETER Experiment Name: At_Germinating_Seeds_P Parameter: Age (hr) Value: 24 vs. 0
  misc_feature: MA Experiment 20000180 PARAMETER Experiment Name: At_Germinating_Seeds_P Parameter: Tissue Value: Germinating Seeds
  misc_feature: MA Experiment ID: 20000184 Result: Up-regulated in Transcription
  misc_feature: MA Experiment 20000184 PARAMETER Experiment Name: At_Shoots__P Parameter: Age (day) Value: 7
  misc_feature: MA Experiment 20000184 PARAMETER Experiment Name: At_Shoots__P Parameter: Tissue Value: Shoots vs. Whole Plant
  misc_feature: MA Experiment ID: 20000185 Result: Down-regulated in Transcription
  misc_feature: MA Experiment 20000185 PARAMETER Experiment Name: At_Roots__P Parameter: Age (day) Value: 7 vs. 21
  misc_feature: MA Experiment 20000185 PARAMETER Experiment Name: At_Roots__P Parameter: Organism Value: A. thaliana
  misc_feature: MA Experiment 20000185 PARAMETER Experiment Name: At_Roots__P Parameter: Tissue Value: Roots vs. Whole Plant
  misc_feature: MA Experiment ID: 20000214 Result: Up-regulated in Transcription
  misc_feature: MA Experiment 20000214 PARAMETER Experiment Name: At_4deg_Cold_P Parameter: Timepoint (hr) Value: 6
  misc_feature: MA Experiment ID: 20000437 Result: Down-regulated in Transcription
  misc_feature: MA Experiment 20000437 PARAMETER Experiment Name: At_Drought_P Parameter: Age (day) Value: 8
  misc_feature: MA Experiment 20000437 PARAMETER Experiment Name: At_Drought_P Parameter: Organism Value: A. thaliana
  misc_feature: MA Experiment 20000437 PARAMETER Experiment Name: At_Drought_P Parameter: Plant Line Value: WS
  misc_feature: MA Experiment 20000437 PARAMETER Experiment Name: At_Drought_P Parameter: Timepoint (hr) Value: 24
  misc_feature: MA Experiment 20000437 PARAMETER Experiment Name: At_Drought_P Parameter: Tissue Value: Whole Plant
  misc_feature: MA Experiment 20000437 PARAMETER Experiment Name: At_Drought_P Parameter: Treatment Value: Drought vs. No Drought
  misc_feature: MA Experiment ID: 20000438 Result: Up-regulated in Transcription
  misc_feature: MA Experiment 20000438 PARAMETER Experiment Name: At_Shoots__P Parameter: Age (day) Value: 14
  misc_feature: MA Experiment 20000438 PARAMETER Experiment Name: At_Shoots__P Parameter: Tissue Value: Shoots vs. Whole Plant
  misc_feature: MA Experiment ID: 20000439 Result: Down-regulated in Transcription
  misc_feature: MA Experiment 20000439 PARAMETER Experiment Name: At_Roots__P Parameter: Age (day) Value: 14 vs. 21
  misc_feature: MA Experiment 20000439 PARAMETER Experiment Name: At_Roots__P Parameter: Organism Value: A. thaliana
  misc_feature: MA Experiment 20000439 PARAMETER Experiment Name: At_Roots__P Parameter: Tissue Value: Roots vs. Whole Plant
  misc_feature: MA Experiment ID: 20001248 Result: Down-regulated in Transcription
  misc_feature: MA Experiment 20001248 PARAMETER Experiment Name: At_Far-red-induction_P Parameter: Age (day) Value: 7
  misc_feature: MA Experiment 20001248 PARAMETER Experiment Name: At_Far-red-induction_P Parameter: Light Value: Far-red vs. White
  misc_feature: MA Experiment 20001248 PARAMETER Experiment Name: At_Far-red-induction_P Parameter: Organism Value: A. thaliana
  misc_feature: MA Experiment 20001248 PARAMETER Experiment Name: At_Far-red-induction_P Parameter: Plant Line Value: Columbia
  misc_feature: MA Experiment 20001248 PARAMETER Experiment Name: At_Far-red-induction_P Parameter: Timepoint (hr) Value: 4
  misc_feature: MA Experiment 20001248 PARAMETER Experiment Name: At_Far-red-induction_P Parameter: Tissue Value: Whole Plant
  misc_feature: MA Experiment ID: 20001450 Result: Down-regulated in Transcription
  misc_feature: MA Experiment 20001450 PARAMETER Experiment Name: At_Far-red-induction_P Parameter: Age (day) Value: 7
  misc_feature: MA Experiment 20001450 PARAMETER Experiment Name: At_Far-red-induction_P Parameter: Light Value: Far-red vs. White
  misc_feature: MA Experiment 20001450 PARAMETER Experiment Name: At_Far-red-induction_P Parameter: Organism Value: A. thaliana
  misc_feature: MA Experiment 20001450 PARAMETER Experiment Name: At_Far-red-induction_P Parameter: Plant Line Value: Columbia
  misc_feature: MA Experiment 20001450 PARAMETER Experiment Name: At_Far-red-induction_P Parameter: Timepoint (hr) Value: 8
  misc_feature: MA Experiment 20001450 PARAMETER Experiment Name: At_Far-red-induction_P Parameter: Tissue Value: Whole Plant
  misc_feature: MA Experiment ID: 20001451 Result: Down-regulated in Transcription
  misc_feature: MA Experiment 20001451 PARAMETER Experiment Name: At_Far-red-induction_P Parameter: Age (day) Value: 7
  misc_feature: MA Experiment 20001451 PARAMETER Experiment Name: At_Far-red-induction_P Parameter: Light Value: Far-red vs. White
  misc_feature: MA Experiment 20001451 PARAMETER Experiment Name: At_Far-red-induction_P Parameter: Organism Value: A. thaliana
  misc_feature: MA Experiment 20001451 PARAMETER Experiment Name: At_Far-red-induction_P Parameter: Plant Line Value: Columbia
  misc_feature: MA Experiment 20001451 PARAMETER Experiment Name: At_Far-red-induction_P Parameter: Timepoint (hr) Value: 24
  misc_feature: MA Experiment 20001451 PARAMETER Experiment Name: At_Far-red-induction_P Parameter: Tissue Value: Whole Plant
  misc_feature: MA Experiment ID: 20001757 Result: Up-regulated in Transcription
  misc_feature: MA Experiment 20001757 PARAMETER Experiment Name: At_50mM_NH4NO3_L-to-H_P Parameter: Timepoint (hr) Value: 6
  misc_feature: MA Experiment 20001757 PARAMETER Experiment Name: At_50mM_NH4NO3_L-to-H_P Parameter: Tissue Value: Leaf
  misc_feature: MA Experiment 20001757 PARAMETER Experiment Name: At_50mM_NH4NO3_L-to-H_P Parameter: Treatment Value: 50mM NH4NO3 vs 100mM Mannitol
  misc_feature: MA Experiment ID: 20001908 Result: Down-regulated in Transcription
  misc_feature: MA Experiment 20001908 PARAMETER Experiment Name: At_Drought_Reproduction_P Parameter: Age (day) Value: 40
  misc_feature: MA Experiment 20001908 PARAMETER Experiment Name: At_Drought_Reproduction_P Parameter: Organism Value: A. thaliana
  misc_feature: MA Experiment 20001908 PARAMETER Experiment Name: At_Drought_Reproduction_P Parameter: Plant Line Value: WS
  misc_feature: MA Experiment 20001908 PARAMETER Experiment Name: At_Drought_Reproduction_P Parameter: Timepoint (day) Value: 10
  misc_feature: MA Experiment 20001908 PARAMETER Experiment Name: At_Drought_Reproduction_P Parameter: Tissue Value: Siliques
  misc_feature: MA Experiment 20001908 PARAMETER Experiment Name: At_Drought_Reproduction_P Parameter: Treatment Value: Drought vs. No Drought
ccacgcgtccgcactgatccttctctcatcctcagaaagaatggctcaaaccatgctgcttacttcaggcgtcaccgccggccattttttgaggaacaagagccctttggctcagcccaaagttcaccatctcttcctctctggaaactctccggttgcactaccatctaggagacaatcattcgttcctctcgctctcttcaaacccaaaaccaaagctgctcctaaaaaggttgagaagccgaagagcaaggttgaggatggcatctttggaacgtctggtgggattggtttcacaaaggcgaatgagctattcgttggtcgtgttgctatgatcggtttcgctgcatcgttgcttggtgaggcgttgacgggaaaagggatattagctcagctgaatctggagacagggataccgatttacgaagcagagccattgcttctcttcttcatcttgttcactctgttgggagccattggagctctcggagacagaggaaaattcgtcgacgatcctcccaccgggctcgagaaagccgtcattcctcccggcaaaaacgtccgatctgccctcggtctcaaagaacaaggtccattgtttgggttcacgaaggcgaacgagttattcgtaggaagattggcacagttgggaatagcattttcactgataggagagattattaccgggaaaggagcattagctcaactcaacattgagaccggtataccaattcaagatatcgaaccacttgtcctcttaaacgttgctttcttcttcttcgctgccattaatcctggtaatggaaaattcatcaccgatgatggtgaagaaagctaaattatcatgtacttaaatttagtagagagtgtgtgaccttctcttcatgttgagacaaaaggaaatggacagcttaaattgttgtaatactt

SEQ ID NO: 108393 - protein, 278 aa, Arabidopsis thaliana
  peptide (1)..(278): Ceres Seq. ID no. 13667346
  misc_feature (73)..(226): Pfam Name: Chlorophyll A-B binding protein Pfam Description: Chlorophyll A-B binding protein
  misc_feature (14)..(278): Homolog of NCBI NO: 15219418 NR Description: photosystem II 22kDa protein -related thaliana] >gi|17380270|sp|Q9XF91|PSBS_ARATH Photosystem II 22 kDa
  misc_feature (14)..(278): Homolog of NCBI NO: 15294226 NR Description: unknown protein [Arabidopsis thaliana]
  misc_feature (14)..(277): Homolog of NCBI NO: 400890 NR Description: Photosystem II 22 kDa protein, chloroplast
  misc_feature (14)..(277): Homolog of NCBI NO: 1709846 NR Description: Photosystem II 22 kDa protein, chloroplast
  misc_feature (14)..(277): Homolog of NCBI NO: 18202913 NR Description: Photosystem II 22 kDa protein, chloroplast (CP22) >gi|12082782|gb|AAG48610.1|AF311720_1 photosystem II 22
  misc_feature (14)..(277): Homolog of NCBI NO: 18203444 NR Description: Photosystem II 22 kDa protein, chloroplast (CP22) >gi|6103011|emb|CAA59007.1| precursor of photosystem II
  misc_feature (14)..(277): Homolog of NCBI NO: 34908652 NR Description: putative photosystem II subunit (22KDa) precursor
  misc_feature (49)..(277): Homolog of NCBI NO: 38345525 NR Description: OSJNBa0039K24.28 [Oryza sativa (japonica
  misc_feature (49)..(277): Homolog of NCBI NO: 7489520 NR Description: photosystem II 22-K chlorophyll-binding protein - >gi|1304215|dbj|BAA12337.1| 22 kDa protein of photosystem II
  misc_feature (124)..(278): Homolog of NCBI NO: 6006279 NR Description: photosystem II 22 kDa protein [Arabidopsis
HASALILLSSSERMAQTMLLTSGVTAGHFLRNKSPLAQPKVHHLFLSGNSPVALPSRRQSFVPLALFKPKTKAAPKKVEKPKSKVEDGIFGTSGGIGFTKANELFVGRVAMIGFAASLLGEALTGKGILAQLNLETGIPIYEAEPLLLFFILFTLLGAIGALGDRGKFVDDPPTGLEKAVIPPGKNVRSALGLKEQGPLFGFTKANELFVGRLAQLGIAFSLIGEIITGKGALAQLNIETGIPIQDIEPLVLLNVAFFFFAAINPGNGKFITDDGEES

SEQ ID NO: 108394 - protein, 265 aa, Arabidopsis thaliana; identical to SEQ ID NO: 24800
  peptide (1)..(265): Ceres Seq. ID no. 13667347
  misc_feature (60)..(213): Pfam Name: Chlorophyll A-B binding protein Pfam Description: Chlorophyll A-B binding protein
  misc_feature (1)..(265): Homolog of NCBI NO: 15219418 NR Description: photosystem II 22kDa protein -related thaliana] >gi|17380270|sp|Q9XF91|PSBS_ARATH Photosystem II 22 kDa
  misc_feature (1)..(265): Homolog of NCBI NO: 15294226 NR Description: unknown protein [Arabidopsis thaliana]
  misc_feature (1)..(264): Homolog of NCBI NO: 400890 NR Description: Photosystem II 22 kDa protein, chloroplast
  misc_feature (1)..(264): Homolog of NCBI NO: 1709846 NR Description: Photosystem II 22 kDa protein, chloroplast
  misc_feature (1)..(264): Homolog of NCBI NO: 18202913 NR Description: Photosystem II 22 kDa protein, chloroplast (CP22) >gi|12082782|gb|AAG48610.1|AF311720_1 photosystem II 22
  misc_feature (1)..(264): Homolog of NCBI NO: 18203444 NR Description: Photosystem II 22 kDa protein, chloroplast (CP22) >gi|6103011|emb|CAA59007.1| precursor of photosystem II
  misc_feature (1)..(264): Homolog of NCBI NO: 34908652 NR Description: putative photosystem II subunit (22KDa) precursor
  misc_feature (36)..(264): Homolog of NCBI NO: 38345525 NR Description: OSJNBa0039K24.28 [Oryza sativa (japonica
  misc_feature (36)..(264): Homolog of NCBI NO: 7489520 NR Description: photosystem II 22-K chlorophyll-binding protein - >gi|1304215|dbj|BAA12337.1| 22 kDa protein of photosystem II
  misc_feature (111)..(265): Homolog of NCBI NO: 6006279 NR Description: photosystem II 22 kDa protein [Arabidopsis

SEQ ID NO: 108395 - protein, 261 aa, Arabidopsis thaliana; identical to SEQ ID NO: 24801
  peptide (1)..(261): Ceres Seq. ID no. 13667348
  misc_feature (56)..(209): Pfam Name: Chlorophyll A-B binding protein Pfam Description: Chlorophyll A-B binding protein
  misc_feature (1)..(261): Homolog of NCBI NO: 15219418 NR Description: photosystem II 22kDa protein -related thaliana] >gi|17380270|sp|Q9XF91|PSBS_ARATH Photosystem II 22 kDa
  misc_feature (1)..(261): Homolog of NCBI NO: 15294226 NR Description: unknown protein [Arabidopsis thaliana]
  misc_feature (1)..(260): Homolog of NCBI NO: 400890 NR Description: Photosystem II 22 kDa protein, chloroplast
  misc_feature (1)..(260): Homolog of NCBI NO: 1709846 NR Description: Photosystem II 22 kDa protein, chloroplast
  misc_feature (1)..(260): Homolog of NCBI NO: 18202913 NR Description: Photosystem II 22 kDa protein, chloroplast (CP22) >gi|12082782|gb|AAG48610.1|AF311720_1 photosystem II 22
  misc_feature (1)..(260): Homolog of NCBI NO: 18203444 NR Description: Photosystem II 22 kDa protein, chloroplast (CP22) >gi|6103011|emb|CAA59007.1| precursor of photosystem II
  misc_feature (1)..(260): Homolog of NCBI NO: 34908652 NR Description: putative photosystem II subunit (22KDa) precursor
  misc_feature (32)..(260): Homolog of NCBI NO: 38345525 NR Description: OSJNBa0039K24.28 [Oryza sativa (japonica
  misc_feature (32)..(260): Homolog of NCBI NO: 7489520 NR Description: photosystem II 22-K chlorophyll-binding protein - >gi|1304215|dbj|BAA12337.1| 22 kDa protein of photosystem II
  misc_feature (107)..(261): Homolog of NCBI NO: 6006279 NR Description: photosystem II 22 kDa protein [Arabidopsis

SEQ ID NO: 108396 - DNA, 2125 bp, Arabidopsis thaliana
  misc_feature (1)..(2125): Ceres Seq. ID no. 13667359
  misc_feature: MA Experiment ID: 20000171 Result: Down-regulated in Transcription
  misc_feature: MA Experiment 20000171 PARAMETER Experiment Name: At_42deg_Heat_P Parameter: Age (day) Value: 14
  misc_feature: MA Experiment 20000171 PARAMETER Experiment Name: At_42deg_Heat_P Parameter: Organism Value: A. thaliana
  misc_feature: MA Experiment 20000171 PARAMETER Experiment Name: At_42deg_Heat_P Parameter: Plant Line Value: WS
  misc_feature: MA Experiment 20000171 PARAMETER Experiment Name: At_42deg_Heat_P Parameter: Temperature (deg C) Value: 42 vs. 22
  misc_feature: MA Experiment 20000171 PARAMETER Experiment Name: At_42deg_Heat_P Parameter: Timepoint (hr) Value: 1
  misc_feature: MA Experiment 20000171 PARAMETER Experiment Name: At_42deg_Heat_P Parameter: Tissue Value: Aerial
  misc_feature: MA Experiment ID: 20000173 Result: Down-regulated in Transcription
  misc_feature: MA Experiment 20000173 PARAMETER Experiment Name: At_42deg_Heat_P Parameter: Age (day) Value: 14
  misc_feature: MA Experiment 20000173 PARAMETER Experiment Name: At_42deg_Heat_P Parameter: Organism Value: A. thaliana
  misc_feature: MA Experiment 20000173 PARAMETER Experiment Name: At_42deg_Heat_P Parameter: Plant Line Value: WS
  misc_feature: MA Experiment 20000173 PARAMETER Experiment Name: At_42deg_Heat_P Parameter: Temperature (deg C) Value: 42 vs. 22
  misc_feature: MA Experiment 20000173 PARAMETER Experiment Name: At_42deg_Heat_P Parameter: Timepoint (hr) Value: 6
  misc_feature: MA Experiment 20000173 PARAMETER Experiment Name: At_42deg_Heat_P Parameter: Tissue Value: Aerial
  misc_feature: MA Experiment ID: 20000184 Result: Down-regulated in Transcription
  misc_feature: MA Experiment 20000184 PARAMETER Experiment Name: At_Shoots__P Parameter: Age (day) Value: 7
  misc_feature: MA Experiment 20000184 PARAMETER Experiment Name: At_Shoots__P Parameter: Tissue Value: Shoots vs. Whole Plant
  misc_feature: MA Experiment ID: 20000185 Result: Down-regulated in Transcription
  misc_feature: MA Experiment 20000185 PARAMETER Experiment Name: At_Roots__P Parameter: Age (day) Value: 7 vs. 21
  misc_feature: MA Experiment 20000185 PARAMETER Experiment Name: At_Roots__P Parameter: Organism Value: A. thaliana
  misc_feature: MA Experiment 20000185 PARAMETER Experiment Name: At_Roots__P Parameter: Tissue Value: Roots vs. Whole Plant
  misc_feature: MA Experiment ID: 20000234 Result: Down-regulated in Transcription
  misc_feature: MA Experiment 20000234 PARAMETER Experiment Name: At_Siliques_P Parameter: Age (day) Value: 21
  misc_feature: MA Experiment 20000234 PARAMETER Experiment Name: At_Siliques_P Parameter: Organism Value: A. thaliana
  misc_feature: MA Experiment 20000234 PARAMETER Experiment Name: At_Siliques_P Parameter: Plant Line Value: WS
  misc_feature: MA Experiment 20000234 PARAMETER Experiment Name: At_Siliques_P Parameter: Tissue Value: Less Than 5mm Siliques vs. Whole Plant
  misc_feature: MA Experiment ID: 20000235 Result: Down-regulated in Transcription
  misc_feature: MA Experiment 20000235 PARAMETER Experiment Name: At_Siliques_P Parameter: Age (day) Value: 21
  misc_feature: MA Experiment 20000235 PARAMETER Experiment Name: At_Siliques_P Parameter: Organism Value: A. thaliana
  misc_feature: MA Experiment 20000235 PARAMETER Experiment Name: At_Siliques_P Parameter: Plant Line Value: WS
  misc_feature: MA Experiment 20000235 PARAMETER Experiment Name: At_Siliques_P Parameter: Tissue Value: 5-10mm Siliques vs. Whole Plant
  misc_feature: MA Experiment ID: 20000264 Result: Down-regulated in Transcription
  misc_feature: MA Experiment 20000264 PARAMETER Experiment Name: At_Open_Flower_P Parameter: Age (day) Value: 21
  misc_feature: MA Experiment 20000264 PARAMETER Experiment Name: At_Open_Flower_P Parameter: Plant Line Value: WS
  misc_feature: MA Experiment 20000264 PARAMETER Experiment Name: At_Open_Flower_P Parameter: Tissue Value: Open Flower vs. Whole Plant
  misc_feature: MA Experiment ID: 20000265 Result: Down-regulated in Transcription
  misc_feature: MA Experiment 20000265 PARAMETER Experiment Name: At_Open_Flower_P Parameter: Age (day) Value: 21
  misc_feature: MA Experiment 20000265 PARAMETER Experiment Name: At_Open_Flower_P Parameter: Plant Line Value: WS
  misc_feature: MA Experiment 20000265 PARAMETER Experiment Name: At_Open_Flower_P Parameter: Tissue Value: Closed Flower vs. Whole Plant
  misc_feature: MA Experiment ID: 20000286 Result: Down-regulated in Transcription
  misc_feature: MA Experiment 20000286 PARAMETER Experiment Name: At_Open_Flower_P Parameter: Age (day) Value: 21
  misc_feature: MA Experiment 20000286 PARAMETER Experiment Name: At_Open_Flower_P Parameter: Plant Line Value: WS
  misc_feature: MA Experiment 20000286 PARAMETER Experiment Name: At_Open_Flower_P Parameter: Tissue Value: Half Open vs. Whole Plant
  misc_feature: MA Experiment ID: 20000438 Result: Down-regulated in Transcription
  misc_feature: MA Experiment 20000438 PARAMETER Experiment Name: At_Shoots__P Parameter: Age (day) Value: 14
  misc_feature: MA Experiment 20000438 PARAMETER Experiment Name: At_Shoots__P Parameter: Tissue Value: Shoots vs. Whole Plant
  misc_feature: MA Experiment ID: 20000439 Result: Down-regulated in Transcription
  misc_feature: MA Experiment 20000439 PARAMETER Experiment Name: At_Roots__P Parameter: Age (day) Value: 14 vs. 21
  misc_feature: MA Experiment 20000439 PARAMETER Experiment Name: At_Roots__P Parameter: Organism Value: A. thaliana
  misc_feature: MA Experiment 20000439 PARAMETER Experiment Name: At_Roots__P Parameter: Tissue Value: Roots vs. Whole Plant
  misc_feature: MA Experiment ID: 20000573 Result: Down-regulated in Transcription
  misc_feature: MA Experiment 20000573 PARAMETER Experiment Name: At_100uM_ABA_Mutants__P Parameter: Organism Value: A. thaliana
  misc_feature: MA Experiment 20000573 PARAMETER Experiment Name: At_100uM_ABA_Mutants__P Parameter: Plant Line Value: CS22 vs. Ler wt
  misc_feature: MA Experiment 20000573 PARAMETER Experiment Name: At_100uM_ABA_Mutants__P Parameter: Timepoint (hr) Value: N/A
  misc_feature: MA Experiment 20000573 PARAMETER Experiment Name: At_100uM_ABA_Mutants__P Parameter: Tissue Value: Whole Plant
  misc_feature: MA Experiment 20000573 PARAMETER Experiment Name: At_100uM_ABA_Mutants__P Parameter: Treatment Value: None
  misc_feature: MA Experiment ID: 20000574 Result: Down-regulated in Transcription
  misc_feature: MA Experiment 20000574 PARAMETER Experiment Name: At_100uM_ABA_Mutants__P Parameter: Organism Value: A. thaliana
  misc_feature: MA Experiment 20000574 PARAMETER Experiment Name: At_100uM_ABA_Mutants__P Parameter: Plant Line Value: CS23 vs. Ler wt
  misc_feature: MA Experiment 20000574 PARAMETER Experiment Name: At_100uM_ABA_Mutants__P Parameter: Timepoint (hr) Value: N/A
  misc_feature: MA Experiment 20000574 PARAMETER Experiment Name: At_100uM_ABA_Mutants__P Parameter: Tissue Value: Whole Plant
  misc_feature: MA Experiment 20000574 PARAMETER Experiment Name: At_100uM_ABA_Mutants__P Parameter: Treatment Value: None
  misc_feature: MA Experiment ID: 20000794 Result: Down-regulated in Transcription
  misc_feature: MA Experiment 20000794 PARAMETER Experiment Name: At_Petals_P Parameter: Age (day) Value: 23-25 days
  misc_feature: MA Experiment 20000794 PARAMETER Experiment Name: At_Petals_P Parameter: Plant Line Value: WS
  misc_feature: MA Experiment 20000794 PARAMETER Experiment Name: At_Petals_P Parameter: Tissue Value: Petals vs. Whole plant
  misc_feature: MA Experiment ID: 20001247 Result: Up-regulated in Transcription
  misc_feature: MA Experiment 20001247 PARAMETER Experiment Name: At_Far-red-induction_P Parameter: Age (day) Value: 7
  misc_feature: MA Experiment 20001247 PARAMETER Experiment Name: At_Far-red-induction_P Parameter: Light Value: Far-red vs. White
  misc_feature: MA Experiment 20001247 PARAMETER Experiment Name: At_Far-red-induction_P Parameter: Organism Value: A. thaliana
  misc_feature: MA Experiment 20001247 PARAMETER Experiment Name: At_Far-red-induction_P Parameter: Plant Line Value: Columbia
  misc_feature: MA Experiment 20001247 PARAMETER Experiment Name: At_Far-red-induction_P Parameter: Timepoint (hr) Value: 1
  misc_feature: MA Experiment 20001247 PARAMETER Experiment Name: At_Far-red-induction_P Parameter: Tissue Value: Whole Plant
  misc_feature: MA Experiment ID: 20001451 Result: Down-regulated in Transcription
  misc_feature: MA Experiment 20001451 PARAMETER Experiment Name: At_Far-red-induction_P Parameter: Age (day) Value: 7
  misc_feature: MA Experiment 20001451 PARAMETER Experiment Name: At_Far-red-induction_P Parameter: Light Value: Far-red vs. White
  misc_feature: MA Experiment 20001451 PARAMETER Experiment Name: At_Far-red-induction_P Parameter: Organism Value: A. thaliana
  misc_feature: MA Experiment 20001451 PARAMETER Experiment Name: At_Far-red-induction_P Parameter: Plant Line Value: Columbia
  misc_feature: MA Experiment 20001451 PARAMETER Experiment Name: At_Far-red-induction_P Parameter: Timepoint (hr) Value: 24
  misc_feature: MA Experiment 20001451 PARAMETER Experiment Name: At_Far-red-induction_P Parameter: Tissue Value: Whole Plant
  misc_feature: MA Experiment ID: 20001904 Result: Down-regulated in Transcription
  misc_feature: MA Experiment 20001904 PARAMETER Experiment Name: At_Drought_Reproduction_P Parameter: Age (day) Value: 37
  misc_feature: MA Experiment 20001904 PARAMETER Experiment Name: At_Drought_Reproduction_P Parameter: Organism Value: A. thaliana
  misc_feature: MA Experiment 20001904 PARAMETER Experiment Name: At_Drought_Reproduction_P Parameter: Plant Line Value: WS
  misc_feature: MA Experiment 20001904 PARAMETER Experiment Name: At_Drought_Reproduction_P Parameter: Timepoint (day) Value: 7
  misc_feature: MA Experiment 20001904 PARAMETER Experiment Name: At_Drought_Reproduction_P Parameter: Tissue Value: Rosettes
  misc_feature: MA Experiment 20001904 PARAMETER Experiment Name: At_Drought_Reproduction_P Parameter: Treatment Value: Drought vs. No Drought
  misc_feature: MA Experiment ID: 20001905 Result: Down-regulated in Transcription
  misc_feature: MA Experiment 20001905 PARAMETER Experiment Name: At_Drought_Reproduction_P Parameter: Age (day) Value: 40
  misc_feature: MA Experiment 20001905 PARAMETER Experiment Name: At_Drought_Reproduction_P Parameter: Organism Value: A. thaliana
  misc_feature: MA Experiment 20001905 PARAMETER Experiment Name: At_Drought_Reproduction_P Parameter: Plant Line Value: WS
  misc_feature: MA Experiment 20001905 PARAMETER Experiment Name: At_Drought_Reproduction_P Parameter: Timepoint (day) Value: 10
  misc_feature: MA Experiment 20001905 PARAMETER Experiment Name: At_Drought_Reproduction_P Parameter: Tissue Value: Rosettes
  misc_feature: MA Experiment 20001905 PARAMETER Experiment Name: At_Drought_Reproduction_P Parameter: Treatment Value: Drought vs. No Drought
  misc_feature: MA Experiment ID: 20001906 Result: Down-regulated in Transcription
  misc_feature: MA Experiment 20001906 PARAMETER Experiment Name: At_Drought_Reproduction_P Parameter: Age (day) Value: 35
  misc_feature: MA Experiment 20001906 PARAMETER Experiment Name: At_Drought_Reproduction_P Parameter: Organism Value: A. thaliana
  misc_feature: MA Experiment 20001906 PARAMETER Experiment Name: At_Drought_Reproduction_P Parameter: Plant Line Value: WS
  misc_feature: MA Experiment 20001906 PARAMETER Experiment Name: At_Drought_Reproduction_P Parameter: Timepoint (day) Value: 5
  misc_feature: MA Experiment 20001906 PARAMETER Experiment Name: At_Drought_Reproduction_P Parameter: Tissue Value: Siliques
  misc_feature: MA Experiment 20001906 PARAMETER Experiment Name: At_Drought_Reproduction_P Parameter: Treatment Value: Drought vs. No Drought
  misc_feature: MA Experiment ID: 20001907 Result: Down-regulated in Transcription
  misc_feature: MA Experiment 20001907 PARAMETER Experiment Name: At_Drought_Reproduction_P Parameter: Age (day) Value: 37
  misc_feature: MA Experiment 20001907 PARAMETER Experiment Name: At_Drought_Reproduction_P Parameter: Organism Value: A. thaliana
  misc_feature: MA Experiment 20001907 PARAMETER Experiment Name: At_Drought_Reproduction_P Parameter: Plant Line Value: WS
  misc_feature: MA Experiment 20001907 PARAMETER Experiment Name: At_Drought_Reproduction_P Parameter: Timepoint (day) Value: 7
  misc_feature: MA Experiment 20001907 PARAMETER Experiment Name: At_Drought_Reproduction_P Parameter: Tissue Value: Siliques
  misc_feature: MA Experiment 20001907 PARAMETER Experiment Name: At_Drought_Reproduction_P Parameter: Treatment Value: Drought vs. No Drought
  misc_feature: Pfam Name: Pkinase Pfam Description: Protein kinase domain
ggcccgaaggggttcgtatgtcttattactcctctttcttcttccttttcctcttctcctttctcacgagtttcagagtttctgctcaagatcccacttacgtataccacacctgtcaaaatacggcaaattacacaagtaacagcacttacaacaacaatctcaagacccttttggcttctctttcttcccgcaacgcttcctactccaccggattccaaaacgccaccgtcggccaagctccagacagagtcaccggacttttcaactgccgtggagatgtctcaacggaagtttgccgtagatgcgtctcctttgccgtcaacgacaccttaactcggtgtcctaaccagaaagaagccacactttattacgatgagtgtgtacttagatactctaaccagaatattctctcgacactaataaccaccggtggagttatcttggttaacacccggaatgtgacatctaaccaactagacctgttaagtgatttggttttgcctactctgaaccaagccgccaccgtagccttgaacagttccaaaaaattcggtacgagaaaaaacaattttactgcgttgcagagtttctatggactggttcagtgcacacctgatctcacgagacaagactgttcgcgttgtctccaactggtcatcaatcaaatacctactgacagaattggtgcaagaattattaatccgagctgtacttcaagatacgagatctacgcgttttacaccgaatccgccgttccaccaccaccaccaccaccgtcaatttgtactcctccagtttcagctcctccgcgatctggaaaagatgggaattcaaaggtgttagtgatagccattgttgtgcctattatagtggctgttctgctttttatagctggttattgtttccttacaagaagggcaaggaagagttattacacaccatctgcatttgctggagatgatatcacaacagcagactcactacagcttgattatagaacaattcaaactgcaacagatgattttgtagagagtaataagattggtcaaggtggatttggtgaggtttacaagggtactttatcggatgggactgaagttgcggtgaagcgactatcaaagtcatcaggacaaggtgaagtagagttcaagaacgaggttgttcttgttgcaaagctacaacatagaaatctggttagacttcttgggttttgtctagacggagaagaaagagtactggtctacgagtatgtgcccaacaaaagtcttgattacttcctctttgaccctgcaaagaaaggccagctggattggactcgacgatacaagattatcggtggagttgctcgagggattctgtatcttcatcaagactcacgactcacaatcatacaccgtgacctcaaagccagtaacattctcttggacgcggatatgaatcctaaaattgcagattttggaatggctaggatctttggattggaccaaaccgaagagaacacaagcagaatagttggtacctatggttacatgtctcccgagtatgcaatgcatggtcagtactcaatgaaatctgatgtctatagcttcggagtgttagttcttgagattataagtggcaagaagaatagcagcttctaccaaacagatggtgcacatgacttggtctcatatgcttgggggctttggagtaacgggcgaccattagaactcgtggatccagctattgtagaaaattgccaaaggaatgaagttgttcgatgtgtccatatcggtcttttatgtgttcaagaagatcctgctgagcgtccgacgttgtcaaccattgttctgatgctcactagtaacactgtgactttacccgtgccacggcaacccggtcttttctttcagagtagaattggaaaagacccgcttgatacagatacaacgagcaaatctcttctagggtctgttgacgatgcatccatcacagatatacatcctcgatgatgatgagtttttcccttcatacctgattcctgaatctattggtngtttgaaaaataaagttaaaaaacttcttttgntattagaatggtttggaatttgnaaatttgtaacccaccaagccaagtttttaa

SEQ ID NO: 108397 - protein, 663 aa, Arabidopsis thaliana
  peptide (1)..(663): Ceres Seq. ID no. 13667360
  misc_feature: Pfam Name: Pkinase Pfam Description: Protein kinase domain
  misc_feature (6)..(663): Homolog of NCBI NO: 18416076 NR Description: serine threonine kinase - like protein
  misc_feature (6)..(663): Homolog of NCBI NO: 30686066 NR Description: serine threonine kinase - like protein
  misc_feature (6)..(663): Homolog of NCBI NO: 30686073 NR Description: serine/threonine kinase - like protein thaliana] >gi|22136670|gb|AAM91654.1| putative serine/threonine
  misc_feature (6)..(663): Homolog of NCBI NO: 7488193 NR Description: probable serine/threonine-specific protein kinase
  misc_feature (297)..(663): Homolog of NCBI NO: 15236415 NR Description: hypothetical protein [Arabidopsis thaliana]
  misc_feature (12)..(269): Homolog of NCBI NO: 15236415 NR Description: hypothetical protein [Arabidopsis thaliana]
  misc_feature (302)..(663): Homolog of NCBI NO: 15236447 NR Description: receptor-like protein kinase, putative
  misc_feature (6)..(249): Homolog of NCBI NO: 15236447 NR Description: receptor-like protein kinase, putative
  misc_feature (273)..(309): Homolog of NCBI NO: 15236447 NR Description: receptor-like protein kinase, putative
  misc_feature (200)..(663): Homolog of NCBI NO: 22655168 NR Description: protein kinase-like protein [Arabidopsis thaliana]
PEGVRMSYYSSFFFLFLFSFLTSFRVSAQDPTYVYHTCQNTANYTSNSTYNNNLKTLLASLSSRNASYSTGFQNATVGQAPDRVTGLFNCRGDVSTEVCRRCVSFAVNDTLTRCPNQKEATLYYDECVLRYSNQNILSTLITTGGVILVNTRNVTSNQLDLLSDLVLPTLNQAATVALNSSKKFGTRKNNFTALQSFYGLVQCTPDLTRQDCSRCLQLVINQIPTDRIGARIINPSCTSRYEIYAFYTESAVPPPPPPPSICTPPVSAPPRSGKDGNSKVLVIAIVVPIIVAVLLFIAGYCFLTRRARKSYYTPSAFAGDDITTADSLQLDYRTIQTATDDFVESNKIGQGGFGEVYKGTLSDGTEVAVKRLSKSSGQGEVEFKNEVVLVAKLQHRNLVRLLGFCLDGEERVLVYEYVPNKSLDYFLFDPAKKGQLDWTRRYKIIGGVARGILYLHQDSRLTIIHRDLKASNILLDADMNPKIADFGMARIFGLDQTEENTSRIVGTYGYMSPEYAMHGQYSMKSDVYSFGVLVLEIISGKKNSSFYQTDGAHDLVSYAWGLWSNGRPLELVDPAIVENCQRNEVVRCVHIGLLCVQEDPAERPTLSTIVLMLTSNTVTLPVPRQPGLFFQSRIGKDPLDTDTTSKSLLGSVDDASITDIHPR

SEQ ID NO: 108398 - protein, 658 aa, Arabidopsis thaliana
  peptide (1)..(658): Ceres Seq. ID no. 13667361
  misc_feature: Pfam Name: Pkinase Pfam Description: Protein kinase domain
  misc_feature (1)..(658): Homolog of NCBI NO: 18416076 NR Description: serine threonine kinase - like protein
  misc_feature (1)..(658): Homolog of NCBI NO: 30686066 NR Description: serine threonine kinase - like protein
  misc_feature (1)..(658): Homolog of NCBI NO: 30686073 NR Description: serine/threonine kinase - like protein thaliana] >gi|22136670|gb|AAM91654.1| putative serine/threonine
  misc_feature (1)..(658): Homolog of NCBI NO: 7488193 NR Description: probable serine/threonine-specific protein kinase
  misc_feature (292)..(658): Homolog of NCBI NO: 15236415 NR Description: hypothetical protein [Arabidopsis thaliana]
  misc_feature (7)..(264): Homolog of NCBI NO: 15236415 NR Description: hypothetical protein [Arabidopsis thaliana]
  misc_feature (297)..(658): Homolog of NCBI NO: 15236447 NR Description: receptor-like protein kinase, putative
  misc_feature (1)..(244): Homolog of NCBI NO: 15236447 NR Description: receptor-like protein kinase, putative
  misc_feature (268)..(304): Homolog of NCBI NO: 15236447 NR Description: receptor-like protein kinase, putative
  misc_feature (195)..(658): Homolog of NCBI NO: 22655168 NR Description: protein kinase-like protein [Arabidopsis thaliana]
MSYYSSFFFLFLFSFLTSFRVSAQDPTYVYHTCQNTANYTSNSTYNNNLKTLLASLSSRNASYSTGFQNATVGQAPDRVTGLFNCRGDVSTEVCRRCVSFAVNDTLTRCPNQKEATLYYDECVLRYSNQNILSTLITTGGVILVNTRNVTSNQLDLLSDLVLPTLNQAATVALNSSKKFGTRKNNFTALQSFYGLVQCTPDLTRQDCSRCLQLVINQIPTDRIGARIINPSCTSRYEIYAFYTESAVPPPPPPPSICTPPVSAPPRSGKDGNSKVLVIAIVVPIIVAVLLFIAGYCFLTRRARKSYYTPSAFAGDDITTADSLQLDYRTIQTATDDFVESNKIGQGGFGEVYKGTLSDGTEVAVKRLSKSSGQGEVEFKNEVVLVAKLQHRNLVRLLGFCLDGEERVLVYEYVPNKSLDYFLFDPAKKGQLDWTRRYKIIGGVARGILYLHQDSRLTIIHRDLKASNILLDADMNPKIADFGMARIFGLDQTEENTSRIVGTYGYMSPEYAMHGQYSMKSDVYSFGVLVLEIISGKKNSSFYQTDGAHDLVSYAWGLWSNGRPLELVDPAIVENCQRNEVVRCVHIGLLCVQEDPAERPTLSTIVLMLTSNTVTLPVPRQPGLFFQSRIGKDPLDTDTTSKSLLGSVDDASITDIHPR

SEQ ID NO: 108399 - DNA, 2958 bp, Arabidopsis thaliana
  misc_feature (1)..(2958): Ceres Seq. ID no. 13667366
  misc_feature: MA Experiment ID: 20000307 Result: Down-regulated in Transcription
  misc_feature: MA Experiment 20000307 PARAMETER Experiment Name: At_Germinating_Seeds_Sub_P Parameter: Age (hr) Value: 24 vs. 0
  misc_feature: MA Experiment 20000307 PARAMETER Experiment Name: At_Germinating_Seeds_Sub_P Parameter: Organism Value: A. thaliana
  misc_feature: MA Experiment 20000307 PARAMETER Experiment Name: At_Germinating_Seeds_Sub_P Parameter: Plant Line Value: WS
  misc_feature: MA Experiment 20000307 PARAMETER Experiment Name: At_Germinating_Seeds_Sub_P Parameter: Tissue Value: Germinating Seeds
  misc_feature: MA Experiment ID: 20000314 Result: Down-regulated in Transcription
  misc_feature: MA Experiment 20000314 PARAMETER Experiment Name: At_14day_Shoots-Roots_Sub_P Parameter: Age (day) Value: 14
  misc_feature: MA Experiment 20000314 PARAMETER Experiment Name: At_14day_Shoots-Roots_Sub_P Parameter: Organism Value: A. thaliana
  misc_feature: MA Experiment 20000314 PARAMETER Experiment Name: At_14day_Shoots-Roots_Sub_P Parameter: Plant Line Value: WS
  misc_feature: MA Experiment 20000314 PARAMETER Experiment Name: At_14day_Shoots-Roots_Sub_P Parameter: Tissue Value: Roots vs. Whole Plant
  misc_feature: MA Experiment ID: 20000328 Result: Down-regulated in Transcription
  misc_feature: MA Experiment 20000328 PARAMETER Experiment Name: At_42deg_Heat_Sub_P Parameter: Age (day) Value: 14
  misc_feature: MA Experiment 20000328 PARAMETER Experiment Name: At_42deg_Heat_Sub_P Parameter: Organism Value: A. thaliana
  misc_feature: MA Experiment 20000328 PARAMETER Experiment Name: At_42deg_Heat_Sub_P Parameter: Plant Line Value: WS
  misc_feature: MA Experiment 20000328 PARAMETER Experiment Name: At_42deg_Heat_Sub_P Parameter: Temperature (deg C) Value: 42 vs. 22
  misc_feature: MA Experiment 20000328 PARAMETER Experiment Name: At_42deg_Heat_Sub_P Parameter: Timepoint (hr) Value: 6
  misc_feature: MA Experiment 20000328 PARAMETER Experiment Name: At_42deg_Heat_Sub_P Parameter: Tissue Value: Aerial
  misc_feature: MA Experiment ID: 20000355 Result: Down-regulated in Transcription
  misc_feature: MA Experiment 20000355 PARAMETER Experiment Name: At_Siliques_Sub_P Parameter: Age (day) Value: 21
  misc_feature: MA Experiment 20000355 PARAMETER Experiment Name: At_Siliques_Sub_P Parameter: Organism Value: A. thaliana
  misc_feature: MA Experiment 20000355 PARAMETER Experiment Name: At_Siliques_Sub_P Parameter: Plant Line Value: WS
  misc_feature: MA Experiment 20000355 PARAMETER Experiment Name: At_Siliques_Sub_P Parameter: Tissue Value: Less Than 5mm Siliques vs. Whole Plant
  misc_feature: Pfam Name: Pkinase Pfam Description: Protein kinase domain
gaaagagttgaatatgaccaatttggaaagtgttttaagtaaaggatttgaagtaaaagtgaagatcgatgatacatcatgtcaagaatgtttttcctctcatggaagttgtggtttcaatgaaaccttgtcattgggagccaaatgcagtccactcaatccaacaccaccaccaccaccaactggtaagtttcgtatatatcacaaattcacaatcatttaatatatattttcttgaacaactcgagatatttattaaatctttctcattctgtatacctttttattttatttttaaccctttacttagacatatcaaacaactatagtaagccatgtttataacatattatatatactaaaattattaaatgaaaaatttagtatattcaattgatttaaagggaataattagaaaatttaccttttgccaccaataaaaatttgtgtttgaacatccgatttttctcacaaatttataattatgaatttttaccttctgttatataaaacttatttatattttgacccccataaaaaggatttatgagtccactgtttaagacatttttcatgctctatagtcaatatcatgttcccgcaatatcctcaaatgcgcagcatgattcatgtactaaataggagtttttcaatttttagcttagggaaaaggaatgaaaaaacaaggaacaaaaagtcttgtcaaagtaaactaatactgacatcccaaattagtcttttgtgtcacaatcctcacttaacttggtcttcacgccctttgccgtttccacctcatctttatgcttatcgctctctctttatacatctttttgtttaaatcatttcctcttatctcttctcaacacaaaccaaaaccataaaacacgttgttcatagatctcaaacaaatcatgtactatcctctcagttctagtttgatgttcttcatcctcttctccttattctaccatcttccttgtgattcaagtaagtgtgagagtctgtttcagtgtgggaacatcaccgccagttttcctttctggggaggagatcgtcacaaacattgcggtcatccattgctagagcttcgctgcgaccaaaacaagagtacctctttattcatctcagaccaagagttctatgttctccatgtcgatcaaacatcttacagtcttacactcgccagaccagaccttttagattccttttgctcccttaaattcaccaacacaaccttaccaccagaaattttcgaactttctccggcctacaagagcgtcacattctaccactgttacccggttcttcctgacctttcgaattatacatgtcctgttataggtccaatctcagtgtctggaaaccctgaagatcacgaaacctgctttgccaattttgccgcaaacgttcctaagagtttcgtcacgaaagagaaaaaattgaatataaccaatttggaaagtgttttggaaaaaggatttgaggtgaacatgaatgtcatcatgaaagcatgtcaagaatgttcatactctaatgaatcctgtggcttcgatgaaaactttccatttgaagttaaatgcaaaccacaccattcaccaactgatacaggcctctctcctggagcaaaagcaggcattgcggttgcttctgtatcgggtttggccattcttatactcgcaggtttgttcttatacatcagacggagacggaagactcaggacgctcaatacacaagcaaaagcttgcctatcacatcatactcgagtagagacacatcaagaaatccaacttccacaacaatctcctccagcagcaatcactctcttcttccctcaatctctaaccttgcaaacggaagcgactactgtggagttcaagtctttagctacgaagaacttgaagaagcaactgagaatttctctagagaactcggagatggtggcttcggtactgtctactacggcgtgttgaaagacggacgagctgtagcagtgaaacgactctacgaaagatcactaaaacgtgtagaacaattcaagaacgaaatcgaaatcttgaaatcgctaaaacatccaaacctcgtgatcctctacggatgcacatcaagacacagcagagagcttctactagtctacgaatacatctcaaacggaactctagccgaacatctacacggcaaccgcgcagaagctcgtcctctctgctggtcaacccgattaaacatcgcaatcgaaaccgcaagcgcattatcattcctccacataaaaggaatcatacacagagacatcaagactactaacatactcttagacgataactaccaagtcaaagtcgccgatttcggactttcacggttgtttccaatggatcaaacacacatatcaaccgcaccacaaggcacaccaggctacgtggatccagagtattaccaatgttaccaattaaacgagaagagcgatgtctacagcttcggagtcgtactaacggaactaatctcatcaaaagaagcagtagacattactcgacaccgtcacgatatcaatctagcgaacatggctgtatctaagattcagaacaatgcattacacgagctagtggattcgagtttaggattcgataatgatccagaagttaggaggaagatgatggcggtgtcggaattagcgtttcgatgtttgcaacaagagagagatgttagacctgcgatggatgagattgtggagattttgagagggattaaggatgatgagaagaagcgtgtgttggtgaagtcgccggatgttgtggatattgaatgcggtggtggtgatgatgttggattgttgaggaatagtgttccgccgccgatttcgccggagactgataagtggactagtagttctgatacggcggcgagtttgtaattaggggttactgtaagtggtttttttaaatctggggttaaaaaaaaggattctt

SEQ ID NO: 108400 - protein, 663 aa, Arabidopsis thaliana
  peptide (1)..(663): Ceres Seq. ID no. 13667367
  misc_feature: Pfam Name: Pkinase Pfam Description: Protein kinase domain
  misc_feature (32)..(224): Homolog of NCBI NO: 30697422 NR Description: serine/threonine protein kinase family
  misc_feature (32)..(224): Homolog of NCBI NO: 12597754 NR Description: protein kinase, putative [Arabidopsis thaliana]
  misc_feature (18)..(237): Homolog of NCBI NO: 30697422 NR Description: serine/threonine protein kinase family
  misc_feature (18)..(237): Homolog of NCBI NO: 12597754 NR Description: protein kinase, putative [Arabidopsis thaliana]
  misc_feature (181)..(663): Homolog of NCBI NO: 25404646 NR Description: probable wall-associated kinase T4O24.5
  misc_feature (1)..(224): Homolog of NCBI NO: 25404646 NR Description: probable wall-associated kinase T4O24.5
  misc_feature (27)..(138): Homolog of NCBI NO: 30697422 NR Description: serine/threonine protein kinase family
  misc_feature (27)..(138): Homolog of NCBI NO: 12597754 NR Description: protein kinase, putative [Arabidopsis thaliana]
  misc_feature (27)..(138): Homolog of NCBI NO: 25404646 NR Description: probable wall-associated kinase T4O24.5
  misc_feature (9)..(662): Homolog of NCBI NO: 22327431 NR Description: serine/threonine protein kinase family thaliana] >gi|18175791|gb|AAL59928.1| putative protein kinase thaliana] >gi|22136902|gb|AAM91795.1| putative protein kinase
MYYPLSSSLMFFILFSLFYHLPCDSSKCESLFQCGNITASFPFWGGDRHKHCGHPLLELRCDQNKSTSLFISDQEFYVLHVDQTSYSLTLARPDLLDSFCSLKFTNTTLPPEIFELSPAYKSVTFYHCYPVLPDLSNYTCPVIGPISVSGNPEDHETCFANFAANVPKSFVTKEKKLNITNLESVLEKGFEVNMNVIMKACQECSYSNESCGFDENFPFEVKCKPHHSPTDTGLSPGAKAGIAVASVSGLAILILAGLFLYIRRRRKTQDAQYTSKSLPITSYSSRDTSRNPTSTTISSSSNHSLLPSISNLANGSDYCGVQVFSYEELEEATENFSRELGDGGFGTVYYGVLKDGRAVAVKRLYERSLKRVEQFKNEIEILKSLKHPNLVILYGCTSRHSRELLLVYEYISNGTLAEHLHGNRAEARPLCWSTRLNIAIETASALSFLHIKGIIHRDIKTTNILLDDNYQVKVADFGLSRLFPMDQTHISTAPQGTPGYVDPEYYQCYQLNEKSDVYSFGVVLTELISSKEAVDITRHRHDINLANMAVSKIQNNALHELVDSSLGFDNDPEVRRKMMAVSELAFRCLQQERDVRPAMDEIVEILRGIKDDEKKRVLVKSPDVVDIECGGGDDVGLLRNSVPPPISPETDKWTSSSDTAASL

SEQ ID NO: 108401 - protein, 654 aa, Arabidopsis thaliana
  peptide (1)..(654): Ceres Seq. ID no. 13667368
  misc_feature: Pfam Name: Pkinase Pfam Description: Protein kinase domain
  misc_feature (23)..(215): Homolog of NCBI NO: 30697422 NR Description: serine/threonine protein kinase family
  misc_feature (23)..(215): Homolog of NCBI NO: 12597754 NR Description: protein kinase, putative [Arabidopsis thaliana]
  misc_feature (9)..(228): Homolog of NCBI NO: 30697422 NR Description: serine/threonine protein kinase family
  misc_feature (9)..(228): Homolog of NCBI NO: 12597754 NR Description: protein kinase, putative [Arabidopsis thaliana]
  misc_feature (172)..(654): Homolog of NCBI NO: 25404646 NR Description: probable wall-associated kinase T4O24.5
  misc_feature (1)..(215): Homolog of NCBI NO: 25404646 NR Description: probable wall-associated kinase T4O24.5
  misc_feature (18)..(129): Homolog of NCBI NO: 30697422 NR Description: serine/threonine protein kinase family
  misc_feature (18)..(129): Homolog of NCBI NO: 12597754 NR Description: protein kinase, putative [Arabidopsis thaliana]
  misc_feature (18)..(129): Homolog of NCBI NO: 25404646 NR Description: probable wall-associated kinase T4O24.5
  misc_feature (1)..(653): Homolog of NCBI NO: 22327431 NR Description: serine/threonine protein kinase family thaliana] >gi|18175791|gb|AAL59928.1| putative protein kinase thaliana] >gi|22136902|gb|AAM91795.1| putative protein kinase
MFFILFSLFYHLPCDSSKCESLFQCGNITASFPFWGGDRHKHCGHPLLELRCDQNKSTSLFISDQEFYVLHVDQTSYSLTLARPDLLDSFCSLKFTNTTLPPEIFELSPAYKSVTFYHCYPVLPDLSNYTCPVIGPISVSGNPEDHETCFANFAANVPKSFVTKEKKLNITNLESVLEKGFEVNMNVIMKACQECSYSNESCGFDENFPFEVKCKPHHSPTDTGLSPGAKAGIAVASVSGLAILILAGLFLYIRRRRKTQDAQYTSKSLPITSYSSRDTSRNPTSTTISSSSNHSLLPSISNLANGSDYCGVQVFSYEELEEATENFSRELGDGGFGTVYYGVLKDGRAVAVKRLYERSLKRVEQFKNEIEILKSLKHPNLVILYGCTSRHSRELLLVYEYISNGTLAEHLHGNRAEARPLCWSTRLNIAIETASALSFLHIKGIIHRDIKTTNILLDDNYQVKVADFGLSRLFPMDQTHISTAPQGTPGYVDPEYYQCYQLNEKSDVYSFGVVLTELISSKEAVDITRHRHDINLANMAVSKIQNNALHELVDSSLGFDNDPEVRRKMMAVSELAFRCLQQERDVRPAMDEIVEILRGIKDDEKKRVLVKSPDVVDIECGGGDDVGLLRNSVPPPISPETDKWTSSSDTAASL

SEQ ID NO: 108402 - protein, 470 aa, Arabidopsis thaliana
  peptide (1)..(470): Ceres Seq. ID no. 13667369
  misc_feature: Pfam Name: Pkinase Pfam Description: Protein kinase domain
  misc_feature (1)..(31): Homolog of NCBI NO: 30697422 NR Description: serine/threonine protein kinase family
  misc_feature (1)..(31): Homolog of NCBI NO: 12597754 NR Description: protein kinase, putative [Arabidopsis thaliana]
  misc_feature (1)..(44): Homolog of NCBI NO: 30697422 NR Description: serine/threonine protein kinase family
  misc_feature (1)..(44): Homolog of NCBI NO: 12597754 NR Description: protein kinase, putative [Arabidopsis thaliana]
  misc_feature (1)..(470): Homolog of NCBI NO: 25404646 NR Description: probable wall-associated kinase T4O24.5
  misc_feature (1)..(31): Homolog of NCBI NO: 25404646 NR Description: probable wall-associated kinase T4O24.5
  misc_feature (1)..(469): Homolog of NCBI NO: 22327431 NR Description: serine/threonine protein kinase family thaliana] >gi|18175791|gb|AAL59928.1| putative protein kinase thaliana] >gi|22136902|gb|AAM91795.1| putative protein kinase
  misc_feature (1)..(469): Homolog of NCBI NO: 10177797 NR Description: contains similarity to protein
  misc_feature (60)..(438): Homolog of NCBI NO: 25402857 NR Description: protein F15H18.11 [imported] - Arabidopsis >gi|6714300|gb|AAF25996.1|AC013354_15 F15H18.11 [Arabidopsis
  misc_feature (1)..(38): Homolog of NCBI NO: 25402857 NR Description: protein F15H18.11 [imported] - Arabidopsis >gi|6714300|gb|AAF25996.1|AC013354_15 F15H18.11 [Arabidopsis
MNVIMKACQECSYSNESCGFDENFPFEVKCKPHHSPTDTGLSPGAKAGIAVASVSGLAILILAGLFLYIRRRRKTQDAQYTSKSLPITSYSSRDTSRNPTSTTISSSSNHSLLPSISNLANGSDYCGVQVFSYEELEEATENFSRELGDGGFGTVYYGVLKDGRAVAVKRLYERSLKRVEQFKNEIEILKSLKHPNLVILYGCTSRHSRELLLVYEYISNGTLAEHLHGNRAEARPLCWSTRLNIAIETASALSFLHIKGIIHRDIKTTNILLDDNYQVKVADFGLSRLFPMDQTHISTAPQGTPGYVDPEYYQCYQLNEKSDVYSFGVVLTELISSKEAVDITRHRHDINLANMAVSKIQNNALHELVDSSLGFDNDPEVRRKMMAVSELAFRCLQQERDVRPAMDEIVEILRGIKDDEKKRVLVKSPDVVDIECGGGDDVGLLRNSVPPPISPETDKWTSSSDTAASL

SEQ ID NO: 108403 - DNA, 1156 bp, Arabidopsis thaliana
  misc_feature (1)..(1156): Ceres Seq. ID no. 13667380
  misc_feature: MA Experiment ID: 20000307 Result: Down-regulated in Transcription
  misc_feature: MA Experiment 20000307 PARAMETER Experiment Name: At_Germinating_Seeds_Sub_P Parameter: Age (hr) Value: 24 vs. 0
  misc_feature: MA Experiment 20000307 PARAMETER Experiment Name: At_Germinating_Seeds_Sub_P Parameter: Organism Value: A. thaliana
  misc_feature: MA Experiment 20000307 PARAMETER Experiment Name: At_Germinating_Seeds_Sub_P Parameter: Plant Line Value: WS
  misc_feature: MA Experiment 20000307 PARAMETER Experiment Name: At_Germinating_Seeds_Sub_P Parameter: Tissue Value: Germinating Seeds
  misc_feature: Pfam Name: CorA Pfam Description: CorA-like Mg2+ transporter protein
aagatgttgcctaacgaagaacttgttccggtgaagaggattacaccccagtcatcgtggagttggatttccatagacgcgacgggaaaaaaaacggtgcttgacgttgacaaatatgtgattatgcaccgtgttcagatccacgctcgcgatctccggatacttgacccaaatctcttttacccttctgctattctgggtcgagaaagagccattgttcttaacttagagcatatcaaggcgatcatcactgccaaagaggttttgattcaggattcgtcagatgaaaatcttattccaaccctggaggagtttcagacacgcttatctgttggaaacaaggcacacggtggtcaattagatggtgatgtggttgaagaagatgaatccgcgtttgaatttcgggcactagaggttgctttggaagctatttgtagcttcctagctgcaaggacaatagaattagagaagtctgcttatcctgctttggatgaacttaccttgaagttaactagccgtaacttgctaagggtttgtaaattgaagagttccatgacccgattgacagctcaggtccaaaagataaaggatgagcttgaacagttgttggaagatgacgaagatatggctgaactctacctttcaaggaagctcgcgggtgcatcttcaccagctattgattctggtgaacacattaattggtatcctacgtccccaacaataggtgctaagatttccagagcaaagagccatttggtgaggtcagccacggttcgtggggacgacaaaaatgatgttgaagaagttgaaatgttgcttgaggcacactttatgcaaatcgacagaactttgaacaaattaaccgagctacgcgagtatgtggatgagacagaagatttccttaatatccagctagacagtagtcgaaatcagctaattaagttcgaaattattttaaccgctggaagcatctgtgtatcagtgtactctgtagttgttggcattctaggcatgaacattcctttcccgtggaacatcaaaaaacatatgttcaaatgggtggtgagcggcactgcaacagtttgcgcaatcttgttcgtgactataatgtcgttcgctcggtacaaaaagctctttggtttttgacgatggaagg

SEQ ID NO: 108404 - protein, 381 aa, Arabidopsis thaliana
  peptide (1)..(381): Ceres Seq. ID no. 13667381
  misc_feature: Pfam Name: CorA Pfam Description: CorA-like Mg2+ transporter protein
  misc_feature (2)..(381): Homolog of NCBI NO: 25360964 NR Description: MRS2-8 [Arabidopsis thaliana]
  misc_feature (2)..(380): Homolog of NCBI NO: 25360941 NR Description: MRS2-7 [Arabidopsis thaliana]
  misc_feature (2)..(380): Homolog of NCBI NO: 30682808 NR Description: expressed protein [Arabidopsis thaliana]
  misc_feature (2)..(274): Homolog of NCBI NO: 9759003 NR Description: contains similarity to unknown
  misc_feature (2)..(380): Homolog of NCBI NO: 11282359 NR Description: hypothetical protein F17I14.120 - Arabidopsis >gi|7671420|emb|CAB89361.1| putative protein [Arabidopsis
  misc_feature (8)..(380): Homolog of NCBI NO: 30698045 NR Description: expressed protein [Arabidopsis thaliana] contains similarity to unknown [Arabidopsis thaliana] >gi|17529326|gb|AAL38890.1| unknown
  misc_feature (2)..(169): Homolog of NCBI NO: 15242491 NR Description: expressed protein [Arabidopsis thaliana]
  misc_feature (175)..(306): Homolog of NCBI NO: 15242491 NR Description: expressed protein [Arabidopsis thaliana]
  misc_feature (2)..(314): Homolog of NCBI NO: 9758997 NR Description: gene_id:MTH16.11~unknown protein [Arabidopsis
  misc_feature (287)..(381): Homolog of NCBI NO: 15242491 NR Description: expressed protein [Arabidopsis thaliana]
KMLPNEELVPVKRITPQSSWSWISIDATGKKTVLDVDKYVIMHRVQIHARDLRILDPNLFYPSAILGRERAIVLNLEHIKAIITAKEVLIQDSSDENLIPTLEEFQTRLSVGNKAHGGQLDGDVVEEDESAFEFRALEVALEAICSFLAARTIELEKSAYPALDELTLKLTSRNLLRVCKLKSSMTRLTAQVQKIKDELEQLLEDDEDMAELYLSRKLAGASSPAIDSGEHINWYPTSPTIGAKISRAKSHLVRSATVRGDDKNDVEEVEMLLEAHFMQIDRTLNKLTELREYVDETEDFLNIQLDSSRNQLIKFEIILTAGSICVSVYSVVVGILGMNIPFPWNIKKHMFKWVVSGTATVCAILFVTIMSFARYKKLFGF

SEQ ID NO: 108405 - protein, 380 aa, Arabidopsis thaliana
  peptide (1)..(380): Ceres Seq. ID no. 13667382
  misc_feature: Pfam Name: CorA Pfam Description: CorA-like Mg2+ transporter protein
  misc_feature (1)..(380): Homolog of NCBI NO: 25360964 NR Description: MRS2-8 [Arabidopsis thaliana]
  misc_feature (1)..(379): Homolog of NCBI NO: 25360941 NR Description: MRS2-7 [Arabidopsis thaliana]
  misc_feature (1)..(379): Homolog of NCBI NO: 30682808 NR Description: expressed protein [Arabidopsis thaliana]
  misc_feature (1)..(273): Homolog of NCBI NO: 9759003 NR Description: contains similarity to unknown
  misc_feature (1)..(379): Homolog of NCBI NO: 11282359 NR Description: hypothetical protein F17I14.120 - Arabidopsis >gi|7671420|emb|CAB89361.1| putative protein [Arabidopsis
  misc_feature (7)..(379): Homolog of NCBI NO: 30698045 NR Description: expressed protein [Arabidopsis thaliana] contains similarity to unknown [Arabidopsis thaliana] >gi|17529326|gb|AAL38890.1| unknown
  misc_feature (1)..(168): Homolog of NCBI NO: 15242491 NR Description: expressed protein [Arabidopsis thaliana]
  misc_feature (174)..(305): Homolog of NCBI NO: 15242491 NR Description: expressed protein [Arabidopsis thaliana]
  misc_feature (1)..(313): Homolog of NCBI NO: 9758997 NR Description: gene_id:MTH16.11~unknown protein [Arabidopsis
  misc_feature (286)..(380): Homolog of NCBI NO: 15242491 NR Description: expressed protein [Arabidopsis thaliana]
MLPNEELVPVKRITPQSSWSWISIDATGKKTVLDVDKYVIMHRVQIHARDLRILDPNLFYPSAILGRERAIVLNLEHIKAIITAKEVLIQDSSDENLIPTLEEFQTRLSVGNKAHGGQLDGDVVEEDESAFEFRALEVALEAICSFLAARTIELEKSAYPALDELTLKLTSRNLLRVCKLKSSMTRLTAQVQKIKDELEQLLEDDEDMAELYLSRKLAGASSPAIDSGEHINWYPTSPTIGAKISRAKSHLVRSATVRGDDKNDVEEVEMLLEAHFMQIDRTLNKLTELREYVDETEDFLNIQLDSSRNQLIKFEIILTAGSICVSVYSVVVGILGMNIPFPWNIKKHMFKWVVSGTATVCAILFVTIMSFARYKKLFGF

SEQ ID NO: 108406 - protein, 340 aa, Arabidopsis thaliana
  peptide (1)..(340): Ceres Seq. ID no. 13667383
  misc_feature: Pfam Name: CorA Pfam Description: CorA-like Mg2+ transporter protein
  misc_feature (1)..(340): Homolog of NCBI NO: 25360964 NR Description: MRS2-8 [Arabidopsis thaliana]
  misc_feature (1)..(339): Homolog of NCBI NO: 25360941 NR Description: MRS2-7 [Arabidopsis thaliana]
  misc_feature (1)..(339): Homolog of NCBI NO: 30682808 NR Description: expressed protein [Arabidopsis thaliana]
  misc_feature (1)..(233): Homolog of NCBI NO: 9759003 NR Description: contains similarity to unknown
  misc_feature (1)..(339): Homolog of NCBI NO: 11282359 NR Description: hypothetical protein F17I14.120 - Arabidopsis >gi|7671420|emb|CAB89361.1| putative protein [Arabidopsis
  misc_feature (1)..(339): Homolog of NCBI NO: 30698045 NR Description: expressed protein [Arabidopsis thaliana] contains similarity to unknown [Arabidopsis thaliana] >gi|17529326|gb|AAL38890.1| unknown
  misc_feature (1)..(128): Homolog of NCBI NO: 15242491 NR Description: expressed protein [Arabidopsis thaliana]
  misc_feature (134)..(265): Homolog of NCBI NO: 15242491 NR Description: expressed protein [Arabidopsis thaliana]
  misc_feature (1)..(273): Homolog of NCBI NO: 9758997 NR Description: gene_id:MTH16.11~unknown protein [Arabidopsis
  misc_feature (246)..(340): Homolog of NCBI NO: 15242491 NR Description: expressed protein [Arabidopsis thaliana]
MHRVQIHARDLRILDPNLFYPSAILGRERAIVLNLEHIKAIITAKEVLIQDSSDENLIPTLEEFQTRLSVGNKAHGGQLDGDVVEEDESAFEFRALEVALEAICSFLAARTIELEKSAYPALDELTLKLTSRNLLRVCKLKSSMTRLTAQVQKIKDELEQLLEDDEDMAELYLSRKLAGASSPAIDSGEHINWYPTSPTIGAKISRAKSHLVRSATVRGDDKNDVEEVEMLLEAHFMQIDRTLNKLTELREYVDETEDFLNIQLDSSRNQLIKFEIILTAGSICVSVYSVVVGILGMNIPFPWNIKKHMFKWVVSGTATVCAILFVTIMSFARYKKLFGF

SEQ ID NO: 108407 - DNA, 1248 bp, Arabidopsis thaliana
  misc_feature (1)..(1248): Ceres Seq. ID no. 13667384
  misc_feature: MA Experiment ID: 20000328 Result: Down-regulated in Transcription
  misc_feature: MA Experiment 20000328 PARAMETER Experiment Name: At_42deg_Heat_Sub_P Parameter: Age (day) Value: 14
  misc_feature: MA Experiment 20000328 PARAMETER Experiment Name: At_42deg_Heat_Sub_P Parameter: Organism Value: A. thaliana
  misc_feature: MA Experiment 20000328 PARAMETER Experiment Name: At_42deg_Heat_Sub_P Parameter: Plant Line Value: WS
  misc_feature: MA Experiment 20000328 PARAMETER Experiment Name: At_42deg_Heat_Sub_P Parameter: Temperature (deg C) Value: 42 vs. 22
  misc_feature: MA Experiment 20000328 PARAMETER Experiment Name: At_42deg_Heat_Sub_P Parameter: Timepoint (hr) Value: 6
  misc_feature: MA Experiment 20000328 PARAMETER Experiment Name: At_42deg_Heat_Sub_P Parameter: Tissue Value: Aerial
  misc_feature: Pfam Name: CorA Pfam Description: CorA-like Mg2+ transporter protein
gatgtcacctgacggagaacttgttccggtggattcatcggcggtggtcacggcgaaaaggaagacatctcagttatcaaggagttggatttccatagacgcgacggggcaaaaaactgtgcttgacgttgataaacacgtgattatgcaccgtgttcagatccacgctcgtgatctccggatccttgacccgaatcttttttacccttctgctattttgggtcgagaaagagccattgttcttaacttagagcatatcaaggcgattatcactgccgaagaggttttgatccgagattcgtcagatgaaaatgttatccccgtcctagaggagtttcagagaagattgcctgtaggaaacgaggaacatggtgctcacggagatggtgatgtgggtgaagaagatgaatccccgtttgaattccgggcgctagaggtggccttggaagctatttgtagttttctagctgcaaggacaacagaactagagaagtctgcctatcctgctttggatgaacttaccttgaagataagtagccgtaacttggaaagagttcgtaaattgaagagtgccatgactcgtttgacagctcgggtccaaaaggtaagggatgagcttgaacagttgttggatgatgatggtgatatggctgatctctaccttacaaggaagcttgttggtgcatcttcatctgtcagcgtttcagatgaacccatttggtatcctacttccccaacaataggttctatgatttccagagcaagtagaatgagtttagccacggttcgtggagacgacgaaaccgatgttgaagagcttgaaatgttgcttgaggcatacttcatgcaaatagacagcactttgaacaaattaaccgagctacgcgagtatattgatgacacagaggattacattaacatccagttagacaatcatcgaaatcagctgattcagttagagctaatgttaagcgcaggaaccgtctgtgtatcagtgtactctatgatcgccggaatattcggcatgaacattcccaacacatggaaccacgaccatggttacattttcaaatgggtcgtaagtctcacgggaacattttgcatagtcttgttcgtgattatactttcgtacgctcggtttagaggactcatcggatcttaatgacaagagaggacaatttggtacatattttatagcagagaatgtgagagcagatcttgttttttggggtctcttctcgccagcat

SEQ ID NO: 108408 - protein, 386 aa, Arabidopsis thaliana
  peptide (1)..(386): Ceres Seq. ID no. 13667385
  misc_feature: Pfam Name: CorA Pfam Description: CorA-like Mg2+ transporter protein
  misc_feature (1)..(386): Homolog of NCBI NO: 25360941 NR Description: MRS2-7 [Arabidopsis thaliana]
  misc_feature (1)..(386): Homolog of NCBI NO: 30682808 NR Description: expressed protein [Arabidopsis thaliana]
  misc_feature (1)..(386): Homolog of NCBI NO: 11282359 NR Description: hypothetical protein F17I14.120 - Arabidopsis >gi|7671420|emb|CAB89361.1| putative protein [Arabidopsis
  misc_feature (1)..(318): Homolog of NCBI NO: 9758997 NR Description: gene_id:MTH16.11~unknown protein [Arabidopsis
  misc_feature (1)..(318): Homolog of NCBI NO: 30682814 NR Description: expressed protein [Arabidopsis thaliana]
  misc_feature (1)..(386): Homolog of NCBI NO: 30698045 NR Description: expressed protein [Arabidopsis thaliana] contains similarity to unknown [Arabidopsis thaliana] >gi|17529326|gb|AAL38890.1| unknown
  misc_feature (1)..(359): Homolog of NCBI NO: 30698047 NR Description: expressed protein [Arabidopsis thaliana]
  misc_feature (1)..(385): Homolog of NCBI NO: 25360964 NR Description: MRS2-8 [Arabidopsis thaliana]
  misc_feature (5)..(386): Homolog of NCBI NO: 40539050 NR Description: putative CorA-like Mg2+ transporter protein
  misc_feature (1)..(284): Homolog of NCBI NO: 9759003 NR Description: contains similarity to unknown
MSPDGELVPVDSSAVVTAKRKTSQLSRSWISIDATGQKTVLDVDKHVIMHRVQIHARDLRILDPNLFYPSAILGRERAIVLNLEHIKAIITAEEVLIRDSSDENVIPVLEEFQRRLPVGNEEHGAHGDGDVGEEDESPFEFRALEVALEAICSFLAARTTELEKSAYPALDELTLKISSRNLERVRKLKSAMTRLTARVQKVRDELEQLLDDDGDMADLYLTRKLVGASSSVSVSDEPIWYPTSPTIGSMISRASRMSLATVRGDDETDVEELEMLLEAYFMQIDSTLNKLTELREYIDDTEDYINIQLDNHRNQLIQLELMLSAGTVCVSVYSMIAGIFGMNIPNTWNHDHGYIFKWVVSLTGTFCIVLFVIILSYARFRGLIGS

SEQ ID NO: 108409 - protein, 338 aa, Arabidopsis thaliana
  peptide (1)..(338): Ceres Seq. ID no. 13667386
  misc_feature: Pfam Name: CorA Pfam Description: CorA-like Mg2+ transporter protein
  misc_feature (1)..(338): Homolog of NCBI NO: 25360941 NR Description: MRS2-7 [Arabidopsis thaliana]
  misc_feature (1)..(338): Homolog of NCBI NO: 30682808 NR Description: expressed protein [Arabidopsis thaliana]
  misc_feature (1)..(338): Homolog of NCBI NO: 11282359 NR Description: hypothetical protein F17I14.120 - Arabidopsis >gi|7671420|emb|CAB89361.1| putative protein [Arabidopsis
  misc_feature (1)..(270): Homolog of NCBI NO: 9758997 NR Description: gene_id:MTH16.11~unknown protein [Arabidopsis
  misc_feature (1)..(270): Homolog of NCBI NO: 30682814 NR Description: expressed protein [Arabidopsis thaliana]
  misc_feature (1)..(338): Homolog of NCBI NO: 30698045 NR Description: expressed protein [Arabidopsis thaliana] contains similarity to unknown [Arabidopsis thaliana] >gi|17529326|gb|AAL38890.1| unknown
  misc_feature (1)..(311): Homolog of NCBI NO: 30698047 NR Description: expressed protein [Arabidopsis thaliana]
  misc_feature (1)..(337): Homolog of NCBI NO: 25360964 NR Description: MRS2-8 [Arabidopsis thaliana]
  misc_feature (1)..(338): Homolog of NCBI NO: 40539050 NR Description: putative CorA-like Mg2+ transporter protein
  misc_feature (1)..(236): Homolog of NCBI NO: 9759003 NR Description: contains similarity to unknown
MHRVQIHARDLRILDPNLFYPSAILGRERAIVLNLEHIKAIITAEEVLIRDSSDENVIPVLEEFQRRLPVGNEEHGAHGDGDVGEEDESPFEFRALEVALEAICSFLAARTTELEKSAYPALDELTLKISSRNLERVRKLKSAMTRLTARVQKVRDELEQLLDDDGDMADLYLTRKLVGASSSVSVSDEPIWYPTSPTIGSMISRASRMSLATVRGDDETDVEELEMLLEAYFMQIDSTLNKLTELREYIDDTEDYINIQLDNHRNQLIQLELMLSAGTVCVSVYSMIAGIFGMNIPNTWNHDHGYIFKWVVSLTGTFCIVLFVIILSYARFRGLIGS

SEQ ID NO: 108410 - protein, 195 aa, Arabidopsis thaliana
  peptide (1)..(195): Ceres Seq. ID no. 13667387
  misc_feature: Pfam Name: CorA Pfam Description: CorA-like Mg2+ transporter protein
  misc_feature (1)..(195): Homolog of NCBI NO: 25360941 NR Description: MRS2-7 [Arabidopsis thaliana]
  misc_feature (1)..(195): Homolog of NCBI NO: 30682808 NR Description: expressed protein [Arabidopsis thaliana]
  misc_feature (1)..(195): Homolog of NCBI NO: 11282359 NR Description: hypothetical protein F17I14.120 - Arabidopsis >gi|7671420|emb|CAB89361.1| putative protein [Arabidopsis
  misc_feature (1)..(127): Homolog of NCBI NO: 9758997 NR Description: gene_id:MTH16.11~unknown protein [Arabidopsis
  misc_feature (1)..(127): Homolog of NCBI NO: 30682814 NR Description: expressed protein [Arabidopsis thaliana]
  misc_feature (1)..(195): Homolog of NCBI NO: 30698045 NR Description: expressed protein [Arabidopsis thaliana] contains similarity to unknown [Arabidopsis thaliana] >gi|17529326|gb|AAL38890.1| unknown
  misc_feature (1)..(168): Homolog of NCBI NO: 30698047 NR Description: expressed protein [Arabidopsis thaliana]
  misc_feature (1)..(194): Homolog of NCBI NO: 25360964 NR Description: MRS2-8 [Arabidopsis thaliana]
  misc_feature (1)..(195): Homolog of NCBI NO: 40539050 NR Description: putative CorA-like Mg2+ transporter protein
  misc_feature (1)..(93): Homolog of NCBI NO: 9759003 NR Description: contains similarity to unknown
MTRLTARVQKVRDELEQLLDDDGDMADLYLTRKLVGASSSVSVSDEPIWYPTSPTIGSMISRASRMSLATVRGDDETDVEELEMLLEAYFMQIDSTLNKLTELREYIDDTEDYINIQLDNHRNQLIQLELMLSAGTVCVSVYSMIAGIFGMNIPNTWNHDHGYIFKWVVSLTGTFCIVLFVIILSYARFRGLIGS

SEQ ID NO: 108411 - DNA, 2129 bp, Arabidopsis thaliana
  misc_feature (1)..(2129): Ceres Seq. ID no. 13667403
  misc_feature: MA Experiment ID: 20000179 Result: Up-regulated in Transcription
  misc_feature: MA Experiment 20000179 PARAMETER Experiment Name: At_Germinating_Seeds_P Parameter: Age (hr) Value: 6 vs. 0
  misc_feature: MA Experiment 20000179 PARAMETER Experiment Name: At_Germinating_Seeds_P Parameter: Tissue Value: Germinating Seeds
  misc_feature: MA Experiment ID: 20000182 Result: Down-regulated in Transcription
  misc_feature: MA Experiment 20000182 PARAMETER Experiment Name: At_2mM_SA_P Parameter: Age (day) Value: 14
  misc_feature: MA Experiment 20000182 PARAMETER Experiment Name: At_2mM_SA_P Parameter: Organism Value: A. thaliana
  misc_feature: MA Experiment 20000182 PARAMETER Experiment Name: At_2mM_SA_P Parameter: Plant Line Value: WS
  misc_feature: MA Experiment 20000182 PARAMETER Experiment Name: At_2mM_SA_P Parameter: Timepoint (hr) Value: 6
  misc_feature: MA Experiment 20000182 PARAMETER Experiment Name: At_2mM_SA_P Parameter: Tissue Value: Aerial
  misc_feature: MA Experiment 20000182 PARAMETER Experiment Name: At_2mM_SA_P Parameter: Treatment Value: 2mM SA vs. No Treatment
  misc_feature: MA Experiment ID: 20000184 Result: Down-regulated in Transcription
  misc_feature: MA Experiment 20000184 PARAMETER Experiment Name: At_Shoots__P Parameter: Age (day) Value: 7
  misc_feature: MA Experiment 20000184 PARAMETER Experiment Name: At_Shoots__P Parameter: Tissue Value: Shoots vs. Whole Plant
  misc_feature: MA Experiment ID: 20000234 Result: Up-regulated in Transcription
  misc_feature: MA Experiment 20000234 PARAMETER Experiment Name: At_Siliques_P Parameter: Age (day) Value: 21
  misc_feature: MA Experiment 20000234 PARAMETER Experiment Name: At_Siliques_P Parameter: Organism Value: A. thaliana
  misc_feature: MA Experiment 20000234 PARAMETER Experiment Name: At_Siliques_P Parameter: Plant Line Value: WS
  misc_feature: MA Experiment 20000234 PARAMETER Experiment Name: At_Siliques_P Parameter: Tissue Value: Less Than 5mm Siliques vs. Whole Plant
  misc_feature: MA Experiment ID: 20000235 Result: Up-regulated in Transcription
  misc_feature: MA Experiment 20000235 PARAMETER Experiment Name: At_Siliques_P Parameter: Age (day) Value: 21
  misc_feature: MA Experiment 20000235 PARAMETER Experiment Name: At_Siliques_P Parameter: Organism Value: A. thaliana
  misc_feature: MA Experiment 20000235 PARAMETER Experiment Name: At_Siliques_P Parameter: Plant Line Value: WS
  misc_feature: MA Experiment 20000235 PARAMETER Experiment Name: At_Siliques_P Parameter: Tissue Value: 5-10mm Siliques vs. Whole Plant
  misc_feature: MA Experiment ID: 20000438 Result: Down-regulated in Transcription
  misc_feature: MA Experiment 20000438 PARAMETER Experiment Name: At_Shoots__P Parameter: Age (day) Value: 14
  misc_feature: MA Experiment 20000438 PARAMETER Experiment Name: At_Shoots__P Parameter: Tissue Value: Shoots vs. Whole Plant
  misc_feature: MA Experiment ID: 20000495 Result: Up-regulated in Transcription
  misc_feature: MA Experiment 20000495 PARAMETER Experiment Name: At_Guard_Cells_P Parameter: Harvest Date Value: 8/2/2002
  misc_feature: MA Experiment 20000495 PARAMETER Experiment Name: At_Guard_Cells_P Parameter: Organism Value: A. thaliana
  misc_feature: MA Experiment 20000495 PARAMETER Experiment Name: At_Guard_Cells_P Parameter: Tissue Value: Guard Cells vs. Leaves
  misc_feature: MA Experiment ID: 20001247 Result: Down-regulated in Transcription
  misc_feature: MA Experiment 20001247 PARAMETER Experiment Name: At_Far-red-induction_P Parameter: Age (day) Value: 7
  misc_feature: MA Experiment 20001247 PARAMETER Experiment Name: At_Far-red-induction_P Parameter: Light Value: Far-red vs. White
  misc_feature: MA Experiment 20001247 PARAMETER Experiment Name: At_Far-red-induction_P Parameter: Organism Value: A. thaliana
  misc_feature: MA Experiment 20001247 PARAMETER Experiment Name: At_Far-red-induction_P Parameter: Plant Line Value: Columbia
  misc_feature: MA Experiment 20001247 PARAMETER Experiment Name: At_Far-red-induction_P Parameter: Timepoint (hr) Value: 1
  misc_feature: MA Experiment 20001247 PARAMETER Experiment Name: At_Far-red-induction_P Parameter: Tissue Value: Whole Plant
  misc_feature: MA Experiment ID: 20001248 Result: Up-regulated in Transcription
  misc_feature: MA Experiment 20001248 PARAMETER Experiment Name: At_Far-red-induction_P Parameter: Age (day) Value: 7
  misc_feature: MA Experiment 20001248 PARAMETER Experiment Name: At_Far-red-induction_P Parameter: Light Value: Far-red vs. White
  misc_feature: MA Experiment 20001248 PARAMETER Experiment Name: At_Far-red-induction_P Parameter: Organism Value: A. thaliana
  misc_feature: MA Experiment 20001248 PARAMETER Experiment Name: At_Far-red-induction_P Parameter: Plant Line Value: Columbia
  misc_feature: MA Experiment 20001248 PARAMETER Experiment Name: At_Far-red-induction_P Parameter: Timepoint (hr) Value: 4
  misc_feature: MA Experiment 20001248 PARAMETER Experiment Name: At_Far-red-induction_P Parameter: Tissue Value: Whole Plant
  misc_feature: MA Experiment ID: 20001451 Result: Down-regulated in Transcription
  misc_feature: MA Experiment 20001451 PARAMETER Experiment Name: At_Far-red-induction_P Parameter: Age (day) Value: 7
  misc_feature: MA Experiment 20001451 PARAMETER Experiment Name: At_Far-red-induction_P Parameter: Light Value: Far-red vs. White
  misc_feature: MA Experiment 20001451 PARAMETER Experiment Name: At_Far-red-induction_P Parameter: Organism Value: A. thaliana
  misc_feature: MA Experiment 20001451 PARAMETER Experiment Name: At_Far-red-induction_P Parameter: Plant Line Value: Columbia
  misc_feature: MA Experiment 20001451 PARAMETER Experiment Name: At_Far-red-induction_P Parameter: Timepoint (hr) Value: 24
  misc_feature: MA Experiment 20001451 PARAMETER Experiment Name: At_Far-red-induction_P Parameter: Tissue Value: Whole Plant
  misc_feature: MA Experiment ID: 20001557 Result: Up-regulated in Transcription
  misc_feature: MA Experiment 20001557 PARAMETER Experiment Name: At_Drought_Soil_Dry_P Parameter: Age (day) Value: 27
  misc_feature: MA Experiment 20001557 PARAMETER Experiment Name: At_Drought_Soil_Dry_P Parameter: Organism Value: A. thaliana
  misc_feature: MA Experiment 20001557 PARAMETER Experiment Name: At_Drought_Soil_Dry_P Parameter: Plant Line Value: WS
  misc_feature: MA Experiment 20001557 PARAMETER Experiment Name: At_Drought_Soil_Dry_P Parameter: Post Timepoint (hr) Value: 3
  misc_feature: MA Experiment 20001557 PARAMETER Experiment Name: At_Drought_Soil_Dry_P Parameter: Post-Treatment Value: Re-Water vs. No Drought
  misc_feature: MA Experiment 20001557 PARAMETER Experiment Name: At_Drought_Soil_Dry_P Parameter: Timepoint (day) Value: 13
  misc_feature: MA Experiment 20001557 PARAMETER Experiment Name: At_Drought_Soil_Dry_P Parameter: Treatment Value: Drought vs. No Drought
  misc_feature: MA Experiment ID: 20001560 Result: Up-regulated in Transcription
  misc_feature: MA Experiment 20001560 PARAMETER Experiment Name: At_Drought_Soil_Dry_P Parameter: Age (day) Value: 28
  misc_feature: MA Experiment 20001560 PARAMETER Experiment Name: At_Drought_Soil_Dry_P Parameter: Organism Value: A. thaliana
  misc_feature: MA Experiment 20001560 PARAMETER Experiment Name: At_Drought_Soil_Dry_P Parameter: Plant Line Value: WS
  misc_feature: MA Experiment 20001560 PARAMETER Experiment Name: At_Drought_Soil_Dry_P Parameter: Post Timepoint (hr) Value: None
  misc_feature: MA Experiment 20001560 PARAMETER Experiment Name: At_Drought_Soil_Dry_P Parameter: Post-Treatment Value: None
  misc_feature: MA Experiment 20001560 PARAMETER Experiment Name: At_Drought_Soil_Dry_P Parameter: Timepoint (day) Value: 14
  misc_feature: MA Experiment 20001560 PARAMETER Experiment Name: At_Drought_Soil_Dry_P Parameter: Treatment Value: Drought vs. No Drought
  misc_feature: MA Experiment ID: 20001906 Result: Down-regulated in Transcription
  misc_feature: MA Experiment 20001906 PARAMETER Experiment Name: At_Drought_Reproduction_P Parameter: Age (day) Value: 35
  misc_feature: MA Experiment 20001906 PARAMETER Experiment Name: At_Drought_Reproduction_P Parameter: Organism Value: A. thaliana
  misc_feature: MA Experiment 20001906 PARAMETER Experiment Name: At_Drought_Reproduction_P Parameter: Plant Line Value: WS
  misc_feature: MA Experiment 20001906 PARAMETER Experiment Name: At_Drought_Reproduction_P Parameter: Timepoint (day) Value: 5
  misc_feature: MA Experiment 20001906 PARAMETER Experiment Name: At_Drought_Reproduction_P Parameter: Tissue Value: Siliques
  misc_feature: MA Experiment 20001906 PARAMETER Experiment Name: At_Drought_Reproduction_P Parameter: Treatment Value: Drought vs. No Drought
  misc_feature: MA Experiment ID: 20001911 Result: Down-regulated in Transcription
  misc_feature: MA Experiment 20001911 PARAMETER Experiment Name: At_Drought_Reproduction_P Parameter: Age (day) Value: 40
  misc_feature: MA Experiment 20001911 PARAMETER Experiment Name: At_Drought_Reproduction_P Parameter: Organism Value: A. thaliana
  misc_feature: MA Experiment 20001911 PARAMETER Experiment Name: At_Drought_Reproduction_P Parameter: Plant Line Value: WS
  misc_feature: MA Experiment 20001911 PARAMETER Experiment Name: At_Drought_Reproduction_P Parameter: Timepoint (day) Value: 10
  misc_feature: MA Experiment 20001911 PARAMETER Experiment Name: At_Drought_Reproduction_P Parameter: Tissue Value: Flowers
  misc_feature: MA Experiment 20001911 PARAMETER Experiment Name: At_Drought_Reproduction_P Parameter: Treatment Value: Drought vs. No Drought
cttctctcttttatcttacgactctcacttcttatctcaaatctacttcaactctatttccagtctccacattttcccacaaatttcaactcttgttctcttcctccaaagtaaaaaacaaaacactgcaagtgaggtttggttttggtgttatagaattatgaagagcgggaagcaatcttcgcaacctgaaaagggtacttccaggatcttgtcactgactgtcctgtttatcgcattttgcggtttctccttctacctcggtggtatattttgctctgagagagacaagattgtagccaaggatgtcacaaggacgactacaaaggctgtagcttcccctaaagaacctacagctactcctattcaaatcaaatccgtttctttcccggagtgcgggtcagagttccaagattacaccccgtgcaccgatccaaagaggtggaagaagtatggtgtccatcgcttaagtttcttggagcgtcattgtcctccggtatatgaaaagaatgagtgtttgattccaccaccagacgggtataaaccgcctataagatggcccaagagccgagaacagtgttggtacaggaacgtgccttatgattggatcaataagcaaaagtctaaccagcattggcttaagaaagaaggagataagttccatttccctggtggtggtaccatgttccctcgtggagttagtcactatgttgatttgatgcaagatctgattcctgaaatgaaagacggaacagtcaggaccgccattgatactggctgtggggttgcgagctggggaggcgatcttttggaccgtgggatactatcactctctcttgctccaagagataaccatgaagctcaggttcaatttgctcttgaacgtggaattcctgcgattctcgggatcatctctacgcaacgtctcccttttccttcaaatgcatttgatatggctcattgttcaagatgtcttattccctggacagaatttggtggaatctatttacttgagattcaccgtatagttcgacctggaggtttttgggttctttctggtccacctgtgaactataatagacgatggcgtggatggaacacaaccatggaagatcagaaatctgactacaacaagcttcagtcacttctaacctccatgtgtttcaaaaagtacgctcaaaaagatgacatagccgtgtggcagaaactctcagacaaatcttgctatgacaaaatcgctaagaacatggaagcttaccctcccaaatgtgacgacagtatagaacctgattctgcttggtacactccactccgtccttgcgtggttgccccgacacctaaagtcaagaagtctggtctcggatcaatcccaaaatggcccgagaggttacatgtcgcgcccgagagaatcggtgatgttcacggaagggaagtgccgaacagtttgaaacacgatgatggtaaatggaagaacagagttaagcattacaagaaagttttaccagctcttgggacagacaagataagaaatgttatggatatgaacactgtttatgaaggtttctctgcggccctcattgaggatcccatttgggtcatgaacgttgtatcatcgtacagcgcaaattcgcttcctgttgtctttgatcgcggtctcatcgggacttaccacgactggtgcgaagctttctcaacgtatccaagaacatatgatcttcttcacctcgacagtctttttaccttggagagtcacaggtgtgagatgaagtacattttgctagagatggacaggatcttgcggccgagtggatatgttataatccgagaatcgagttatttcatggacgcaatcacaacgttagcgaaagggataaggtggagttgccggagagaggagactgagtatgcagtcaaaagtgagaagattctggtttgccagaaaaagctatggttttcgtcaaaccaaacctcttgatgagaccacctgtatcatagtgtttatcatctcctgtgatgcacactacagagagaaggatctagtcctttgagtccaagatatagctctataaacaatctcctttttttgttctctttaatttcttgggtatttcacgggcggccgcgaattc

SEQ ID NO: 108412 - protein, 657 aa, Arabidopsis thaliana
  peptide (1)..(657): Ceres Seq. ID no. 13667404
  misc_feature (138)..(647): Pfam Name: Putative methyltransferase Pfam Description: Putative methyltransferase
  misc_feature (64)..(657): Homolog of NCBI NO: 18415244 NR Description: ERD3 protein [Arabidopsis thaliana] ERD3 protein [Arabidopsis thaliana] >gi|15320410|dbj|BAB63914.1|
  misc_feature (146)..(475): Homolog of NCBI NO: 7487142 NR Description: hypothetical protein T18B16.90 - Arabidopsis
  misc_feature (121)..(650): Homolog of NCBI NO: 15225560 NR Description: dehydration-induced protein family [Arabidopsis
  misc_feature (129)..(650): Homolog of NCBI NO: 24413975 NR Description: hypothetical protein~similar to Oryza sativa
  misc_feature (129)..(650): Homolog of NCBI NO: 15235080 NR Description: dehydration-induced protein family [Arabidopsis
  misc_feature (117)..(650): Homolog of NCBI NO: 15236921 NR Description: dehydration-induced protein family [Arabidopsis
  misc_feature (129)..(650): Homolog of NCBI NO: 18398763 NR Description: dehydration-induced protein family [Arabidopsis
  misc_feature (309)..(650): Homolog of NCBI NO: 9665165 NR Description: Unknown Protein [Arabidopsis thaliana]
  misc_feature (129)..(332): Homolog of NCBI NO: 9665165 NR Description: Unknown Protein [Arabidopsis thaliana]
  misc_feature (125)..(657): Homolog of NCBI NO: 18396075 NR Description: dehydration-induced protein family [Arabidopsis
FSLLSYDSHFLSQIYFNSISSLHIFPQISTLVLFLQSKKQNTASEVWFWCYRIMKSGKQSSQPEKGTSRILSLTVLFIAFCGFSFYLGGIFCSERDKIVAKDVTRTTTKAVASPKEPTATPIQIKSVSFPECGSEFQDYTPCTDPKRWKKYGVHRLSFLERHCPPVYEKNECLIPPPDGYKPPIRWPKSREQCWYRNVPYDWINKQKSNQHWLKKEGDKFHFPGGGTMFPRGVSHYVDLMQDLIPEMKDGTVRTAIDTGCGVASWGGDLLDRGILSLSLAPRDNHEAQVQFALERGIPAILGIISTQRLPFPSNAFDMAHCSRCLIPWTEFGGIYLLEIHRIVRPGGFWVLSGPPVNYNRRWRGWNTTMEDQKSDYNKLQSLLTSMCFKKYAQKDDIAVWQKLSDKSCYDKIAKNMEAYPPKCDDSIEPDSAWYTPLRPCVVAPTPKVKKSGLGSIPKWPERLHVAPERIGDVHGREVPNSLKHDDGKWKNRVKHYKKVLPALGTDKIRNVMDMNTVYEGFSAALIEDPIWVMNVVSSYSANSLPVVFDRGLIGTYHDWCEAFSTYPRTYDLLHLDSLFTLESHRCEMKYILLEMDRILRPSGYVIIRESSYFMDAITTLAKGIRWSCRREETEYAVKSEKILVCQKKLWFSSNQTS

SEQ ID NO: 108413 - protein, 604 aa, Arabidopsis thaliana
  peptide (1)..(604): Ceres Seq. ID no. 13667405
  misc_feature (85)..(594): Pfam Name: Putative methyltransferase Pfam Description: Putative methyltransferase
  misc_feature (11)..(604): Homolog of NCBI NO: 18415244 NR Description: ERD3 protein [Arabidopsis thaliana] ERD3 protein [Arabidopsis thaliana] >gi|15320410|dbj|BAB63914.1|
  misc_feature (93)..(422): Homolog of NCBI NO: 7487142 NR Description: hypothetical protein T18B16.90 - Arabidopsis
  misc_feature (68)..(597): Homolog of NCBI NO: 15225560 NR Description: dehydration-induced protein family [Arabidopsis
  misc_feature (76)..(597): Homolog of NCBI NO: 24413975 NR Description: hypothetical protein~similar to Oryza sativa
  misc_feature (76)..(597): Homolog of NCBI NO: 15235080 NR Description: dehydration-induced protein family [Arabidopsis
  misc_feature (64)..(597): Homolog of NCBI NO: 15236921 NR Description: dehydration-induced protein family [Arabidopsis
  misc_feature (76)..(597): Homolog of NCBI NO: 18398763 NR Description: dehydration-induced protein family [Arabidopsis
  misc_feature (256)..(597): Homolog of NCBI NO: 9665165 NR Description: Unknown Protein [Arabidopsis thaliana]
  misc_feature (76)..(279): Homolog of NCBI NO: 9665165 NR Description: Unknown Protein [Arabidopsis thaliana]
  misc_feature (72)..(604): Homolog of NCBI NO: 18396075 NR Description: dehydration-induced protein family [Arabidopsis
MKSGKQSSQPEKGTSRILSLTVLFIAFCGFSFYLGGIFCSERDKIVAKDVTRTTTKAVASPKEPTATPIQIKSVSFPECGSEFQDYTPCTDPKRWKKYGVHRLSFLERHCPPVYEKNECLIPPPDGYKPPIRWPKSREQCWYRNVPYDWINKQKSNQHWLKKEGDKFHFPGGGTMFPRGVSHYVDLMQDLIPEMKDGTVRTAIDTGCGVASWGGDLLDRGILSLSLAPRDNHEAQVQFALERGIPAILGIISTQRLPFPSNAFDMAHCSRCLIPWTEFGGIYLLEIHRIVRPGGFWVLSGPPVNYNRRWRGWNTTMEDQKSDYNKLQSLLTSMCFKKYAQKDDIAVWQKLSDKSCYDKIAKNMEAYPPKCDDSIEPDSAWYTPLRPCVVAPTPKVKKSGLGSIPKWPERLHVAPERIGDVHGREVPNSLKHDDGKWKNRVKHYKKVLPALGTDKIRNVMDMNTVYEGFSAALIEDPIWVMNVVSSYSANSLPVVFDRGLIGTYHDWCEAFSTYPRTYDLLHLDSLFTLESHRCEMKYILLEMDRILRPSGYVIIRESSYFMDAITTLAKGIRWSCRREETEYAVKSEKILVCQKKLWFSSNQTS

SEQ ID NO: 108414 - protein, 430 aa, Arabidopsis thaliana
  peptide (1)..(430): Ceres Seq. ID no. 13667406
  misc_feature (1)..(420): Pfam Name: Putative methyltransferase Pfam Description: Putative methyltransferase
  misc_feature (1)..(430): Homolog of NCBI NO: 18415244 NR Description: ERD3 protein [Arabidopsis thaliana] ERD3 protein [Arabidopsis thaliana] >gi|15320410|dbj|BAB63914.1|
  misc_feature (1)..(248): Homolog of NCBI NO: 7487142 NR Description: hypothetical protein T18B16.90 - Arabidopsis
  misc_feature (1)..(423): Homolog of NCBI NO: 15225560 NR Description: dehydration-induced protein family [Arabidopsis
  misc_feature (1)..(423): Homolog of NCBI NO: 24413975 NR Description: hypothetical protein~similar to Oryza sativa
  misc_feature (1)..(423): Homolog of NCBI NO: 15235080 NR Description: dehydration-induced protein family [Arabidopsis
  misc_feature (1)..(423): Homolog of NCBI NO: 15236921 NR Description: dehydration-induced protein family [Arabidopsis
  misc_feature (1)..(423): Homolog of NCBI NO: 18398763 NR Description: dehydration-induced protein family [Arabidopsis
  misc_feature (82)..(423): Homolog of NCBI NO: 9665165 NR Description: Unknown Protein [Arabidopsis thaliana]
  misc_feature (1)..(105): Homolog of NCBI NO: 9665165 NR Description: Unknown Protein [Arabidopsis thaliana]
  misc_feature (1)..(430): Homolog of NCBI NO: 18396075 NR Description: dehydration-induced protein family [Arabidopsis
MFPRGVSHYVDLMQDLIPEMKDGTVRTAIDTGCGVASWGGDLLDRGILSLSLAPRDNHEAQVQFALERGIPAILGIISTQRLPFPSNAFDMAHCSRCLIPWTEFGGIYLLEIHRIVRPGGFWVLSGPPVNYNRRWRGWNTTMEDQKSDYNKLQSLLTSMCFKKYAQKDDIAVWQKLSDKSCYDKIAKNMEAYPPKCDDSIEPDSAWYTPLRPCVVAPTPKVKKSGLGSIPKWPERLHVAPERIGDVHGREVPNSLKHDDGKWKNRVKHYKKVLPALGTDKIRNVMDMNTVYEGFSAALIEDPIWVMNVVSSYSANSLPVVFDRGLIGTYHDWCEAFSTYPRTYDLLHLDSLFTLESHRCEMKYILLEMDRILRPSGYVIIRESSYFMDAITTLAKGIRWSCRREETEYAVKSEKILVCQKKLWFSSNQTS

SEQ ID NO: 108415 - DNA, 1490 bp, Arabidopsis thaliana
  misc_feature (1)..(1490): Ceres Seq. ID no. 13667407
  misc_feature: MA Experiment ID: 20000437 Result: Up-regulated in Transcription
  misc_feature: MA Experiment 20000437 PARAMETER Experiment Name: At_Drought_P Parameter: Age (day) Value: 8
  misc_feature: MA Experiment 20000437 PARAMETER Experiment Name: At_Drought_P Parameter: Organism Value: A. thaliana
  misc_feature: MA Experiment 20000437 PARAMETER Experiment Name: At_Drought_P Parameter: Plant Line Value: WS
  misc_feature: MA Experiment 20000437 PARAMETER Experiment Name: At_Drought_P Parameter: Timepoint (hr) Value: 24
  misc_feature: MA Experiment 20000437 PARAMETER Experiment Name: At_Drought_P Parameter: Tissue Value: Whole Plant
  misc_feature: MA Experiment 20000437 PARAMETER Experiment Name: At_Drought_P Parameter: Treatment Value: Drought vs. No Drought
  misc_feature: MA Experiment ID: 20000495 Result: Up-regulated in Transcription
  misc_feature: MA Experiment 20000495 PARAMETER Experiment Name: At_Guard_Cells_P Parameter: Harvest Date Value: 8/2/2002
  misc_feature: MA Experiment 20000495 PARAMETER Experiment Name: At_Guard_Cells_P Parameter: Organism Value: A. thaliana
  misc_feature: MA Experiment 20000495 PARAMETER Experiment Name: At_Guard_Cells_P Parameter: Tissue Value: Guard Cells vs. Leaves
  misc_feature: MA Experiment ID: 20000794 Result: Up-regulated in Transcription
  misc_feature: MA Experiment 20000794 PARAMETER Experiment Name: At_Petals_P Parameter: Age (day) Value: 23-25 days
  misc_feature: MA Experiment 20000794 PARAMETER Experiment Name: At_Petals_P Parameter: Plant Line Value: WS
  misc_feature: MA Experiment 20000794 PARAMETER Experiment Name: At_Petals_P Parameter: Tissue Value: Petals vs. Whole plant
  misc_feature: MA Experiment ID: 20001451 Result: Up-regulated in Transcription
  misc_feature: MA Experiment 20001451 PARAMETER Experiment Name: At_Far-red-induction_P Parameter: Age (day) Value: 7
  misc_feature: MA Experiment 20001451 PARAMETER Experiment Name: At_Far-red-induction_P Parameter: Light Value: Far-red vs. White
  misc_feature: MA Experiment 20001451 PARAMETER Experiment Name: At_Far-red-induction_P Parameter: Organism Value: A. thaliana
  misc_feature: MA Experiment 20001451 PARAMETER Experiment Name: At_Far-red-induction_P Parameter: Plant Line Value: Columbia
  misc_feature: MA Experiment 20001451 PARAMETER Experiment Name: At_Far-red-induction_P Parameter: Timepoint (hr) Value: 24
  misc_feature: MA Experiment 20001451 PARAMETER Experiment Name: At_Far-red-induction_P Parameter: Tissue Value: Whole Plant
  misc_feature: MA Experiment ID: 20001911 Result: Up-regulated in Transcription
  misc_feature: MA Experiment 20001911 PARAMETER Experiment Name: At_Drought_Reproduction_P Parameter: Age (day) Value: 40
  misc_feature: MA Experiment 20001911 PARAMETER Experiment Name: At_Drought_Reproduction_P Parameter: Organism Value: A. thaliana
  misc_feature: MA Experiment 20001911 PARAMETER Experiment Name: At_Drought_Reproduction_P Parameter: Plant Line Value: WS
  misc_feature: MA Experiment 20001911 PARAMETER Experiment Name: At_Drought_Reproduction_P Parameter: Timepoint (day) Value: 10
  misc_feature: MA Experiment 20001911 PARAMETER Experiment Name: At_Drought_Reproduction_P Parameter: Tissue Value: Flowers
  misc_feature: MA Experiment 20001911 PARAMETER Experiment Name: At_Drought_Reproduction_P Parameter: Treatment Value: Drought vs. No Drought
acgcgtccgacgcttcgtcgccggccgatttctcccagactcgtcttaccgcctccggtcgaaaccctagattcccggaggacgaaattcgttttttcgccggaactaaattaaggagatttgagaggctatgggtacaacaacgacaacaagcgctgtgtatatccatgttatcgaggatgtcgtcaacaaagttcgtgaggagttcattaacaacggaggtcctggcgagagtgttctcagcgagcttcaaggaatttgggagacgaagatgatgcaagccggagtcttgaatggaccaatagagaggtcatcggctcagaagccaacacctggtggtccactgactcatgatttgaatgttccttatgaaggtacagaggagtacgagactcccactgctgaaatgctcttccctcctacaccattgcagactccccttccaacgccgcttcccggtactgctgataactcatccatgtataacatccctaccggctcaagtgattatcccactcctggaactgagaatggagtcaacattgatgttaaagcaagacctagtccttatatgccaccgccttctccgtggacaaatcctagacttgatgtcaatgttgcttatgtggatggccgtgatgagcctgagagaggaaactctaaccagcagtttacgcaggatttatttgtgccatcctctgggaaacgaaaacgtgatgattcttctggacattatcaaaatggtggatctatacctcaacaggatggtgcaggcgatgctatccctgaggccaaactttgagtgtgatgcattccgcataacctctattggcgatagaaaggtaccacgagacttcttcagctcatcatcgaagattcctcaggttgatgggccaatgcctgacccttatgatgaaatgctctctacaccaaatatatatagttatcaaggacccagtgaagagtttaacgaggccagaactcctgctccaaacgagtaccaaacgagcactcctgttgctgtacaaaacgatatcattgaagatgatgaagagctgttgaacgaagatgatgatgatgacgagttggacgacctagaaagtggcgaggatatgaacacacaacacctggttttagctcaatttgacaaggtgacgcgcacaaagagcaggtggaagtgcagtctgaaagacgggatcatgcatataaacgataaggacattctcttcaacaaagcagcaggcgagtttgacttctgatcttaacactagcaatgatgcttctaggaaagtccttcaaatgtccagtgtctttctttttaccttatgatttaagaccgaccgagagagacatgagtattcatgggaaagtgtactctggttggcttgttgtacaaaaagaaaagttttttctgtcgaagaaggcgtatcaactttcaccttgtttcatgaactcttattgtctttcacgcaatggaaaattaacttccc

SEQ ID NO: 108416 - protein, 299 aa, Arabidopsis thaliana
  peptide (1)..(299): Ceres Seq. ID no. 13667408
  misc_feature (146)..(299): Pfam Name: Transcription factor IIA, alpha/beta subunit Pfam Description: Transcription factor IIA, alpha/beta subunit
  misc_feature (143)..(292): Homolog of NCBI NO: 25406978 NR Description: protein F22G5.14 [imported] - Arabidopsis >gi|8778543|gb|AAF79551.1|AC022464_9 F22G5.14 [Arabidopsis
  misc_feature (146)..(299): Homolog of NCBI NO: 30680148 NR Description: transcription factor IIA large subunit thaliana] >gi|30680153|ref|NP_172228.3| transcription factor IIA subunit [Arabidopsis thaliana] >gi|11358887|pir||T51333
  misc_feature (98)..(299): Homolog of NCBI NO: 1429226 NR Description: TFIIA [Arabidopsis thaliana]
  misc_feature (146)..(299): Homolog of NCBI NO: 18390773 NR Description: transcription factor IIA large subunit thaliana] >gi|14532726|gb|AAK64164.1| putative transcription IIA large subunit [Arabidopsis thaliana]
  misc_feature (146)..(298): Homolog of NCBI NO: 25406976 NR Description: protein F22G5.18 [imported] - Arabidopsis >gi|8778565|gb|AAF79573.1|AC022464_31 F22G5.18 [Arabidopsis
  misc_feature (146)..(299): Homolog of NCBI NO: 17065294 NR Description: similar to TFIIA [Arabidopsis thaliana]
  misc_feature (227)..(299): Homolog of NCBI NO: 15237841 NR Description: hypothetical protein [Arabidopsis thaliana]
  misc_feature (191)..(299): Homolog of NCBI NO: 34099900 NR Description: transcription factor IIA large subunit-1 [Xenopus
  misc_feature (229)..(299): Homolog of NCBI NO: 1633309 NR Description: Chain C, Yeast TfiiaTBPDNA COMPLEX
  misc_feature (230)..(299): Homolog of NCBI NO: 38492544 NR Description: Chain C, Human TfiiaTBPDNA COMPLEX
MFLMKVQRSTRLPLLKCSSLLHHCRLPFQRRFPVLLITHPCITSLPAQVIIPLLELRMESTLMLKQDLVLICHRLLRGQILDLMSMLLMWMAVMSLREETLTSSLRRIYLCHPLGNENVMILLDIIKMVDLYLNRMVQAMLSLRPNFECDAFRITSIGDRKVPRDFFSSSSKIPQVDGPMPDPYDEMLSTPNIYSYQGPSEEFNEARTPAPNEYQTSTPVAVQNDIIEDDEELLNEDDDDDELDDLESGEDMNTQHLVLAQFDKVTRTKSRWKCSLKDGIMHINDKDILFNKAAGEFDF

SEQ ID NO: 108417 - protein, 296 aa, Arabidopsis thaliana
  peptide (1)..(296): Ceres Seq. ID no. 13667409
  misc_feature (143)..(296): Pfam Name: Transcription factor IIA, alpha/beta subunit Pfam Description: Transcription factor IIA, alpha/beta subunit
  misc_feature (140)..(289): Homolog of NCBI NO: 25406978 NR Description: protein F22G5.14 [imported] - Arabidopsis >gi|8778543|gb|AAF79551.1|AC022464_9 F22G5.14 [Arabidopsis
  misc_feature (143)..(296): Homolog of NCBI NO: 30680148 NR Description: transcription factor IIA large subunit thaliana] >gi|30680153|ref|NP_172228.3| transcription factor IIA subunit [Arabidopsis thaliana] >gi|11358887|pir||T51333
  misc_feature (95)..(296): Homolog of NCBI NO: 1429226 NR Description: TFIIA [Arabidopsis thaliana]
  misc_feature (143)..(296): Homolog of NCBI NO: 18390773 NR Description: transcription factor IIA large subunit thaliana] >gi|14532726|gb|AAK64164.1| putative transcription IIA large subunit [Arabidopsis thaliana]
  misc_feature (143)..(295): Homolog of NCBI NO: 25406976 NR Description: protein F22G5.18 [imported] - Arabidopsis >gi|8778565|gb|AAF79573.1|AC022464_31 F22G5.18 [Arabidopsis
  misc_feature (143)..(296): Homolog of NCBI NO: 17065294 NR Description: similar to TFIIA [Arabidopsis thaliana]
  misc_feature (224)..(296): Homolog of NCBI NO: 15237841 NR Description: hypothetical protein [Arabidopsis thaliana]
  misc_feature (188)..(296): Homolog of NCBI NO: 34099900 NR Description: transcription factor IIA large subunit-1 [Xenopus
  misc_feature (226)..(296): Homolog of NCBI NO: 1633309 NR Description: Chain C, Yeast TfiiaTBPDNA COMPLEX
  misc_feature (227)..(296): Homolog of NCBI NO: 38492544 NR Description: Chain C, Human TfiiaTBPDNA COMPLEX
MKVQRSTRLPLLKCSSLLHHCRLPFQRRFPVLLITHPCITSLPAQVIIPLLELRMESTLMLKQDLVLICHRLLRGQILDLMSMLLMWMAVMSLREETLTSSLRRIYLCHPLGNENVMILLDIIKMVDLYLNRMVQAMLSLRPNFECDAFRITSIGDRKVPRDFFSSSSKIPQVDGPMPDPYDEMLSTPNIYSYQGPSEEFNEARTPAPNEYQTSTPVAVQNDIIEDDEELLNEDDDDDELDDLESGEDMNTQHLVLAQFDKVTRTKSRWKCSLKDGIMHINDKDILFNKAAGEFDF

SEQ ID NO: 108418 - protein, 242 aa, Arabidopsis thaliana
  peptide (1)..(242): Ceres Seq. ID no. 13667410
  misc_feature (89)..(242): Pfam Name: Transcription factor IIA, alpha/beta subunit Pfam Description: Transcription factor IIA, alpha/beta subunit
  misc_feature (86)..(235): Homolog of NCBI NO: 25406978 NR Description: protein F22G5.14 [imported] - Arabidopsis >gi|8778543|gb|AAF79551.1|AC022464_9 F22G5.14 [Arabidopsis
  misc_feature (89)..(242): Homolog of NCBI NO: 30680148 NR Description: transcription factor IIA large subunit thaliana] >gi|30680153|ref|NP_172228.3| transcription factor IIA subunit [Arabidopsis thaliana] >gi|11358887|pir||T51333
  misc_feature (41)..(242): Homolog of NCBI NO: 1429226 NR Description: TFIIA [Arabidopsis thaliana]
  misc_feature (89)..(242): Homolog of NCBI NO: 18390773 NR Description: transcription factor IIA large subunit thaliana] >gi|14532726|gb|AAK64164.1| putative transcription IIA large subunit [Arabidopsis thaliana]
  misc_feature (89)..(241): Homolog of NCBI NO: 25406976 NR Description: protein F22G5.18 [imported] - Arabidopsis >gi|8778565|gb|AAF79573.1|AC022464_31 F22G5.18 [Arabidopsis
  misc_feature (89)..(242): Homolog of NCBI NO: 17065294 NR Description: similar to TFIIA [Arabidopsis thaliana]
  misc_feature (170)..(242): Homolog of NCBI NO: 15237841 NR Description: hypothetical protein [Arabidopsis thaliana]
  misc_feature (134)..(242): Homolog of NCBI NO: 34099900 NR Description: transcription factor IIA large subunit-1 [Xenopus
  misc_feature (172)..(242): Homolog of NCBI NO: 1633309 NR Description: Chain C, Yeast TfiiaTBPDNA COMPLEX
  misc_feature (173)..(242): Homolog of NCBI NO: 38492544 NR Description: Chain C, Human TfiiaTBPDNA COMPLEX
MESTLMLKQDLVLICHRLLRGQILDLMSMLLMWMAVMSLREETLTSSLRRIYLCHPLGNENVMILLDIIKMVDLYLNRMVQAMLSLRPNFECDAFRITSIGDRKVPRDFFSSSSKIPQVDGPMPDPYDEMLSTPNIYSYQGPSEEFNEARTPAPNEYQTSTPVAVQNDIIEDDEELLNEDDDDDELDDLESGEDMNTQHLVLAQFDKVTRTKSRWKCSLKDGIMHINDKDILFNKAAGEFDF

SEQ ID NO: 108419 - DNA, 1846 bp, Arabidopsis thaliana
  misc_feature (1)..(1846): Ceres Seq. ID no. 13667411
  misc_feature: MA Experiment ID: 20000184 Result: Down-regulated in Transcription
  misc_feature: MA Experiment 20000184 PARAMETER Experiment Name: At_Shoots__P Parameter: Age (day) Value: 7
  misc_feature: MA Experiment 20000184 PARAMETER Experiment Name: At_Shoots__P Parameter: Tissue Value: Shoots vs. Whole Plant
  misc_feature: MA Experiment ID: 20000437 Result: Up-regulated in Transcription
  misc_feature: MA Experiment 20000437 PARAMETER Experiment Name: At_Drought_P Parameter: Age (day) Value: 8
  misc_feature: MA Experiment 20000437 PARAMETER Experiment Name: At_Drought_P Parameter: Organism Value: A. thaliana
  misc_feature: MA Experiment 20000437 PARAMETER Experiment Name: At_Drought_P Parameter: Plant Line Value: WS
  misc_feature: MA Experiment 20000437 PARAMETER Experiment Name: At_Drought_P Parameter: Timepoint (hr) Value: 24
  misc_feature: MA Experiment 20000437 PARAMETER Experiment Name: At_Drought_P Parameter: Tissue Value: Whole Plant
  misc_feature: MA Experiment 20000437 PARAMETER Experiment Name: At_Drought_P Parameter: Treatment Value: Drought vs. No Drought
  misc_feature: MA Experiment ID: 20000438 Result: Down-regulated in Transcription
  misc_feature: MA Experiment 20000438 PARAMETER Experiment Name: At_Shoots__P Parameter: Age (day) Value: 14
  misc_feature: MA Experiment 20000438 PARAMETER Experiment Name: At_Shoots__P Parameter: Tissue Value: Shoots vs. Whole Plant
  misc_feature: MA Experiment ID: 20001905 Result: Up-regulated in Transcription
  misc_feature: MA Experiment 20001905 PARAMETER Experiment Name: At_Drought_Reproduction_P Parameter: Age (day) Value: 40
  misc_feature: MA Experiment 20001905 PARAMETER Experiment Name: At_Drought_Reproduction_P Parameter: Organism Value: A. thaliana
  misc_feature: MA Experiment 20001905 PARAMETER Experiment Name: At_Drought_Reproduction_P Parameter: Plant Line Value: WS
  misc_feature: MA Experiment 20001905 PARAMETER Experiment Name: At_Drought_Reproduction_P Parameter: Timepoint (day) Value: 10
  misc_feature: MA Experiment 20001905 PARAMETER Experiment Name: At_Drought_Reproduction_P Parameter: Tissue Value: Rosettes
  misc_feature: MA Experiment 20001905 PARAMETER Experiment Name: At_Drought_Reproduction_P Parameter: Treatment Value: Drought vs. No Drought
tctttctctctttcatcgccctcaccggaacgcgcctactctctttccacatcgtacgtttcctctctctaaattcttcaactttaaaggtgataaaaattgaatctttcccacaacccacaagaaaattcgaatcctttctctctttctatctcttagtcacgctttcgatcagcaatctcctcgaattctggttggttccgtctctgttttctgtacacaaagccctgctgctgttgatacacgtgagccgccattaatgcccctttgttttcttcttccagctgatttaggaagttggtgatcaaattacatctagtgtttgtttccgccagctgaagtgaatcaaaatgtttagttttggccgagcaagaagccaagggaggcaaaacagatctatgtctcttggaggactggattatgcagaccccaagaagaaaaacaattacttgggaaagattcttttgacagcttctcttacagccttgtgcattttcatgctcaagcaatctccaacattcaatactcctagcgtgttttctcgacatgagccaggggttacacatgttttggtcactggtggtgctgggtatattggttcacatgcagctctaaggcttctaaaggaatcatatcgagtgaccattgtggacaatctatcacggggcaatctcgctgcagtcaggattttgcaagaactatttccggaacctggaaggcttcaatttatttatgctgatcttggagatgccaaagctgtcaacaagatattcacagagaatgcctttgacgctgtgatgcatttcgctgctggtgcatatgttggggaaagcacacaattccctcttaagtattatcacaatattacatcgaacactttggtagtattagagacaatggctgctcatggagtaaagactttgatatattcaagcacttgtgcaacgtatggggagcctgatattatgccaattacagaggaaactcctcaggtgccaatcaacccatatggtaaggccaagaagatggcagaagatatcattttggatttctcgaaaaactcagatatggcagttatgatcctaagatatttcaatgtgattgggtccgatccagagggcagattgggtgaagccccaagacctgagctgcgagagcatggacgcatctccggtgcttgttttgatgcagcacgtggcatcatgcctggcctacagatcaaaggaacagactacaaaaccgctgatggaacttgcgtacgggattacattgatgtcactgatttggttgatgctcatgttaaagctcttcaaaaggcaaaaccacgcaaagttggaatctacaatgttggcaccgggaaaggtagctcggtgaaagagtttgttgaggcgtgcaagaaagcaactggtgttgagatcaagatcgactatttgcctagacgtgcaggtgattacgctgaggtttacagtgatccaagcaagattaggaaggaacttaactggacagctaagcacactaatctcaaagagagtcttgagactgcatggagatggcagaagctgcaccgtaatggctatggcttaacaacctcatcggtctcggtttactgactttgttcattcctttggtgatggacggagattttgattccagatggtattgaggagagaagcgtaggagatgatgatggtttatatataaatataacacaagatatattatccatattatgaaaaaatgatatcacatgaccagatttttgattgatattcattttgnaatggctttangttcttttaaggaaccagcccatttcattangtatatggtaccctttttacaaatt

SEQ ID NO: 108420 - protein, 419 aa, Arabidopsis thaliana
  peptide (1)..(419): Ceres Seq. ID no. 13667412
  misc_feature (73)..(406): Pfam Name: NAD dependent epimerase/dehydratase family Pfam Description: NAD dependent epimerase/dehydratase family
  misc_feature (1)..(419): Homolog of NCBI NO: 24417398 NR Description: unknown [Arabidopsis thaliana]
  misc_feature (1)..(419): Homolog of NCBI NO: 22329866 NR Description: NAD-dependent epimerase/dehydratase family
  misc_feature (34)..(419): Homolog of NCBI NO: 7437275 NR Description: probable UDPglucose 4-epimerase (EC 5.1.3.2)
  misc_feature (34)..(409): Homolog of NCBI NO: 15237098 NR Description: NAD-dependent epimerase/dehydratase family
  misc_feature (1)..(410): Homolog of NCBI NO: 25553524 NR Description: UDP-galactose 4-epimerase-like protein [Oryza
  misc_feature (22)..(410): Homolog of NCBI NO: 27260937 NR Description: OJ1417_E01.21 [Oryza sativa (japonica
  misc_feature (22)..(409): Homolog of NCBI NO: 15241503 NR Description: NAD-dependent epimerase/dehydratase family
  misc_feature (16)..(410): Homolog of NCBI NO: 27529690 NR Description: UDP-galactose 4-epimerase-like protein [Oryza
  misc_feature (22)..(410): Homolog of NCBI NO: 26106016 NR Description: UDP-galactose 4-epimerase-like protein [Oryza
  misc_feature (245)..(408): Homolog of NCBI NO: 5852089 NR Description: zwh12.1 [Oryza sativa (indica cultivar-group)]
MFSFGRARSQGRQNRSMSLGGLDYADPKKKNNYLGKILLTASLTALCIFMLKQSPTFNTPSVFSRHEPGVTHVLVTGGAGYIGSHAALRLLKESYRVTIVDNLSRGNLAAVRILQELFPEPGRLQFIYADLGDAKAVNKIFTENAFDAVMHFAAGAYVGESTQFPLKYYHNITSNTLVVLETMAAHGVKTLIYSSTCATYGEPDIMPITEETPQVPINPYGKAKKMAEDIILDFSKNSDMAVMILRYFNVIGSDPEGRLGEAPRPELREHGRISGACFDAARGIMPGLQIKGTDYKTADGTCVRDYIDVTDLVDAHVKALQKAKPRKVGIYNVGTGKGSSVKEFVEACKKATGVEIKIDYLPRRAGDYAEVYSDPSKIRKELNWTAKHTNLKESLETAWRWQKLHRNGYGLTTSSVSVY

SEQ ID NO: 108421 - protein, 403 aa, Arabidopsis thaliana
  peptide (1)..(403): Ceres Seq. ID no. 13667413
  misc_feature (57)..(390): Pfam Name: NAD dependent epimerase/dehydratase family Pfam Description: NAD dependent epimerase/dehydratase family
  misc_feature (1)..(403): Homolog of NCBI NO: 24417398 NR Description: unknown [Arabidopsis thaliana]
  misc_feature (1)..(403): Homolog of NCBI NO: 22329866 NR Description: NAD-dependent epimerase/dehydratase family
  misc_feature (18)..(403): Homolog of NCBI NO: 7437275 NR Description: probable UDPglucose 4-epimerase (EC 5.1.3.2)
  misc_feature (18)..(393): Homolog of NCBI NO: 15237098 NR Description: NAD-dependent epimerase/dehydratase family
  misc_feature (1)..(394): Homolog of NCBI NO: 25553524 NR Description: UDP-galactose 4-epimerase-like protein [Oryza
  misc_feature (6)..(394): Homolog of NCBI NO: 27260937 NR Description: OJ1417_E01.21 [Oryza sativa (japonica
  misc_feature (6)..(393): Homolog of NCBI NO: 15241503 NR Description: NAD-dependent epimerase/dehydratase family
  misc_feature (1)..(394): Homolog of NCBI NO: 27529690 NR Description: UDP-galactose 4-epimerase-like protein [Oryza
  misc_feature (6)..(394): Homolog of NCBI NO: 26106016 NR Description: UDP-galactose 4-epimerase-like protein [Oryza
  misc_feature (229)..(392): Homolog of NCBI NO: 5852089 NR Description: zwh12.1 [Oryza sativa (indica cultivar-group)]
MSLGGLDYADPKKKNNYLGKILLTASLTALCIFMLKQSPTFNTPSVFSRHEPGVTHVLVTGGAGYIGSHAALRLLKESYRVTIVDNLSRGNLAAVRILQELFPEPGRLQFIYADLGDAKAVNKIFTENAFDAVMHFAAGAYVGESTQFPLKYYHNITSNTLVVLETMAAHGVKTLIYSSTCATYGEPDIMPITEETPQVPINPYGKAKKMAEDIILDFSKNSDMAVMILRYFNVIGSDPEGRLGEAPRPELREHGRISGACFDAARGIMPGLQIKGTDYKTADGTCVRDYIDVTDLVDAHVKALQKAKPRKVGIYNVGTGKGSSVKEFVEACKKATGVEIKIDYLPRRAGDYAEVYSDPSKIRKELNWTAKHTNLKESLETAWRWQKLHRNGYGLTTSSVSVY

SEQ ID NO: 108422 - protein, 370 aa, Arabidopsis thaliana
  peptide (1)..(370): Ceres Seq. ID no. 13667414
  misc_feature (24)..(357): Pfam Name: NAD dependent epimerase/dehydratase family Pfam Description: NAD dependent epimerase/dehydratase family
  misc_feature (1)..(370): Homolog of NCBI NO: 24417398 NR Description: unknown [Arabidopsis thaliana]
  misc_feature (1)..(370): Homolog of NCBI NO: 22329866 NR Description: NAD-dependent epimerase/dehydratase family
  misc_feature (1)..(370): Homolog of NCBI NO: 7437275 NR Description: probable UDPglucose 4-epimerase (EC 5.1.3.2)
  misc_feature (1)..(360): Homolog of NCBI NO: 15237098 NR Description: NAD-dependent epimerase/dehydratase family
  misc_feature (1)..(361): Homolog of NCBI NO: 25553524 NR Description: UDP-galactose 4-epimerase-like protein [Oryza
  misc_feature (1)..(361): Homolog of NCBI NO: 27260937 NR Description: OJ1417_E01.21 [Oryza sativa (japonica
  misc_feature (1)..(360): Homolog of NCBI NO: 15241503 NR Description: NAD-dependent epimerase/dehydratase family
  misc_feature (1)..(361): Homolog of NCBI NO: 27529690 NR Description: UDP-galactose 4-epimerase-like protein [Oryza
  misc_feature (1)..(361): Homolog of NCBI NO: 26106016 NR Description: UDP-galactose 4-epimerase-like protein [Oryza
  misc_feature (196)..(359): Homolog of NCBI NO: 5852089 NR Description: zwh12.1 [Oryza sativa (indica cultivar-group)]
MLKQSPTFNTPSVFSRHEPGVTHVLVTGGAGYIGSHAALRLLKESYRVTIVDNLSRGNLAAVRILQELFPEPGRLQFIYADLGDAKAVNKIFTENAFDAVMHFAAGAYVGESTQFPLKYYHNITSNTLVVLETMAAHGVKTLIYSSTCATYGEPDIMPITEETPQVPINPYGKAKKMAEDIILDFSKNSDMAVMILRYFNVIGSDPEGRLGEAPRPELREHGRISGACFDAARGIMPGLQIKGTDYKTADGTCVRDYIDVTDLVDAHVKALQKAKPRKVGIYNVGTGKGSSVKEFVEACKKATGVEIKIDYLPRRAGDYAEVYSDPSKIRKELNWTAKHTNLKESLETAWRWQKLHRNGYGLTTSSVSVY

SEQ ID NO: 108423 - DNA, 784 bp, Arabidopsis thaliana
  misc_feature (1)..(784): Ceres Seq. ID no. 13667415
  misc_feature: MA Experiment ID: 20000173 Result: Down-regulated in Transcription
  misc_feature: MA Experiment 20000173 PARAMETER Experiment Name: At_42deg_Heat_P Parameter: Age (day) Value: 14
  misc_feature: MA Experiment 20000173 PARAMETER Experiment Name: At_42deg_Heat_P Parameter: Organism Value: A. thaliana
  misc_feature: MA Experiment 20000173 PARAMETER Experiment Name: At_42deg_Heat_P Parameter: Plant Line Value: WS
  misc_feature: MA Experiment 20000173 PARAMETER Experiment Name: At_42deg_Heat_P Parameter: Temperature (deg C) Value: 42 vs. 22
  misc_feature: MA Experiment 20000173 PARAMETER Experiment Name: At_42deg_Heat_P Parameter: Timepoint (hr) Value: 6
  misc_feature: MA Experiment 20000173 PARAMETER Experiment Name: At_42deg_Heat_P Parameter: Tissue Value: Aerial
  misc_feature: MA Experiment ID: 20000185 Result: Down-regulated in Transcription
  misc_feature: MA Experiment 20000185 PARAMETER Experiment Name: At_Roots__P Parameter: Age (day) Value: 7 vs. 21
  misc_feature: MA Experiment 20000185 PARAMETER Experiment Name: At_Roots__P Parameter: Organism Value: A. thaliana
  misc_feature: MA Experiment 20000185 PARAMETER Experiment Name: At_Roots__P Parameter: Tissue Value: Roots vs. Whole Plant
  misc_feature: MA Experiment ID: 20000227 Result: Down-regulated in Transcription
  misc_feature: MA Experiment 20000227 PARAMETER Experiment Name: At_Root-Tips-vs-Tops_P Parameter: Tissue Value: Root Tips vs. Root Tops
  misc_feature: MA Experiment ID: 20000234 Result: Down-regulated in Transcription
  misc_feature: MA Experiment 20000234 PARAMETER Experiment Name: At_Siliques_P Parameter: Age (day) Value: 21
  misc_feature: MA Experiment 20000234 PARAMETER Experiment Name: At_Siliques_P Parameter: Organism Value: A. thaliana
  misc_feature: MA Experiment 20000234 PARAMETER Experiment Name: At_Siliques_P Parameter: Plant Line Value: WS
  misc_feature: MA Experiment 20000234 PARAMETER Experiment Name: At_Siliques_P Parameter: Tissue Value: Less Than 5mm Siliques vs. Whole Plant
  misc_feature: MA Experiment ID: 20000264 Result: Down-regulated in Transcription
  misc_feature: MA Experiment 20000264 PARAMETER Experiment Name: At_Open_Flower_P Parameter: Age (day) Value: 21
  misc_feature: MA Experiment 20000264 PARAMETER Experiment Name: At_Open_Flower_P Parameter: Plant Line Value: WS
  misc_feature: MA Experiment 20000264 PARAMETER Experiment Name: At_Open_Flower_P Parameter: Tissue Value: Open Flower vs. Whole Plant
  misc_feature: MA Experiment ID: 20000265 Result: Down-regulated in Transcription
  misc_feature: MA Experiment 20000265 PARAMETER Experiment Name: At_Open_Flower_P Parameter: Age (day) Value: 21
  misc_feature: MA Experiment 20000265 PARAMETER Experiment Name: At_Open_Flower_P Parameter: Plant Line Value: WS
  misc_feature: MA Experiment 20000265 PARAMETER Experiment Name: At_Open_Flower_P Parameter: Tissue Value: Closed Flower vs. Whole Plant
  misc_feature: MA Experiment ID: 20000268 Result: Down-regulated in Transcription
  misc_feature: MA Experiment 20000268 PARAMETER Experiment Name: At_100mM_NaCl__P Parameter: Age (day) Value: 14
  misc_feature: MA Experiment 20000268 PARAMETER Experiment Name: At_100mM_NaCl__P Parameter: Organism Value: A. thaliana
  misc_feature: MA Experiment 20000268 PARAMETER Experiment Name: At_100mM_NaCl__P Parameter: Plant Line Value: WS
  misc_feature: MA Experiment 20000268 PARAMETER Experiment Name: At_100mM_NaCl__P Parameter: Timepoint (hr) Value: 6
  misc_feature: MA Experiment 20000268 PARAMETER Experiment Name: At_100mM_NaCl__P Parameter: Tissue Value: Whole Plant
  misc_feature: MA Experiment 20000268 PARAMETER Experiment Name: At_100mM_NaCl__P Parameter: Treatment Value: 100mM NaCl vs. No Treatment
  misc_feature: MA Experiment ID: 20000269 Result: Down-regulated in Transcription
  misc_feature: MA Experiment 20000269 PARAMETER Experiment Name: At_1mM_KNO3_L-vs-H_Roots_P Parameter: Age (day) Value: 7,10,12
  misc_feature: MA Experiment 20000269 PARAMETER Experiment Name: At_1mM_KNO3_L-vs-H_Roots_P Parameter: Organism Value: A. thaliana
  misc_feature: MA Experiment 20000269 PARAMETER Experiment Name: At_1mM_KNO3_L-vs-H_Roots_P Parameter: Plant Line Value: WS
  misc_feature: MA Experiment 20000269 PARAMETER Experiment Name: At_1mM_KNO3_L-vs-H_Roots_P Parameter: Timepoint (day) Value: 7,10,12
  misc_feature: MA Experiment 20000269 PARAMETER Experiment Name: At_1mM_KNO3_L-vs-H_Roots_P Parameter: Tissue Value: Roots
  misc_feature: MA Experiment 20000269 PARAMETER Experiment Name: At_1mM_KNO3_L-vs-H_Roots_P Parameter: Treatment Value: 1mM KNO3 vs. 50mM KNO3
  misc_feature: MA Experiment ID: 20000286 Result: Down-regulated in Transcription
  misc_feature: MA Experiment 20000286 PARAMETER Experiment Name: At_Open_Flower_P Parameter: Age (day) Value: 21
  misc_feature: MA Experiment 20000286 PARAMETER Experiment Name: At_Open_Flower_P Parameter: Plant Line Value: WS
  misc_feature: MA Experiment 20000286 PARAMETER Experiment Name: At_Open_Flower_P Parameter: Tissue Value: Half Open vs. Whole Plant
  misc_feature: MA Experiment ID: 20000308 Result: Down-regulated in Transcription
  misc_feature: MA Experiment 20000308 PARAMETER Experiment Name: At_100mM_NaCl__P Parameter: Age (day) Value: 17
  misc_feature: MA Experiment 20000308 PARAMETER Experiment Name: At_100mM_NaCl__P Parameter: Organism Value: A. thaliana
  misc_feature: MA Experiment 20000308 PARAMETER Experiment Name: At_100mM_NaCl__P Parameter: Plant Line Value: WS
  misc_feature: MA Experiment 20000308 PARAMETER Experiment Name: At_100mM_NaCl__P Parameter: Timepoint (hr) Value: 72
  misc_feature: MA Experiment 20000308 PARAMETER Experiment Name: At_100mM_NaCl__P Parameter: Tissue Value: Whole Plant
  misc_feature: MA Experiment 20000308 PARAMETER Experiment Name: At_100mM_NaCl__P Parameter: Treatment Value: 100mM NaCl vs. No Treatment
  misc_feature: MA Experiment ID: 20000439 Result: Down-regulated in Transcription
  misc_feature: MA Experiment 20000439 PARAMETER Experiment Name: At_Roots__P Parameter: Age (day) Value: 14 vs. 21
  misc_feature: MA Experiment 20000439 PARAMETER Experiment Name: At_Roots__P Parameter: Organism Value: A. thaliana
  misc_feature: MA Experiment 20000439 PARAMETER Experiment Name: At_Roots__P Parameter: Tissue Value: Roots vs. Whole Plant
  misc_feature: MA Experiment ID: 20000441 Result: Up-regulated in Transcription
  misc_feature: MA Experiment 20000441 PARAMETER Experiment Name: At_1uM_BR-BRZ__P Parameter: Tissue Value: Shoot Apices
  misc_feature: MA Experiment 20000441 PARAMETER Experiment Name: At_1uM_BR-BRZ__P Parameter: Treatment Value: 1uM BR vs. No Treatment
  misc_feature: MA Experiment ID: 20000443 Result: Up-regulated in Transcription
  misc_feature: MA Experiment 20000443 PARAMETER Experiment Name: At_1uM_BR-BRZ__P Parameter: Tissue Value: Shoot Apices
  misc_feature: MA Experiment 20000443 PARAMETER Experiment Name: At_1uM_BR-BRZ__P Parameter: Treatment Value: 1uM BRZ vs. No Treatment
  misc_feature: MA Experiment ID: 20000451 Result: Down-regulated in Transcription
  misc_feature: MA Experiment 20000451 PARAMETER Experiment Name: At_CS6879_Shoots-Roots_P Parameter: Age (day) Value: 14
  misc_feature: MA Experiment 20000451 PARAMETER Experiment Name: At_CS6879_Shoots-Roots_P Parameter: Organism Value: A. thaliana
  misc_feature: MA Experiment 20000451 PARAMETER Experiment Name: At_CS6879_Shoots-Roots_P Parameter: Plant Line Value: CS6879 vs. WS
  misc_feature: MA Experiment 20000451 PARAMETER Experiment Name: At_CS6879_Shoots-Roots_P Parameter: Tissue Value: Roots
  misc_feature: MA Experiment ID: 20000460 Result: Up-regulated in Transcription
  misc_feature: MA Experiment 20000460 PARAMETER Experiment Name: At_10percent_PEG_P Parameter: Age (day) Value: 12
  misc_feature: MA Experiment 20000460 PARAMETER Experiment Name: At_10percent_PEG_P Parameter: Organism Value: A. thaliana
  misc_feature: MA Experiment 20000460 PARAMETER Experiment Name: At_10percent_PEG_P Parameter: Plant Line Value: WS
  misc_feature: MA Experiment 20000460 PARAMETER Experiment Name: At_10percent_PEG_P Parameter: Timepoint (day) Value: 12
  misc_feature: MA Experiment 20000460 PARAMETER Experiment Name: At_10percent_PEG_P Parameter: Tissue Value: Whole Plant
  misc_feature: MA Experiment 20000460 PARAMETER Experiment Name: At_10percent_PEG_P Parameter: Treatment Value: 10percent PEG vs. No Treatment
  misc_feature: MA Experiment ID: 20000527 Result: Up-regulated in Transcription
  misc_feature: MA Experiment 20000527 PARAMETER Experiment Name: At_10percent_PEG_P Parameter: Age (day) Value: 20
  misc_feature: MA Experiment 20000527 PARAMETER Experiment Name: At_10percent_PEG_P Parameter: Organism Value: A. thaliana
  misc_feature: MA Experiment 20000527 PARAMETER Experiment Name: At_10percent_PEG_P Parameter: Plant Line Value: WS
  misc_feature: MA Experiment 20000527 PARAMETER Experiment Name: At_10percent_PEG_P Parameter: Timepoint (day) Value: 20
  misc_feature: MA Experiment 20000527 PARAMETER Experiment Name: At_10percent_PEG_P Parameter: Tissue Value: Whole Plant
  misc_feature: MA Experiment 20000527 PARAMETER Experiment Name: At_10percent_PEG_P Parameter: Treatment Value: 10percent PEG vs. No Treatment
  misc_feature: MA Experiment ID: 20000794 Result: Down-regulated in Transcription
  misc_feature: MA Experiment 20000794 PARAMETER Experiment Name: At_Petals_P Parameter: Age (day) Value: 23-25 days
  misc_feature: MA Experiment 20000794 PARAMETER Experiment Name: At_Petals_P Parameter: Plant Line Value: WS
  misc_feature: MA Experiment 20000794 PARAMETER Experiment Name: At_Petals_P Parameter: Tissue Value: Petals vs. Whole plant
  misc_feature: MA Experiment ID: 20001247 Result: Up-regulated in Transcription
  misc_feature: MA Experiment 20001247 PARAMETER Experiment Name: At_Far-red-induction_P Parameter: Age (day) Value: 7
  misc_feature: MA Experiment 20001247 PARAMETER Experiment Name: At_Far-red-induction_P Parameter: Light Value: Far-red vs. White
  misc_feature: MA Experiment 20001247 PARAMETER Experiment Name: At_Far-red-induction_P Parameter: Organism Value: A. thaliana
  misc_feature: MA Experiment 20001247 PARAMETER Experiment Name: At_Far-red-induction_P Parameter: Plant Line Value: Columbia
  misc_feature: MA Experiment 20001247 PARAMETER Experiment Name: At_Far-red-induction_P Parameter: Timepoint (hr) Value: 1
  misc_feature: MA Experiment 20001247 PARAMETER Experiment Name: At_Far-red-induction_P Parameter: Tissue Value: Whole Plant
  misc_feature: MA Experiment ID: 20001450 Result: Up-regulated in Transcription
  misc_feature: MA Experiment 20001450 PARAMETER Experiment Name: At_Far-red-induction_P Parameter: Age (day) Value: 7
  misc_feature: MA Experiment 20001450 PARAMETER Experiment Name: At_Far-red-induction_P Parameter: Light Value: Far-red vs. White
  misc_feature: MA Experiment 20001450 PARAMETER Experiment Name: At_Far-red-induction_P Parameter: Organism Value: A. thaliana
  misc_feature: MA Experiment 20001450 PARAMETER Experiment Name: At_Far-red-induction_P Parameter: Plant Line Value: Columbia
  misc_feature: MA Experiment 20001450 PARAMETER Experiment Name: At_Far-red-induction_P Parameter: Timepoint (hr) Value: 8
  misc_feature: MA Experiment 20001450 PARAMETER Experiment Name: At_Far-red-induction_P Parameter: Tissue Value: Whole Plant
  misc_feature: MA Experiment ID: 20001451 Result: Up-regulated in Transcription
  misc_feature: MA Experiment 20001451 PARAMETER Experiment Name: At_Far-red-induction_P Parameter: Age (day) Value: 7
  misc_feature: MA Experiment 20001451 PARAMETER Experiment Name: At_Far-red-induction_P Parameter: Light Value: Far-red vs. White
  misc_feature: MA Experiment 20001451 PARAMETER Experiment Name: At_Far-red-induction_P Parameter: Organism Value: A. thaliana
  misc_feature: MA Experiment 20001451 PARAMETER Experiment Name: At_Far-red-induction_P Parameter: Plant Line Value: Columbia
  misc_feature: MA Experiment 20001451 PARAMETER Experiment Name: At_Far-red-induction_P Parameter: Timepoint (hr) Value: 24
  misc_feature: MA Experiment 20001451 PARAMETER Experiment Name: At_Far-red-induction_P Parameter: Tissue Value: Whole Plant
  misc_feature: MA Experiment ID: 20001458 Result: Up-regulated in Transcription
  misc_feature: MA Experiment 20001458 PARAMETER Experiment Name: At_50mM_NH4NO3_L-to-H_P Parameter: Age (day) Value: Undefined
  misc_feature: MA Experiment 20001458 PARAMETER Experiment Name: At_50mM_NH4NO3_L-to-H_P Parameter: Organism Value: Undefined
  misc_feature: MA Experiment 20001458 PARAMETER Experiment Name: At_50mM_NH4NO3_L-to-H_P Parameter: Plant Line Value: Undefined
  misc_feature: MA Experiment 20001458 PARAMETER Experiment Name: At_50mM_NH4NO3_L-to-H_P Parameter: Timepoint (hr) Value: 2
  misc_feature: MA Experiment 20001458 PARAMETER Experiment Name: At_50mM_NH4NO3_L-to-H_P Parameter: Tissue Value: Siliques
  misc_feature: MA Experiment 20001458 PARAMETER Experiment Name: At_50mM_NH4NO3_L-to-H_P Parameter: Treatment Value: 50mM NH4NO3 vs. 100mM Manitol
  misc_feature: MA Experiment ID: 20001459 Result: Down-regulated in Transcription
  misc_feature: MA Experiment 20001459 PARAMETER Experiment Name: At_50mM_NH4NO3_L-to-H_P Parameter: Age (day) Value: Undefined
  misc_feature: MA Experiment 20001459 PARAMETER Experiment Name: At_50mM_NH4NO3_L-to-H_P Parameter: Organism Value: Undefined
  misc_feature: MA Experiment 20001459 PARAMETER Experiment Name: At_50mM_NH4NO3_L-to-H_P Parameter: Plant Line Value: Undefined
  misc_feature: MA Experiment 20001459 PARAMETER Experiment Name: At_50mM_NH4NO3_L-to-H_P Parameter: Timepoint (hr) Value: 4
  misc_feature: MA Experiment 20001459 PARAMETER Experiment Name: At_50mM_NH4NO3_L-to-H_P Parameter: Tissue Value: Siliques
  misc_feature: MA Experiment 20001459 PARAMETER Experiment Name: At_50mM_NH4NO3_L-to-H_P Parameter: Treatment Value: 50mM NH4NO3 vs. 100mM Manitol
  misc_feature: MA Experiment ID: 20001504 Result: Down-regulated in Transcription
  misc_feature: MA Experiment 20001504 PARAMETER Experiment Name: At_Far-red-enriched_P Parameter: Age (day) Value: 10
  misc_feature: MA Experiment 20001504 PARAMETER Experiment Name: At_Far-red-enriched_P Parameter: Light Value: Far-red enriched vs. White
  misc_feature: MA Experiment 20001504 PARAMETER Experiment Name: At_Far-red-enriched_P Parameter: Organism Value: A. thaliana
  misc_feature: MA Experiment 20001504 PARAMETER Experiment Name: At_Far-red-enriched_P Parameter: Plant Line Value: Columbia
  misc_feature: MA Experiment 20001504 PARAMETER Experiment Name: At_Far-red-enriched_P Parameter: Timepoint (day) Value: 6
  misc_feature: MA Experiment 20001504 PARAMETER Experiment Name: At_Far-red-enriched_P Parameter: Tissue Value: Whole Plant
  misc_feature: MA Experiment ID: 20001554 Result: Down-regulated in Transcription
  misc_feature: MA Experiment 20001554 PARAMETER Experiment Name: At_Drought_Soil_Dry_P Parameter: Age (day) Value: 21
  misc_feature: MA Experiment 20001554 PARAMETER Experiment Name: At_Drought_Soil_Dry_P Parameter: Organism Value: A. thaliana
  misc_feature: MA Experiment 20001554 PARAMETER Experiment Name: At_Drought_Soil_Dry_P Parameter: Plant Line Value: WS
  misc_feature: MA Experiment 20001554 PARAMETER Experiment Name: At_Drought_Soil_Dry_P Parameter: Post Timepoint (hr) Value: None
  misc_feature: MA Experiment 20001554 PARAMETER Experiment Name: At_Drought_Soil_Dry_P Parameter: Post-Treatment Value: None
  misc_feature: MA Experiment 20001554 PARAMETER Experiment Name: At_Drought_Soil_Dry_P Parameter: Timepoint (day) Value: 7
  misc_feature: MA Experiment 20001554 PARAMETER Experiment Name: At_Drought_Soil_Dry_P Parameter: Treatment Value: Drought vs. No Drought
  misc_feature: MA Experiment ID: 20001555 Result: Down-regulated in Transcription
  misc_feature: MA Experiment 20001555 PARAMETER Experiment Name: At_Drought_Soil_Dry_P Parameter: Age (day) Value: 24
  misc_feature: MA Experiment 20001555 PARAMETER Experiment Name: At_Drought_Soil_Dry_P Parameter: Organism Value: A. thaliana
  misc_feature: MA Experiment 20001555 PARAMETER Experiment Name: At_Drought_Soil_Dry_P Parameter: Plant Line Value: WS
  misc_feature: MA Experiment 20001555 PARAMETER Experiment Name: At_Drought_Soil_Dry_P Parameter: Post Timepoint (hr) Value: None
  misc_feature: MA Experiment 20001555 PARAMETER Experiment Name: At_Drought_Soil_Dry_P Parameter: Post-Treatment Value: None
  misc_feature: MA Experiment 20001555 PARAMETER Experiment Name: At_Drought_Soil_Dry_P Parameter: Timepoint (day) Value: 10
  misc_feature: MA Experiment 20001555 PARAMETER Experiment Name: At_Drought_Soil_Dry_P Parameter: Treatment Value: Drought vs. No Drought
  misc_feature: MA Experiment ID: 20001556 Result: Down-regulated in Transcription
  misc_feature: MA Experiment 20001556 PARAMETER Experiment Name: At_Drought_Soil_Dry_P Parameter: Age (day) Value: 26
  misc_feature: MA Experiment 20001556 PARAMETER Experiment Name: At_Drought_Soil_Dry_P Parameter: Organism Value: A. thaliana
  misc_feature: MA Experiment 20001556 PARAMETER Experiment Name: At_Drought_Soil_Dry_P Parameter: Plant Line Value: WS
  misc_feature: MA Experiment 20001556 PARAMETER Experiment Name: At_Drought_Soil_Dry_P Parameter: Post Timepoint (hr) Value: None
  misc_feature: MA Experiment 20001556 PARAMETER Experiment Name: At_Drought_Soil_Dry_P Parameter: Post-Treatment Value: None
  misc_feature: MA Experiment 20001556 PARAMETER Experiment Name: At_Drought_Soil_Dry_P Parameter: Timepoint (day) Value: 12
  misc_feature: MA Experiment 20001556 PARAMETER Experiment Name: At_Drought_Soil_Dry_P Parameter: Treatment Value: Drought vs. No Drought
  misc_feature: MA Experiment ID: 20001557 Result: Down-regulated in Transcription
  misc_feature: MA Experiment 20001557 PARAMETER Experiment Name: At_Drought_Soil_Dry_P Parameter: Age (day) Value: 27
  misc_feature: MA Experiment 20001557 PARAMETER Experiment Name: At_Drought_Soil_Dry_P Parameter: Organism Value: A. thaliana
  misc_feature: MA Experiment 20001557 PARAMETER Experiment Name: At_Drought_Soil_Dry_P Parameter: Plant Line Value: WS
  misc_feature: MA Experiment 20001557 PARAMETER Experiment Name: At_Drought_Soil_Dry_P Parameter: Post Timepoint (hr) Value: 3
  misc_feature: MA Experiment 20001557 PARAMETER Experiment Name: At_Drought_Soil_Dry_P Parameter: Post-Treatment Value: Re-Water vs. No Drought
  misc_feature: MA Experiment 20001557 PARAMETER Experiment Name: At_Drought_Soil_Dry_P Parameter: Timepoint (day) Value: 13
  misc_feature: MA Experiment 20001557 PARAMETER Experiment Name: At_Drought_Soil_Dry_P Parameter: Treatment Value: Drought vs. No Drought
  misc_feature: MA Experiment ID: 20001558 Result: Down-regulated in Transcription
  misc_feature: MA Experiment 20001558 PARAMETER Experiment Name: At_Drought_Soil_Dry_P Parameter: Age (day) Value: 27
  misc_feature: MA Experiment 20001558 PARAMETER Experiment Name: At_Drought_Soil_Dry_P Parameter: Organism Value: A. thaliana
  misc_feature: MA Experiment 20001558 PARAMETER Experiment Name: At_Drought_Soil_Dry_P Parameter: Plant Line Value: WS
  misc_feature: MA Experiment 20001558 PARAMETER Experiment Name: At_Drought_Soil_Dry_P Parameter: Post Timepoint (hr) Value: 6
  misc_feature: MA Experiment 20001558 PARAMETER Experiment Name: At_Drought_Soil_Dry_P Parameter: Post-Treatment Value: Re-Water vs. No Drought
  misc_feature: MA Experiment 20001558 PARAMETER Experiment Name: At_Drought_Soil_Dry_P Parameter: Timepoint (day) Value: 13
  misc_feature: MA Experiment 20001558 PARAMETER Experiment Name: At_Drought_Soil_Dry_P Parameter: Treatment Value: Drought vs. No Drought
  misc_feature: MA Experiment ID: 20001559 Result: Down-regulated in Transcription
  misc_feature: MA Experiment 20001559 PARAMETER Experiment Name: At_Drought_Soil_Dry_P Parameter: Age (day) Value: 28
  misc_feature: MA Experiment 20001559 PARAMETER Experiment Name: At_Drought_Soil_Dry_P Parameter: Organism Value: A. thaliana
  misc_feature: MA Experiment 20001559 PARAMETER Experiment Name: At_Drought_Soil_Dry_P Parameter: Plant Line Value: WS
  misc_feature: MA Experiment 20001559 PARAMETER Experiment Name: At_Drought_Soil_Dry_P Parameter: Post Timepoint (hr) Value: 29
  misc_feature: MA Experiment 20001559 PARAMETER Experiment Name: At_Drought_Soil_Dry_P Parameter: Post-Treatment Value: Re-Water vs. No Drought
  misc_feature: MA Experiment 20001559 PARAMETER Experiment Name: At_Drought_Soil_Dry_P Parameter: Timepoint (day) Value: 14
  misc_feature: MA Experiment 20001559 PARAMETER Experiment Name: At_Drought_Soil_Dry_P Parameter: Treatment Value: Drought vs. No Drought
  misc_feature: MA Experiment ID: 20001560 Result: Down-regulated in Transcription
  misc_feature: MA Experiment 20001560 PARAMETER Experiment Name: At_Drought_Soil_Dry_P Parameter: Age (day) Value: 28
  misc_feature: MA Experiment 20001560 PARAMETER Experiment Name: At_Drought_Soil_Dry_P Parameter: Organism Value: A. thaliana
  misc_feature: MA Experiment 20001560 PARAMETER Experiment Name: At_Drought_Soil_Dry_P Parameter: Plant Line Value: WS
  misc_feature: MA Experiment 20001560 PARAMETER Experiment Name: At_Drought_Soil_Dry_P Parameter: Post Timepoint (hr) Value: None
  misc_feature: MA Experiment 20001560 PARAMETER Experiment Name: At_Drought_Soil_Dry_P Parameter: Post-Treatment Value: None
  misc_feature: MA Experiment 20001560 PARAMETER Experiment Name: At_Drought_Soil_Dry_P Parameter: Timepoint (day) Value: 14
  misc_feature: MA Experiment 20001560 PARAMETER Experiment Name: At_Drought_Soil_Dry_P Parameter: Treatment Value: Drought vs. No Drought
  misc_feature: MA Experiment ID: 20001755 Result: Down-regulated in Transcription
  misc_feature: MA Experiment 20001755 PARAMETER Experiment Name: At_50mM_NH4NO3_L-to-H_P Parameter: Timepoint (hr) Value: 2
  misc_feature: MA Experiment 20001755 PARAMETER Experiment Name: At_50mM_NH4NO3_L-to-H_P Parameter: Tissue Value: Leaf
  misc_feature: MA Experiment 20001755 PARAMETER Experiment Name: At_50mM_NH4NO3_L-to-H_P Parameter: Treatment Value: 50mM NH4NO3 vs 100mM Mannitol
  misc_feature: MA Experiment ID: 20001757 Result: Up-regulated in Transcription
  misc_feature: MA Experiment 20001757 PARAMETER Experiment Name: At_50mM_NH4NO3_L-to-H_P Parameter: Timepoint (hr) Value: 6
  misc_feature: MA Experiment 20001757 PARAMETER Experiment Name: At_50mM_NH4NO3_L-to-H_P Parameter: Tissue Value: Leaf
  misc_feature: MA Experiment 20001757 PARAMETER Experiment Name: At_50mM_NH4NO3_L-to-H_P Parameter: Treatment Value: 50mM NH4NO3 vs 100mM Mannitol
  misc_feature: MA Experiment ID: 20001906 Result: Down-regulated in Transcription
  misc_feature: MA Experiment 20001906 PARAMETER Experiment Name: At_Drought_Reproduction_P Parameter: Age (day) Value: 35
  misc_feature: MA Experiment 20001906 PARAMETER Experiment Name: At_Drought_Reproduction_P Parameter: Organism Value: A. thaliana
  misc_feature: MA Experiment 20001906 PARAMETER Experiment Name: At_Drought_Reproduction_P Parameter: Plant Line Value: WS
  misc_feature: MA Experiment 20001906 PARAMETER Experiment Name: At_Drought_Reproduction_P Parameter: Timepoint (day) Value: 5
  misc_feature: MA Experiment 20001906 PARAMETER Experiment Name: At_Drought_Reproduction_P Parameter: Tissue Value: Siliques
  misc_feature: MA Experiment 20001906 PARAMETER Experiment Name: At_Drought_Reproduction_P Parameter: Treatment Value: Drought vs. No Drought
  misc_feature: MA Experiment ID: 20001907 Result: Down-regulated in Transcription
  misc_feature: MA Experiment 20001907 PARAMETER Experiment Name: At_Drought_Reproduction_P Parameter: Age (day) Value: 37
  misc_feature: MA Experiment 20001907 PARAMETER Experiment Name: At_Drought_Reproduction_P Parameter: Organism Value: A. thaliana
  misc_feature: MA Experiment 20001907 PARAMETER Experiment Name: At_Drought_Reproduction_P Parameter: Plant Line Value: WS
  misc_feature: MA Experiment 20001907 PARAMETER Experiment Name: At_Drought_Reproduction_P Parameter: Timepoint (day) Value: 7
  misc_feature: MA Experiment 20001907 PARAMETER Experiment Name: At_Drought_Reproduction_P Parameter: Tissue Value: Siliques
  misc_feature: MA Experiment 20001907 PARAMETER Experiment Name: At_Drought_Reproduction_P Parameter: Treatment Value: Drought vs. No Drought
  misc_feature: MA Experiment ID: 20001908 Result: Down-regulated in Transcription
  misc_feature: MA Experiment 20001908 PARAMETER Experiment Name: At_Drought_Reproduction_P Parameter: Age (day) Value: 40
  misc_feature: MA Experiment 20001908 PARAMETER Experiment Name: At_Drought_Reproduction_P Parameter: Organism Value: A. thaliana
  misc_feature: MA Experiment 20001908 PARAMETER Experiment Name: At_Drought_Reproduction_P Parameter: Plant Line Value: WS
  misc_feature: MA Experiment 20001908 PARAMETER Experiment Name: At_Drought_Reproduction_P Parameter: Timepoint (day) Value: 10
  misc_feature: MA Experiment 20001908 PARAMETER Experiment Name: At_Drought_Reproduction_P Parameter: Tissue Value: Siliques
  misc_feature: MA Experiment 20001908 PARAMETER Experiment Name: At_Drought_Reproduction_P Parameter: Treatment Value: Drought vs. No Drought
  misc_feature: Pfam Name: GATase_2 Pfam Description: Glutamine amidotransferases class-II
ttttgctcaggttgttctgtggactagatgggatctactgtatgtttctagggagattgaataatctctgtacattgaatcgacaatacggtttatctgggaagaactcaaacgaggcaatgtttgtgatcgaagcttatcgaacacttcgtgatcgtggtccttacccagcagatcaagttcttagaggtcttgagggaagcttcgctttcgttgtctacgatactcaaacttcctctgttttctcagctctgagttctgatggaggaaaaagtctttactggggaatttctggagacggatctgttgtaatgtctgatgatattcagatcataaagcaaggctgtgctaaatcgtttgctcctttccctaatggtaaaccaaaacttaagtttttcattagccctataaagaaagaaacatacttttgagtttagatcttgatgtgtgttttgtgtttttgttattgcaggatgtatgtttcatagtgagacagggcttaagagctttgaccatccgactaatatgatgaaggcaatgccgaggattgatagtaaaggtgttctttgtggagctagtttcaaagttgatgcttgttctaagatcaatagtatccctagaagaggaagtgaagctaactgggcgctggctaattctcgttgattttgcttctagtttcgttaactcttgcttctttgttgcgttttctttttatgtactcttgtttatgtaaatatagccttatgaagacgataaagaaataaaattgatttgcttcttcgtg

SEQ ID NO: 108424 - protein, 142 aa, Arabidopsis thaliana
  peptide (1)..(142): Ceres Seq. ID no. 13667416
  misc_feature: Pfam Name: GATase_2 Pfam Description: Glutamine amidotransferases class-II
  misc_feature (3)..(125): Homolog of NCBI NO: 18400774 NR Description: expressed protein [Arabidopsis thaliana] unknown protein [Arabidopsis thaliana] AT3g15450/MJK13_11 [Arabidopsis thaliana]
  misc_feature (3)..(125): Homolog of NCBI NO: 18416995 NR Description: expressed protein [Arabidopsis thaliana] AT4g27450/F27G19_50 [Arabidopsis thaliana] unknown protein [Arabidopsis thaliana]
  misc_feature (3)..(125): Homolog of NCBI NO: 7486256 NR Description: hypothetical protein F27G19.50 - Arabidopsis >gi|4972070|emb|CAB43877.1| putative protein [Arabidopsis >gi|7269599|emb|CAB81395.1| putative protein [Arabidopsis
  misc_feature (14)..(142): Homolog of NCBI NO: 24417390 NR Description: unknown [Arabidopsis thaliana]
LLRLFCGLDGIYCMFLGRLNNLCTLNRQYGLSGKNSNEAMFVIEAYRTLRDRGPYPADQVLRGLEGSFAFVVYDTQTSSVFSALSSDGGKSLYWGISGDGSVVMSDDIQIIKQGCAKSFAPFPNGKPKLKFFISPIKKETYF

SEQ ID NO: 108425 - protein, 129 aa, Arabidopsis thaliana
  peptide (1)..(129): Ceres Seq. ID no. 13667417
  misc_feature: Pfam Name: GATase_2 Pfam Description: Glutamine amidotransferases class-II
  misc_feature (1)..(112): Homolog of NCBI NO: 18400774 NR Description: expressed protein [Arabidopsis thaliana] unknown protein [Arabidopsis thaliana] AT3g15450/MJK13_11 [Arabidopsis thaliana]
  misc_feature (1)..(112): Homolog of NCBI NO: 18416995 NR Description: expressed protein [Arabidopsis thaliana] AT4g27450/F27G19_50 [Arabidopsis thaliana] unknown protein [Arabidopsis thaliana]
  misc_feature (1)..(112): Homolog of NCBI NO: 7486256 NR Description: hypothetical protein F27G19.50 - Arabidopsis >gi|4972070|emb|CAB43877.1| putative protein [Arabidopsis >gi|7269599|emb|CAB81395.1| putative protein [Arabidopsis
  misc_feature (1)..(129): Homolog of NCBI NO: 24417390 NR Description: unknown [Arabidopsis thaliana]
MFLGRLNNLCTLNRQYGLSGKNSNEAMFVIEAYRTLRDRGPYPADQVLRGLEGSFAFVVYDTQTSSVFSALSSDGGKSLYWGISGDGSVVMSDDIQIIKQGCAKSFAPFPNGKPKLKFFISPIKKETYF

SEQ ID NO: 108426 - protein, 103 aa, Arabidopsis thaliana
  peptide (1)..(103): Ceres Seq. ID no. 13667418
  misc_feature: Pfam Name: GATase_2 Pfam Description: Glutamine amidotransferases class-II
  misc_feature (1)..(86): Homolog of NCBI NO: 18400774 NR Description: expressed protein [Arabidopsis thaliana] unknown protein [Arabidopsis thaliana] AT3g15450/MJK13_11 [Arabidopsis thaliana]
  misc_feature (1)..(86): Homolog of NCBI NO: 18416995 NR Description: expressed protein [Arabidopsis thaliana] AT4g27450/F27G19_50 [Arabidopsis thaliana] unknown protein [Arabidopsis thaliana]
  misc_feature (1)..(86): Homolog of NCBI NO: 7486256 NR Description: hypothetical protein F27G19.50 - Arabidopsis >gi|4972070|emb|CAB43877.1| putative protein [Arabidopsis >gi|7269599|emb|CAB81395.1| putative protein [Arabidopsis
  misc_feature (1)..(103): Homolog of NCBI NO: 24417390 NR Description: unknown [Arabidopsis thaliana]
MFVIEAYRTLRDRGPYPADQVLRGLEGSFAFVVYDTQTSSVFSALSSDGGKSLYWGISGDGSVVMSDDIQIIKQGCAKSFAPFPNGKPKLKFFISPIKKETYF

SEQ ID NO: 108427 - DNA, 897 bp, Arabidopsis thaliana
  misc_feature (1)..(897): Ceres Seq. ID no. 13667439
  misc_feature: MA Experiment ID: 20000171 Result: Up-regulated in Transcription
  misc_feature: MA Experiment 20000171 PARAMETER Experiment Name: At_42deg_Heat_P Parameter: Age (day) Value: 14
  misc_feature: MA Experiment 20000171 PARAMETER Experiment Name: At_42deg_Heat_P Parameter: Organism Value: A. thaliana
  misc_feature: MA Experiment 20000171 PARAMETER Experiment Name: At_42deg_Heat_P Parameter: Plant Line Value: WS
  misc_feature: MA Experiment 20000171 PARAMETER Experiment Name: At_42deg_Heat_P Parameter: Temperature (deg C) Value: 42 vs. 22
  misc_feature: MA Experiment 20000171 PARAMETER Experiment Name: At_42deg_Heat_P Parameter: Timepoint (hr) Value: 1
  misc_feature: MA Experiment 20000171 PARAMETER Experiment Name: At_42deg_Heat_P Parameter: Tissue Value: Aerial
  misc_feature: MA Experiment ID: 20000173 Result: Up-regulated in Transcription
  misc_feature: MA Experiment 20000173 PARAMETER Experiment Name: At_42deg_Heat_P Parameter: Age (day) Value: 14
  misc_feature: MA Experiment 20000173 PARAMETER Experiment Name: At_42deg_Heat_P Parameter: Organism Value: A. thaliana
  misc_feature: MA Experiment 20000173 PARAMETER Experiment Name: At_42deg_Heat_P Parameter: Plant Line Value: WS
  misc_feature: MA Experiment 20000173 PARAMETER Experiment Name: At_42deg_Heat_P Parameter: Temperature (deg C) Value: 42 vs. 22
  misc_feature: MA Experiment 20000173 PARAMETER Experiment Name: At_42deg_Heat_P Parameter: Timepoint (hr) Value: 6
  misc_feature: MA Experiment 20000173 PARAMETER Experiment Name: At_42deg_Heat_P Parameter: Tissue Value: Aerial
  misc_feature: MA Experiment ID: 20000184 Result: Down-regulated in Transcription
  misc_feature: MA Experiment 20000184 PARAMETER Experiment Name: At_Shoots__P Parameter: Age (day) Value: 7
  misc_feature: MA Experiment 20000184 PARAMETER Experiment Name: At_Shoots__P Parameter: Tissue Value: Shoots vs. Whole Plant
  misc_feature: MA Experiment ID: 20000185 Result: Up-regulated in Transcription
  misc_feature: MA Experiment 20000185 PARAMETER Experiment Name: At_Roots__P Parameter: Age (day) Value: 7 vs. 21
  misc_feature: MA Experiment 20000185 PARAMETER Experiment Name: At_Roots__P Parameter: Organism Value: A. thaliana
  misc_feature: MA Experiment 20000185 PARAMETER Experiment Name: At_Roots__P Parameter: Tissue Value: Roots vs. Whole Plant
  misc_feature: MA Experiment ID: 20000227 Result: Down-regulated in Transcription
  misc_feature: MA Experiment 20000227 PARAMETER Experiment Name: At_Root-Tips-vs-Tops_P Parameter: Tissue Value: Root Tips vs. Root Tops
  misc_feature: MA Experiment ID: 20000495 Result: Up-regulated in Transcription
  misc_feature: MA Experiment 20000495 PARAMETER Experiment Name: At_Guard_Cells_P Parameter: Harvest Date Value: 8/2/2002
  misc_feature: MA Experiment 20000495 PARAMETER Experiment Name: At_Guard_Cells_P Parameter: Organism Value: A. thaliana
  misc_feature: MA Experiment 20000495 PARAMETER Experiment Name: At_Guard_Cells_P Parameter: Tissue Value: Guard Cells vs. Leaves
  misc_feature: Pfam Name: GATA Pfam Description: GATA zinc finger
gtatgtgttaaagagtgaatggagctgtggacagaagctagagccttaaaggcaagtctaagaggagaatctactatatctctcaaacatcaccaagtgattgtgtcggaagatttaagccgaacttcttccttgccggaagatttctccgttgagtgtttcctcgatttctcagaaggtcaaaaagaagaagaagaagaagttgtctctgtttcttcttcacaagagcaagaagaacaagaacatgattgtgtctttagttcacaaccttgcatctttgatcaacttccttctttgccggatgaagatgtggaagagcttgaatgggtatctcgtgttgtggatgattgttcatcaccagaagtttcacttctcttaacacaaacacataaaaccaaaccaagcttctcaagaattccggttaaaccaagaaccaaacggtctcggaacagtttaaccggtagtcgtgtttggccactcgtttcaaccaatcatcaacatgcagcaacagagcagttgaggaagaagaaacaagaaactgtccttgtgtttcaacgaagatgcagccattgtggcacaaacaacacaccacagtggagaaccggtccggtcggtccaaaaaccttatgtaatgcatgtggagtccggtttaagtctggtaggctctgcccggaatacagaccggcggatagtccgacgttctcgaatgagattcactcaaatcttcataggaaggttctggaattaagaaagagtaaagagttgggtgaagaaacaggtgaagctagtactaaatcagacccagtcaaatttggcagcaagtggtagataagacttaggtaaaacctactttttgtaacattatctgtagtgttgtaatttaacaacttgcttctt

SEQ ID NO: 108428 - protein, 269 aa, Arabidopsis thaliana; identical to SEQ ID NO: 80584
  peptide (1)..(269): Ceres Seq. ID no. 13667440
  misc_feature: Pfam Name: GATA Pfam Description: GATA zinc finger
  misc_feature (1)..(269): Homolog of NCBI NO: 15236172 NR Description: GATA transcription factor 3 [Arabidopsis thaliana]
  misc_feature (1)..(269): Homolog of NCBI NO: 7484970 NR Description: GATA-binding transcription factor homolog 3
  misc_feature (1)..(269): Homolog of NCBI NO: 20466648 NR Description: GATA transcription factor 3 [Arabidopsis >gi|22136458|gb|AAM91307.1| GATA transcription factor 3
  misc_feature (30)..(172): Homolog of NCBI NO: 15225399 NR Description: GATA zinc finger protein [Arabidopsis thaliana]
  misc_feature (180)..(249): Homolog of NCBI NO: 15225399 NR Description: GATA zinc finger protein [Arabidopsis thaliana]
  misc_feature (38)..(251): Homolog of NCBI NO: 15232355 NR Description: GATA zinc finger protein [Arabidopsis thaliana]
  misc_feature (42)..(247): Homolog of NCBI NO: 15234336 NR Description: GATA zinc finger protein [Arabidopsis thaliana]
  misc_feature (41)..(156): Homolog of NCBI NO: 38344977 NR Description: OSJNBa0011L07.7 [Oryza sativa (japonica
  misc_feature (184)..(262): Homolog of NCBI NO: 38344977 NR Description: OSJNBa0011L07.7 [Oryza sativa (japonica
  misc_feature (93)..(249): Homolog of NCBI NO: 37572447 NR Description: AG-motif binding protein-3 [Nicotiana tabacum]

SEQ ID NO: 108429 - DNA, 2108 bp, Arabidopsis thaliana
  misc_feature (1)..(2108): Ceres Seq. ID no. 13667452
  misc_feature: MA Experiment ID: 20000166 Result: Down-regulated in Transcription
  misc_feature: MA Experiment 20000166 PARAMETER Experiment Name: At_100uM_ABA_P Parameter: Age (day) Value: 14
  misc_feature: MA Experiment 20000166 PARAMETER Experiment Name: At_100uM_ABA_P Parameter: Organism Value: A. thaliana
  misc_feature: MA Experiment 20000166 PARAMETER Experiment Name: At_100uM_ABA_P Parameter: Plant Line Value: WS
  misc_feature: MA Experiment 20000166 PARAMETER Experiment Name: At_100uM_ABA_P Parameter: Timepoint (hr) Value: 1
  misc_feature: MA Experiment 20000166 PARAMETER Experiment Name: At_100uM_ABA_P Parameter: Tissue Value: Aerial
  misc_feature: MA Experiment 20000166 PARAMETER Experiment Name: At_100uM_ABA_P Parameter: Treatment Value: 100uM ABA vs. No Treatment
  misc_feature: MA Experiment ID: 20000169 Result: Down-regulated in Transcription
  misc_feature: MA Experiment 20000169 PARAMETER Experiment Name: At_100uM_ABA_P Parameter: Age (day) Value: 14
  misc_feature: MA Experiment 20000169 PARAMETER Experiment Name: At_100uM_ABA_P Parameter: Organism Value: A. thaliana
  misc_feature: MA Experiment 20000169 PARAMETER Experiment Name: At_100uM_ABA_P Parameter: Plant Line Value: WS
  misc_feature: MA Experiment 20000169 PARAMETER Experiment Name: At_100uM_ABA_P Parameter: Timepoint (hr) Value: 6
  misc_feature: MA Experiment 20000169 PARAMETER Experiment Name: At_100uM_ABA_P Parameter: Tissue Value: Aerial
  misc_feature: MA Experiment 20000169 PARAMETER Experiment Name: At_100uM_ABA_P Parameter: Treatment Value: 100uM ABA vs. No Treatment
  misc_feature: MA Experiment ID: 20000171 Result: Down-regulated in Transcription
  misc_feature: MA Experiment 20000171 PARAMETER Experiment Name: At_42deg_Heat_P Parameter: Age (day) Value: 14
  misc_feature: MA Experiment 20000171 PARAMETER Experiment Name: At_42deg_Heat_P Parameter: Organism Value: A. thaliana
  misc_feature: MA Experiment 20000171 PARAMETER Experiment Name: At_42deg_Heat_P Parameter: Plant Line Value: WS
  misc_feature: MA Experiment 20000171 PARAMETER Experiment Name: At_42deg_Heat_P Parameter: Temperature (deg C) Value: 42 vs. 22
  misc_feature: MA Experiment 20000171 PARAMETER Experiment Name: At_42deg_Heat_P Parameter: Timepoint (hr) Value: 1
  misc_feature: MA Experiment 20000171 PARAMETER Experiment Name: At_42deg_Heat_P Parameter: Tissue Value: Aerial
  misc_feature: MA Experiment ID: 20000179 Result: Up-regulated in Transcription
  misc_feature: MA Experiment 20000179 PARAMETER Experiment Name: At_Germinating_Seeds_P Parameter: Age (hr) Value: 6 vs. 0
  misc_feature: MA Experiment 20000179 PARAMETER Experiment Name: At_Germinating_Seeds_P Parameter: Tissue Value: Germinating Seeds
  misc_feature: MA Experiment ID: 20000182 Result: Up-regulated in Transcription
  misc_feature: MA Experiment 20000182 PARAMETER Experiment Name: At_2mM_SA_P Parameter: Age (day) Value: 14
  misc_feature: MA Experiment 20000182 PARAMETER Experiment Name: At_2mM_SA_P Parameter: Organism Value: A. thaliana
  misc_feature: MA Experiment 20000182 PARAMETER Experiment Name: At_2mM_SA_P Parameter: Plant Line Value: WS
  misc_feature: MA Experiment 20000182 PARAMETER Experiment Name: At_2mM_SA_P Parameter: Timepoint (hr) Value: 6
  misc_feature: MA Experiment 20000182 PARAMETER Experiment Name: At_2mM_SA_P Parameter: Tissue Value: Aerial
  misc_feature: MA Experiment 20000182 PARAMETER Experiment Name: At_2mM_SA_P Parameter: Treatment Value: 2mM SA vs. No Treatment
  misc_feature: MA Experiment ID: 20000184 Result: Down-regulated in Transcription
  misc_feature: MA Experiment 20000184 PARAMETER Experiment Name: At_Shoots__P Parameter: Age (day) Value: 7
  misc_feature: MA Experiment 20000184 PARAMETER Experiment Name: At_Shoots__P Parameter: Tissue Value: Shoots vs. Whole Plant
  misc_feature: MA Experiment ID: 20000185 Result: Down-regulated in Transcription
  misc_feature: MA Experiment 20000185 PARAMETER Experiment Name: At_Roots__P Parameter: Age (day) Value: 7 vs. 21
  misc_feature: MA Experiment 20000185 PARAMETER Experiment Name: At_Roots__P Parameter: Organism Value: A. thaliana
  misc_feature: MA Experiment 20000185 PARAMETER Experiment Name: At_Roots__P Parameter: Tissue Value: Roots vs. Whole Plant
  misc_feature: MA Experiment ID: 20000213 Result: Up-regulated in Transcription
  misc_feature: MA Experiment 20000213 PARAMETER Experiment Name: At_4deg_Cold_P Parameter: Timepoint (hr) Value: 2
  misc_feature: MA Experiment ID: 20000234 Result: Down-regulated in Transcription
  misc_feature: MA Experiment 20000234 PARAMETER Experiment Name: At_Siliques_P Parameter: Age (day) Value: 21
  misc_feature: MA Experiment 20000234 PARAMETER Experiment Name: At_Siliques_P Parameter: Organism Value: A. thaliana
  misc_feature: MA Experiment 20000234 PARAMETER Experiment Name: At_Siliques_P Parameter: Plant Line Value: WS
  misc_feature: MA Experiment 20000234 PARAMETER Experiment Name: At_Siliques_P Parameter: Tissue Value: Less Than 5mm Siliques vs. Whole Plant
  misc_feature: MA Experiment ID: 20000235 Result: Down-regulated in Transcription
  misc_feature: MA Experiment 20000235 PARAMETER Experiment Name: At_Siliques_P Parameter: Age (day) Value: 21
  misc_feature: MA Experiment 20000235 PARAMETER Experiment Name: At_Siliques_P Parameter: Organism Value: A. thaliana
  misc_feature: MA Experiment 20000235 PARAMETER Experiment Name: At_Siliques_P Parameter: Plant Line Value: WS
  misc_feature: MA Experiment 20000235 PARAMETER Experiment Name: At_Siliques_P Parameter: Tissue Value: 5-10mm Siliques vs. Whole Plant
  misc_feature: MA Experiment ID: 20000264 Result: Down-regulated in Transcription
  misc_feature: MA Experiment 20000264 PARAMETER Experiment Name: At_Open_Flower_P Parameter: Age (day) Value: 21
  misc_feature: MA Experiment 20000264 PARAMETER Experiment Name: At_Open_Flower_P Parameter: Plant Line Value: WS
  misc_feature: MA Experiment 20000264 PARAMETER Experiment Name: At_Open_Flower_P Parameter: Tissue Value: Open Flower vs. Whole Plant
  misc_feature: MA Experiment ID: 20000286 Result: Down-regulated in Transcription
  misc_feature: MA Experiment 20000286 PARAMETER Experiment Name: At_Open_Flower_P Parameter: Age (day) Value: 21
  misc_feature: MA Experiment 20000286 PARAMETER Experiment Name: At_Open_Flower_P Parameter: Plant Line Value: WS
  misc_feature: MA Experiment 20000286 PARAMETER Experiment Name: At_Open_Flower_P Parameter: Tissue Value: Half Open vs. Whole Plant
  misc_feature: MA Experiment ID: 20000438 Result: Down-regulated in Transcription
  misc_feature: MA Experiment 20000438 PARAMETER Experiment Name: At_Shoots__P Parameter: Age (day) Value: 14
  misc_feature: MA Experiment 20000438 PARAMETER Experiment Name: At_Shoots__P Parameter: Tissue Value: Shoots vs. Whole Plant
  misc_feature: MA Experiment ID: 20000453 Result: Down-regulated in Transcription
  misc_feature: MA Experiment 20000453 PARAMETER Experiment Name: At_100uM_ABA_P Parameter: Age (day) Value: 15
  misc_feature: MA Experiment 20000453 PARAMETER Experiment Name: At_100uM_ABA_P Parameter: Organism Value: A. thaliana
  misc_feature: MA Experiment 20000453 PARAMETER Experiment Name: At_100uM_ABA_P Parameter: Plant Line Value: WS
  misc_feature: MA Experiment 20000453 PARAMETER Experiment Name: At_100uM_ABA_P Parameter: Timepoint (hr) Value: 24
  misc_feature: MA Experiment 20000453 PARAMETER Experiment Name: At_100uM_ABA_P Parameter: Tissue Value: Aerial
  misc_feature: MA Experiment 20000453 PARAMETER Experiment Name: At_100uM_ABA_P Parameter: Treatment Value: 100uM ABA vs. No Treatment
  misc_feature: MA Experiment ID: 20000455 Result: Down-regulated in Transcription
  misc_feature: MA Experiment 20000455 PARAMETER Experiment Name: At_100uM_ABA_P Parameter: Age (day) Value: 16
  misc_feature: MA Experiment 20000455 PARAMETER Experiment Name: At_100uM_ABA_P Parameter: Organism Value: A. thaliana
  misc_feature: MA Experiment 20000455 PARAMETER Experiment Name: At_100uM_ABA_P Parameter: Plant Line Value: WS
  misc_feature: MA Experiment 20000455 PARAMETER Experiment Name: At_100uM_ABA_P Parameter: Timepoint (hr) Value: 48
  misc_feature: MA Experiment 20000455 PARAMETER Experiment Name: At_100uM_ABA_P Parameter: Tissue Value: Aerial
  misc_feature: MA Experiment 20000455 PARAMETER Experiment Name: At_100uM_ABA_P Parameter: Treatment Value: 100uM ABA vs. No Treatment
  misc_feature: MA Experiment ID: 20000460 Result: Up-regulated in Transcription
  misc_feature: MA Experiment 20000460 PARAMETER Experiment Name: At_10percent_PEG_P Parameter: Age (day) Value: 12
  misc_feature: MA Experiment 20000460 PARAMETER Experiment Name: At_10percent_PEG_P Parameter: Organism Value: A. thaliana
  misc_feature: MA Experiment 20000460 PARAMETER Experiment Name: At_10percent_PEG_P Parameter: Plant Line Value: WS
  misc_feature: MA Experiment 20000460 PARAMETER Experiment Name: At_10percent_PEG_P Parameter: Timepoint (day) Value: 12
  misc_feature: MA Experiment 20000460 PARAMETER Experiment Name: At_10percent_PEG_P Parameter: Tissue Value: Whole Plant
  misc_feature: MA Experiment 20000460 PARAMETER Experiment Name: At_10percent_PEG_P Parameter: Treatment Value: 10percent PEG vs. No Treatment
  misc_feature: MA Experiment ID: 20000495 Result: Down-regulated in Transcription
  misc_feature: MA Experiment 20000495 PARAMETER Experiment Name: At_Guard_Cells_P Parameter: Harvest Date Value: 8/2/2002
  misc_feature: MA Experiment 20000495 PARAMETER Experiment Name: At_Guard_Cells_P Parameter: Organism Value: A. thaliana
  misc_feature: MA Experiment 20000495 PARAMETER Experiment Name: At_Guard_Cells_P Parameter: Tissue Value: Guard Cells vs. Leaves
  misc_feature: MA Experiment ID: 20000527 Result: Up-regulated in Transcription
  misc_feature: MA Experiment 20000527 PARAMETER Experiment Name: At_10percent_PEG_P Parameter: Age (day) Value: 20
  misc_feature: MA Experiment 20000527 PARAMETER Experiment Name: At_10percent_PEG_P Parameter: Organism Value: A. thaliana
  misc_feature: MA Experiment 20000527 PARAMETER Experiment Name: At_10percent_PEG_P Parameter: Plant Line Value: WS
  misc_feature: MA Experiment 20000527 PARAMETER Experiment Name: At_10percent_PEG_P Parameter: Timepoint (day) Value: 20
  misc_feature: MA Experiment 20000527 PARAMETER Experiment Name: At_10percent_PEG_P Parameter: Tissue Value: Whole Plant
  misc_feature: MA Experiment 20000527 PARAMETER Experiment Name: At_10percent_PEG_P Parameter: Treatment Value: 10percent PEG vs. No Treatment
  misc_feature: MA Experiment ID: 20000606 Result: Up-regulated in Transcription
  misc_feature: MA Experiment 20000606 PARAMETER Experiment Name: At_CS8548_Mutant_P Parameter: Age (day) Value: 14
  misc_feature: MA Experiment 20000606 PARAMETER Experiment Name: At_CS8548_Mutant_P Parameter: Plant Line Value: CS8548 vs. wt
  misc_feature: MA Experiment 20000606 PARAMETER Experiment Name: At_CS8548_Mutant_P Parameter: Tissue Value: Whole Plant
  misc_feature: MA Experiment ID: 20000709 Result: Down-regulated in Transcription
  misc_feature: MA Experiment 20000709 PARAMETER Experiment Name: At_15mM_NH4NO3_L-to-H_P Parameter: Age (hr) Value: 14
  misc_feature: MA Experiment 20000709 PARAMETER Experiment Name: At_15mM_NH4NO3_L-to-H_P Parameter: Organism Value: A. thaliana
  misc_feature: MA Experiment 20000709 PARAMETER Experiment Name: At_15mM_NH4NO3_L-to-H_P Parameter: Plant Line Value: WS
  misc_feature: MA Experiment 20000709 PARAMETER Experiment Name: At_15mM_NH4NO3_L-to-H_P Parameter: Timepoint (hr) Value: 4
  misc_feature: MA Experiment 20000709 PARAMETER Experiment Name: At_15mM_NH4NO3_L-to-H_P Parameter: Tissue Value: Aerial
  misc_feature: MA Experiment 20000709 PARAMETER Experiment Name: At_15mM_NH4NO3_L-to-H_P Parameter: Treatment Value: 15mM NH4NO3 vs. 30mM Mannitol
  misc_feature: MA Experiment ID: 20000794 Result: Down-regulated in Transcription
  misc_feature: MA Experiment 20000794 PARAMETER Experiment Name: At_Petals_P Parameter: Age (day) Value: 23-25 days
  misc_feature: MA Experiment 20000794 PARAMETER Experiment Name: At_Petals_P Parameter: Plant Line Value: WS
  misc_feature: MA Experiment 20000794 PARAMETER Experiment Name: At_Petals_P Parameter: Tissue Value: Petals vs. Whole plant
  misc_feature: MA Experiment ID: 20001248 Result: Up-regulated in Transcription
  misc_feature: MA Experiment 20001248 PARAMETER Experiment Name: At_Far-red-induction_P Parameter: Age (day) Value: 7
  misc_feature: MA Experiment 20001248 PARAMETER Experiment Name: At_Far-red-induction_P Parameter: Light Value: Far-red vs. White
  misc_feature: MA Experiment 20001248 PARAMETER Experiment Name: At_Far-red-induction_P Parameter: Organism Value: A. thaliana
  misc_feature: MA Experiment 20001248 PARAMETER Experiment Name: At_Far-red-induction_P Parameter: Plant Line Value: Columbia
  misc_feature: MA Experiment 20001248 PARAMETER Experiment Name: At_Far-red-induction_P Parameter: Timepoint (hr) Value: 4
  misc_feature: MA Experiment 20001248 PARAMETER Experiment Name: At_Far-red-induction_P Parameter: Tissue Value: Whole Plant
  misc_feature: MA Experiment ID: 20001557 Result: Up-regulated in Transcription
  misc_feature: MA Experiment 20001557 PARAMETER Experiment Name: At_Drought_Soil_Dry_P Parameter: Age (day) Value: 27
  misc_feature: MA Experiment 20001557 PARAMETER Experiment Name: At_Drought_Soil_Dry_P Parameter: Organism Value: A. thaliana
  misc_feature: MA Experiment 20001557 PARAMETER Experiment Name: At_Drought_Soil_Dry_P Parameter: Plant Line Value: WS
  misc_feature: MA Experiment 20001557 PARAMETER Experiment Name: At_Drought_Soil_Dry_P Parameter: Post Timepoint (hr) Value: 3
  misc_feature: MA Experiment 20001557 PARAMETER Experiment Name: At_Drought_Soil_Dry_P Parameter: Post-Treatment Value: Re-Water vs. No Drought
  misc_feature: MA Experiment 20001557 PARAMETER Experiment Name: At_Drought_Soil_Dry_P Parameter: Timepoint (day) Value: 13
  misc_feature: MA Experiment 20001557 PARAMETER Experiment Name: At_Drought_Soil_Dry_P Parameter: Treatment Value: Drought vs. No Drought
  misc_feature: MA Experiment ID: 20001558 Result: Up-regulated in Transcription
  misc_feature: MA Experiment 20001558 PARAMETER Experiment Name: At_Drought_Soil_Dry_P Parameter: Age (day) Value: 27
  misc_feature: MA Experiment 20001558 PARAMETER Experiment Name: At_Drought_Soil_Dry_P Parameter: Organism Value: A. thaliana
  misc_feature: MA Experiment 20001558 PARAMETER Experiment Name: At_Drought_Soil_Dry_P Parameter: Plant Line Value: WS
  misc_feature: MA Experiment 20001558 PARAMETER Experiment Name: At_Drought_Soil_Dry_P Parameter: Post Timepoint (hr) Value: 6
  misc_feature: MA Experiment 20001558 PARAMETER Experiment Name: At_Drought_Soil_Dry_P Parameter: Post-Treatment Value: Re-Water vs. No Drought
  misc_feature: MA Experiment 20001558 PARAMETER Experiment Name: At_Drought_Soil_Dry_P Parameter: Timepoint (day) Value: 13
  misc_feature: MA Experiment 20001558 PARAMETER Experiment Name: At_Drought_Soil_Dry_P Parameter: Treatment Value: Drought vs. No Drought
  misc_feature: MA Experiment ID: 20001773 Result: Down-regulated in Transcription
  misc_feature: MA Experiment 20001773 PARAMETER Experiment Name: At_Far-red-enriched-adult_P Parameter: Age (day) Value: 30
  misc_feature: MA Experiment 20001773 PARAMETER Experiment Name: At_Far-red-enriched-adult_P Parameter: Light Value: Far-red enriched vs. White
  misc_feature: MA Experiment 20001773 PARAMETER Experiment Name: At_Far-red-enriched-adult_P Parameter: Organism Value: A. thaliana
  misc_feature: MA Experiment 20001773 PARAMETER Experiment Name: At_Far-red-enriched-adult_P Parameter: Plant Line Value: Columbia
  misc_feature: MA Experiment 20001773 PARAMETER Experiment Name: At_Far-red-enriched-adult_P Parameter: Timepoint (hr) Value: 48
  misc_feature: MA Experiment 20001773 PARAMETER Experiment Name: At_Far-red-enriched-adult_P Parameter: Tissue Value: Aerial
  misc_feature: MA Experiment ID: 20001774 Result: Down-regulated in Transcription
  misc_feature: MA Experiment 20001774 PARAMETER Experiment Name: At_Far-red-enriched-adult_P Parameter: Age (day) Value: 31
  misc_feature: MA Experiment 20001774 PARAMETER Experiment Name: At_Far-red-enriched-adult_P Parameter: Light Value: Far-red enriched vs. White
  misc_feature: MA Experiment 20001774 PARAMETER Experiment Name: At_Far-red-enriched-adult_P Parameter: Organism Value: A. thaliana
  misc_feature: MA Experiment 20001774 PARAMETER Experiment Name: At_Far-red-enriched-adult_P Parameter: Plant Line Value: Columbia
  misc_feature: MA Experiment 20001774 PARAMETER Experiment Name: At_Far-red-enriched-adult_P Parameter: Timepoint (hr) Value: 72
  misc_feature: MA Experiment 20001774 PARAMETER Experiment Name: At_Far-red-enriched-adult_P Parameter: Tissue Value: Aerial
  misc_feature: MA Experiment ID: 20001904 Result: Down-regulated in Transcription
  misc_feature: MA Experiment 20001904 PARAMETER Experiment Name: At_Drought_Reproduction_P Parameter: Age (day) Value: 37
  misc_feature: MA Experiment 20001904 PARAMETER Experiment Name: At_Drought_Reproduction_P Parameter: Organism Value: A. thaliana
  misc_feature: MA Experiment 20001904 PARAMETER Experiment Name: At_Drought_Reproduction_P Parameter: Plant Line Value: WS
  misc_feature: MA Experiment 20001904 PARAMETER Experiment Name: At_Drought_Reproduction_P Parameter: Timepoint (day) Value: 7
  misc_feature: MA Experiment 20001904 PARAMETER Experiment Name: At_Drought_Reproduction_P Parameter: Tissue Value: Rosettes
  misc_feature: MA Experiment 20001904 PARAMETER Experiment Name: At_Drought_Reproduction_P Parameter: Treatment Value: Drought vs. No Drought
ccctccaaatctttcaagtatcccatgaacaaaagaaacccgaaaaggaagaatccacctgaagagctccctccaccgcctccgccaccaccaccaccaccatcatcccgaggtgggaacccgtttccaccgtcatcaagctttggggatttaacttttccatgagtaggagcttgtgtgattgttggtgattgccgtgtaacggtctgtgtttgtccttgactgcattttgaattcagcgcagagttacatgcaaagactggtcttttattcttagagacgacaactggttgcactgcatcctggagagaagggaatttactttggctccaaggctggcgttgcatagaaacgcttgtaggataacgcctttgagagtttccattactcgtaaaagatttctcacgaggagcgaggtacaccgatgtttgtgtaccaatacacaatgatggattcattaccggcataactacaaacagcaacaaaacaataatctttaacctatttcacaagggagaaaaataaaaataaaaatcaatttctcataaatcgaatagagaaaaaaattatggattcatcaattttgaaattcgattaatgataaaaacccatagagatttggatcaaagcaggtagatttttttgtcgaggaaaaatttgggattttgagaagataaacaccttagcaaattcaaagaagaatatatcaaacatcttttgttttctctgataatgtcgggagcatcttctgtttcttctgtttcttctatttgttcctctaatgtatcattgatccctacgggacctcaagtgttcatcaatttccgggggaaagatttacgaaaaggcttcatgagctttcttacgcctgctttgaaaaaagaaaagatcaacgtgtttatagacgaacaagaggagaggggcaaatacctaatcagtctttttgatacgataggtgagtcaaaaatcgctttggttatcttttctgaaggatactgcgagtcacgctggtgtatggacgagctggtacaaatcaaggaatacatggatcaaaacagactcgtaatcattccaatattctacaggattgatctcgatgtggtcaaacatcttaaaggaaaattcggcaataatttcttggatttggtagataaatatcatcccgaaccaaaaaaactccaaaaatggatggaagctttgttctctgtttgcgagttgttttccttgattttgccaaaaaacagtgacatttcggatagagattttgtaaagtcaatcgtcaaggcggttaaaaaagtgcagcggaatttctcccaagaaagaaatggagtaaatgaatatcaagatttctcagtccctccaagtaaactcactatcactatgcatgagtcaccaaatgaggaagccgttcaagttacggtgctaaatgaattttaccagatgaagaatcagtcaccagtgccatcatacgagttcaaattttgggtcgaccttactagaccaaagggtaacgttttcatgattgacgcaagagatctttccattgcatggtcagaggactccaaccattggacctggctcactctcgcaaaccaaaattcaaatgaatcagtgatggaaattgcatttttgaaaagtgctagctggctagacgtagctggaaagtttgacactcgatatttgaccccgaggacaaggtacgaggtggtgttcgtagtgaagttagaatacacattcgaatgggagacactagtgaagctaaagctagacttgccgaatacttgggagaaaccgcaagaacagaatgtggacatgtttgactacataagtgaccaatggctcgatattccagttggagagttcaccacatcgaagaaaaacgtcggggaaatctcttttgcaatgtacgaacacgagtgccaactgtggaagtcagggctcttcgtcaaaggtgttacaattcgtcccaaatactaagtcatttataagcatgtatgttgttggtctgagatatatatagtggaaatgctcgctttgaaccataatcttagtttcacctcccaaatgtttgttacaatgttacttgtgtagatagtttgaccggtttc

SEQ ID NO: 108430 - protein, 414 aa, Arabidopsis thaliana
  peptide (1)..(414): Ceres Seq. ID no. 13667453
  misc_feature (27)..(158): Pfam Name: TIR domain Pfam Description: TIR domain
  misc_feature (1)..(414): Homolog of NCBI NO: 24417348 NR Description: unknown [Arabidopsis thaliana]
  misc_feature (1)..(414): Homolog of NCBI NO: 30697190 NR Description: disease resistance protein (TIR class), putative thaliana] >gi|13272479|gb|AAK17178.1|AF325110_1 hypothetical
  misc_feature (1)..(414): Homolog of NCBI NO: 7487798 NR Description: hypothetical protein T8F5.18 - Arabidopsis >gi|3335346|gb|AAC27148.1|AAC27148 Contains similarity to TMV protein N gb|U15605 from Nictiana glutinosa. [Arabidopsis
  misc_feature (18)..(201): Homolog of NCBI NO: 28436442 NR Description: unknown [Arabidopsis thaliana] unknown [Arabidopsis thaliana] >gi|28436446|gb|AAO43290.1| [Arabidopsis thaliana] >gi|28436448|gb|AAO43291.1| unknown
  misc_feature (18)..(199): Homolog of NCBI NO: 28436440 NR Description: unknown [Arabidopsis thaliana]
  misc_feature (18)..(199): Homolog of NCBI NO: 28436434 NR Description: unknown [Arabidopsis thaliana] unknown [Arabidopsis thaliana] >gi|28436438|gb|AAO43286.1|
  misc_feature (18)..(199): Homolog of NCBI NO: 28394792 NR Description: unknown [Arabidopsis lyrata]
  misc_feature (6)..(170): Homolog of NCBI NO: 25370554 NR Description: probable disease resistance protein [imported] - thaliana >gi|4263705|gb|AAD15391.1| disease resistance protein
  misc_feature (6)..(170): Homolog of NCBI NO: 30685189 NR Description: disease resistance protein (TIR class), putative
  misc_feature (162)..(221): Homolog of NCBI NO: 25370554 NR Description: probable disease resistance protein [imported] - thaliana >gi|4263705|gb|AAD15391.1| disease resistance protein
MSGASSVSSVSSICSSNVSLIPTGPQVFINFRGKDLRKGFMSFLTPALKKEKINVFIDEQEERGKYLISLFDTIGESKIALVIFSEGYCESRWCMDELVQIKEYMDQNRLVIIPIFYRIDLDVVKHLKGKFGNNFLDLVDKYHPEPKKLQKWMEALFSVCELFSLILPKNSDISDRDFVKSIVKAVKKVQRNFSQERNGVNEYQDFSVPPSKLTITMHESPNEEAVQVTVLNEFYQMKNQSPVPSYEFKFWVDLTRPKGNVFMIDARDLSIAWSEDSNHWTWLTLANQNSNESVMEIAFLKSASWLDVAGKFDTRYLTPRTRYEVVFVVKLEYTFEWETLVKLKLDLPNTWEKPQEQNVDMFDYISDQWLDIPVGEFTTSKKNVGEISFAMYEHECQLWKSGLFVKGVTIRPKY

SEQ ID NO: 108431 - protein, 374 aa, Arabidopsis thaliana
  peptide (1)..(374): Ceres Seq. ID no. 13667454
  misc_feature (1)..(118): Pfam Name: TIR domain Pfam Description: TIR domain
  misc_feature (1)..(374): Homolog of NCBI NO: 24417348 NR Description: unknown [Arabidopsis thaliana]
  misc_feature (1)..(374): Homolog of NCBI NO: 30697190 NR Description: disease resistance protein (TIR class), putative thaliana] >gi|13272479|gb|AAK17178.1|AF325110_1 hypothetical
  misc_feature (1)..(374): Homolog of NCBI NO: 7487798 NR Description: hypothetical protein T8F5.18 - Arabidopsis >gi|3335346|gb|AAC27148.1|AAC27148 Contains similarity to TMV protein N gb|U15605 from Nictiana glutinosa. [Arabidopsis
  misc_feature (1)..(161): Homolog of NCBI NO: 28436442 NR Description: unknown [Arabidopsis thaliana] unknown [Arabidopsis thaliana] >gi|28436446|gb|AAO43290.1| [Arabidopsis thaliana] >gi|28436448|gb|AAO43291.1| unknown
  misc_feature (1)..(159): Homolog of NCBI NO: 28436440 NR Description: unknown [Arabidopsis thaliana]
  misc_feature (1)..(159): Homolog of NCBI NO: 28436434 NR Description: unknown [Arabidopsis thaliana] unknown [Arabidopsis thaliana] >gi|28436438|gb|AAO43286.1|
  misc_feature (1)..(159): Homolog of NCBI NO: 28394792 NR Description: unknown [Arabidopsis lyrata]
  misc_feature (1)..(130): Homolog of NCBI NO: 25370554 NR Description: probable disease resistance protein [imported] - thaliana >gi|4263705|gb|AAD15391.1| disease resistance protein
  misc_feature (1)..(130): Homolog of NCBI NO: 30685189 NR Description: disease resistance protein (TIR class), putative
  misc_feature (122)..(181): Homolog of NCBI NO: 25370554 NR Description: probable disease resistance protein [imported] - thaliana >gi|4263705|gb|AAD15391.1| disease resistance protein
MSFLTPALKKEKINVFIDEQEERGKYLISLFDTIGESKIALVIFSEGYCESRWCMDELVQIKEYMDQNRLVIIPIFYRIDLDVVKHLKGKFGNNFLDLVDKYHPEPKKLQKWMEALFSVCELFSLILPKNSDISDRDFVKSIVKAVKKVQRNFSQERNGVNEYQDFSVPPSKLTITMHESPNEEAVQVTVLNEFYQMKNQSPVPSYEFKFWVDLTRPKGNVFMIDARDLSIAWSEDSNHWTWLTLANQNSNESVMEIAFLKSASWLDVAGKFDTRYLTPRTRYEVVFVVKLEYTFEWETLVKLKLDLPNTWEKPQEQNVDMFDYISDQWLDIPVGEFTTSKKNVGEISFAMYEHECQLWKSGLFVKGVTIRPKY

SEQ ID NO: 108432 - protein, 320 aa, Arabidopsis thaliana
  peptide (1)..(320): Ceres Seq. ID no. 13667455
  misc_feature (1)..(64): Pfam Name: TIR domain Pfam Description: TIR domain
  misc_feature (1)..(320): Homolog of NCBI NO: 24417348 NR Description: unknown [Arabidopsis thaliana]
  misc_feature (1)..(320): Homolog of NCBI NO: 30697190 NR Description: disease resistance protein (TIR class), putative thaliana] >gi|13272479|gb|AAK17178.1|AF325110_1 hypothetical
  misc_feature (1)..(320): Homolog of NCBI NO: 7487798 NR Description: hypothetical protein T8F5.18 - Arabidopsis >gi|3335346|gb|AAC27148.1|AAC27148 Contains similarity to TMV protein N gb|U15605 from Nictiana glutinosa. [Arabidopsis
  misc_feature (1)..(107): Homolog of NCBI NO: 28436442 NR Description: unknown [Arabidopsis thaliana] unknown [Arabidopsis thaliana] >gi|28436446|gb|AAO43290.1| [Arabidopsis thaliana] >gi|28436448|gb|AAO43291.1| unknown
  misc_feature (1)..(105): Homolog of NCBI NO: 28436440 NR Description: unknown [Arabidopsis thaliana]
  misc_feature (1)..(105): Homolog of NCBI NO: 28436434 NR Description: unknown [Arabidopsis thaliana] unknown [Arabidopsis thaliana] >gi|28436438|gb|AAO43286.1|
  misc_feature (1)..(105): Homolog of NCBI NO: 28394792 NR Description: unknown [Arabidopsis lyrata]
  misc_feature (1)..(76): Homolog of NCBI NO: 25370554 NR Description: probable disease resistance protein [imported] - thaliana >gi|4263705|gb|AAD15391.1| disease resistance protein
  misc_feature (1)..(76): Homolog of NCBI NO: 30685189 NR Description: disease resistance protein (TIR class), putative
  misc_feature (68)..(127): Homolog of NCBI NO: 25370554 NR Description: probable disease resistance protein [imported] - thaliana >gi|4263705|gb|AAD15391.1| disease resistance protein
MDELVQIKEYMDQNRLVIIPIFYRIDLDVVKHLKGKFGNNFLDLVDKYHPEPKKLQKWMEALFSVCELFSLILPKNSDISDRDFVKSIVKAVKKVQRNFSQERNGVNEYQDFSVPPSKLTITMHESPNEEAVQVTVLNEFYQMKNQSPVPSYEFKFWVDLTRPKGNVFMIDARDLSIAWSEDSNHWTWLTLANQNSNESVMEIAFLKSASWLDVAGKFDTRYLTPRTRYEVVFVVKLEYTFEWETLVKLKLDLPNTWEKPQEQNVDMFDYISDQWLDIPVGEFTTSKKNVGEISFAMYEHECQLWKSGLFVKGVTIRPKY

SEQ ID NO: 108433 - DNA, 2525 bp, Arabidopsis thaliana
  misc_feature (1)..(2525): Ceres Seq. ID no. 13667460
  misc_feature: MA Experiment ID: 20000179 Result: Down-regulated in Transcription
  misc_feature: MA Experiment 20000179 PARAMETER Experiment Name: At_Germinating_Seeds_P Parameter: Age (hr) Value: 6 vs. 0
  misc_feature: MA Experiment 20000179 PARAMETER Experiment Name: At_Germinating_Seeds_P Parameter: Tissue Value: Germinating Seeds
  misc_feature: MA Experiment ID: 20000180 Result: Down-regulated in Transcription
  misc_feature: MA Experiment 20000180 PARAMETER Experiment Name: At_Germinating_Seeds_P Parameter: Age (hr) Value: 24 vs. 0
  misc_feature: MA Experiment 20000180 PARAMETER Experiment Name: At_Germinating_Seeds_P Parameter: Tissue Value: Germinating Seeds
  misc_feature: MA Experiment ID: 20000235 Result: Down-regulated in Transcription
  misc_feature: MA Experiment 20000235 PARAMETER Experiment Name: At_Siliques_P Parameter: Age (day) Value: 21
  misc_feature: MA Experiment 20000235 PARAMETER Experiment Name: At_Siliques_P Parameter: Organism Value: A. thaliana
  misc_feature: MA Experiment 20000235 PARAMETER Experiment Name: At_Siliques_P Parameter: Plant Line Value: WS
  misc_feature: MA Experiment 20000235 PARAMETER Experiment Name: At_Siliques_P Parameter: Tissue Value: 5-10mm Siliques vs. Whole Plant
  misc_feature: MA Experiment ID: 20000265 Result: Down-regulated in Transcription
  misc_feature: MA Experiment 20000265 PARAMETER Experiment Name: At_Open_Flower_P Parameter: Age (day) Value: 21
  misc_feature: MA Experiment 20000265 PARAMETER Experiment Name: At_Open_Flower_P Parameter: Plant Line Value: WS
  misc_feature: MA Experiment 20000265 PARAMETER Experiment Name: At_Open_Flower_P Parameter: Tissue Value: Closed Flower vs. Whole Plant
  misc_feature: MA Experiment ID: 20000794 Result: Down-regulated in Transcription
  misc_feature: MA Experiment 20000794 PARAMETER Experiment Name: At_Petals_P Parameter: Age (day) Value: 23-25 days
  misc_feature: MA Experiment 20000794 PARAMETER Experiment Name: At_Petals_P Parameter: Plant Line Value: WS
  misc_feature: MA Experiment 20000794 PARAMETER Experiment Name: At_Petals_P Parameter: Tissue Value: Petals vs. Whole plant
ctcttttgaacacatgggaatacacttgggagagattggtattgttctctttccttgctttctgtggttaagtttattcctaagttgtggctatgcagctataactatttcaagtcctttgacattgggacaaactctgagttcccctggtggattttatgagttaggattcttcagtcctaacaactctcacaatcagtatgtagggatctggttcaagaaaattacaccacgggtggttgtgtgggtggctaacagagaaaagccgatcacaaaccctgtggcaaatcttactatcagcagaaatggtagtcttattttgctagacagtagtaaaaatgttgtttggtcaaccagaagaccttccatatctaataagtgtcatgcaaagctcttagatacaggaaatcttgtcatagtagatgatgtttcagaaaatcttttgtggcaaagttttgagaatcctggtgatactatgctgccttactcatcgctgatgtacaaccttgccactggggagaagcgagtattatcttcgtggaaaagccacactgatccatcccctggtgatttcgtagttcgactaacaccacaagtgccagcacagatcgttactatgagaggctcatcggtttataagagaagcggtccatgggctaagaccggtttcactggcgtaccactaatggatgaatcatacacaagtcctttcagcctttcccaagatgtaggaaatggaacagggctcttctcttatttacagagaagttctgaacttacacgagttatcataacatcagagggatatctaaagacttttcggtacaatgggacaggctgggttctggactttatcactccagcaaatttatgtgatttgtatggtgcatgtggaccttttgggctgtgtgtgacgtccaatcccacaaagtgtaaatgcatgaaagggtttgtaccaaaatacaaggaggagtggaagcgcgggaacatgacttctggatgtatgcgacgtacagaattatcttgtcaggcaaacttatctacaaagacacaaggaaaaggtgtagacgtcttctatcgtctggccaatgtaaagcctccggatctctacgaatatgcaagctttgtggatgcagatcaatgccaccagggttgtctcagcaattgctcttgctctgcttttgcgtatattactggaattggttgtttgctttggaatcatgagctaatagacacagttagatattccgttggaggagagtttctttccattcgtcttgcaagttcagaactggctggaaacaggaggaccaagattattgttggtagtatcagcctttccatttttgtgattttggcctttggctcatataagtactggagatacagagcaaaacaaaatgattcatggaaaaatggtttggaaccacaagaaatctcaggtttaacattctttgagatgaataccatacgaactgctaccaataacttcaatgtctcaaacaaactcggtcaaggtggatttggtccagtttataagggaacactgtcagacaagaaggatatagccgttaaacgcctttctagcagctctgggcagggtacagaagagttcatgaacgaaataaaactcatctcaaaattacaacacagaaacttggttcgacttttgggatgctgcattgatggagaagaaaaactactaatttatgagtttctagtgaacaaaagcctcgacacttttctctttgatttgacgctaaagcttcagattgattggcctaagaggttcaacatcattcaaggtgtttcacgtgggcttctctatctccatcgtgactcttgcatgagggtcatacatcgagatctgaaggtcagcaacattctcttggacgaaaaaatgaacccaaaaatatcagatttcggattggctcggatgtttcaaggaacccaacataagacaacactcgtaagggttgttggaactctaggatacatgtctcctgagtatgcatggacaggaatgttctcagagaagtccgacatatatgcttttggagttctcctgttagaaatcataagtgggaagaagatttcaagcttttgctgtggagaggaaggcaaaacccttcttggacatgcatgggaatgttggctcgagaccggtggagtggatctattggatgaagatattagcagctcgtgttctccagttgaagttgaagtcgctcgatgtgttcagattggtctactctgcatccaacagcaagctattgacagaccaaacatagcacaagtagtgaccatgatgacaagtgcaacagatcttccgagaccaaaacaaccactctttgcattgcagattcaagatcaagagagtgttgtgtcagtctcaaagtctgtgaaccatgttacacaaactgagatatatgggcgataaagtttgctttattatgtatgaactgcagactgaaatgtaataccagcaatagagtgtaatcacttaatttaaattgtacattacg

SEQ ID NO: 108434 - protein, 812 aa, Arabidopsis thaliana
  peptide (1)..(812): Ceres Seq. ID no. 13667461
  misc_feature (77)..(187): Pfam Name: D-mannose binding lectin Pfam Description: D-mannose binding lectin
  misc_feature (12)..(812): Homolog of NCBI NO: 18407151 NR Description: S-locus protein kinase, putative [Arabidopsis >gi|3056592|gb|AAC13903.1|AAC13903 T1F9.13 [Arabidopsis thaliana] At1g61380/T1F9_13 [Arabidopsis thaliana]
  misc_feature (12)..(812): Homolog of NCBI NO: 21537374 NR Description: receptor kinase, putative [Arabidopsis thaliana]
  misc_feature (9)..(812): Homolog of NCBI NO: 15219933 NR Description: S-locus protein kinase, putative [Arabidopsis
  misc_feature (7)..(812): Homolog of NCBI NO: 15219917 NR Description: S-locus protein kinase, putative [Arabidopsis
  misc_feature (9)..(812): Homolog of NCBI NO: 15219935 NR Description: S-locus protein kinase, putative [Arabidopsis
  misc_feature (15)..(426): Homolog of NCBI NO: 15220351 NR Description: S-locus protein kinase family [Arabidopsis
  misc_feature (482)..(812): Homolog of NCBI NO: 15220351 NR Description: S-locus protein kinase family [Arabidopsis
  misc_feature (41)..(805): Homolog of NCBI NO: 25956275 NR Description: unnamed protein product [Lotus japonicus]
  misc_feature (12)..(782): Homolog of NCBI NO: 38344790 NR Description: OSJNBa0043L09.10 [Oryza sativa (japonica
  misc_feature (51)..(782): Homolog of NCBI NO: 21743079 NR Description: OSJNBb0002J11.8 [Oryza sativa (japonica
SFEHMGIHLGEIGIVLFPCFLWLSLFLSCGYAAITISSPLTLGQTLSSPGGFYELGFFSPNNSHNQYVGIWFKKITPRVVVWVANREKPITNPVANLTISRNGSLILLDSSKNVVWSTRRPSISNKCHAKLLDTGNLVIVDDVSENLLWQSFENPGDTMLPYSSLMYNLATGEKRVLSSWKSHTDPSPGDFVVRLTPQVPAQIVTMRGSSVYKRSGPWAKTGFTGVPLMDESYTSPFSLSQDVGNGTGLFSYLQRSSELTRVIITSEGYLKTFRYNGTGWVLDFITPANLCDLYGACGPFGLCVTSNPTKCKCMKGFVPKYKEEWKRGNMTSGCMRRTELSCQANLSTKTQGKGVDVFYRLANVKPPDLYEYASFVDADQCHQGCLSNCSCSAFAYITGIGCLLWNHELIDTVRYSVGGEFLSIRLASSELAGNRRTKIIVGSISLSIFVILAFGSYKYWRYRAKQNDSWKNGLEPQEISGLTFFEMNTIRTATNNFNVSNKLGQGGFGPVYKGTLSDKKDIAVKRLSSSSGQGTEEFMNEIKLISKLQHRNLVRLLGCCIDGEEKLLIYEFLVNKSLDTFLFDLTLKLQIDWPKRFNIIQGVSRGLLYLHRDSCMRVIHRDLKVSNILLDEKMNPKISDFGLARMFQGTQHKTTLVRVVGTLGYMSPEYAWTGMFSEKSDIYAFGVLLLEIISGKKISSFCCGEEGKTLLGHAWECWLETGGVDLLDEDISSSCSPVEVEVARCVQIGLLCIQQQAIDRPNIAQVVTMMTSATDLPRPKQPLFALQIQDQESVVSVSKSVNHVTQTEIYGR

SEQ ID NO: 108435 - protein, 808 aa, Arabidopsis thaliana
  peptide (1)..(808): Ceres Seq. ID no. 13667462
  misc_feature (73)..(183): Pfam Name: D-mannose binding lectin Pfam Description: D-mannose binding lectin
  misc_feature (8)..(808): Homolog of NCBI NO: 18407151 NR Description: S-locus protein kinase, putative [Arabidopsis >gi|3056592|gb|AAC13903.1|AAC13903 T1F9.13 [Arabidopsis thaliana] At1g61380/T1F9_13 [Arabidopsis thaliana]
  misc_feature (8)..(808): Homolog of NCBI NO: 21537374 NR Description: receptor kinase, putative [Arabidopsis thaliana]
  misc_feature (5)..(808): Homolog of NCBI NO: 15219933 NR Description: S-locus protein kinase, putative [Arabidopsis
  misc_feature (3)..(808): Homolog of NCBI NO: 15219917 NR Description: S-locus protein kinase, putative [Arabidopsis
  misc_feature (5)..(808): Homolog of NCBI NO: 15219935 NR Description: S-locus protein kinase, putative [Arabidopsis
  misc_feature (11)..(422): Homolog of NCBI NO: 15220351 NR Description: S-locus protein kinase family [Arabidopsis
  misc_feature (478)..(808): Homolog of NCBI NO: 15220351 NR Description: S-locus protein kinase family [Arabidopsis
  misc_feature (37)..(801): Homolog of NCBI NO: 25956275 NR Description: unnamed protein product [Lotus japonicus]
  misc_feature (8)..(778): Homolog of NCBI NO: 38344790 NR Description: OSJNBa0043L09.10 [Oryza sativa (japonica
  misc_feature (47)..(778): Homolog of NCBI NO: 21743079 NR Description: OSJNBb0002J11.8 [Oryza sativa (japonica
MGIHLGEIGIVLFPCFLWLSLFLSCGYAAITISSPLTLGQTLSSPGGFYELGFFSPNNSHNQYVGIWFKKITPRVVVWVANREKPITNPVANLTISRNGSLILLDSSKNVVWSTRRPSISNKCHAKLLDTGNLVIVDDVSENLLWQSFENPGDTMLPYSSLMYNLATGEKRVLSSWKSHTDPSPGDFVVRLTPQVPAQIVTMRGSSVYKRSGPWAKTGFTGVPLMDESYTSPFSLSQDVGNGTGLFSYLQRSSELTRVIITSEGYLKTFRYNGTGWVLDFITPANLCDLYGACGPFGLCVTSNPTKCKCMKGFVPKYKEEWKRGNMTSGCMRRTELSCQANLSTKTQGKGVDVFYRLANVKPPDLYEYASFVDADQCHQGCLSNCSCSAFAYITGIGCLLWNHELIDTVRYSVGGEFLSIRLASSELAGNRRTKIIVGSISLSIFVILAFGSYKYWRYRAKQNDSWKNGLEPQEISGLTFFEMNTIRTATNNFNVSNKLGQGGFGPVYKGTLSDKKDIAVKRLSSSSGQGTEEFMNEIKLISKLQHRNLVRLLGCCIDGEEKLLIYEFLVNKSLDTFLFDLTLKLQIDWPKRFNIIQGVSRGLLYLHRDSCMRVIHRDLKVSNILLDEKMNPKISDFGLARMFQGTQHKTTLVRVVGTLGYMSPEYAWTGMFSEKSDIYAFGVLLLEIISGKKISSFCCGEEGKTLLGHAWECWLETGGVDLLDEDISSSCSPVEVEVARCVQIGLLCIQQQAIDRPNIAQVVTMMTSATDLPRPKQPLFALQIQDQESVVSVSKSVNHVTQTEIYGR

SEQ ID NO: 108436 - protein, 654 aa, Arabidopsis thaliana
  peptide (1)..(654): Ceres Seq. ID no. 13667463
  misc_feature (1)..(654): Homolog of NCBI NO: 18407151 NR Description: S-locus protein kinase, putative [Arabidopsis >gi|3056592|gb|AAC13903.1|AAC13903 T1F9.13 [Arabidopsis thaliana] At1g61380/T1F9_13 [Arabidopsis thaliana]
  misc_feature (1)..(654): Homolog of NCBI NO: 21537374 NR Description: receptor kinase, putative [Arabidopsis thaliana]
  misc_feature (1)..(654): Homolog of NCBI NO: 15219933 NR Description: S-locus protein kinase, putative [Arabidopsis
  misc_feature (1)..(654): Homolog of NCBI NO: 15219917 NR Description: S-locus protein kinase, putative [Arabidopsis
  misc_feature (1)..(654): Homolog of NCBI NO: 15219935 NR Description: S-locus protein kinase, putative [Arabidopsis
  misc_feature (1)..(268): Homolog of NCBI NO: 15220351 NR Description: S-locus protein kinase family [Arabidopsis
  misc_feature (324)..(654): Homolog of NCBI NO: 15220351 NR Description: S-locus protein kinase family [Arabidopsis
  misc_feature (1)..(647): Homolog of NCBI NO: 25956275 NR Description: unnamed protein product [Lotus japonicus]
  misc_feature (1)..(624): Homolog of NCBI NO: 38344790 NR Description: OSJNBa0043L09.10 [Oryza sativa (japonica
  misc_feature (1)..(624): Homolog of NCBI NO: 21743079 NR Description: OSJNBb0002J11.8 [Oryza sativa (japonica
MLPYSSLMYNLATGEKRVLSSWKSHTDPSPGDFVVRLTPQVPAQIVTMRGSSVYKRSGPWAKTGFTGVPLMDESYTSPFSLSQDVGNGTGLFSYLQRSSELTRVIITSEGYLKTFRYNGTGWVLDFITPANLCDLYGACGPFGLCVTSNPTKCKCMKGFVPKYKEEWKRGNMTSGCMRRTELSCQANLSTKTQGKGVDVFYRLANVKPPDLYEYASFVDADQCHQGCLSNCSCSAFAYITGIGCLLWNHELIDTVRYSVGGEFLSIRLASSELAGNRRTKIIVGSISLSIFVILAFGSYKYWRYRAKQNDSWKNGLEPQEISGLTFFEMNTIRTATNNFNVSNKLGQGGFGPVYKGTLSDKKDIAVKRLSSSSGQGTEEFMNEIKLISKLQHRNLVRLLGCCIDGEEKLLIYEFLVNKSLDTFLFDLTLKLQIDWPKRFNIIQGVSRGLLYLHRDSCMRVIHRDLKVSNILLDEKMNPKISDFGLARMFQGTQHKTTLVRVVGTLGYMSPEYAWTGMFSEKSDIYAFGVLLLEIISGKKISSFCCGEEGKTLLGHAWECWLETGGVDLLDEDISSSCSPVEVEVARCVQIGLLCIQQQAIDRPNIAQVVTMMTSATDLPRPKQPLFALQIQDQESVVSVSKSVNHVTQTEIYGR

SEQ ID NO: 108437 - DNA, 1290 bp, Arabidopsis thaliana
  misc_feature (1)..(1290): Ceres Seq. ID no. 13667491
  misc_feature: MA Experiment ID: 20000307 Result: Up-regulated in Transcription
  misc_feature: MA Experiment 20000307 PARAMETER Experiment Name: At_Germinating_Seeds_Sub_P Parameter: Age (hr) Value: 24 vs. 0
  misc_feature: MA Experiment 20000307 PARAMETER Experiment Name: At_Germinating_Seeds_Sub_P Parameter: Organism Value: A. thaliana
  misc_feature: MA Experiment 20000307 PARAMETER Experiment Name: At_Germinating_Seeds_Sub_P Parameter: Plant Line Value: WS
  misc_feature: MA Experiment 20000307 PARAMETER Experiment Name: At_Germinating_Seeds_Sub_P Parameter: Tissue Value: Germinating Seeds
  misc_feature: MA Experiment ID: 20000440 Result: Down-regulated in Transcription
  misc_feature: MA Experiment 20000440 PARAMETER Experiment Name: At_Closed-Flower__Sub_P Parameter: Tissue Value: Closed Flower vs. Whole Plant
actaaagtaaaatgagcttgacactagagtttctgcttcttctgattgtacttttcttgagtcaccatgctcattctggctctattgtcaaatttcttcctggttttgaaggccccctttctttcgaactcgaaaccgggtacattggtattggtgaggaagaggaagtgcaattattctactatttcatcaaatctgagaagaatccagaagaagaccctcttcttctatggttaagtggaggacctggatgttcctctctcactggccttctttttgagaatggaccggtggctttgaaattcgaggtttacaatggaagtgttccatctttggtctctactgcatattcatggacaaagatggcgaacataatattcttggatcagccagttggagctggcttctcctattcaagaactccacttgttgataaaactagtgacacgggtgaagttaagaggatttatgagtttcttcaaaagtggttaagcaaacatcaacaatttttttccaaccctttttacgttggtggagattcttattcaggtatgattgttccacctctagttcaagaaatcgcaaaaggaaattatcaaataaatctacagggttatatccttggaaacccgataacagatactgaatctgaacaaaactatcagattccatatgctcatggaatggcattaatctctgatgaactatacaagtcaatggagagaatctgcaaaggaaactatgtgaatgtagattcacttaacacaaaatgttataaactcatcaaagattatcaaaagtgtcttcataaactgaataagtatcatatattattacctgactgcgatataacatctcctgattgctttttatataggtatactctcatgaccttttgggccaacaacaagagcgttcgcgaagctctgcaagtcaataagggaagtataggagaatgggtacaatgtaactacaaaaatatttcctacaattacgacatcaagagcagtgtcgcgtaccatatgaagaatagtattgatggctaccgatctcttatctacaatggtgaccatgatatgatggtgcctttccttgcaactcaagcctggataagatctctcaattattccatcactgatgattggaggccttggatgataaacgatcaaattgctggatacacgagaagttattccaataagatgacatttgctactatcaaagcaagtcttcttgtgtcaacttaatatttgtattgtccttagactgcaataaaaaagactttgtttt

SEQ ID NO: 108438 - protein, 411 aa, Arabidopsis thaliana
  peptide (1)..(411): Ceres Seq. ID no. 13667492
  misc_feature (30)..(406): Pfam Name: Serine carboxypeptidase Pfam Description: Serine carboxypeptidase
  misc_feature (1)..(411): Homolog of NCBI NO: 24417488 NR Description: unknown [Arabidopsis thaliana]
  misc_feature (1)..(406): Homolog of NCBI NO: 25289782 NR Description: probable serine carboxypeptidase I [imported] - thaliana >gi|3169172|gb|AAC17815.1| putative serine I [Arabidopsis thaliana] >gi|20197276|gb|AAM15008.1| putative
  misc_feature (1)..(406): Homolog of NCBI NO: 15227769 NR Description: serine carboxypeptidase -related [Arabidopsis
  misc_feature (8)..(406): Homolog of NCBI NO: 15227765 NR Description: serine carboxypeptidase -related [Arabidopsis
  misc_feature (8)..(404): Homolog of NCBI NO: 15228300 NR Description: serine carboxypeptidase -related [Arabidopsis >gi|8567775|gb|AAF76347.1| glucose acyltransferase, putative
  misc_feature (8)..(390): Homolog of NCBI NO: 30681870 NR Description: serine carboxypeptidase -related [Arabidopsis
  misc_feature (1)..(407): Homolog of NCBI NO: 30681910 NR Description: serine carboxypeptidase -related [Arabidopsis
  misc_feature (1)..(406): Homolog of NCBI NO: 18400137 NR Description: serine carboxypeptidase -related [Arabidopsis >gi|20197128|gb|AAC17816.2| putative serine carboxypeptidase I thaliana] >gi|20197274|gb|AAM15006.1| putative serine
  misc_feature (1)..(405): Homolog of NCBI NO: 30681915 NR Description: serine carboxypeptidase -related [Arabidopsis
  misc_feature (1)..(404): Homolog of NCBI NO: 15227773 NR Description: serine carboxypeptidase -related [Arabidopsis
MSLTLEFLLLLIVLFLSHHAHSGSIVKFLPGFEGPLSFELETGYIGIGEEEEVQLFYYFIKSEKNPEEDPLLLWLSGGPGCSSLTGLLFENGPVALKFEVYNGSVPSLVSTAYSWTKMANIIFLDQPVGAGFSYSRTPLVDKTSDTGEVKRIYEFLQKWLSKHQQFFSNPFYVGGDSYSGMIVPPLVQEIAKGNYQINLQGYILGNPITDTESEQNYQIPYAHGMALISDELYKSMERICKGNYVNVDSLNTKCYKLIKDYQKCLHKLNKYHILLPDCDITSPDCFLYRYTLMTFWANNKSVREALQVNKGSIGEWVQCNYKNISYNYDIKSSVAYHMKNSIDGYRSLIYNGDHDMMVPFLATQAWIRSLNYSITDDWRPWMINDQIAGYTRSYSNKMTFATIKASLLVST

SEQ ID NO: 108439 - protein, 294 aa, Arabidopsis thaliana
  peptide (1)..(294): Ceres Seq. ID no. 13667493
  misc_feature (1)..(289): Pfam Name: Serine carboxypeptidase Pfam Description: Serine carboxypeptidase
  misc_feature (1)..(294): Homolog of NCBI NO: 24417488 NR Description: unknown [Arabidopsis thaliana]
  misc_feature (1)..(289): Homolog of NCBI NO: 25289782 NR Description: probable serine carboxypeptidase I [imported] - thaliana >gi|3169172|gb|AAC17815.1| putative serine I [Arabidopsis thaliana] >gi|20197276|gb|AAM15008.1| putative
  misc_feature (1)..(289): Homolog of NCBI NO: 15227769 NR Description: serine carboxypeptidase -related [Arabidopsis
  misc_feature (1)..(289): Homolog of NCBI NO: 15227765 NR Description: serine carboxypeptidase -related [Arabidopsis
  misc_feature (1)..(287): Homolog of NCBI NO: 15228300 NR Description: serine carboxypeptidase -related [Arabidopsis >gi|8567775|gb|AAF76347.1| glucose acyltransferase, putative
  misc_feature (1)..(273): Homolog of NCBI NO: 30681870 NR Description: serine carboxypeptidase -related [Arabidopsis
  misc_feature (1)..(290): Homolog of NCBI NO: 30681910 NR Description: serine carboxypeptidase -related [Arabidopsis
  misc_feature (1)..(289): Homolog of NCBI NO: 18400137 NR Description: serine carboxypeptidase -related [Arabidopsis >gi|20197128|gb|AAC17816.2| putative serine carboxypeptidase I thaliana] >gi|20197274|gb|AAM15006.1| putative serine
  misc_feature (1)..(288): Homolog of NCBI NO: 30681915 NR Description: serine carboxypeptidase -related [Arabidopsis
  misc_feature (1)..(287): Homolog of NCBI NO: 15227773 NR Description: serine carboxypeptidase -related [Arabidopsis
MANIIFLDQPVGAGFSYSRTPLVDKTSDTGEVKRIYEFLQKWLSKHQQFFSNPFYVGGDSYSGMIVPPLVQEIAKGNYQINLQGYILGNPITDTESEQNYQIPYAHGMALISDELYKSMERICKGNYVNVDSLNTKCYKLIKDYQKCLHKLNKYHILLPDCDITSPDCFLYRYTLMTFWANNKSVREALQVNKGSIGEWVQCNYKNISYNYDIKSSVAYHMKNSIDGYRSLIYNGDHDMMVPFLATQAWIRSLNYSITDDWRPWMINDQIAGYTRSYSNKMTFATIKASLLVST

SEQ ID NO: 108440 - protein, 231 aa, Arabidopsis thaliana
  peptide (1)..(231): Ceres Seq. ID no. 13667494
  misc_feature (1)..(226): Pfam Name: Serine carboxypeptidase Pfam Description: Serine carboxypeptidase
  misc_feature (1)..(231): Homolog of NCBI NO: 24417488 NR Description: unknown [Arabidopsis thaliana]
  misc_feature (1)..(226): Homolog of NCBI NO: 25289782 NR Description: probable serine carboxypeptidase I [imported] - thaliana >gi|3169172|gb|AAC17815.1| putative serine I [Arabidopsis thaliana] >gi|20197276|gb|AAM15008.1| putative
  misc_feature (1)..(226): Homolog of NCBI NO: 15227769 NR Description: serine carboxypeptidase -related [Arabidopsis
  misc_feature (1)..(226): Homolog of NCBI NO: 15227765 NR Description: serine carboxypeptidase -related [Arabidopsis
  misc_feature (1)..(224): Homolog of NCBI NO: 15228300 NR Description: serine carboxypeptidase -related [Arabidopsis >gi|8567775|gb|AAF76347.1| glucose acyltransferase, putative
  misc_feature (1)..(210): Homolog of NCBI NO: 30681870 NR Description: serine carboxypeptidase -related [Arabidopsis
  misc_feature (1)..(227): Homolog of NCBI NO: 30681910 NR Description: serine carboxypeptidase -related [Arabidopsis
  misc_feature (1)..(226): Homolog of NCBI NO: 18400137 NR Description: serine carboxypeptidase -related [Arabidopsis >gi|20197128|gb|AAC17816.2| putative serine carboxypeptidase I thaliana] >gi|20197274|gb|AAM15006.1| putative serine
  misc_feature (1)..(225): Homolog of NCBI NO: 30681915 NR Description: serine carboxypeptidase -related [Arabidopsis
  misc_feature (1)..(224): Homolog of NCBI NO: 15227773 NR Description: serine carboxypeptidase -related [Arabidopsis
MIVPPLVQEIAKGNYQINLQGYILGNPITDTESEQNYQIPYAHGMALISDELYKSMERICKGNYVNVDSLNTKCYKLIKDYQKCLHKLNKYHILLPDCDITSPDCFLYRYTLMTFWANNKSVREALQVNKGSIGEWVQCNYKNISYNYDIKSSVAYHMKNSIDGYRSLIYNGDHDMMVPFLATQAWIRSLNYSITDDWRPWMINDQIAGYTRSYSNKMTFATIKASLLVST

SEQ ID NO: 108441 - DNA, 1051 bp, Arabidopsis thaliana
  misc_feature (1)..(1051): Ceres Seq. ID no. 13667503
  misc_feature: MA Experiment ID: 20000171 Result: Up-regulated in Transcription
  misc_feature: MA Experiment 20000171 PARAMETER Experiment Name: At_42deg_Heat_P Parameter: Age (day) Value: 14
  misc_feature: MA Experiment 20000171 PARAMETER Experiment Name: At_42deg_Heat_P Parameter: Organism Value: A. thaliana
  misc_feature: MA Experiment 20000171 PARAMETER Experiment Name: At_42deg_Heat_P Parameter: Plant Line Value: WS
  misc_feature: MA Experiment 20000171 PARAMETER Experiment Name: At_42deg_Heat_P Parameter: Temperature (deg C) Value: 42 vs. 22
  misc_feature: MA Experiment 20000171 PARAMETER Experiment Name: At_42deg_Heat_P Parameter: Timepoint (hr) Value: 1
  misc_feature: MA Experiment 20000171 PARAMETER Experiment Name: At_42deg_Heat_P Parameter: Tissue Value: Aerial
  misc_feature: MA Experiment ID: 20000314 Result: Up-regulated in Transcription
  misc_feature: MA Experiment 20000314 PARAMETER Experiment Name: At_14day_Shoots-Roots_Sub_P Parameter: Age (day) Value: 14
  misc_feature: MA Experiment 20000314 PARAMETER Experiment Name: At_14day_Shoots-Roots_Sub_P Parameter: Organism Value: A. thaliana
  misc_feature: MA Experiment 20000314 PARAMETER Experiment Name: At_14day_Shoots-Roots_Sub_P Parameter: Plant Line Value: WS
  misc_feature: MA Experiment 20000314 PARAMETER Experiment Name: At_14day_Shoots-Roots_Sub_P Parameter: Tissue Value: Roots vs. Whole Plant
  misc_feature: MA Experiment ID: 20000327 Result: Up-regulated in Transcription
  misc_feature: MA Experiment 20000327 PARAMETER Experiment Name: At_42deg_Heat_Sub_P Parameter: Age (day) Value: 14
  misc_feature: MA Experiment 20000327 PARAMETER Experiment Name: At_42deg_Heat_Sub_P Parameter: Organism Value: A. thaliana
  misc_feature: MA Experiment 20000327 PARAMETER Experiment Name: At_42deg_Heat_Sub_P Parameter: Plant Line Value: WS
  misc_feature: MA Experiment 20000327 PARAMETER Experiment Name: At_42deg_Heat_Sub_P Parameter: Temperature (deg C) Value: 42 vs. 22
  misc_feature: MA Experiment 20000327 PARAMETER Experiment Name: At_42deg_Heat_Sub_P Parameter: Timepoint (hr) Value: 1
  misc_feature: MA Experiment 20000327 PARAMETER Experiment Name: At_42deg_Heat_Sub_P Parameter: Tissue Value: Aerial
  misc_feature: MA Experiment ID: 20001451 Result: Up-regulated in Transcription
  misc_feature: MA Experiment 20001451 PARAMETER Experiment Name: At_Far-red-induction_P Parameter: Age (day) Value: 7
  misc_feature: MA Experiment 20001451 PARAMETER Experiment Name: At_Far-red-induction_P Parameter: Light Value: Far-red vs. White
  misc_feature: MA Experiment 20001451 PARAMETER Experiment Name: At_Far-red-induction_P Parameter: Organism Value: A. thaliana
  misc_feature: MA Experiment 20001451 PARAMETER Experiment Name: At_Far-red-induction_P Parameter: Plant Line Value: Columbia
  misc_feature: MA Experiment 20001451 PARAMETER Experiment Name: At_Far-red-induction_P Parameter: Timepoint (hr) Value: 24
  misc_feature: MA Experiment 20001451 PARAMETER Experiment Name: At_Far-red-induction_P Parameter: Tissue Value: Whole Plant
attgggtacgggcccccctcgaggtcgacccacgcgtccgaagaaagaaaaccctaaaccaccggaaatcgatttctttggaagatggatatcgagcagaagcaagccgagatcattgatcagctcgtgaagcgagcttctacttgcaaatccgaggctctgggcccgctcatcatcgaagccacatcgcatccttctctcttcgccttctccgagattttggctctacccaatgttgcccagcttgaaggaaccacagattctgtgtacctggatctactacgcttgtttgcccatggcacctggggagactacaaatgcaatgccacccgtcttccgcacttgtcccctgaccaaattctcaagcttaagcagctcactgtcctcacccttgctgagtctaacaaggtattgccctatgatacactaatggtcgagttagatgtttccaatgttcgcgaactcgaggactttcttatcaatgaatgcatgtatgcgggtatagttaggggaaaactggatcagttaaaaagatgttttgaggttccgtttgcagctggtagggatctaaggccaggtcaactagggaatatgttacacacattgtccaactggttgaacacgtcagagaatctgctcatttcaattcaagacaagatcaaatgggcggacaatatgagtgagatggacaaaaaacatcgtaaggaagcagaagaaggggtggaagaagtgaagaagtctctgtccatgaagagggaataaggagatgtttggggaaccaagtggagtgatggactacgaagaagatgggatccgaccaaagaggaggaggcatcctgtaacaaggtagaggagcaagagagagcaaatggtcagtgcggattgacattccatttaccgagagtagattatgattatttggttgcggattttcaacttgtataagatcctctgttctctctcacaataaccccttgttatgtttgatttccctcattagcaaatttggtgtctttctgcccattaaaagaaaaatggctttgaatttagt

SEQ ID NO: 108442 - protein, 225 aa, Arabidopsis thaliana
  peptide (1)..(225): Ceres Seq. ID no. 13667504
  misc_feature (60)..(156): Pfam Name: PCI domain Pfam Description: PCI domain
  misc_feature (1)..(225): Homolog of NCBI NO: 18378920 NR Description: COP9 complex subunit, FUS5 [Arabidopsis thaliana] At1g02090/T7I23_24 [Arabidopsis thaliana]
  misc_feature (1)..(225): Homolog of NCBI NO: 30678240 NR Description: COP9 complex subunit, FUS5 [Arabidopsis thaliana]
  misc_feature (4)..(220): Homolog of NCBI NO: 12232385 NR Description: COP9 constitutive photomorphogenic homolog
  misc_feature (4)..(220): Homolog of NCBI NO: 15215085 NR Description: Cops7b protein [Mus musculus]
  misc_feature (4)..(220): Homolog of NCBI NO: 27764886 NR Description: COP9 (constitutive photomorphogenic) homolog, expressed [Mus musculus] >gi|26349105|dbj|BAC38192.1| unnamed
  misc_feature (4)..(220): Homolog of NCBI NO: 3309176 NR Description: COP9 complex subunit 7b [Mus musculus]
  misc_feature (4)..(220): Homolog of NCBI NO: 34877558 NR Description: similar to Cops7b protein [Rattus norvegicus]
  misc_feature (11)..(220): Homolog of NCBI NO: 37589772 NR Description: Unknown (protein for IMAGE:4786730) [Danio rerio]
  misc_feature (1)..(225): Homolog of NCBI NO: 22024078 NR Description: CG2038-PA [Drosophila melanogaster]
  misc_feature (12)..(222): Homolog of NCBI NO: 6120135 NR Description: COP9 complex subunit 7a [Homo sapiens]
MDIEQKQAEIIDQLVKRASTCKSEALGPLIIEATSHPSLFAFSEILALPNVAQLEGTTDSVYLDLLRLFAHGTWGDYKCNATRLPHLSPDQILKLKQLTVLTLAESNKVLPYDTLMVELDVSNVRELEDFLINECMYAGIVRGKLDQLKRCFEVPFAAGRDLRPGQLGNMLHTLSNWLNTSENLLISIQDKIKWADNMSEMDKKHRKEAEEGVEEVKKSLSMKRE

SEQ ID NO: 108443 - DNA, 726 bp, Arabidopsis thaliana
  misc_feature (1)..(726): Ceres Seq. ID no. 13667505
  misc_feature: MA Experiment ID: 108434 Result: Up-regulated in Transcription
  misc_feature: MA Experiment 108434 PARAMETER Experiment Name: At_Root_Tips_cDNA_P Parameter: Tissue Value: Root Tips
  misc_feature: MA Experiment ID: 108462 Result: Down-regulated in Transcription
  misc_feature: MA Experiment 108462 PARAMETER Experiment Name: At_Germinating_Seeds_cDNA_P Parameter: Age (day) Value: 2 vs. 0
  misc_feature: MA Experiment 108462 PARAMETER Experiment Name: At_Germinating_Seeds_cDNA_P Parameter: Tissue Value: Germinating Seeds
  misc_feature: MA Experiment ID: 108463 Result: Down-regulated in Transcription
  misc_feature: MA Experiment 108463 PARAMETER Experiment Name: At_Germinating_Seeds_cDNA_P Parameter: Age (day) Value: 3 vs. 0
  misc_feature: MA Experiment 108463 PARAMETER Experiment Name: At_Germinating_Seeds_cDNA_P Parameter: Tissue Value: Germinating Seeds
  misc_feature: MA Experiment ID: 108464 Result: Down-regulated in Transcription
  misc_feature: MA Experiment 108464 PARAMETER Experiment Name: At_Germinating_Seeds_cDNA_P Parameter: Age (day) Value: 4 vs. 0
  misc_feature: MA Experiment 108464 PARAMETER Experiment Name: At_Germinating_Seeds_cDNA_P Parameter: Tissue Value: Germinating Seeds
  misc_feature: MA Experiment ID: 20000111 Result: Up-regulated in Transcription
  misc_feature: MA Experiment 20000111 PARAMETER Experiment Name: At_42deg_Heat_cDNA_P Parameter: Temperature (deg C) Value: 42 vs. 22
  misc_feature: MA Experiment 20000111 PARAMETER Experiment Name: At_42deg_Heat_cDNA_P Parameter: Timepoint (hr) Value: 6
  misc_feature: MA Experiment 20000111 PARAMETER Experiment Name: At_42deg_Heat_cDNA_P Parameter: Tissue Value: Aerial
  misc_feature: MA Experiment ID: 20000113 Result: Up-regulated in Transcription
  misc_feature: MA Experiment 20000113 PARAMETER Experiment Name: At_42deg_Heat_cDNA_P Parameter: Temperature (deg C) Value: 42 vs. 22
  misc_feature: MA Experiment 20000113 PARAMETER Experiment Name: At_42deg_Heat_cDNA_P Parameter: Timepoint (hr) Value: 8
  misc_feature: MA Experiment 20000113 PARAMETER Experiment Name: At_42deg_Heat_cDNA_P Parameter: Tissue Value: Aerial
cggcacgaggttttttttcccttctcccaatctcatcttctccgaaaacctttcttctctcaaatttctgtgaaaacatgtctgacgacgagcaccactttgaggccagcgaatccggagcttccaagacctatcctcaatcagccggtaacatccgtaaaggtggtcacatcgtcatcaaaaaccgtccctgcaaggttgttgaggtttcgacttccaaaactggcaagcacggtcacgccaaatgtcactttgttgctattgatatcttcactgctaagaagcttgaagatattgttccatcttcccacaattgtgatgttccacatgtgaaccgtgttgattaccagttgattgatatcactgaggatggcttcgtgagccttctcactgacagtggtggcaccaaggatgatctcaagcttcccaccgatgatggtctcaccgcccagatgaggcttggattcgatgagggaaaggatattgtggtgtctgtcatgtcttccatgggagaggagcagatctgtgccgtcaaggaagttggtggtggcaagtaaacaagtatcattcgatatattattaccagtttgacaacggacgtcaatgttataagaaccaaaagatgtttttctttttcctaatttagaccctttgtgtgtgtttcttgttgcaagacaaccatatctattggttttggattgttggaaaagtttgctcgtgccaatt

SEQ ID NO: 108444 - protein, 184 aa, Arabidopsis thaliana
  peptide (1)..(184): Ceres Seq. ID no. 13667506
  misc_feature (109)..(178): Pfam Name: Eukaryotic initiation factor 5A hypusine, Pfam Description: Eukaryotic initiation factor 5A hypusine,
  misc_feature (26)..(184): Homolog of NCBI NO: 9295717 NR Description: T24P13.1 [Arabidopsis thaliana]
  misc_feature (26)..(184): Homolog of NCBI NO: 15222741 NR Description: initiation factor 5A-4 -related [Arabidopsis
  misc_feature (26)..(184): Homolog of NCBI NO: 40805177 NR Description: eukaryotic translation initiation factor-5A
  misc_feature (26)..(181): Homolog of NCBI NO: 15222317 NR Description: Eukaryotic initiation factor 5A -related thaliana] >gi|20138712|sp|Q9C505|IF53_ARATH Eukaryotic
  misc_feature (26)..(181): Homolog of NCBI NO: 13937159 NR Description: At1g69410/F10D13.8 [Arabidopsis thaliana]
  misc_feature (26)..(184): Homolog of NCBI NO: 20138709 NR Description: Eukaryotic translation initiation factor 5A >gi|12407783|gb|AAG53645.1|AF296081_1 eukaryotic translation
  misc_feature (26)..(181): Homolog of NCBI NO: 20138708 NR Description: Eukaryotic translation initiation factor 5A-1
  misc_feature (26)..(181): Homolog of NCBI NO: 15223002 NR Description: initiation factor 5A-4 [Arabidopsis thaliana]
  misc_feature (26)..(181): Homolog of NCBI NO: 3024022 NR Description: Eukaryotic translation initiation factor 5A-5
  misc_feature (26)..(181): Homolog of NCBI NO: 124224 NR Description: Eukaryotic translation initiation factor 5A-1
ARGFFSLLPISSSPKTFLLSNFCENMSDDEHHFEASESGASKTYPQSAGNIRKGGHIVIKNRPCKVVEVSTSKTGKHGHAKCHFVAIDIFTAKKLEDIVPSSHNCDVPHVNRVDYQLIDITEDGFVSLLTDSGGTKDDLKLPTDDGLTAQMRLGFDEGKDIVVSVMSSMGEEQICAVKEVGGGK

SEQ ID NO: 108445 - protein, 159 aa, Arabidopsis thaliana; identical to SEQ ID NO: 41154
  peptide (1)..(159): Ceres Seq. ID no. 13667507
  misc_feature (84)..(153): Pfam Name: Eukaryotic initiation factor 5A hypusine, Pfam Description: Eukaryotic initiation factor 5A hypusine,
  misc_feature (1)..(159): Homolog of NCBI NO: 9295717 NR Description: T24P13.1 [Arabidopsis thaliana]
  misc_feature (1)..(159): Homolog of NCBI NO: 15222741 NR Description: initiation factor 5A-4 -related [Arabidopsis
  misc_feature (1)..(159): Homolog of NCBI NO: 40805177 NR Description: eukaryotic translation initiation factor-5A
  misc_feature (1)..(156): Homolog of NCBI NO: 15222317 NR Description: Eukaryotic initiation factor 5A -related thaliana] >gi|20138712|sp|Q9C505|IF53_ARATH Eukaryotic
  misc_feature (1)..(156): Homolog of NCBI NO: 13937159 NR Description: At1g69410/F10D13.8 [Arabidopsis thaliana]
  misc_feature (1)..(159): Homolog of NCBI NO: 20138709 NR Description: Eukaryotic translation initiation factor 5A >gi|12407783|gb|AAG53645.1|AF296081_1 eukaryotic translation
  misc_feature (1)..(156): Homolog of NCBI NO: 20138708 NR Description: Eukaryotic translation initiation factor 5A-1
  misc_feature (1)..(156): Homolog of NCBI NO: 15223002 NR Description: initiation factor 5A-4 [Arabidopsis thaliana]
  misc_feature (1)..(156): Homolog of NCBI NO: 3024022 NR Description: Eukaryotic translation initiation factor 5A-5
  misc_feature (1)..(156): Homolog of NCBI NO: 124224 NR Description: Eukaryotic translation initiation factor 5A-1

SEQ ID NO: 108446 - protein, 110 aa, Arabidopsis thaliana
  peptide (1)..(110): Ceres Seq. ID no. 13667508
RHEVFFPFSQSHLLRKPFFSQISVKTCLTTSTTLRPANPELPRPILNQPVTSVKVVTSSSKTVPARLLRFRLPKLASTVTPNVTLLLLISSLLRSLKILFHLPTIVMFHM

SEQ ID NO: 108447 - DNA, 860 bp, Arabidopsis thaliana
  misc_feature (1)..(860): Ceres Seq. ID no. 13667588
  misc_feature: MA Experiment ID: 20000180 Result: Up-regulated in Transcription
  misc_feature: MA Experiment 20000180 PARAMETER Experiment Name: At_Germinating_Seeds_P Parameter: Age (hr) Value: 24 vs. 0
  misc_feature: MA Experiment 20000180 PARAMETER Experiment Name: At_Germinating_Seeds_P Parameter: Tissue Value: Germinating Seeds
  misc_feature: MA Experiment ID: 20000182 Result: Up-regulated in Transcription
  misc_feature: MA Experiment 20000182 PARAMETER Experiment Name: At_2mM_SA_P Parameter: Age (day) Value: 14
  misc_feature: MA Experiment 20000182 PARAMETER Experiment Name: At_2mM_SA_P Parameter: Organism Value: A. thaliana
  misc_feature: MA Experiment 20000182 PARAMETER Experiment Name: At_2mM_SA_P Parameter: Plant Line Value: WS
  misc_feature: MA Experiment 20000182 PARAMETER Experiment Name: At_2mM_SA_P Parameter: Timepoint (hr) Value: 6
  misc_feature: MA Experiment 20000182 PARAMETER Experiment Name: At_2mM_SA_P Parameter: Tissue Value: Aerial
  misc_feature: MA Experiment 20000182 PARAMETER Experiment Name: At_2mM_SA_P Parameter: Treatment Value: 2mM SA vs. No Treatment
  misc_feature: MA Experiment ID: 20000185 Result: Up-regulated in Transcription
  misc_feature: MA Experiment 20000185 PARAMETER Experiment Name: At_Roots__P Parameter: Age (day) Value: 7 vs. 21
  misc_feature: MA Experiment 20000185 PARAMETER Experiment Name: At_Roots__P Parameter: Organism Value: A. thaliana
  misc_feature: MA Experiment 20000185 PARAMETER Experiment Name: At_Roots__P Parameter: Tissue Value: Roots vs. Whole Plant
  misc_feature: MA Experiment ID: 20000227 Result: Down-regulated in Transcription
  misc_feature: MA Experiment 20000227 PARAMETER Experiment Name: At_Root-Tips-vs-Tops_P Parameter: Tissue Value: Root Tips vs. Root Tops
  misc_feature: MA Experiment ID: 20000234 Result: Down-regulated in Transcription
  misc_feature: MA Experiment 20000234 PARAMETER Experiment Name: At_Siliques_P Parameter: Age (day) Value: 21
  misc_feature: MA Experiment 20000234 PARAMETER Experiment Name: At_Siliques_P Parameter: Organism Value: A. thaliana
  misc_feature: MA Experiment 20000234 PARAMETER Experiment Name: At_Siliques_P Parameter: Plant Line Value: WS
  misc_feature: MA Experiment 20000234 PARAMETER Experiment Name: At_Siliques_P Parameter: Tissue Value: Less Than 5mm Siliques vs. Whole Plant
  misc_feature: MA Experiment ID: 20000235 Result: Down-regulated in Transcription
  misc_feature: MA Experiment 20000235 PARAMETER Experiment Name: At_Siliques_P Parameter: Age (day) Value: 21
  misc_feature: MA Experiment 20000235 PARAMETER Experiment Name: At_Siliques_P Parameter: Organism Value: A. thaliana
  misc_feature: MA Experiment 20000235 PARAMETER Experiment Name: At_Siliques_P Parameter: Plant Line Value: WS
  misc_feature: MA Experiment 20000235 PARAMETER Experiment Name: At_Siliques_P Parameter: Tissue Value: 5-10mm Siliques vs. Whole Plant
  misc_feature: MA Experiment ID: 20000264 Result: Down-regulated in Transcription
  misc_feature: MA Experiment 20000264 PARAMETER Experiment Name: At_Open_Flower_P Parameter: Age (day) Value: 21
  misc_feature: MA Experiment 20000264 PARAMETER Experiment Name: At_Open_Flower_P Parameter: Plant Line Value: WS
  misc_feature: MA Experiment 20000264 PARAMETER Experiment Name: At_Open_Flower_P Parameter: Tissue Value: Open Flower vs. Whole Plant
  misc_feature: MA Experiment ID: 20000265 Result: Down-regulated in Transcription
  misc_feature: MA Experiment 20000265 PARAMETER Experiment Name: At_Open_Flower_P Parameter: Age (day) Value: 21
  misc_feature: MA Experiment 20000265 PARAMETER Experiment Name: At_Open_Flower_P Parameter: Plant Line Value: WS
  misc_feature: MA Experiment 20000265 PARAMETER Experiment Name: At_Open_Flower_P Parameter: Tissue Value: Closed Flower vs. Whole Plant
  misc_feature: MA Experiment ID: 20000286 Result: Down-regulated in Transcription
  misc_feature: MA Experiment 20000286 PARAMETER Experiment Name: At_Open_Flower_P Parameter: Age (day) Value: 21
  misc_feature: MA Experiment 20000286 PARAMETER Experiment Name: At_Open_Flower_P Parameter: Plant Line Value: WS
  misc_feature: MA Experiment 20000286 PARAMETER Experiment Name: At_Open_Flower_P Parameter: Tissue Value: Half Open vs. Whole Plant
  misc_feature: MA Experiment ID: 20000437 Result: Down-regulated in Transcription
  misc_feature: MA Experiment 20000437 PARAMETER Experiment Name: At_Drought_P Parameter: Age (day) Value: 8
  misc_feature: MA Experiment 20000437 PARAMETER Experiment Name: At_Drought_P Parameter: Organism Value: A. thaliana
  misc_feature: MA Experiment 20000437 PARAMETER Experiment Name: At_Drought_P Parameter: Plant Line Value: WS
  misc_feature: MA Experiment 20000437 PARAMETER Experiment Name: At_Drought_P Parameter: Timepoint (hr) Value: 24
  misc_feature: MA Experiment 20000437 PARAMETER Experiment Name: At_Drought_P Parameter: Tissue Value: Whole Plant
  misc_feature: MA Experiment 20000437 PARAMETER Experiment Name: At_Drought_P Parameter: Treatment Value: Drought vs. No Drought
  misc_feature: MA Experiment ID: 20000438 Result: Down-regulated in Transcription
  misc_feature: MA Experiment 20000438 PARAMETER Experiment Name: At_Shoots__P Parameter: Age (day) Value: 14
  misc_feature: MA Experiment 20000438 PARAMETER Experiment Name: At_Shoots__P Parameter: Tissue Value: Shoots vs. Whole Plant
  misc_feature: MA Experiment ID: 20000439 Result: Up-regulated in Transcription
  misc_feature: MA Experiment 20000439 PARAMETER Experiment Name: At_Roots__P Parameter: Age (day) Value: 14 vs. 21
  misc_feature: MA Experiment 20000439 PARAMETER Experiment Name: At_Roots__P Parameter: Organism Value: A. thaliana
  misc_feature: MA Experiment 20000439 PARAMETER Experiment Name: At_Roots__P Parameter: Tissue Value: Roots vs. Whole Plant
  misc_feature: MA Experiment ID: 20000794 Result: Down-regulated in Transcription
  misc_feature: MA Experiment 20000794 PARAMETER Experiment Name: At_Petals_P Parameter: Age (day) Value: 23-25 days
  misc_feature: MA Experiment 20000794 PARAMETER Experiment Name: At_Petals_P Parameter: Plant Line Value: WS
  misc_feature: MA Experiment 20000794 PARAMETER Experiment Name: At_Petals_P Parameter: Tissue Value: Petals vs. Whole plant
  misc_feature: MA Experiment ID: 20001248 Result: Up-regulated in Transcription
  misc_feature: MA Experiment 20001248 PARAMETER Experiment Name: At_Far-red-induction_P Parameter: Age (day) Value: 7
  misc_feature: MA Experiment 20001248 PARAMETER Experiment Name: At_Far-red-induction_P Parameter: Light Value: Far-red vs. White
  misc_feature: MA Experiment 20001248 PARAMETER Experiment Name: At_Far-red-induction_P Parameter: Organism Value: A. thaliana
  misc_feature: MA Experiment 20001248 PARAMETER Experiment Name: At_Far-red-induction_P Parameter: Plant Line Value: Columbia
  misc_feature: MA Experiment 20001248 PARAMETER Experiment Name: At_Far-red-induction_P Parameter: Timepoint (hr) Value: 4
  misc_feature: MA Experiment 20001248 PARAMETER Experiment Name: At_Far-red-induction_P Parameter: Tissue Value: Whole Plant
  misc_feature: MA Experiment ID: 20001451 Result: Up-regulated in Transcription
  misc_feature: MA Experiment 20001451 PARAMETER Experiment Name: At_Far-red-induction_P Parameter: Age (day) Value: 7
  misc_feature: MA Experiment 20001451 PARAMETER Experiment Name: At_Far-red-induction_P Parameter: Light Value: Far-red vs. White
  misc_feature: MA Experiment 20001451 PARAMETER Experiment Name: At_Far-red-induction_P Parameter: Organism Value: A. thaliana
  misc_feature: MA Experiment 20001451 PARAMETER Experiment Name: At_Far-red-induction_P Parameter: Plant Line Value: Columbia
  misc_feature: MA Experiment 20001451 PARAMETER Experiment Name: At_Far-red-induction_P Parameter: Timepoint (hr) Value: 24
  misc_feature: MA Experiment 20001451 PARAMETER Experiment Name: At_Far-red-induction_P Parameter: Tissue Value: Whole Plant
  misc_feature: MA Experiment ID: 20001555 Result: Down-regulated in Transcription
  misc_feature: MA Experiment 20001555 PARAMETER Experiment Name: At_Drought_Soil_Dry_P Parameter: Age (day) Value: 24
  misc_feature: MA Experiment 20001555 PARAMETER Experiment Name: At_Drought_Soil_Dry_P Parameter: Organism Value: A. thaliana
  misc_feature: MA Experiment 20001555 PARAMETER Experiment Name: At_Drought_Soil_Dry_P Parameter: Plant Line Value: WS
  misc_feature: MA Experiment 20001555 PARAMETER Experiment Name: At_Drought_Soil_Dry_P Parameter: Post Timepoint (hr) Value: None
  misc_feature: MA Experiment 20001555 PARAMETER Experiment Name: At_Drought_Soil_Dry_P Parameter: Post-Treatment Value: None
  misc_feature: MA Experiment 20001555 PARAMETER Experiment Name: At_Drought_Soil_Dry_P Parameter: Timepoint (day) Value: 10
  misc_feature: MA Experiment 20001555 PARAMETER Experiment Name: At_Drought_Soil_Dry_P Parameter: Treatment Value: Drought vs. No Drought
  misc_feature: MA Experiment ID: 20001774 Result: Down-regulated in Transcription
  misc_feature: MA Experiment 20001774 PARAMETER Experiment Name: At_Far-red-enriched-adult_P Parameter: Age (day) Value: 31
  misc_feature: MA Experiment 20001774 PARAMETER Experiment Name: At_Far-red-enriched-adult_P Parameter: Light Value: Far-red enriched vs. White
  misc_feature: MA Experiment 20001774 PARAMETER Experiment Name: At_Far-red-enriched-adult_P Parameter: Organism Value: A. thaliana
  misc_feature: MA Experiment 20001774 PARAMETER Experiment Name: At_Far-red-enriched-adult_P Parameter: Plant Line Value: Columbia
  misc_feature: MA Experiment 20001774 PARAMETER Experiment Name: At_Far-red-enriched-adult_P Parameter: Timepoint (hr) Value: 72
  misc_feature: MA Experiment 20001774 PARAMETER Experiment Name: At_Far-red-enriched-adult_P Parameter: Tissue Value: Aerial
  misc_feature: MA Experiment ID: 20001905 Result: Up-regulated in Transcription
  misc_feature: MA Experiment 20001905 PARAMETER Experiment Name: At_Drought_Reproduction_P Parameter: Age (day) Value: 40
  misc_feature: MA Experiment 20001905 PARAMETER Experiment Name: At_Drought_Reproduction_P Parameter: Organism Value: A. thaliana
  misc_feature: MA Experiment 20001905 PARAMETER Experiment Name: At_Drought_Reproduction_P Parameter: Plant Line Value: WS
  misc_feature: MA Experiment 20001905 PARAMETER Experiment Name: At_Drought_Reproduction_P Parameter: Timepoint (day) Value: 10
  misc_feature: MA Experiment 20001905 PARAMETER Experiment Name: At_Drought_Reproduction_P Parameter: Tissue Value: Rosettes
  misc_feature: MA Experiment 20001905 PARAMETER Experiment Name: At_Drought_Reproduction_P Parameter: Treatment Value: Drought vs. No Drought
caagaatatctctcttctacagtaaacaaaaaaatggcaatgaatggtttgtccaagatggctgtagccgccgcaactgctcttctcctagttctgaccattgtcccgggcgcagtagctgtgacttacactattgaatggaccactggtgtggactactcaggttgggctaccggaaagactttcagggttggtgacattctagagttcaagtatggttcttcccacacggtggatgtggttgacaaagccggatatgatggctgcgacggctcctcctcgactgagaaccattccgatggagacaccaaaatcgatcttaagactgtaggaataaactatttcatctgttctacaactggtcactgcagtggcggcatgaagctagccgttaatgtcgtagccggttctgccgacctccggccactcccacgccaccttcttcaactccgggaactcctaccacaccggaatcacctccgtctggcggatcacccacacccaccacacccacacctggtgcaggttcaacttctcctcctcctccaccaaaggcaagtggtgcgtctaagggagtgatgagttacgttttggtgggagtctcgatggttttgggttatggtttgtggatgtaattggtttagagagccagggtggagtcagtgcttttgcctttttaaattattttggtttttggttgtaagagaatttgggtttgtgtgccacgtcagaagctcttcattattcgtaggatttttattatctcggcatttgattatcgctatcatcatcatcatcacgttcacttattctcttgttgtattaaattatactattaattttcattttcgttcatgtgg

SEQ ID NO: 108448 - protein, 192 aa, Arabidopsis thaliana
  peptide (1)..(192): Ceres Seq. ID no. 13667589
  misc_feature (12)..(144): Homolog of NCBI NO: 25453522 NR Description: blue copper-binding protein II [imported] -
  misc_feature (12)..(144): Homolog of NCBI NO: 25453521 NR Description: blue copper-binding protein II [imported] -
  misc_feature (12)..(138): Homolog of NCBI NO: 21554060 NR Description: phytocyanin [Arabidopsis thaliana]
  misc_feature (12)..(138): Homolog of NCBI NO: 15224960 NR Description: uclacyanin II [Arabidopsis thaliana]
  misc_feature (12)..(192): Homolog of NCBI NO: 25282796 NR Description: uclacyanin II [imported] - Arabidopsis thaliana
  misc_feature (20)..(137): Homolog of NCBI NO: 15232289 NR Description: uclacyanin 3 [Arabidopsis thaliana]
  misc_feature (20)..(144): Homolog of NCBI NO: 15232287 NR Description: plastocyanin-like domain containing protein
  misc_feature (22)..(144): Homolog of NCBI NO: 14140127 NR Description: uclacyanin 3-like protein [Oryza sativa]
  misc_feature (17)..(138): Homolog of NCBI NO: 15218396 NR Description: plastocyanin-like domain containing protein thaliana] >gi|25406158|pir||H96745 probable blue copper protein
  misc_feature (28)..(139): Homolog of NCBI NO: 15219890 NR Description: plastocyanin-like domain containing protein thaliana] >gi|25402967|pir||A86358 Similar to blue copper protein
QEYLSSTVNKKMAMNGLSKMAVAAATALLLVLTIVPGAVAVTYTIEWTTGVDYSGWATGKTFRVGDILEFKYGSSHTVDVVDKAGYDGCDGSSSTENHSDGDTKIDLKTVGINYFICSTTGHCSGGMKLAVNVVAGSADLRPLPRHLLQLRELLPHRNHLRLADHPHPPHPHLVQVQLLLLLHQRQVVRLRE

SEQ ID NO: 108449 - protein, 181 aa, Arabidopsis thaliana
  peptide (1)..(181): Ceres Seq. ID no. 13667590
  misc_feature (1)..(133): Homolog of NCBI NO: 25453522 NR Description: blue copper-binding protein II [imported] -
  misc_feature (1)..(133): Homolog of NCBI NO: 25453521 NR Description: blue copper-binding protein II [imported] -
  misc_feature (1)..(127): Homolog of NCBI NO: 21554060 NR Description: phytocyanin [Arabidopsis thaliana]
  misc_feature (1)..(127): Homolog of NCBI NO: 15224960 NR Description: uclacyanin II [Arabidopsis thaliana]
  misc_feature (1)..(181): Homolog of NCBI NO: 25282796 NR Description: uclacyanin II [imported] - Arabidopsis thaliana
  misc_feature (9)..(126): Homolog of NCBI NO: 15232289 NR Description: uclacyanin 3 [Arabidopsis thaliana]
  misc_feature (9)..(133): Homolog of NCBI NO: 15232287 NR Description: plastocyanin-like domain containing protein
  misc_feature (11)..(133): Homolog of NCBI NO: 14140127 NR Description: uclacyanin 3-like protein [Oryza sativa]
  misc_feature (6)..(127): Homolog of NCBI NO: 15218396 NR Description: plastocyanin-like domain containing protein thaliana] >gi|25406158|pir||H96745 probable blue copper protein
  misc_feature (17)..(128): Homolog of NCBI NO: 15219890 NR Description: plastocyanin-like domain containing protein thaliana] >gi|25402967|pir||A86358 Similar to blue copper protein
MAMNGLSKMAVAAATALLLVLTIVPGAVAVTYTIEWTTGVDYSGWATGKTFRVGDILEFKYGSSHTVDVVDKAGYDGCDGSSSTENHSDGDTKIDLKTVGINYFICSTTGHCSGGMKLAVNVVAGSADLRPLPRHLLQLRELLPHRNHLRLADHPHPPHPHLVQVQLLLLLHQRQVVRLRE

SEQ ID NO: 108450 - protein, 179 aa, Arabidopsis thaliana
  peptide (1)..(179): Ceres Seq. ID no. 13667591
  misc_feature (1)..(131): Homolog of NCBI NO: 25453522 NR Description: blue copper-binding protein II [imported] -
  misc_feature (1)..(131): Homolog of NCBI NO: 25453521 NR Description: blue copper-binding protein II [imported] -
  misc_feature (1)..(125): Homolog of NCBI NO: 21554060 NR Description: phytocyanin [Arabidopsis thaliana]
  misc_feature (1)..(125): Homolog of NCBI NO: 15224960 NR Description: uclacyanin II [Arabidopsis thaliana]
  misc_feature (1)..(179): Homolog of NCBI NO: 25282796 NR Description: uclacyanin II [imported] - Arabidopsis thaliana
  misc_feature (7)..(124): Homolog of NCBI NO: 15232289 NR Description: uclacyanin 3 [Arabidopsis thaliana]
  misc_feature (7)..(131): Homolog of NCBI NO: 15232287 NR Description: plastocyanin-like domain containing protein
  misc_feature (9)..(131): Homolog of NCBI NO: 14140127 NR Description: uclacyanin 3-like protein [Oryza sativa]
  misc_feature (4)..(125): Homolog of NCBI NO: 15218396 NR Description: plastocyanin-like domain containing protein thaliana] >gi|25406158|pir||H96745 probable blue copper protein
  misc_feature (15)..(126): Homolog of NCBI NO: 15219890 NR Description: plastocyanin-like domain containing protein thaliana] >gi|25402967|pir||A86358 Similar to blue copper protein
MNGLSKMAVAAATALLLVLTIVPGAVAVTYTIEWTTGVDYSGWATGKTFRVGDILEFKYGSSHTVDVVDKAGYDGCDGSSSTENHSDGDTKIDLKTVGINYFICSTTGHCSGGMKLAVNVVAGSADLRPLPRHLLQLRELLPHRNHLRLADHPHPPHPHLVQVQLLLLLHQRQVVRLRE

SEQ ID NO: 108451 - DNA, 993 bp, Arabidopsis thaliana
  misc_feature (1)..(993): Ceres Seq. ID no. 13667592
  misc_feature: MA Experiment ID: 20000180 Result: Down-regulated in Transcription
  misc_feature: MA Experiment 20000180 PARAMETER Experiment Name: At_Germinating_Seeds_P Parameter: Age (hr) Value: 24 vs. 0
  misc_feature: MA Experiment 20000180 PARAMETER Experiment Name: At_Germinating_Seeds_P Parameter: Tissue Value: Germinating Seeds
  misc_feature: MA Experiment ID: 20000234 Result: Down-regulated in Transcription
  misc_feature: MA Experiment 20000234 PARAMETER Experiment Name: At_Siliques_P Parameter: Age (day) Value: 21
  misc_feature: MA Experiment 20000234 PARAMETER Experiment Name: At_Siliques_P Parameter: Organism Value: A. thaliana
  misc_feature: MA Experiment 20000234 PARAMETER Experiment Name: At_Siliques_P Parameter: Plant Line Value: WS
  misc_feature: MA Experiment 20000234 PARAMETER Experiment Name: At_Siliques_P Parameter: Tissue Value: Less Than 5mm Siliques vs. Whole Plant
  misc_feature: MA Experiment ID: 20000286 Result: Down-regulated in Transcription
  misc_feature: MA Experiment 20000286 PARAMETER Experiment Name: At_Open_Flower_P Parameter: Age (day) Value: 21
  misc_feature: MA Experiment 20000286 PARAMETER Experiment Name: At_Open_Flower_P Parameter: Plant Line Value: WS
  misc_feature: MA Experiment 20000286 PARAMETER Experiment Name: At_Open_Flower_P Parameter: Tissue Value: Half Open vs. Whole Plant
  misc_feature: MA Experiment ID: 20001248 Result: Up-regulated in Transcription
  misc_feature: MA Experiment 20001248 PARAMETER Experiment Name: At_Far-red-induction_P Parameter: Age (day) Value: 7
  misc_feature: MA Experiment 20001248 PARAMETER Experiment Name: At_Far-red-induction_P Parameter: Light Value: Far-red vs. White
  misc_feature: MA Experiment 20001248 PARAMETER Experiment Name: At_Far-red-induction_P Parameter: Organism Value: A. thaliana
  misc_feature: MA Experiment 20001248 PARAMETER Experiment Name: At_Far-red-induction_P Parameter: Plant Line Value: Columbia
  misc_feature: MA Experiment 20001248 PARAMETER Experiment Name: At_Far-red-induction_P Parameter: Timepoint (hr) Value: 4
  misc_feature: MA Experiment 20001248 PARAMETER Experiment Name: At_Far-red-induction_P Parameter: Tissue Value: Whole Plant
  misc_feature: MA Experiment ID: 20001450 Result: Up-regulated in Transcription
  misc_feature: MA Experiment 20001450 PARAMETER Experiment Name: At_Far-red-induction_P Parameter: Age (day) Value: 7
  misc_feature: MA Experiment 20001450 PARAMETER Experiment Name: At_Far-red-induction_P Parameter: Light Value: Far-red vs. White
  misc_feature: MA Experiment 20001450 PARAMETER Experiment Name: At_Far-red-induction_P Parameter: Organism Value: A. thaliana
  misc_feature: MA Experiment 20001450 PARAMETER Experiment Name: At_Far-red-induction_P Parameter: Plant Line Value: Columbia
  misc_feature: MA Experiment 20001450 PARAMETER Experiment Name: At_Far-red-induction_P Parameter: Timepoint (hr) Value: 8
  misc_feature: MA Experiment 20001450 PARAMETER Experiment Name: At_Far-red-induction_P Parameter: Tissue Value: Whole Plant
  misc_feature: MA Experiment ID: 20001451 Result: Up-regulated in Transcription
  misc_feature: MA Experiment 20001451 PARAMETER Experiment Name: At_Far-red-induction_P Parameter: Age (day) Value: 7
  misc_feature: MA Experiment 20001451 PARAMETER Experiment Name: At_Far-red-induction_P Parameter: Light Value: Far-red vs. White
  misc_feature: MA Experiment 20001451 PARAMETER Experiment Name: At_Far-red-induction_P Parameter: Organism Value: A. thaliana
  misc_feature: MA Experiment 20001451 PARAMETER Experiment Name: At_Far-red-induction_P Parameter: Plant Line Value: Columbia
  misc_feature: MA Experiment 20001451 PARAMETER Experiment Name: At_Far-red-induction_P Parameter: Timepoint (hr) Value: 24
  misc_feature: MA Experiment 20001451 PARAMETER Experiment Name: At_Far-red-induction_P Parameter: Tissue Value: Whole Plant
  misc_feature: Pfam Name: IF4E Pfam Description: Eukaryotic initiation factor 4E
ccacgcgtccgtctttcttcttcctgattggaattttagggcttttgaaagcacgaacgcgtgaagctctaatcgagaaaaaaatggaggttttggataggagagacgatgagatcagggactcgggaaacatggacagcatcaagtcacactatgttaccgactctgtttccgaggaacgccgctctcgtgagctcaaggatggtctccatcctttacggtacaagttttcgatatggtacactcgtcgcacaccaggggttcggaaccagtcttatgaagataacatcaagaagatggtagaattcagcacggttgaaggattttgggcctgctactgtcaccttgctcgttcttctctcttgcctagtccaacagatcttcatttctttaaggatgggattcgtccattgtgggaggatggtgccaactgcaatggaggaaagtggatcatacgtttctcaaaagttgtatctgctcgcttctgggaggatctgcttcttgcgttggtaggcgaccagcttgatgatgctgataacatatgtggggcagtactgagtgtccgtttcaacgaggacatcattagtgtatggaatcgcaatgcttctgaccatcaggcagtgatgggtttgagagactcaatcaagcggcatttgaagttgcctcatgcatatgtcatggaatacaagccacacgatgcttctctccgcgacaactcttcctacagaaacacatggctgagaggataggcccaaagtcgatgattgtatcatgtaatgtggagaagatttgggaagctcatctgcaacctgggaagatatctggattgaaccctgtatccaataccatactgtaccggaggcttacaatatcagaaaaacaaaatccgggctacttctgtgtcagtatgtgttcatttcgtttttcttttacagtacatcttgttaacttcaatggtttgactcttgatcaaaactataagggttaattttc

SEQ ID NO: 108452 - protein, 248 aa, Arabidopsis thaliana
  peptide (1)..(248): Ceres Seq. ID no. 13667593
  misc_feature: Pfam Name: IF4E Pfam Description: Eukaryotic initiation factor 4E
  misc_feature (28)..(248): Homolog of NCBI NO: 25453555 NR Description: eukaryotic cap-binding protein [imported] -
  misc_feature (28)..(248): Homolog of NCBI NO: 15238740 NR Description: eukaryotic cap-binding protein (gb|AAC17220.1) thaliana] >gi|29839401|sp|Q9FK59|IFE3_ARATH Eukaryotic
  misc_feature (70)..(244): Homolog of NCBI NO: 13624327 NR Description: eukaryotic translation initiation factor 4E like DNA segment, human D0S6743E [Mus musculus]
  misc_feature (40)..(244): Homolog of NCBI NO: 37590370 NR Description: Unknown (protein for MGC:73242) [Danio rerio]
  misc_feature (35)..(236): Homolog of NCBI NO: 4757702 NR Description: eukaryotic translation initiation factor 4E-like
  misc_feature (35)..(236): Homolog of NCBI NO: 12653185 NR Description: EIF4EL3 protein [Homo sapiens]
  misc_feature (70)..(236): Homolog of NCBI NO: 3329384 NR Description: translation initiation factor 4e [Homo sapiens]
  misc_feature (70)..(236): Homolog of NCBI NO: 29839292 NR Description: Eukaryotic translation initiation factor 4E type
  misc_feature (70)..(236): Homolog of NCBI NO: 34877568 NR Description: similar to eukaryotic translation initiation
  misc_feature (70)..(236): Homolog of NCBI NO: 3201958 NR Description: eIF4E-like protein 4E-LP [Mus musculus]
TRPSFFFLIGILGLLKARTREALIEKKMEVLDRRDDEIRDSGNMDSIKSHYVTDSVSEERRSRELKDGLHPLRYKFSIWYTRRTPGVRNQSYEDNIKKMVEFSTVEGFWACYCHLARSSLLPSPTDLHFFKDGIRPLWEDGANCNGGKWIIRFSKVVSARFWEDLLLALVGDQLDDADNICGAVLSVRFNEDIISVWNRNASDHQAVMGLRDSIKRHLKLPHAYVMEYKPHDASLRDNSSYRNTWLRG

SEQ ID NO: 108453 - protein, 221 aa, Arabidopsis thaliana
  peptide (1)..(221): Ceres Seq. ID no. 13667594
  misc_feature: Pfam Name: IF4E Pfam Description: Eukaryotic initiation factor 4E
  misc_feature (1)..(221): Homolog of NCBI NO: 25453555 NR Description: eukaryotic cap-binding protein [imported] -
  misc_feature (1)..(221): Homolog of NCBI NO: 15238740 NR Description: eukaryotic cap-binding protein (gb|AAC17220.1) thaliana] >gi|29839401|sp|Q9FK59|IFE3_ARATH Eukaryotic
  misc_feature (43)..(217): Homolog of NCBI NO: 13624327 NR Description: eukaryotic translation initiation factor 4E like DNA segment, human D0S6743E [Mus musculus]
  misc_feature (13)..(217): Homolog of NCBI NO: 37590370 NR Description: Unknown (protein for MGC:73242) [Danio rerio]
  misc_feature (8)..(209): Homolog of NCBI NO: 4757702 NR Description: eukaryotic translation initiation factor 4E-like
  misc_feature (8)..(209): Homolog of NCBI NO: 12653185 NR Description: EIF4EL3 protein [Homo sapiens]
  misc_feature (43)..(209): Homolog of NCBI NO: 3329384 NR Description: translation initiation factor 4e [Homo sapiens]
  misc_feature (43)..(209): Homolog of NCBI NO: 29839292 NR Description: Eukaryotic translation initiation factor 4E type
  misc_feature (43)..(209): Homolog of NCBI NO: 34877568 NR Description: similar to eukaryotic translation initiation
  misc_feature (43)..(209): Homolog of NCBI NO: 3201958 NR Description: eIF4E-like protein 4E-LP [Mus musculus]
MEVLDRRDDEIRDSGNMDSIKSHYVTDSVSEERRSRELKDGLHPLRYKFSIWYTRRTPGVRNQSYEDNIKKMVEFSTVEGFWACYCHLARSSLLPSPTDLHFFKDGIRPLWEDGANCNGGKWIIRFSKVVSARFWEDLLLALVGDQLDDADNICGAVLSVRFNEDIISVWNRNASDHQAVMGLRDSIKRHLKLPHAYVMEYKPHDASLRDNSSYRNTWLRG

SEQ ID NO: 108454 - protein, 205 aa, Arabidopsis thaliana
  peptide (1)..(205): Ceres Seq. ID no. 13667595
  misc_feature: Pfam Name: IF4E Pfam Description: Eukaryotic initiation factor 4E
  misc_feature (1)..(205): Homolog of NCBI NO: 25453555 NR Description: eukaryotic cap-binding protein [imported] -
  misc_feature (1)..(205): Homolog of NCBI NO: 15238740 NR Description: eukaryotic cap-binding protein (gb|AAC17220.1) thaliana] >gi|29839401|sp|Q9FK59|IFE3_ARATH Eukaryotic
  misc_feature (27)..(201): Homolog of NCBI NO: 13624327 NR Description: eukaryotic translation initiation factor 4E like DNA segment, human D0S6743E [Mus musculus]
  misc_feature (1)..(201): Homolog of NCBI NO: 37590370 NR Description: Unknown (protein for MGC:73242) [Danio rerio]
  misc_feature (1)..(193): Homolog of NCBI NO: 4757702 NR Description: eukaryotic translation initiation factor 4E-like
  misc_feature (1)..(193): Homolog of NCBI NO: 12653185 NR Description: EIF4EL3 protein [Homo sapiens]
  misc_feature (27)..(193): Homolog of NCBI NO: 3329384 NR Description: translation initiation factor 4e [Homo sapiens]
  misc_feature (27)..(193): Homolog of NCBI NO: 29839292 NR Description: Eukaryotic translation initiation factor 4E type
  misc_feature (27)..(193): Homolog of NCBI NO: 34877568 NR Description: similar to eukaryotic translation initiation
  misc_feature (27)..(193): Homolog of NCBI NO: 3201958 NR Description: eIF4E-like protein 4E-LP [Mus musculus]
MDSIKSHYVTDSVSEERRSRELKDGLHPLRYKFSIWYTRRTPGVRNQSYEDNIKKMVEFSTVEGFWACYCHLARSSLLPSPTDLHFFKDGIRPLWEDGANCNGGKWIIRFSKVVSARFWEDLLLALVGDQLDDADNICGAVLSVRFNEDIISVWNRNASDHQAVMGLRDSIKRHLKLPHAYVMEYKPHDASLRDNSSYRNTWLRG

SEQ ID NO: 108455 - DNA, 1567 bp, Arabidopsis thaliana
  misc_feature (1)..(1567): Ceres Seq. ID no. 13667645
  misc_feature: MA Experiment ID: 108434 Result: Up-regulated in Transcription
  misc_feature: MA Experiment 108434 PARAMETER Experiment Name: At_Root_Tips_cDNA_P Parameter: Tissue Value: Root Tips
  misc_feature: MA Experiment ID: 108461 Result: Down-regulated in Transcription
  misc_feature: MA Experiment 108461 PARAMETER Experiment Name: At_Germinating_Seeds_cDNA_P Parameter: Age (day) Value: 1 vs. 0
  misc_feature: MA Experiment 108461 PARAMETER Experiment Name: At_Germinating_Seeds_cDNA_P Parameter: Tissue Value: Germinating Seeds
  misc_feature: MA Experiment ID: 108462 Result: Down-regulated in Transcription
  misc_feature: MA Experiment 108462 PARAMETER Experiment Name: At_Germinating_Seeds_cDNA_P Parameter: Age (day) Value: 2 vs. 0
  misc_feature: MA Experiment 108462 PARAMETER Experiment Name: At_Germinating_Seeds_cDNA_P Parameter: Tissue Value: Germinating Seeds
  misc_feature: MA Experiment ID: 108463 Result: Down-regulated in Transcription
  misc_feature: MA Experiment 108463 PARAMETER Experiment Name: At_Germinating_Seeds_cDNA_P Parameter: Age (day) Value: 3 vs. 0
  misc_feature: MA Experiment 108463 PARAMETER Experiment Name: At_Germinating_Seeds_cDNA_P Parameter: Tissue Value: Germinating Seeds
  misc_feature: MA Experiment ID: 108464 Result: Down-regulated in Transcription
  misc_feature: MA Experiment 108464 PARAMETER Experiment Name: At_Germinating_Seeds_cDNA_P Parameter: Age (day) Value: 4 vs. 0
  misc_feature: MA Experiment 108464 PARAMETER Experiment Name: At_Germinating_Seeds_cDNA_P Parameter: Tissue Value: Germinating Seeds
  misc_feature: MA Experiment ID: 108595 Result: Down-regulated in Transcription
  misc_feature: MA Experiment 108595 PARAMETER Experiment Name: At_Ler-pi_Ovule_cDNA_P Parameter: Plant Line Value: null
  misc_feature: MA Experiment ID: 20000087 Result: Down-regulated in Transcription
  misc_feature: MA Experiment 20000087 PARAMETER Experiment Name: At_100uM_ABA_Mutants_cDNA_P Parameter: Plant Line Value: WS
  misc_feature: MA Experiment 20000087 PARAMETER Experiment Name: At_100uM_ABA_Mutants_cDNA_P Parameter: Timepoint (hr) Value: 6
  misc_feature: MA Experiment 20000087 PARAMETER Experiment Name: At_100uM_ABA_Mutants_cDNA_P Parameter: Tissue Value: Aerial
  misc_feature: MA Experiment 20000087 PARAMETER Experiment Name: At_100uM_ABA_Mutants_cDNA_P Parameter: Treatment Value: 100uM ABA vs. No Treatment
  misc_feature: MA Experiment ID: 20000111 Result: Up-regulated in Transcription
  misc_feature: MA Experiment 20000111 PARAMETER Experiment Name: At_42deg_Heat_cDNA_P Parameter: Temperature (deg C) Value: 42 vs. 22
  misc_feature: MA Experiment 20000111 PARAMETER Experiment Name: At_42deg_Heat_cDNA_P Parameter: Timepoint (hr) Value: 6
  misc_feature: MA Experiment 20000111 PARAMETER Experiment Name: At_42deg_Heat_cDNA_P Parameter: Tissue Value: Aerial
  misc_feature: MA Experiment ID: 20000180 Result: Down-regulated in Transcription
  misc_feature: MA Experiment 20000180 PARAMETER Experiment Name: At_Germinating_Seeds_P Parameter: Age (hr) Value: 24 vs. 0
  misc_feature: MA Experiment 20000180 PARAMETER Experiment Name: At_Germinating_Seeds_P Parameter: Tissue Value: Germinating Seeds
  misc_feature: MA Experiment ID: 20000495 Result: Down-regulated in Transcription
  misc_feature: MA Experiment 20000495 PARAMETER Experiment Name: At_Guard_Cells_P Parameter: Harvest Date Value: 8/2/2002
  misc_feature: MA Experiment 20000495 PARAMETER Experiment Name: At_Guard_Cells_P Parameter: Organism Value: A. thaliana
  misc_feature: MA Experiment 20000495 PARAMETER Experiment Name: At_Guard_Cells_P Parameter: Tissue Value: Guard Cells vs. Leaves
  misc_feature: MA Experiment ID: 20000496 Result: Down-regulated in Transcription
  misc_feature: MA Experiment 20000496 PARAMETER Experiment Name: At_Guard_Cells_P Parameter: Harvest Date Value: 7/19/2002
  misc_feature: MA Experiment 20000496 PARAMETER Experiment Name: At_Guard_Cells_P Parameter: Organism Value: Canola
  misc_feature: MA Experiment 20000496 PARAMETER Experiment Name: At_Guard_Cells_P Parameter: Tissue Value: Guard Cells vs. Leaves
  misc_feature: MA Experiment ID: 20001451 Result: Down-regulated in Transcription
  misc_feature: MA Experiment 20001451 PARAMETER Experiment Name: At_Far-red-induction_P Parameter: Age (day) Value: 7
  misc_feature: MA Experiment 20001451 PARAMETER Experiment Name: At_Far-red-induction_P Parameter: Light Value: Far-red vs. White
  misc_feature: MA Experiment 20001451 PARAMETER Experiment Name: At_Far-red-induction_P Parameter: Organism Value: A. thaliana
  misc_feature: MA Experiment 20001451 PARAMETER Experiment Name: At_Far-red-induction_P Parameter: Plant Line Value: Columbia
  misc_feature: MA Experiment 20001451 PARAMETER Experiment Name: At_Far-red-induction_P Parameter: Timepoint (hr) Value: 24
  misc_feature: MA Experiment 20001451 PARAMETER Experiment Name: At_Far-red-induction_P Parameter: Tissue Value: Whole Plant
  misc_feature: MA Experiment ID: 20001558 Result: Up-regulated in Transcription
  misc_feature: MA Experiment 20001558 PARAMETER Experiment Name: At_Drought_Soil_Dry_P Parameter: Age (day) Value: 27
  misc_feature: MA Experiment 20001558 PARAMETER Experiment Name: At_Drought_Soil_Dry_P Parameter: Organism Value: A. thaliana
  misc_feature: MA Experiment 20001558 PARAMETER Experiment Name: At_Drought_Soil_Dry_P Parameter: Plant Line Value: WS
  misc_feature: MA Experiment 20001558 PARAMETER Experiment Name: At_Drought_Soil_Dry_P Parameter: Post Timepoint (hr) Value: 6
  misc_feature: MA Experiment 20001558 PARAMETER Experiment Name: At_Drought_Soil_Dry_P Parameter: Post-Treatment Value: Re-Water vs. No Drought
  misc_feature: MA Experiment 20001558 PARAMETER Experiment Name: At_Drought_Soil_Dry_P Parameter: Timepoint (day) Value: 13
  misc_feature: MA Experiment 20001558 PARAMETER Experiment Name: At_Drought_Soil_Dry_P Parameter: Treatment Value: Drought vs. No Drought
  misc_feature: MA Experiment ID: 20001757 Result: Up-regulated in Transcription
  misc_feature: MA Experiment 20001757 PARAMETER Experiment Name: At_50mM_NH4NO3_L-to-H_P Parameter: Timepoint (hr) Value: 6
  misc_feature: MA Experiment 20001757 PARAMETER Experiment Name: At_50mM_NH4NO3_L-to-H_P Parameter: Tissue Value: Leaf
  misc_feature: MA Experiment 20001757 PARAMETER Experiment Name: At_50mM_NH4NO3_L-to-H_P Parameter: Treatment Value: 50mM NH4NO3 vs 100mM Mannitol
ccacgcgtccgtaagaagattttgccagtgcgggaagcggcggagattgagagattagcgacgatggaggaaagcaaacagaactatgacctgacgccactaatagcgcctaacctggacagacacttggtgtttcctatattcgagttccttcaagagcgtcagctttaccctgatgagcagatcctgaagtctaaaatccagcttttgaaccagacgaacatggttgattacgccatggatattcacaagagtctctaccacactgaagacgctcctcaagaaatggtggagagaagaacagaggttgtcgctaggctcaaatctttggaggaggctgctgcaccactcgtgtcttttcttttgaaccctaacgctgtgcaggagctaagagctgacaagcagtacaatctccaaatgctcaaggaacgctaccagattggtccagaccagattgaggctttgtaccagtacgccaagtttcagtttgaatgtggcaactattctggtgctgctgattatctttaccagtacaggaccctgtgctctaaccttgagaggagtttgagtgccttgtggggaaagctcgcatctgaaatattgatgcaaaactgggatattgctcttgaagagcttaaccgtctcaaagagattattgactcaaagagtttttcatcgccgttaaaccaggtgcagaacaggatttggttgatgcattggggtctgtatatcttttttaaccatgataatggaaggacacagatcattgatctttttaaccaagacaagtatctgaatgccatccaaactagtgctccacacttgctgcgctacttggcaactgctttcattgtcaacaaaaggagaagaccacaattgaaagacttcattaaggtcattcagcaagagcactactcctacaaagatccaattatcgagttcctggcatgtgtgtttgtcaattatgactttgatggggctcaaaagaagatgaaagagtgtgaagaggtcattgtgaatgatccattccttggcaagcgagttgaggatggaaacttttcaactgtaccactgagagatgaattttttgaaaatgcccgcctattcgtctttgaaaccttttgcaaaattcatcaaaggattgacatgggggtacttcgtgaaaaattgaatctgaactatgaggaggccgagagatggattgtgaacctaatccgcacctcaaagcttgatgccaagattgattctgagtcaggaactgtaatcatggtgcctactcagcccaacgtgcatgagcagttgataaaccacaccaaaggcttatcaggacgaacatacaagttagtgaatcagctcttggaacacacacaggcgcaagcaactcgctagtcaaaattttgctgtggaagcctttccttgataaaactcaccttcggttgactggaattattttctttttcttgctctgagttcaccttttactttgaaaaagattattatggagttgttctatttgaaatgttggatccacagattggaacattttccaaccaaatcagcattttgt

SEQ ID NO: 108456 - protein, 462 aa, Arabidopsis thaliana
  peptide (1)..(462): Ceres Seq. ID no. 13667646
  misc_feature (309)..(425): Pfam Name: PCI domain Pfam Description: PCI domain
  misc_feature (22)..(462): Homolog of NCBI NO: 7689381 NR Description: eIF3e [Arabidopsis thaliana]
  misc_feature (22)..(462): Homolog of NCBI NO: 18410687 NR Description: translation initiation factor 3 -related protein thaliana] >gi|12407658|gb|AAG53613.1|AF285832_1 eukaryotic factor 3E subunit [Arabidopsis thaliana]
  misc_feature (29)..(462): Homolog of NCBI NO: 34900328 NR Description: putative translation initiation factor 3 [Oryza
  misc_feature (29)..(454): Homolog of NCBI NO: 34394686 NR Description: putative eukaryotic initiation factor 3E [Oryza
  misc_feature (141)..(462): Homolog of NCBI NO: 34900030 NR Description: putative eIF3e [Oryza sativa (japonica
  misc_feature (29)..(448): Homolog of NCBI NO: 4503521 NR Description: murine mammary tumor integration site 6 (oncogene eukaryotic translation initiation factor 3, subunit 6 (48kD)
  misc_feature (29)..(448): Homolog of NCBI NO: 12847562 NR Description: unnamed protein product [Mus musculus]
  misc_feature (29)..(448): Homolog of NCBI NO: 34866211 NR Description: similar to Eukaryotic translation initiation
  misc_feature (29)..(456): Homolog of NCBI NO: 38494387 NR Description: Murine mammary tumor integration site 6 [Silurana
  misc_feature (29)..(448): Homolog of NCBI NO: 17389740 NR Description: eukaryotic translation initiation factor 3,
PRVRKKILPVREAAEIERLATMEESKQNYDLTPLIAPNLDRHLVFPIFEFLQERQLYPDEQILKSKIQLLNQTNMVDYAMDIHKSLYHTEDAPQEMVERRTEVVARLKSLEEAAAPLVSFLLNPNAVQELRADKQYNLQMLKERYQIGPDQIEALYQYAKFQFECGNYSGAADYLYQYRTLCSNLERSLSALWGKLASEILMQNWDIALEELNRLKEIIDSKSFSSPLNQVQNRIWLMHWGLYIFFNHDNGRTQIIDLFNQDKYLNAIQTSAPHLLRYLATAFIVNKRRRPQLKDFIKVIQQEHYSYKDPIIEFLACVFVNYDFDGAQKKMKECEEVIVNDPFLGKRVEDGNFSTVPLRDEFFENARLFVFETFCKIHQRIDMGVLREKLNLNYEEAERWIVNLIRTSKLDAKIDSESGTVIMVPTQPNVHEQLINHTKGLSGRTYKLVNQLLEHTQAQATR

SEQ ID NO: 108457 - protein, 441 aa, Arabidopsis thaliana
  peptide (1)..(441): Ceres Seq. ID no. 13667647
  misc_feature (288)..(404): Pfam Name: PCI domain Pfam Description: PCI domain
  misc_feature (1)..(441): Homolog of NCBI NO: 7689381 NR Description: eIF3e [Arabidopsis thaliana]
  misc_feature (1)..(441): Homolog of NCBI NO: 18410687 NR Description: translation initiation factor 3 -related protein thaliana] >gi|12407658|gb|AAG53613.1|AF285832_1 eukaryotic factor 3E subunit [Arabidopsis thaliana]
  misc_feature (8)..(441): Homolog of NCBI NO: 34900328 NR Description: putative translation initiation factor 3 [Oryza
  misc_feature (8)..(433): Homolog of NCBI NO: 34394686 NR Description: putative eukaryotic initiation factor 3E [Oryza
  misc_feature (120)..(441): Homolog of NCBI NO: 34900030 NR Description: putative eIF3e [Oryza sativa (japonica
  misc_feature (8)..(427): Homolog of NCBI NO: 4503521 NR Description: murine mammary tumor integration site 6 (oncogene eukaryotic translation initiation factor 3, subunit 6 (48kD)
  misc_feature (8)..(427): Homolog of NCBI NO: 12847562 NR Description: unnamed protein product [Mus musculus]
  misc_feature (8)..(427): Homolog of NCBI NO: 34866211 NR Description: similar to Eukaryotic translation initiation
  misc_feature (8)..(435): Homolog of NCBI NO: 38494387 NR Description: Murine mammary tumor integration site 6 [Silurana
  misc_feature (8)..(427): Homolog of NCBI NO: 17389740 NR Description: eukaryotic translation initiation factor 3,
MEESKQNYDLTPLIAPNLDRHLVFPIFEFLQERQLYPDEQILKSKIQLLNQTNMVDYAMDIHKSLYHTEDAPQEMVERRTEVVARLKSLEEAAAPLVSFLLNPNAVQELRADKQYNLQMLKERYQIGPDQIEALYQYAKFQFECGNYSGAADYLYQYRTLCSNLERSLSALWGKLASEILMQNWDIALEELNRLKEIIDSKSFSSPLNQVQNRIWLMHWGLYIFFNHDNGRTQIIDLFNQDKYLNAIQTSAPHLLRYLATAFIVNKRRRPQLKDFIKVIQQEHYSYKDPIIEFLACVFVNYDFDGAQKKMKECEEVIVNDPFLGKRVEDGNFSTVPLRDEFFENARLFVFETFCKIHQRIDMGVLREKLNLNYEEAERWIVNLIRTSKLDAKIDSESGTVIMVPTQPNVHEQLINHTKGLSGRTYKLVNQLLEHTQAQATR

SEQ ID NO: 108458 - protein, 388 aa, Arabidopsis thaliana
  peptide (1)..(388): Ceres Seq. ID no. 13667648
  misc_feature (235)..(351): Pfam Name: PCI domain Pfam Description: PCI domain
  misc_feature (1)..(388): Homolog of NCBI NO: 7689381 NR Description: eIF3e [Arabidopsis thaliana]
  misc_feature (1)..(388): Homolog of NCBI NO: 18410687 NR Description: translation initiation factor 3 -related protein thaliana] >gi|12407658|gb|AAG53613.1|AF285832_1 eukaryotic factor 3E subunit [Arabidopsis thaliana]
  misc_feature (1)..(388): Homolog of NCBI NO: 34900328 NR Description: putative translation initiation factor 3 [Oryza
  misc_feature (1)..(380): Homolog of NCBI NO: 34394686 NR Description: putative eukaryotic initiation factor 3E [Oryza
  misc_feature (67)..(388): Homolog of NCBI NO: 34900030 NR Description: putative eIF3e [Oryza sativa (japonica
  misc_feature (1)..(374): Homolog of NCBI NO: 4503521 NR Description: murine mammary tumor integration site 6 (oncogene eukaryotic translation initiation factor 3, subunit 6 (48kD)
  misc_feature (1)..(374): Homolog of NCBI NO: 12847562 NR Description: unnamed protein product [Mus musculus]
  misc_feature (1)..(374): Homolog of NCBI NO: 34866211 NR Description: similar to Eukaryotic translation initiation
  misc_feature (1)..(382): Homolog of NCBI NO: 38494387 NR Description: Murine mammary tumor integration site 6 [Silurana
  misc_feature (1)..(374): Homolog of NCBI NO: 17389740 NR Description: eukaryotic translation initiation factor 3,
MVDYAMDIHKSLYHTEDAPQEMVERRTEVVARLKSLEEAAAPLVSFLLNPNAVQELRADKQYNLQMLKERYQIGPDQIEALYQYAKFQFECGNYSGAADYLYQYRTLCSNLERSLSALWGKLASEILMQNWDIALEELNRLKEIIDSKSFSSPLNQVQNRIWLMHWGLYIFFNHDNGRTQIIDLFNQDKYLNAIQTSAPHLLRYLATAFIVNKRRRPQLKDFIKVIQQEHYSYKDPIIEFLACVFVNYDFDGAQKKMKECEEVIVNDPFLGKRVEDGNFSTVPLRDEFFENARLFVFETFCKIHQRIDMGVLREKLNLNYEEAERWIVNLIRTSKLDAKIDSESGTVIMVPTQPNVHEQLINHTKGLSGRTYKLVNQLLEHTQAQATR

SEQ ID NO: 108459 - DNA, 1335 bp, Arabidopsis thaliana
  misc_feature (1)..(1335): Ceres Seq. ID no. 13667657
  misc_feature: MA Experiment ID: 108433 Result: Up-regulated in Transcription
  misc_feature: MA Experiment 108433 PARAMETER Experiment Name: At_rhl_Mutant2_cDNA_P Parameter: Age (day) Value: 7
  misc_feature: MA Experiment 108433 PARAMETER Experiment Name: At_rhl_Mutant2_cDNA_P Parameter: Organism Value: A. thaliana
  misc_feature: MA Experiment 108433 PARAMETER Experiment Name: At_rhl_Mutant2_cDNA_P Parameter: Plant Line Value: rhl Mutant vs. wt landsburg
  misc_feature: MA Experiment 108433 PARAMETER Experiment Name: At_rhl_Mutant2_cDNA_P Parameter: Tissue Value: Roots
  misc_feature: MA Experiment ID: 108434 Result: Down-regulated in Transcription
  misc_feature: MA Experiment 108434 PARAMETER Experiment Name: At_Root_Tips_cDNA_P Parameter: Tissue Value: Root Tips
  misc_feature: MA Experiment ID: 108435 Result: Up-regulated in Transcription
  misc_feature: MA Experiment 108435 PARAMETER Experiment Name: At_stm_Mutants_cDNA_P Parameter: Plant Line Value: wt Landsburg vs stm
  misc_feature: MA Experiment 108435 PARAMETER Experiment Name: At_stm_Mutants_cDNA_P Parameter: Tissue Value: Shoot Apical Meristem Region
  misc_feature: MA Experiment ID: 108461 Result: Up-regulated in Transcription
  misc_feature: MA Experiment 108461 PARAMETER Experiment Name: At_Germinating_Seeds_cDNA_P Parameter: Age (day) Value: 1 vs. 0
  misc_feature: MA Experiment 108461 PARAMETER Experiment Name: At_Germinating_Seeds_cDNA_P Parameter: Tissue Value: Germinating Seeds
  misc_feature: MA Experiment ID: 108463 Result: Up-regulated in Transcription
  misc_feature: MA Experiment 108463 PARAMETER Experiment Name: At_Germinating_Seeds_cDNA_P Parameter: Age (day) Value: 3 vs. 0
  misc_feature: MA Experiment 108463 PARAMETER Experiment Name: At_Germinating_Seeds_cDNA_P Parameter: Tissue Value: Germinating Seeds
  misc_feature: MA Experiment ID: 108464 Result: Up-regulated in Transcription
  misc_feature: MA Experiment 108464 PARAMETER Experiment Name: At_Germinating_Seeds_cDNA_P Parameter: Age (day) Value: 4 vs. 0
  misc_feature: MA Experiment 108464 PARAMETER Experiment Name: At_Germinating_Seeds_cDNA_P Parameter: Tissue Value: Germinating Seeds
  misc_feature: MA Experiment ID: 108488 Result: Down-regulated in Transcription
  misc_feature: MA Experiment ID: 108574 Result: Up-regulated in Transcription
  misc_feature: MA Experiment 108574 PARAMETER Experiment Name: At_Wounding__cDNA_P Parameter: Timepoint (hr) Value: 1
  misc_feature: MA Experiment 108574 PARAMETER Experiment Name: At_Wounding__cDNA_P Parameter: Tissue Value: Aerial
  misc_feature: MA Experiment 108574 PARAMETER Experiment Name: At_Wounding__cDNA_P Parameter: Treatment Value: Wounding vs. No Wounding
  misc_feature: MA Experiment ID: 108577 Result: Down-regulated in Transcription
  misc_feature: MA Experiment 108577 PARAMETER Experiment Name: At_42deg_Heat_cDNA_P Parameter: Temperature (deg C) Value: 42 vs. 22
  misc_feature: MA Experiment 108577 PARAMETER Experiment Name: At_42deg_Heat_cDNA_P Parameter: Timepoint (hr) Value: 6
  misc_feature: MA Experiment 108577 PARAMETER Experiment Name: At_42deg_Heat_cDNA_P Parameter: Tissue Value: Aerial
  misc_feature: MA Experiment ID: 108585 Result: Up-regulated in Transcription
  misc_feature: MA Experiment 108585 PARAMETER Experiment Name: At_5mM_NaNP_cDNA_P Parameter: Timepoint (hr) Value: 6
  misc_feature: MA Experiment 108585 PARAMETER Experiment Name: At_5mM_NaNP_cDNA_P Parameter: Tissue Value: Aerial
  misc_feature: MA Experiment 108585 PARAMETER Experiment Name: At_5mM_NaNP_cDNA_P Parameter: Treatment Value: null
  misc_feature: MA Experiment ID: 108595 Result: Up-regulated in Transcription
  misc_feature: MA Experiment 108595 PARAMETER Experiment Name: At_Ler-pi_Ovule_cDNA_P Parameter: Plant Line Value: null
  misc_feature: MA Experiment ID: 108667 Result: Up-regulated in Transcription
  misc_feature: MA Experiment 108667 PARAMETER Experiment Name: At_2mM_SA_cDNA_P Parameter: Plant Line Value: WS
  misc_feature: MA Experiment 108667 PARAMETER Experiment Name: At_2mM_SA_cDNA_P Parameter: Timepoint (hr) Value: 1
  misc_feature: MA Experiment 108667 PARAMETER Experiment Name: At_2mM_SA_cDNA_P Parameter: Treatment Value: 2mM SA vs. No Treatment
  misc_feature: MA Experiment ID: 108668 Result: Up-regulated in Transcription
  misc_feature: MA Experiment 108668 PARAMETER Experiment Name: At_2mM_SA_cDNA_P Parameter: Plant Line Value: WS
  misc_feature: MA Experiment 108668 PARAMETER Experiment Name: At_2mM_SA_cDNA_P Parameter: Timepoint (hr) Value: 6
  misc_feature: MA Experiment 108668 PARAMETER Experiment Name: At_2mM_SA_cDNA_P Parameter: Treatment Value: 2mM SA vs. No Treatment
  misc_feature: MA Experiment ID: 20000069 Result: Up-regulated in Transcription
  misc_feature: MA Experiment 20000069 PARAMETER Experiment Name: At_100uM_ABA_Mutants_cDNA_P Parameter: Plant Line Value: CS23
  misc_feature: MA Experiment 20000069 PARAMETER Experiment Name: At_100uM_ABA_Mutants_cDNA_P Parameter: Timepoint (hr) Value: 6
  misc_feature: MA Experiment 20000069 PARAMETER Experiment Name: At_100uM_ABA_Mutants_cDNA_P Parameter: Tissue Value: Aerial
  misc_feature: MA Experiment 20000069 PARAMETER Experiment Name: At_100uM_ABA_Mutants_cDNA_P Parameter: Treatment Value: 100uM ABA vs. No Treatment
  misc_feature: MA Experiment ID: 20000072 Result: Up-regulated in Transcription
  misc_feature: MA Experiment 20000072 PARAMETER Experiment Name: At_100uM_ABA_Mutants_cDNA_P Parameter: Plant Line Value: CS8105
  misc_feature: MA Experiment 20000072 PARAMETER Experiment Name: At_100uM_ABA_Mutants_cDNA_P Parameter: Timepoint (hr) Value: 6
  misc_feature: MA Experiment 20000072 PARAMETER Experiment Name: At_100uM_ABA_Mutants_cDNA_P Parameter: Tissue Value: Aerial
  misc_feature: MA Experiment 20000072 PARAMETER Experiment Name: At_100uM_ABA_Mutants_cDNA_P Parameter: Treatment Value: 100uM ABA vs. No Treatment
  misc_feature: MA Experiment ID: 20000086 Result: Up-regulated in Transcription
  misc_feature: MA Experiment 20000086 PARAMETER Experiment Name: At_100uM_ABA_Mutants_cDNA_P Parameter: Plant Line Value: CS22
  misc_feature: MA Experiment 20000086 PARAMETER Experiment Name: At_100uM_ABA_Mutants_cDNA_P Parameter: Timepoint (hr) Value: 6
  misc_feature: MA Experiment 20000086 PARAMETER Experiment Name: At_100uM_ABA_Mutants_cDNA_P Parameter: Tissue Value: Aerial
  misc_feature: MA Experiment 20000086 PARAMETER Experiment Name: At_100uM_ABA_Mutants_cDNA_P Parameter: Treatment Value: 100uM ABA vs. No Treatment
  misc_feature: MA Experiment ID: 20000111 Result: Down-regulated in Transcription
  misc_feature: MA Experiment 20000111 PARAMETER Experiment Name: At_42deg_Heat_cDNA_P Parameter: Temperature (deg C) Value: 42 vs. 22
  misc_feature: MA Experiment 20000111 PARAMETER Experiment Name: At_42deg_Heat_cDNA_P Parameter: Timepoint (hr) Value: 6
  misc_feature: MA Experiment 20000111 PARAMETER Experiment Name: At_42deg_Heat_cDNA_P Parameter: Tissue Value: Aerial
  misc_feature: MA Experiment ID: 20000112 Result: Down-regulated in Transcription
  misc_feature: MA Experiment 20000112 PARAMETER Experiment Name: At_42deg_Heat_cDNA_P Parameter: Temperature (deg C) Value: 42 vs. 22
  misc_feature: MA Experiment 20000112 PARAMETER Experiment Name: At_42deg_Heat_cDNA_P Parameter: Timepoint (hr) Value: 2
  misc_feature: MA Experiment 20000112 PARAMETER Experiment Name: At_42deg_Heat_cDNA_P Parameter: Tissue Value: Aerial
gaactagtctcgaattttctatttccgaataacaaaaccgatcggcggagacatgacggcggcacaagggaactctaacgagactctgttttcttcttacaagatgggaagattcgatctctctcatcgagtggttctggcgccgatgacgcggtgcagggcgttgaacggagtaccaaacgcggcgttggcagagtattatgctcaacggaccactcccggcggttttctcatctccgaaggcaccatggtctctcccggatccgcagggttcccacatgtgcctggaatctattcagatgaacaagtagaagcatggaagcaagtggtggaagcagttcacgctaagggaggtttcatcttttgtcaattatggcatgttggacgtgcttctcatgcagtgtatcaacctaatggaggatcaccaatatcgtcaacgaacaaaccaatctcggaaaacaggtggcgagttttgttgcccgatggttcccacgtgaagtacccgaaacctcgggctttagaagcttccgagatacctcgggtggtggaggattattgcctttctgctttgaatgcgattcgagctggtttcgatgggattgagatccacggggcgcatggttacctcattgatcagtttttgaaagacgggatcaatgaccgtactgaccaatacggaggatccattgaaaaccgttgtagattcttgaaacaagtagtggaaggtgtagtttcagccataggagctagtaaagttggtgtgagggtatctccagctatagatcacttggacgcaactgattctaacccattatcactcgggctagccgtggttgatatgctcaataagttacaagatgttaatggcttgaagctcgcttaccttcacgttacacaacctcgctaccacgcctatgggcaaacagagtcgggaaggcaagggagtgatgaggaagaagctaagctaatgaagagcttgagaatggcttataaaggaacctttatgtctagtggaggattcaataaggaactaggcatgcaagctgttcaacaaggtgatgctgatttggtttcatatggcaggctttttatcgcaaacccggatttggtttcgcggttcaagattgatggagagttgaataaatataatcggaagacgttttacactcaagatccagttgttggctacacggattatcctttcttggctccttcttcccgcctctgagtttgataatcggaggagaaaatgtattgatgttgtataaagacaatatattaataagtaaaatgacaatgttattgttatccacttaatgaatagtcatgtatctt

SEQ ID NO: 108460 - protein, 391 aa, Arabidopsis thaliana
  peptide (1)..(391): Ceres Seq. ID no. 13667658
  misc_feature (11)..(363): Pfam Name: NADH:flavin oxidoreductase / NADH oxidase family Pfam Description: NADH:flavin oxidoreductase / NADH oxidase family
  misc_feature (1)..(391): Homolog of NCBI NO: 5059115 NR Description: OPDA-reductase homolog [Arabidopsis thaliana]
  misc_feature (1)..(391): Homolog of NCBI NO: 10242314 NR Description: 12-oxo-phytodienoate reductase [Arabidopsis
  misc_feature (1)..(391): Homolog of NCBI NO: 6707797 NR Description: 12-oxo-phytodienoate reductase [Arabidopsis
  misc_feature (1)..(391): Homolog of NCBI NO: 7688991 NR Description: 12-oxo-phytodienoate reductase [Arabidopsis
  misc_feature (1)..(391): Homolog of NCBI NO: 15225045 NR Description: 12-oxophytodienoate reductase (OPR3)(DDE1)
  misc_feature (1)..(385): Homolog of NCBI NO: 12056507 NR Description: 12-oxophytodienoate reductase 3 [Lycopersicon
  misc_feature (8)..(391): Homolog of NCBI NO: 5701740 NR Description: LEDI-5a protein [Lithospermum erythrorhizon]
  misc_feature (3)..(289): Homolog of NCBI NO: 7449902 NR Description: probable 12-oxophytodienoate reductase (EC
  misc_feature (263)..(389): Homolog of NCBI NO: 7449902 NR Description: probable 12-oxophytodienoate reductase (EC
  misc_feature (12)..(385): Homolog of NCBI NO: 23495288 NR Description: 12-oxophytodienoic acid reductase [Oryza sativa]
MTAAQGNSNETLFSSYKMGRFDLSHRVVLAPMTRCRALNGVPNAALAEYYAQRTTPGGFLISEGTMVSPGSAGFPHVPGIYSDEQVEAWKQVVEAVHAKGGFIFCQLWHVGRASHAVYQPNGGSPISSTNKPISENRWRVLLPDGSHVKYPKPRALEASEIPRVVEDYCLSALNAIRAGFDGIEIHGAHGYLIDQFLKDGINDRTDQYGGSIENRCRFLKQVVEGVVSAIGASKVGVRVSPAIDHLDATDSNPLSLGLAVVDMLNKLQDVNGLKLAYLHVTQPRYHAYGQTESGRQGSDEEEAKLMKSLRMAYKGTFMSSGGFNKELGMQAVQQGDADLVSYGRLFIANPDLVSRFKIDGELNKYNRKTFYTQDPVVGYTDYPFLAPSSRL

SEQ ID NO: 108461 - protein, 374 aa, Arabidopsis thaliana
  peptide (1)..(374): Ceres Seq. ID no. 13667659
  misc_feature (1)..(346): Pfam Name: NADH:flavin oxidoreductase / NADH oxidase family Pfam Description: NADH:flavin oxidoreductase / NADH oxidase family
  misc_feature (1)..(374): Homolog of NCBI NO: 5059115 NR Description: OPDA-reductase homolog [Arabidopsis thaliana]
  misc_feature (1)..(374): Homolog of NCBI NO: 10242314 NR Description: 12-oxo-phytodienoate reductase [Arabidopsis
  misc_feature (1)..(374): Homolog of NCBI NO: 6707797 NR Description: 12-oxo-phytodienoate reductase [Arabidopsis
  misc_feature (1)..(374): Homolog of NCBI NO: 7688991 NR Description: 12-oxo-phytodienoate reductase [Arabidopsis
  misc_feature (1)..(374): Homolog of NCBI NO: 15225045 NR Description: 12-oxophytodienoate reductase (OPR3)(DDE1)
  misc_feature (1)..(368): Homolog of NCBI NO: 12056507 NR Description: 12-oxophytodienoate reductase 3 [Lycopersicon
  misc_feature (1)..(374): Homolog of NCBI NO: 5701740 NR Description: LEDI-5a protein [Lithospermum erythrorhizon]
  misc_feature (1)..(272): Homolog of NCBI NO: 7449902 NR Description: probable 12-oxophytodienoate reductase (EC
  misc_feature (246)..(372): Homolog of NCBI NO: 7449902 NR Description: probable 12-oxophytodienoate reductase (EC
  misc_feature (1)..(368): Homolog of NCBI NO: 23495288 NR Description: 12-oxophytodienoic acid reductase [Oryza sativa]
MGRFDLSHRVVLAPMTRCRALNGVPNAALAEYYAQRTTPGGFLISEGTMVSPGSAGFPHVPGIYSDEQVEAWKQVVEAVHAKGGFIFCQLWHVGRASHAVYQPNGGSPISSTNKPISENRWRVLLPDGSHVKYPKPRALEASEIPRVVEDYCLSALNAIRAGFDGIEIHGAHGYLIDQFLKDGINDRTDQYGGSIENRCRFLKQVVEGVVSAIGASKVGVRVSPAIDHLDATDSNPLSLGLAVVDMLNKLQDVNGLKLAYLHVTQPRYHAYGQTESGRQGSDEEEAKLMKSLRMAYKGTFMSSGGFNKELGMQAVQQGDADLVSYGRLFIANPDLVSRFKIDGELNKYNRKTFYTQDPVVGYTDYPFLAPSSRL

SEQ ID NO: 108462 - protein, 360 aa, Arabidopsis thaliana
  peptide (1)..(360): Ceres Seq. ID no. 13667660
  misc_feature (1)..(332): Pfam Name: NADH:flavin oxidoreductase / NADH oxidase family Pfam Description: NADH:flavin oxidoreductase / NADH oxidase family
  misc_feature (1)..(360): Homolog of NCBI NO: 5059115 NR Description: OPDA-reductase homolog [Arabidopsis thaliana]
  misc_feature (1)..(360): Homolog of NCBI NO: 10242314 NR Description: 12-oxo-phytodienoate reductase [Arabidopsis
  misc_feature (1)..(360): Homolog of NCBI NO: 6707797 NR Description: 12-oxo-phytodienoate reductase [Arabidopsis
  misc_feature (1)..(360): Homolog of NCBI NO: 7688991 NR Description: 12-oxo-phytodienoate reductase [Arabidopsis
  misc_feature (1)..(360): Homolog of NCBI NO: 15225045 NR Description: 12-oxophytodienoate reductase (OPR3)(DDE1)
  misc_feature (1)..(354): Homolog of NCBI NO: 12056507 NR Description: 12-oxophytodienoate reductase 3 [Lycopersicon
  misc_feature (1)..(360): Homolog of NCBI NO: 5701740 NR Description: LEDI-5a protein [Lithospermum erythrorhizon]
  misc_feature (1)..(258): Homolog of NCBI NO: 7449902 NR Description: probable 12-oxophytodienoate reductase (EC
  misc_feature (232)..(358): Homolog of NCBI NO: 7449902 NR Description: probable 12-oxophytodienoate reductase (EC
  misc_feature (1)..(354): Homolog of NCBI NO: 23495288 NR Description: 12-oxophytodienoic acid reductase [Oryza sativa]
MTRCRALNGVPNAALAEYYAQRTTPGGFLISEGTMVSPGSAGFPHVPGIYSDEQVEAWKQVVEAVHAKGGFIFCQLWHVGRASHAVYQPNGGSPISSTNKPISENRWRVLLPDGSHVKYPKPRALEASEIPRVVEDYCLSALNAIRAGFDGIEIHGAHGYLIDQFLKDGINDRTDQYGGSIENRCRFLKQVVEGVVSAIGASKVGVRVSPAIDHLDATDSNPLSLGLAVVDMLNKLQDVNGLKLAYLHVTQPRYHAYGQTESGRQGSDEEEAKLMKSLRMAYKGTFMSSGGFNKELGMQAVQQGDADLVSYGRLFIANPDLVSRFKIDGELNKYNRKTFYTQDPVVGYTDYPFLAPSSRL

SEQ ID NO: 108463 - DNA, 1146 bp, Arabidopsis thaliana
  misc_feature (1)..(1146): Ceres Seq. ID no. 13667665
  misc_feature: MA Experiment ID: 108434 Result: Down-regulated in Transcription
  misc_feature: MA Experiment 108434 PARAMETER Experiment Name: At_Root_Tips_cDNA_P Parameter: Tissue Value: Root Tips
  misc_feature: MA Experiment ID: 108461 Result: Down-regulated in Transcription
  misc_feature: MA Experiment 108461 PARAMETER Experiment Name: At_Germinating_Seeds_cDNA_P Parameter: Age (day) Value: 1 vs. 0
  misc_feature: MA Experiment 108461 PARAMETER Experiment Name: At_Germinating_Seeds_cDNA_P Parameter: Tissue Value: Germinating Seeds
  misc_feature: MA Experiment ID: 108462 Result: Down-regulated in Transcription
  misc_feature: MA Experiment 108462 PARAMETER Experiment Name: At_Germinating_Seeds_cDNA_P Parameter: Age (day) Value: 2 vs. 0
  misc_feature: MA Experiment 108462 PARAMETER Experiment Name: At_Germinating_Seeds_cDNA_P Parameter: Tissue Value: Germinating Seeds
  misc_feature: MA Experiment ID: 108463 Result: Down-regulated in Transcription
  misc_feature: MA Experiment 108463 PARAMETER Experiment Name: At_Germinating_Seeds_cDNA_P Parameter: Age (day) Value: 3 vs. 0
  misc_feature: MA Experiment 108463 PARAMETER Experiment Name: At_Germinating_Seeds_cDNA_P Parameter: Tissue Value: Germinating Seeds
  misc_feature: MA Experiment ID: 108464 Result: Down-regulated in Transcription
  misc_feature: MA Experiment 108464 PARAMETER Experiment Name: At_Germinating_Seeds_cDNA_P Parameter: Age (day) Value: 4 vs. 0
  misc_feature: MA Experiment 108464 PARAMETER Experiment Name: At_Germinating_Seeds_cDNA_P Parameter: Tissue Value: Germinating Seeds
  misc_feature: MA Experiment ID: 108577 Result: Down-regulated in Transcription
  misc_feature: MA Experiment 108577 PARAMETER Experiment Name: At_42deg_Heat_cDNA_P Parameter: Temperature (deg C) Value: 42 vs. 22
  misc_feature: MA Experiment 108577 PARAMETER Experiment Name: At_42deg_Heat_cDNA_P Parameter: Timepoint (hr) Value: 6
  misc_feature: MA Experiment 108577 PARAMETER Experiment Name: At_42deg_Heat_cDNA_P Parameter: Tissue Value: Aerial
  misc_feature: MA Experiment ID: 108594 Result: Down-regulated in Transcription
  misc_feature: MA Experiment 108594 PARAMETER Experiment Name: At_Ler-rhl_Root_cDNA_P Parameter: Plant Line Value: null
  misc_feature: MA Experiment ID: 20000227 Result: Down-regulated in Transcription
  misc_feature: MA Experiment 20000227 PARAMETER Experiment Name: At_Root-Tips-vs-Tops_P Parameter: Tissue Value: Root Tips vs. Root Tops
  misc_feature: MA Experiment ID: 20000265 Result: Up-regulated in Transcription
  misc_feature: MA Experiment 20000265 PARAMETER Experiment Name: At_Open_Flower_P Parameter: Age (day) Value: 21
  misc_feature: MA Experiment 20000265 PARAMETER Experiment Name: At_Open_Flower_P Parameter: Plant Line Value: WS
  misc_feature: MA Experiment 20000265 PARAMETER Experiment Name: At_Open_Flower_P Parameter: Tissue Value: Closed Flower vs. Whole Plant
  misc_feature: MA Experiment ID: 20000453 Result: Down-regulated in Transcription
  misc_feature: MA Experiment 20000453 PARAMETER Experiment Name: At_100uM_ABA_P Parameter: Age (day) Value: 15
  misc_feature: MA Experiment 20000453 PARAMETER Experiment Name: At_100uM_ABA_P Parameter: Organism Value: A. thaliana
  misc_feature: MA Experiment 20000453 PARAMETER Experiment Name: At_100uM_ABA_P Parameter: Plant Line Value: WS
  misc_feature: MA Experiment 20000453 PARAMETER Experiment Name: At_100uM_ABA_P Parameter: Timepoint (hr) Value: 24
  misc_feature: MA Experiment 20000453 PARAMETER Experiment Name: At_100uM_ABA_P Parameter: Tissue Value: Aerial
  misc_feature: MA Experiment 20000453 PARAMETER Experiment Name: At_100uM_ABA_P Parameter: Treatment Value: 100uM ABA vs. No Treatment
acacaaagtcataacagtcgtttaaagtctgatccttttcatttttctttagtgtgtgaaaagagaaatacagttatggcggagatctcgggaaacggtggtgatgctagagacggagctgtggtggtcaatctcaaggaagaagacgaacaacaacaacaacaacaagctattcataaacccttgaagaaacaagactctctcctctctatctctgtccctttcttacaaaagttgatggcggaggttttgggaacatacttcttgatattcgccggttgtgccgcggtggctgtaaacacacaacatgacaaagccgtgactcttccagggatcgccatcgtttggggacttaccgtcatggtccttgtttactctctcggtcacatctccggtgctcatttcaatccggccgtcacaatcgcattcgcttcttgcggccgtttccctcttaaacaggttccggcttatgtgatatcacaagtgatcggatcaacgctagcggcggcgactttacggctcttgttcggacttgatcaagatgtttgtagtgggaaacacgatgtgttcgtcggaacattaccatctggatcgaatttgcagtcgtttgtgatcgagtttatcattactttctacctaatgttcgttatttctggcgttgccaccgataatagagcgatcggagaacttgctggactagcagtaggatcaacagtgctacttaacgtgataattgccgggccggtatcgggagcatcgatgaatccaggacgaagtttaggacctgcaatggtctacagttgctacagaggactttggatctacatagtttctccaattgttggtgcagtttcgggtgcgtgggtttataacatggttcgatatactgataagccattacgagaaataactaaaagcggttcttttttaaagacagtgcgaaacggtagctctcgttaagaaaaagaaaaacatgactatgttgtactagtcatcggaggttaagttgtatcactaaagaagtaactggaatattttgtattaaagtgtttttaaatttggattaccgcaaatggataaacatttatggtatgtgacgaatatgtaactgatctataacgagtttggccatatctaattacgtgc

SEQ ID NO: 108464 - protein, 319 aa, Arabidopsis thaliana
  peptide (1)..(319): Ceres Seq. ID no. 13667666
  misc_feature (26)..(319): Homolog of NCBI NO: 15234059 NR Description: major intrinsic protein (MIP) family [Arabidopsis
  misc_feature (26)..(319): Homolog of NCBI NO: 21536953 NR Description: major intrinsic protein (MIP)- like [Arabidopsis
  misc_feature (26)..(318): Homolog of NCBI NO: 18415224 NR Description: major intrinsic protein (MIP) family [Arabidopsis
  misc_feature (26)..(318): Homolog of NCBI NO: 25324917 NR Description: nodulin-26-like protein [imported] - Arabidopsis
  misc_feature (42)..(318): Homolog of NCBI NO: 2677614 NR Description: NLM1 protein (NodLikeMip1) [Arabidopsis thaliana]
  misc_feature (78)..(318): Homolog of NCBI NO: 7449725 NR Description: nodulin-26-like protein F13C5.200 - Arabidopsis
  misc_feature (62)..(311): Homolog of NCBI NO: 5139541 NR Description: nodulin26-like major intrinsic protein [Pisum
  misc_feature (71)..(316): Homolog of NCBI NO: 17025880 NR Description: multifunctional aquaporin [Medicago truncatula]
  misc_feature (32)..(318): Homolog of NCBI NO: 1076748 NR Description: major intrinsic protein - rice
  misc_feature (60)..(311): Homolog of NCBI NO: 541944 NR Description: nodulin-26 - soybean
TQSHNSRLKSDPFHFSLVCEKRNTVMAEISGNGGDARDGAVVVNLKEEDEQQQQQQAIHKPLKKQDSLLSISVPFLQKLMAEVLGTYFLIFAGCAAVAVNTQHDKAVTLPGIAIVWGLTVMVLVYSLGHISGAHFNPAVTIAFASCGRFPLKQVPAYVISQVIGSTLAAATLRLLFGLDQDVCSGKHDVFVGTLPSGSNLQSFVIEFIITFYLMFVISGVATDNRAIGELAGLAVGSTVLLNVIIAGPVSGASMNPGRSLGPAMVYSCYRGLWIYIVSPIVGAVSGAWVYNMVRYTDKPLREITKSGSFLKTVRNGSSR

SEQ ID NO: 108465 - protein, 294 aa, Arabidopsis thaliana; identical to SEQ ID NO: 40718
  peptide (1)..(294): Ceres Seq. ID no. 13667667
  misc_feature (1)..(294): Homolog of NCBI NO: 15234059 NR Description: major intrinsic protein (MIP) family [Arabidopsis
  misc_feature (1)..(294): Homolog of NCBI NO: 21536953 NR Description: major intrinsic protein (MIP)- like [Arabidopsis
  misc_feature (1)..(293): Homolog of NCBI NO: 18415224 NR Description: major intrinsic protein (MIP) family [Arabidopsis
  misc_feature (1)..(293): Homolog of NCBI NO: 25324917 NR Description: nodulin-26-like protein [imported] - Arabidopsis
  misc_feature (17)..(293): Homolog of NCBI NO: 2677614 NR Description: NLM1 protein (NodLikeMip1) [Arabidopsis thaliana]
  misc_feature (53)..(293): Homolog of NCBI NO: 7449725 NR Description: nodulin-26-like protein F13C5.200 - Arabidopsis
  misc_feature (37)..(286): Homolog of NCBI NO: 5139541 NR Description: nodulin26-like major intrinsic protein [Pisum
  misc_feature (46)..(291): Homolog of NCBI NO: 17025880 NR Description: multifunctional aquaporin [Medicago truncatula]
  misc_feature (7)..(293): Homolog of NCBI NO: 1076748 NR Description: major intrinsic protein - rice
  misc_feature (35)..(286): Homolog of NCBI NO: 541944 NR Description: nodulin-26 - soybean

SEQ ID NO: 108466 - protein, 240 aa, Arabidopsis thaliana; identical to SEQ ID NO: 40719
  peptide (1)..(240): Ceres Seq. ID no. 13667668
  misc_feature (1)..(240): Homolog of NCBI NO: 15234059 NR Description: major intrinsic protein (MIP) family [Arabidopsis
  misc_feature (1)..(240): Homolog of NCBI NO: 21536953 NR Description: major intrinsic protein (MIP)- like [Arabidopsis
  misc_feature (1)..(239): Homolog of NCBI NO: 18415224 NR Description: major intrinsic protein (MIP) family [Arabidopsis
  misc_feature (1)..(239): Homolog of NCBI NO: 25324917 NR Description: nodulin-26-like protein [imported] - Arabidopsis
  misc_feature (1)..(239): Homolog of NCBI NO: 2677614 NR Description: NLM1 protein (NodLikeMip1) [Arabidopsis thaliana]
  misc_feature (1)..(239): Homolog of NCBI NO: 7449725 NR Description: nodulin-26-like protein F13C5.200 - Arabidopsis
  misc_feature (1)..(232): Homolog of NCBI NO: 5139541 NR Description: nodulin26-like major intrinsic protein [Pisum
  misc_feature (1)..(237): Homolog of NCBI NO: 17025880 NR Description: multifunctional aquaporin [Medicago truncatula]
  misc_feature (1)..(239): Homolog of NCBI NO: 1076748 NR Description: major intrinsic protein - rice
  misc_feature (1)..(232): Homolog of NCBI NO: 541944 NR Description: nodulin-26 - soybean

SEQ ID NO: 108467 - DNA, 1806 bp, Arabidopsis thaliana
  misc_feature (1)..(1806): Ceres Seq. ID no. 13667673
  misc_feature: MA Experiment ID: 20000179 Result: Down-regulated in Transcription
  misc_feature: MA Experiment 20000179 PARAMETER Experiment Name: At_Germinating_Seeds_P Parameter: Age (hr) Value: 6 vs. 0
  misc_feature: MA Experiment 20000179 PARAMETER Experiment Name: At_Germinating_Seeds_P Parameter: Tissue Value: Germinating Seeds
  misc_feature: MA Experiment ID: 20000180 Result: Down-regulated in Transcription
  misc_feature: MA Experiment 20000180 PARAMETER Experiment Name: At_Germinating_Seeds_P Parameter: Age (hr) Value: 24 vs. 0
  misc_feature: MA Experiment 20000180 PARAMETER Experiment Name: At_Germinating_Seeds_P Parameter: Tissue Value: Germinating Seeds
cagagagcagctcccttcccctcggcgaggaggaaggaagaagaaagccagagagagagagagagatcatcgcagcttctcctccgaccatttgactgcgactgtgattacaacacaccgttgatcctacgaaaaagaggtaatggatactggcggcaattcgctggcgtccggacctgatggtgtgaagaggaaagtttgttatttctatgaccctgaggtcggcaattactactatggccaaggtcatcccatgaagccccatcgcatccgcatgacccatgccctcctcgctcactacggtctccttcagcatatgcaggttctcaagcccttccctgcccgcgaacgtgatctctgccgcttccacgccgacgactatgtctcttttctccgcagcattacccctgaaacccagcaagatcagattcgccaacttaagcgcttcaatgttggtgaagactgtcccgtctttgacggcctttattccttttgccagacctatgctggaggatctgttggtggctctgtcaagcttaaccacggcctctgcgatattgccatcaactgggctggtggtctccatcacgctaagaagtgcgaggcctctggcttctgttacgtcaatgatatcgtcttagctatcctagagctccttaagcagcatgagcgtgttctttatgtcgatattgatatccaccacggggatggagtggaggaggcattttatgctactgacagggttatgactgtctcgtttcataaatttggtgattactttcccggtacaggtcacattcaggatataggttatggtagcggaaagtactattctctcaatgtaccactggatgatggaatcgatgatgagagctatcatctgttattcaagcccatcatggggaaagttatggaaattttccgaccaggggctgtggtattgcaatgtggtgctgactccctatctggggatcggttaggttgcttcaatctttcaatcaaaggtcatgctgagtgcgtcaaatttatgagatcgttcaatgttcccctactgctcttgggtggtggtggttacactatccgcaatgttgcccgttgctggtgctacgagactggagttgcacttggagttgaagttgaagacaagatgccggagcatgaatattatgaatactttggtccagactatacacttcacgttgctccaagtaacatggaaaataagaattctcgtcagatgcttgaagagattcgcaatgaccttctccacaatctctctaagcttcagcatgctccaagtgtaccatttcaggaaagaccacctgatacagagactcccgaggttgatgaagaccaagaagatggggataaaagatgggatccggattcagacatggatgttgatgatgaccgtaaacctataccaagcagagtaaaaagagaagctgttgaaccagatacaaaggacaaggatggactgaaaggaattatggagcgtggaaaaggttgtgaggtggaggtggatgagagtggaagcactaaggttacaggagtaaacccagtgggagtggaggaagcaagtgtgaaaatggaagaggaaggaacaaacaagggtggggcggagcaggcgtttcctcctaaaacataagactcggagcttctaatttcttgctactttttctgtctatcaaatgttgctagttaagtttctggagttgttgttgttgtaagcactcctctgttttagaggattgagcacggatatgtatttattcgttgcatgtctgaatgatgatatgatatgac

SEQ ID NO: 108468 - protein, 501 aa, Arabidopsis thaliana
  peptide (1)..(501): Ceres Seq. ID no. 13667674
  misc_feature (1)..(501): Homolog of NCBI NO: 2318131 NR Description: histone deacetylase [Arabidopsis thaliana]
  misc_feature (1)..(501): Homolog of NCBI NO: 15233694 NR Description: Histone deacetylase [Arabidopsis thaliana]
  misc_feature (1)..(490): Homolog of NCBI NO: 9022439 NR Description: histone deacetylase [Mesembryanthemum
  misc_feature (3)..(490): Homolog of NCBI NO: 14550104 NR Description: histone deacetylase HDA101 [Zea mays]
  misc_feature (3)..(490): Homolog of NCBI NO: 3023947 NR Description: Probable histone deacetylase (RPD3 homolog)
  misc_feature (4)..(472): Homolog of NCBI NO: 12698880 NR Description: histone deacetylase HD1 [Oryza sativa]
  misc_feature (2)..(445): Homolog of NCBI NO: 15242626 NR Description: histone deacetylase [Arabidopsis thaliana] histone deacetylase [Arabidopsis thaliana] putative histone deacetylase [Arabidopsis thaliana]
  misc_feature (2)..(445): Homolog of NCBI NO: 11066141 NR Description: putative histone deacetylase [Arabidopsis
  misc_feature (14)..(495): Homolog of NCBI NO: 6680193 NR Description: histone deacetylase 1 [Mus musculus] Histone deacetylase 1 (HD1) >gi|1771286|emb|CAA66870.1| histone
  misc_feature (7)..(447): Homolog of NCBI NO: 4193320 NR Description: histone deacetylase [Zea mays]
MDTGGNSLASGPDGVKRKVCYFYDPEVGNYYYGQGHPMKPHRIRMTHALLAHYGLLQHMQVLKPFPARERDLCRFHADDYVSFLRSITPETQQDQIRQLKRFNVGEDCPVFDGLYSFCQTYAGGSVGGSVKLNHGLCDIAINWAGGLHHAKKCEASGFCYVNDIVLAILELLKQHERVLYVDIDIHHGDGVEEAFYATDRVMTVSFHKFGDYFPGTGHIQDIGYGSGKYYSLNVPLDDGIDDESYHLLFKPIMGKVMEIFRPGAVVLQCGADSLSGDRLGCFNLSIKGHAECVKFMRSFNVPLLLLGGGGYTIRNVARCWCYETGVALGVEVEDKMPEHEYYEYFGPDYTLHVAPSNMENKNSRQMLEEIRNDLLHNLSKLQHAPSVPFQERPPDTETPEVDEDQEDGDKRWDPDSDMDVDDDRKPIPSRVKREAVEPDTKDKDGLKGIMERGKGCEVEVDESGSTKVTGVNPVGVEEASVKMEEEGTNKGGAEQAFPPKT

SEQ ID NO: 108469 - protein, 464 aa, Arabidopsis thaliana
  peptide (1)..(464): Ceres Seq. ID no. 13667675
  misc_feature (1)..(464): Homolog of NCBI NO: 2318131 NR Description: histone deacetylase [Arabidopsis thaliana]
  misc_feature (1)..(464): Homolog of NCBI NO: 15233694 NR Description: Histone deacetylase [Arabidopsis thaliana]
  misc_feature (1)..(453): Homolog of NCBI NO: 9022439 NR Description: histone deacetylase [Mesembryanthemum
  misc_feature (1)..(453): Homolog of NCBI NO: 14550104 NR Description: histone deacetylase HDA101 [Zea mays]
  misc_feature (1)..(453): Homolog of NCBI NO: 3023947 NR Description: Probable histone deacetylase (RPD3 homolog)
  misc_feature (1)..(435): Homolog of NCBI NO: 12698880 NR Description: histone deacetylase HD1 [Oryza sativa]
  misc_feature (1)..(408): Homolog of NCBI NO: 15242626 NR Description: histone deacetylase [Arabidopsis thaliana] histone deacetylase [Arabidopsis thaliana] putative histone deacetylase [Arabidopsis thaliana]
  misc_feature (1)..(408): Homolog of NCBI NO: 11066141 NR Description: putative histone deacetylase [Arabidopsis
  misc_feature (1)..(458): Homolog of NCBI NO: 6680193 NR Description: histone deacetylase 1 [Mus musculus] Histone deacetylase 1 (HD1) >gi|1771286|emb|CAA66870.1| histone
  misc_feature (1)..(410): Homolog of NCBI NO: 4193320 NR Description: histone deacetylase [Zea mays]
MKPHRIRMTHALLAHYGLLQHMQVLKPFPARERDLCRFHADDYVSFLRSITPETQQDQIRQLKRFNVGEDCPVFDGLYSFCQTYAGGSVGGSVKLNHGLCDIAINWAGGLHHAKKCEASGFCYVNDIVLAILELLKQHERVLYVDIDIHHGDGVEEAFYATDRVMTVSFHKFGDYFPGTGHIQDIGYGSGKYYSLNVPLDDGIDDESYHLLFKPIMGKVMEIFRPGAVVLQCGADSLSGDRLGCFNLSIKGHAECVKFMRSFNVPLLLLGGGGYTIRNVARCWCYETGVALGVEVEDKMPEHEYYEYFGPDYTLHVAPSNMENKNSRQMLEEIRNDLLHNLSKLQHAPSVPFQERPPDTETPEVDEDQEDGDKRWDPDSDMDVDDDRKPIPSRVKREAVEPDTKDKDGLKGIMERGKGCEVEVDESGSTKVTGVNPVGVEEASVKMEEEGTNKGGAEQAFPPKT

SEQ ID NO: 108470 - protein, 457 aa, Arabidopsis thaliana
  peptide (1)..(457): Ceres Seq. ID no. 13667676
  misc_feature (1)..(457): Homolog of NCBI NO: 2318131 NR Description: histone deacetylase [Arabidopsis thaliana]
  misc_feature (1)..(457): Homolog of NCBI NO: 15233694 NR Description: Histone deacetylase [Arabidopsis thaliana]
  misc_feature (1)..(446): Homolog of NCBI NO: 9022439 NR Description: histone deacetylase [Mesembryanthemum
  misc_feature (1)..(446): Homolog of NCBI NO: 14550104 NR Description: histone deacetylase HDA101 [Zea mays]
  misc_feature (1)..(446): Homolog of NCBI NO: 3023947 NR Description: Probable histone deacetylase (RPD3 homolog)
  misc_feature (1)..(428): Homolog of NCBI NO: 12698880 NR Description: histone deacetylase HD1 [Oryza sativa]
  misc_feature (1)..(401): Homolog of NCBI NO: 15242626 NR Description: histone deacetylase [Arabidopsis thaliana] histone deacetylase [Arabidopsis thaliana] putative histone deacetylase [Arabidopsis thaliana]
  misc_feature (1)..(401): Homolog of NCBI NO: 11066141 NR Description: putative histone deacetylase [Arabidopsis
  misc_feature (1)..(451): Homolog of NCBI NO: 6680193 NR Description: histone deacetylase 1 [Mus musculus] Histone deacetylase 1 (HD1) >gi|1771286|emb|CAA66870.1| histone
  misc_feature (1)..(403): Homolog of NCBI NO: 4193320 NR Description: histone deacetylase [Zea mays]
MTHALLAHYGLLQHMQVLKPFPARERDLCRFHADDYVSFLRSITPETQQDQIRQLKRFNVGEDCPVFDGLYSFCQTYAGGSVGGSVKLNHGLCDIAINWAGGLHHAKKCEASGFCYVNDIVLAILELLKQHERVLYVDIDIHHGDGVEEAFYATDRVMTVSFHKFGDYFPGTGHIQDIGYGSGKYYSLNVPLDDGIDDESYHLLFKPIMGKVMEIFRPGAVVLQCGADSLSGDRLGCFNLSIKGHAECVKFMRSFNVPLLLLGGGGYTIRNVARCWCYETGVALGVEVEDKMPEHEYYEYFGPDYTLHVAPSNMENKNSRQMLEEIRNDLLHNLSKLQHAPSVPFQERPPDTETPEVDEDQEDGDKRWDPDSDMDVDDDRKPIPSRVKREAVEPDTKDKDGLKGIMERGKGCEVEVDESGSTKVTGVNPVGVEEASVKMEEEGTNKGGAEQAFPPKT

SEQ ID NO: 108471 - DNA, 1391 bp, Arabidopsis thaliana
  misc_feature (1)..(1391): Ceres Seq. ID no. 13667677
  misc_feature: MA Experiment ID: 20000173 Result: Down-regulated in Transcription
  misc_feature: MA Experiment 20000173 PARAMETER Experiment Name: At_42deg_Heat_P Parameter: Age (day) Value: 14
  misc_feature: MA Experiment 20000173 PARAMETER Experiment Name: At_42deg_Heat_P Parameter: Organism Value: A. thaliana
  misc_feature: MA Experiment 20000173 PARAMETER Experiment Name: At_42deg_Heat_P Parameter: Plant Line Value: WS
  misc_feature: MA Experiment 20000173 PARAMETER Experiment Name: At_42deg_Heat_P Parameter: Temperature (deg C) Value: 42 vs. 22
  misc_feature: MA Experiment 20000173 PARAMETER Experiment Name: At_42deg_Heat_P Parameter: Timepoint (hr) Value: 6
  misc_feature: MA Experiment 20000173 PARAMETER Experiment Name: At_42deg_Heat_P Parameter: Tissue Value: Aerial
  misc_feature: MA Experiment ID: 20000179 Result: Down-regulated in Transcription
  misc_feature: MA Experiment 20000179 PARAMETER Experiment Name: At_Germinating_Seeds_P Parameter: Age (hr) Value: 6 vs. 0
  misc_feature: MA Experiment 20000179 PARAMETER Experiment Name: At_Germinating_Seeds_P Parameter: Tissue Value: Germinating Seeds
  misc_feature: MA Experiment ID: 20000180 Result: Down-regulated in Transcription
  misc_feature: MA Experiment 20000180 PARAMETER Experiment Name: At_Germinating_Seeds_P Parameter: Age (hr) Value: 24 vs. 0
  misc_feature: MA Experiment 20000180 PARAMETER Experiment Name: At_Germinating_Seeds_P Parameter: Tissue Value: Germinating Seeds
  misc_feature: MA Experiment ID: 20000184 Result: Down-regulated in Transcription
  misc_feature: MA Experiment 20000184 PARAMETER Experiment Name: At_Shoots__P Parameter: Age (day) Value: 7
  misc_feature: MA Experiment 20000184 PARAMETER Experiment Name: At_Shoots__P Parameter: Tissue Value: Shoots vs. Whole Plant
  misc_feature: MA Experiment ID: 20000185 Result: Down-regulated in Transcription
  misc_feature: MA Experiment 20000185 PARAMETER Experiment Name: At_Roots__P Parameter: Age (day) Value: 7 vs. 21
  misc_feature: MA Experiment 20000185 PARAMETER Experiment Name: At_Roots__P Parameter: Organism Value: A. thaliana
  misc_feature: MA Experiment 20000185 PARAMETER Experiment Name: At_Roots__P Parameter: Tissue Value: Roots vs. Whole Plant
  misc_feature: MA Experiment ID: 20000227 Result: Down-regulated in Transcription
  misc_feature: MA Experiment 20000227 PARAMETER Experiment Name: At_Root-Tips-vs-Tops_P Parameter: Tissue Value: Root Tips vs. Root Tops
  misc_feature: MA Experiment ID: 20000234 Result: Down-regulated in Transcription
  misc_feature: MA Experiment 20000234 PARAMETER Experiment Name: At_Siliques_P Parameter: Age (day) Value: 21
  misc_feature: MA Experiment 20000234 PARAMETER Experiment Name: At_Siliques_P Parameter: Organism Value: A. thaliana
  misc_feature: MA Experiment 20000234 PARAMETER Experiment Name: At_Siliques_P Parameter: Plant Line Value: WS
  misc_feature: MA Experiment 20000234 PARAMETER Experiment Name: At_Siliques_P Parameter: Tissue Value: Less Than 5mm Siliques vs. Whole Plant
  misc_feature: MA Experiment ID: 20000235 Result: Down-regulated in Transcription
  misc_feature: MA Experiment 20000235 PARAMETER Experiment Name: At_Siliques_P Parameter: Age (day) Value: 21
  misc_feature: MA Experiment 20000235 PARAMETER Experiment Name: At_Siliques_P Parameter: Organism Value: A. thaliana
  misc_feature: MA Experiment 20000235 PARAMETER Experiment Name: At_Siliques_P Parameter: Plant Line Value: WS
  misc_feature: MA Experiment 20000235 PARAMETER Experiment Name: At_Siliques_P Parameter: Tissue Value: 5-10mm Siliques vs. Whole Plant
  misc_feature: MA Experiment ID: 20000264 Result: Down-regulated in Transcription
  misc_feature: MA Experiment 20000264 PARAMETER Experiment Name: At_Open_Flower_P Parameter: Age (day) Value: 21
  misc_feature: MA Experiment 20000264 PARAMETER Experiment Name: At_Open_Flower_P Parameter: Plant Line Value: WS
  misc_feature: MA Experiment 20000264 PARAMETER Experiment Name: At_Open_Flower_P Parameter: Tissue Value: Open Flower vs. Whole Plant
  misc_feature: MA Experiment ID: 20000265 Result: Down-regulated in Transcription
  misc_feature: MA Experiment 20000265 PARAMETER Experiment Name: At_Open_Flower_P Parameter: Age (day) Value: 21
  misc_feature: MA Experiment 20000265 PARAMETER Experiment Name: At_Open_Flower_P Parameter: Plant Line Value: WS
  misc_feature: MA Experiment 20000265 PARAMETER Experiment Name: At_Open_Flower_P Parameter: Tissue Value: Closed Flower vs. Whole Plant
  misc_feature: MA Experiment ID: 20000286 Result: Down-regulated in Transcription
  misc_feature: MA Experiment 20000286 PARAMETER Experiment Name: At_Open_Flower_P Parameter: Age (day) Value: 21
  misc_feature: MA Experiment 20000286 PARAMETER Experiment Name: At_Open_Flower_P Parameter: Plant Line Value: WS
  misc_feature: MA Experiment 20000286 PARAMETER Experiment Name: At_Open_Flower_P Parameter: Tissue Value: Half Open vs. Whole Plant
  misc_feature: MA Experiment ID: 20000438 Result: Down-regulated in Transcription
  misc_feature: MA Experiment 20000438 PARAMETER Experiment Name: At_Shoots__P Parameter: Age (day) Value: 14
  misc_feature: MA Experiment 20000438 PARAMETER Experiment Name: At_Shoots__P Parameter: Tissue Value: Shoots vs. Whole Plant
  misc_feature: MA Experiment ID: 20000439 Result: Down-regulated in Transcription
  misc_feature: MA Experiment 20000439 PARAMETER Experiment Name: At_Roots__P Parameter: Age (day) Value: 14 vs. 21
  misc_feature: MA Experiment 20000439 PARAMETER Experiment Name: At_Roots__P Parameter: Organism Value: A. thaliana
  misc_feature: MA Experiment 20000439 PARAMETER Experiment Name: At_Roots__P Parameter: Tissue Value: Roots vs. Whole Plant
  misc_feature: MA Experiment ID: 20000460 Result: Up-regulated in Transcription
  misc_feature: MA Experiment 20000460 PARAMETER Experiment Name: At_10percent_PEG_P Parameter: Age (day) Value: 12
  misc_feature: MA Experiment 20000460 PARAMETER Experiment Name: At_10percent_PEG_P Parameter: Organism Value: A. thaliana
  misc_feature: MA Experiment 20000460 PARAMETER Experiment Name: At_10percent_PEG_P Parameter: Plant Line Value: WS
  misc_feature: MA Experiment 20000460 PARAMETER Experiment Name: At_10percent_PEG_P Parameter: Timepoint (day) Value: 12
  misc_feature: MA Experiment 20000460 PARAMETER Experiment Name: At_10percent_PEG_P Parameter: Tissue Value: Whole Plant
  misc_feature: MA Experiment 20000460 PARAMETER Experiment Name: At_10percent_PEG_P Parameter: Treatment Value: 10percent PEG vs. No Treatment
  misc_feature: MA Experiment ID: 20000495 Result: Down-regulated in Transcription
  misc_feature: MA Experiment 20000495 PARAMETER Experiment Name: At_Guard_Cells_P Parameter: Harvest Date Value: 8/2/2002
  misc_feature: MA Experiment 20000495 PARAMETER Experiment Name: At_Guard_Cells_P Parameter: Organism Value: A. thaliana
  misc_feature: MA Experiment 20000495 PARAMETER Experiment Name: At_Guard_Cells_P Parameter: Tissue Value: Guard Cells vs. Leaves
  misc_feature: MA Experiment ID: 20000573 Result: Down-regulated in Transcription
  misc_feature: MA Experiment 20000573 PARAMETER Experiment Name: At_100uM_ABA_Mutants__P Parameter: Organism Value: A. thaliana
  misc_feature: MA Experiment 20000573 PARAMETER Experiment Name: At_100uM_ABA_Mutants__P Parameter: Plant Line Value: CS22 vs. Ler wt
  misc_feature: MA Experiment 20000573 PARAMETER Experiment Name: At_100uM_ABA_Mutants__P Parameter: Timepoint (hr) Value: N/A
  misc_feature: MA Experiment 20000573 PARAMETER Experiment Name: At_100uM_ABA_Mutants__P Parameter: Tissue Value: Whole Plant
  misc_feature: MA Experiment 20000573 PARAMETER Experiment Name: At_100uM_ABA_Mutants__P Parameter: Treatment Value: None
  misc_feature: MA Experiment ID: 20000574 Result: Down-regulated in Transcription
  misc_feature: MA Experiment 20000574 PARAMETER Experiment Name: At_100uM_ABA_Mutants__P Parameter: Organism Value: A. thaliana
  misc_feature: MA Experiment 20000574 PARAMETER Experiment Name: At_100uM_ABA_Mutants__P Parameter: Plant Line Value: CS23 vs. Ler wt
  misc_feature: MA Experiment 20000574 PARAMETER Experiment Name: At_100uM_ABA_Mutants__P Parameter: Timepoint (hr) Value: N/A
  misc_feature: MA Experiment 20000574 PARAMETER Experiment Name: At_100uM_ABA_Mutants__P Parameter: Tissue Value: Whole Plant
  misc_feature: MA Experiment 20000574 PARAMETER Experiment Name: At_100uM_ABA_Mutants__P Parameter: Treatment Value: None
  misc_feature: MA Experiment ID: 20000794 Result: Down-regulated in Transcription
  misc_feature: MA Experiment 20000794 PARAMETER Experiment Name: At_Petals_P Parameter: Age (day) Value: 23-25 days
  misc_feature: MA Experiment 20000794 PARAMETER Experiment Name: At_Petals_P Parameter: Plant Line Value: WS
  misc_feature: MA Experiment 20000794 PARAMETER Experiment Name: At_Petals_P Parameter: Tissue Value: Petals vs. Whole plant
gaattccggaataatcatggagtttcatcaagctcacttccacctttcctcaccaaaacatatgagatggttgatgattcttcatccgattctatcgtctcttggagtcagagcaataagagtttcatcgtttggaatccgccggagttttctagagatcttcttccgagattcttcaagcacaataacttctctagctttatccgccagcttaacacatatggttttagaaaagctgatcctgagcaatgggaatttgcgaatgatgattttgtgagaggtcaacctcatcttatgaagaacattcatagacgcaaaccagttcatagccactctttaccgaatcttcaagctcagttaaacccgttgacggattcagaacgagtgagaatgaataatcagattgagagattgacaaaagagaaagaaggattgcttgaagagttacataaacaagacgaggaacgagaagtgtttgagatgcaagtgaaagaacttaaagaacgattacaacacatggagaagcgtcagaaaacaatggtttcgtttgtttctcaagtattggaaaagccagggcttgctttgaacctatcgccgtgtgttcccgaaacaaacgagaggaaaagaaggttccctaggatcgagttctttcccgatgaaccgatgttggaagagaacaaaacttgtgttgttgtgagagaggaaggttctacaagcccttcttcacacacaagagagcatcaagtggaacagttagagtcatcgatagcgatttgggagaatcttgtatcggattcttgtgagagtatgttacaatcaagaagtatgatgacacttgatgtggatgaatcatctacttttccagagagccctcctctttcttgcatacagttaagtgtcgattcacgtctcaaatctcctccttctccaaggatcatcgatatgaactgtgagcccgatggttcgaaagaacagaacactgttgctgctcctcctcctcctccagtagcaggagcgaatgatggcttctggcagcagtttttctcagagaatcctggctcaaccgagcaacgggaagttcaattagagaggaaagacgataaagataaagccggagtacgtactgagaaatgctggtggaattcgagaaatgttaatgcaattacagaacagcttggacatctgacttcttcagagagaagttgatatgtcaaagattaaatttctagtctgttttagttacttgtaaaatagggtttctcagttttattgttttcgattacagtacttaggtatggttcagctgtttatttatcacttgtatgatctttcacagttcattgtagcagacttcaatggtaatgataagctagagcttatggatagtattc

SEQ ID NO: 108472 - protein, 401 aa, Arabidopsis thaliana
  peptide (1)..(401): Ceres Seq. ID no. 13667678
  misc_feature (14)..(184): Pfam Name: HSF-type DNA-binding Pfam Description: HSF-type DNA-binding
  misc_feature (1)..(401): Homolog of NCBI NO: 3399765 NR Description: heat shock transcription factor 21 [Arabidopsis
  misc_feature (4)..(401): Homolog of NCBI NO: 15234053 NR Description: heat shock transcription factor 21 [Arabidopsis
  misc_feature (9)..(401): Homolog of NCBI NO: 16118447 NR Description: heat shock transcription factor [Phaseolus
  misc_feature (9)..(401): Homolog of NCBI NO: 5821138 NR Description: heat shock factor [Nicotiana tabacum]
  misc_feature (9)..(400): Homolog of NCBI NO: 7158882 NR Description: heat shock transcription factor [Medicago sativa]
  misc_feature (7)..(268): Homolog of NCBI NO: 34909524 NR Description: putative heat shock factor [Oryza sativa cultivar- group)] >gi|14209551|dbj|BAB56047.1| putative heat
  misc_feature (280)..(401): Homolog of NCBI NO: 34909524 NR Description: putative heat shock factor [Oryza sativa cultivar- group)] >gi|14209551|dbj|BAB56047.1| putative heat
  misc_feature (4)..(225): Homolog of NCBI NO: 15242478 NR Description: heat shock transcription factor family thaliana] >gi|9758674|dbj|BAB09213.1| heat shock transcription
  misc_feature (7)..(269): Homolog of NCBI NO: 18414114 NR Description: heat shock transcription factor family thaliana] >gi|14517387|gb|AAK62584.1| AT4g13980/dl3030c thaliana] >gi|24111373|gb|AAN46810.1| At4g13980/dl3030c
  misc_feature (321)..(359): Homolog of NCBI NO: 18414114 NR Description: heat shock transcription factor family thaliana] >gi|14517387|gb|AAK62584.1| AT4g13980/dl3030c thaliana] >gi|24111373|gb|AAN46810.1| At4g13980/dl3030c
EFRNNHGVSSSSLPPFLTKTYEMVDDSSSDSIVSWSQSNKSFIVWNPPEFSRDLLPRFFKHNNFSSFIRQLNTYGFRKADPEQWEFANDDFVRGQPHLMKNIHRRKPVHSHSLPNLQAQLNPLTDSERVRMNNQIERLTKEKEGLLEELHKQDEEREVFEMQVKELKERLQHMEKRQKTMVSFVSQVLEKPGLALNLSPCVPETNERKRRFPRIEFFPDEPMLEENKTCVVVREEGSTSPSSHTREHQVEQLESSIAIWENLVSDSCESMLQSRSMMTLDVDESSTFPESPPLSCIQLSVDSRLKSPPSPRIIDMNCEPDGSKEQNTVAAPPPPPVAGANDGFWQQFFSENPGSTEQREVQLERKDDKDKAGVRTEKCWWNSRNVNAITEQLGHLTSSERS

SEQ ID NO: 108473 - protein, 379 aa, Arabidopsis thaliana; identical to SEQ ID NO: 83118
  peptide (1)..(379): Ceres Seq. ID no. 13667679
  misc_feature (1)..(162): Pfam Name: HSF-type DNA-binding Pfam Description: HSF-type DNA-binding
  misc_feature (1)..(379): Homolog of NCBI NO: 3399765 NR Description: heat shock transcription factor 21 [Arabidopsis
  misc_feature (1)..(379): Homolog of NCBI NO: 15234053 NR Description: heat shock transcription factor 21 [Arabidopsis
  misc_feature (1)..(379): Homolog of NCBI NO: 16118447 NR Description: heat shock transcription factor [Phaseolus
  misc_feature (1)..(379): Homolog of NCBI NO: 5821138 NR Description: heat shock factor [Nicotiana tabacum]
  misc_feature (1)..(378): Homolog of NCBI NO: 7158882 NR Description: heat shock transcription factor [Medicago sativa]
  misc_feature (1)..(246): Homolog of NCBI NO: 34909524 NR Description: putative heat shock factor [Oryza sativa cultivar- group)] >gi|14209551|dbj|BAB56047.1| putative heat
  misc_feature (258)..(379): Homolog of NCBI NO: 34909524 NR Description: putative heat shock factor [Oryza sativa cultivar- group)] >gi|14209551|dbj|BAB56047.1| putative heat
  misc_feature (1)..(203): Homolog of NCBI NO: 15242478 NR Description: heat shock transcription factor family thaliana] >gi|9758674|dbj|BAB09213.1| heat shock transcription
  misc_feature (1)..(247): Homolog of NCBI NO: 18414114 NR Description: heat shock transcription factor family thaliana] >gi|14517387|gb|AAK62584.1| AT4g13980/dl3030c thaliana] >gi|24111373|gb|AAN46810.1| At4g13980/dl3030c
  misc_feature (299)..(337): Homolog of NCBI NO: 18414114 NR Description: heat shock transcription factor family thaliana] >gi|14517387|gb|AAK62584.1| AT4g13980/dl3030c thaliana] >gi|24111373|gb|AAN46810.1| At4g13980/dl3030c

SEQ ID NO: 108474 - protein, 303 aa, Arabidopsis thaliana; identical to SEQ ID NO: 83119
  peptide (1)..(303): Ceres Seq. ID no. 13667680
  misc_feature (1)..(86): Pfam Name: HSF-type DNA-binding Pfam Description: HSF-type DNA-binding
  misc_feature (1)..(303): Homolog of NCBI NO: 3399765 NR Description: heat shock transcription factor 21 [Arabidopsis
  misc_feature (1)..(303): Homolog of NCBI NO: 15234053 NR Description: heat shock transcription factor 21 [Arabidopsis
  misc_feature (1)..(303): Homolog of NCBI NO: 16118447 NR Description: heat shock transcription factor [Phaseolus
  misc_feature (1)..(303): Homolog of NCBI NO: 5821138 NR Description: heat shock factor [Nicotiana tabacum]
  misc_feature (1)..(302): Homolog of NCBI NO: 7158882 NR Description: heat shock transcription factor [Medicago sativa]
  misc_feature (1)..(170): Homolog of NCBI NO: 34909524 NR Description: putative heat shock factor [Oryza sativa cultivar- group)] >gi|14209551|dbj|BAB56047.1| putative heat
  misc_feature (182)..(303): Homolog of NCBI NO: 34909524 NR Description: putative heat shock factor [Oryza sativa cultivar- group)] >gi|14209551|dbj|BAB56047.1| putative heat
  misc_feature (1)..(127): Homolog of NCBI NO: 15242478 NR Description: heat shock transcription factor family thaliana] >gi|9758674|dbj|BAB09213.1| heat shock transcription
  misc_feature (1)..(171): Homolog of NCBI NO: 18414114 NR Description: heat shock transcription factor family thaliana] >gi|14517387|gb|AAK62584.1| AT4g13980/dl3030c thaliana] >gi|24111373|gb|AAN46810.1| At4g13980/dl3030c
  misc_feature (223)..(261): Homolog of NCBI NO: 18414114 NR Description: heat shock transcription factor family thaliana] >gi|14517387|gb|AAK62584.1| AT4g13980/dl3030c thaliana] >gi|24111373|gb|AAN46810.1| At4g13980/dl3030c

SEQ ID NO: 108475 - DNA, 1296 bp, Arabidopsis thaliana
  misc_feature (1)..(1296): Ceres Seq. ID no. 13667681
  misc_feature: MA Experiment ID: 20000794 Result: Up-regulated in Transcription
  misc_feature: MA Experiment 20000794 PARAMETER Experiment Name: At_Petals_P Parameter: Age (day) Value: 23-25 days
  misc_feature: MA Experiment 20000794 PARAMETER Experiment Name: At_Petals_P Parameter: Plant Line Value: WS
  misc_feature: MA Experiment 20000794 PARAMETER Experiment Name: At_Petals_P Parameter: Tissue Value: Petals vs. Whole plant
  misc_feature: MA Experiment ID: 20001905 Result: Up-regulated in Transcription
  misc_feature: MA Experiment 20001905 PARAMETER Experiment Name: At_Drought_Reproduction_P Parameter: Age (day) Value: 40
  misc_feature: MA Experiment 20001905 PARAMETER Experiment Name: At_Drought_Reproduction_P Parameter: Organism Value: A. thaliana
  misc_feature: MA Experiment 20001905 PARAMETER Experiment Name: At_Drought_Reproduction_P Parameter: Plant Line Value: WS
  misc_feature: MA Experiment 20001905 PARAMETER Experiment Name: At_Drought_Reproduction_P Parameter: Timepoint (day) Value: 10
  misc_feature: MA Experiment 20001905 PARAMETER Experiment Name: At_Drought_Reproduction_P Parameter: Tissue Value: Rosettes
  misc_feature: MA Experiment 20001905 PARAMETER Experiment Name: At_Drought_Reproduction_P Parameter: Treatment Value: Drought vs. No Drought
  misc_feature: MA Experiment ID: 20001911 Result: Up-regulated in Transcription
  misc_feature: MA Experiment 20001911 PARAMETER Experiment Name: At_Drought_Reproduction_P Parameter: Age (day) Value: 40
  misc_feature: MA Experiment 20001911 PARAMETER Experiment Name: At_Drought_Reproduction_P Parameter: Organism Value: A. thaliana
  misc_feature: MA Experiment 20001911 PARAMETER Experiment Name: At_Drought_Reproduction_P Parameter: Plant Line Value: WS
  misc_feature: MA Experiment 20001911 PARAMETER Experiment Name: At_Drought_Reproduction_P Parameter: Timepoint (day) Value: 10
  misc_feature: MA Experiment 20001911 PARAMETER Experiment Name: At_Drought_Reproduction_P Parameter: Tissue Value: Flowers
  misc_feature: MA Experiment 20001911 PARAMETER Experiment Name: At_Drought_Reproduction_P Parameter: Treatment Value: Drought vs. No Drought
accagtaatctcaatcacaaactatttcccccccttcgttcatcaaatcctcaagagaaaaaaaaaatccccaaaagcttcctcaaaaccctaacacagatctctcgatcttctccgatctgtcttttctcctaatctggtttagtttgattttattggattgaagatgtcagacgctttgaatatgactcttgatgaaattgtgaagaagagtaagagtgaaaggtctgcagctgcaaggtctggaggtaaaggagtttcccgtaagagtggacgtggacgtggtggacctaatggtgttgtaggaggtggaagaggaggtggacctgttcgtagaggtcctcttgctgttaatactcggccatcatcatccttctccataaacaagcttgcccgcaggaagaggagcttgccatggcagaatcagaatgatttgtatgaagaaacccttagagctgttggggtatcaggagtggaagtcggaaccacagtttatattaccaaccttgatcagggagtgacaaatgaagatataagggaactctatgctgaaattggagagctgaaaagatatgcaattcactatgacaaaaatgggcgtccaagtggatcggctgaagttgtgtatatgagaagaagtgatgcaattcaagctatgaggaaatacaataatgtacttttggatggaaggcctatgaaactggagattctgggtggaaatactgaatctgctcctgtcgcagctcgtgttaatgtgactggattgaatggaaggatgaagaggagtgtcttcattggacaaggagttagaggtgggagagtaggaagaggaagaggttcaggtccttctgggagacgccttccactccaacaaaaccaacaaggtggtgtgacagctggtcgaggcgggttccgtggtagaggccggggtaatggtggtggcagagggaataaaagcggtgggcgaggtggaaagaagccagtggagaagtctgctgcggatctcgacaaagatctcgaaagctatcatgctgaagctatgaacatctcttaaacagaagcaagacttcgcatcttgtcatgtacttttgtgttctttattcttagtctctgactaaatatgtggcaaagtctggtttggtttaattacgtttaggatggctctactctgcttttattttcctcttttcttgtttcacactttcacagtcacttttggttattgaagttaaaagagatttagctgtaaatgagaaagctgttattgttagttggttgaatctaataatatacgaa

SEQ ID NO: 108476 - protein, 295 aa, Arabidopsis thaliana; identical to SEQ ID NO: 40675
  peptide (1)..(295): Ceres Seq. ID no. 13667682
  misc_feature (109)..(179): Pfam Name: RNA recognition motif. (a.k.a. RRM, RBD, or RNP domain) Pfam Description: RNA recognition motif. (a.k.a. RRM, RBD, or RNP
  misc_feature (1)..(295): Homolog of NCBI NO: 18408471 NR Description: RNA and export factor binding protein, putative thaliana] >gi|15294238|gb|AAK95296.1|AF410310_1 At1g66260/T6J19_1 thaliana] >gi|23506135|gb|AAN31079.1| At1g66260/T6J19_1
  misc_feature (1)..(295): Homolog of NCBI NO: 9663023 NR Description: DIP1 protein [Arabidopsis thaliana]
  misc_feature (1)..(295): Homolog of NCBI NO: 25404603 NR Description: hypothetical protein T6J19.1 [imported] - thaliana >gi|12323574|gb|AAG51767.1|AC066691_7 RNA and export
  misc_feature (1)..(295): Homolog of NCBI NO: 30693141 NR Description: RNA and export factor binding protein, putative
  misc_feature (1)..(295): Homolog of NCBI NO: 9663025 NR Description: DIP2 protein [Arabidopsis thaliana]
  misc_feature (69)..(295): Homolog of NCBI NO: 9757981 NR Description: gene_id:K12B20.19~unknown protein [Arabidopsis
  misc_feature (24)..(292): Homolog of NCBI NO: 38175495 NR Description: putative transcriptional coactivator(DIP2) [Oryza
  misc_feature (1)..(295): Homolog of NCBI NO: 30679669 NR Description: RNA and export factor binding protein, putative thaliana] >gi|22655123|gb|AAM98152.1| putative protein thaliana] >gi|30023796|gb|AAP13431.1| At5g02530 [Arabidopsis
  misc_feature (1)..(295): Homolog of NCBI NO: 11358209 NR Description: hypothetical protein T22P11.120 - Arabidopsis >gi|7413642|emb|CAB85990.1| putative protein [Arabidopsis
  misc_feature (1)..(255): Homolog of NCBI NO: 40644804 NR Description: putative DIP2 protein [Triticum aestivum]

SEQ ID NO: 108477 - protein, 289 aa, Arabidopsis thaliana; identical to SEQ ID NO: 40676
  peptide (1)..(289): Ceres Seq. ID no. 13667683
  misc_feature (103)..(173): Pfam Name: RNA recognition motif. (a.k.a. RRM, RBD, or RNP domain) Pfam Description: RNA recognition motif. (a.k.a. RRM, RBD, or RNP
  misc_feature (1)..(289): Homolog of NCBI NO: 18408471 NR Description: RNA and export factor binding protein, putative thaliana] >gi|15294238|gb|AAK95296.1|AF410310_1 At1g66260/T6J19_1 thaliana] >gi|23506135|gb|AAN31079.1| At1g66260/T6J19_1
  misc_feature (1)..(289): Homolog of NCBI NO: 9663023 NR Description: DIP1 protein [Arabidopsis thaliana]
  misc_feature (1)..(289): Homolog of NCBI NO: 25404603 NR Description: hypothetical protein T6J19.1 [imported] - thaliana >gi|12323574|gb|AAG51767.1|AC066691_7 RNA and export
  misc_feature (1)..(289): Homolog of NCBI NO: 30693141 NR Description: RNA and export factor binding protein, putative
  misc_feature (1)..(289): Homolog of NCBI NO: 9663025 NR Description: DIP2 protein [Arabidopsis thaliana]
  misc_feature (63)..(289): Homolog of NCBI NO: 9757981 NR Description: gene_id:K12B20.19~unknown protein [Arabidopsis
  misc_feature (18)..(286): Homolog of NCBI NO: 38175495 NR Description: putative transcriptional coactivator(DIP2) [Oryza
  misc_feature (1)..(289): Homolog of NCBI NO: 30679669 NR Description: RNA and export factor binding protein, putative thaliana] >gi|22655123|gb|AAM98152.1| putative protein thaliana] >gi|30023796|gb|AAP13431.1| At5g02530 [Arabidopsis
  misc_feature (1)..(289): Homolog of NCBI NO: 11358209 NR Description: hypothetical protein T22P11.120 - Arabidopsis >gi|7413642|emb|CAB85990.1| putative protein [Arabidopsis
  misc_feature (1)..(249): Homolog of NCBI NO: 40644804 NR Description: putative DIP2 protein [Triticum aestivum]

SEQ ID NO: 108478 - DNA, 942 bp, Arabidopsis thaliana
  misc_feature (1)..(942): Ceres Seq. ID no. 13667688
  misc_feature: MA Experiment ID: 20000180 Result: Down-regulated in Transcription
  misc_feature: MA Experiment 20000180 PARAMETER Experiment Name: At_Germinating_Seeds_P Parameter: Age (hr) Value: 24 vs. 0
  misc_feature: MA Experiment 20000180 PARAMETER Experiment Name: At_Germinating_Seeds_P Parameter: Tissue Value: Germinating Seeds
  misc_feature: MA Experiment ID: 20000184 Result: Down-regulated in Transcription
  misc_feature: MA Experiment 20000184 PARAMETER Experiment Name: At_Shoots__P Parameter: Age (day) Value: 7
  misc_feature: MA Experiment 20000184 PARAMETER Experiment Name: At_Shoots__P Parameter: Tissue Value: Shoots vs. Whole Plant
  misc_feature: MA Experiment ID: 20000185 Result: Up-regulated in Transcription
  misc_feature: MA Experiment 20000185 PARAMETER Experiment Name: At_Roots__P Parameter: Age (day) Value: 7 vs. 21
  misc_feature: MA Experiment 20000185 PARAMETER Experiment Name: At_Roots__P Parameter: Organism Value: A. thaliana
  misc_feature: MA Experiment 20000185 PARAMETER Experiment Name: At_Roots__P Parameter: Tissue Value: Roots vs. Whole Plant
  misc_feature: MA Experiment ID: 20000234 Result: Up-regulated in Transcription
  misc_feature: MA Experiment 20000234 PARAMETER Experiment Name: At_Siliques_P Parameter: Age (day) Value: 21
  misc_feature: MA Experiment 20000234 PARAMETER Experiment Name: At_Siliques_P Parameter: Organism Value: A. thaliana
  misc_feature: MA Experiment 20000234 PARAMETER Experiment Name: At_Siliques_P Parameter: Plant Line Value: WS
  misc_feature: MA Experiment 20000234 PARAMETER Experiment Name: At_Siliques_P Parameter: Tissue Value: Less Than 5mm Siliques vs. Whole Plant
  misc_feature: MA Experiment ID: 20001558 Result: Up-regulated in Transcription
  misc_feature: MA Experiment 20001558 PARAMETER Experiment Name: At_Drought_Soil_Dry_P Parameter: Age (day) Value: 27
  misc_feature: MA Experiment 20001558 PARAMETER Experiment Name: At_Drought_Soil_Dry_P Parameter: Organism Value: A. thaliana
  misc_feature: MA Experiment 20001558 PARAMETER Experiment Name: At_Drought_Soil_Dry_P Parameter: Plant Line Value: WS
  misc_feature: MA Experiment 20001558 PARAMETER Experiment Name: At_Drought_Soil_Dry_P Parameter: Post Timepoint (hr) Value: 6
  misc_feature: MA Experiment 20001558 PARAMETER Experiment Name: At_Drought_Soil_Dry_P Parameter: Post-Treatment Value: Re-Water vs. No Drought
  misc_feature: MA Experiment 20001558 PARAMETER Experiment Name: At_Drought_Soil_Dry_P Parameter: Timepoint (day) Value: 13
  misc_feature: MA Experiment 20001558 PARAMETER Experiment Name: At_Drought_Soil_Dry_P Parameter: Treatment Value: Drought vs. No Drought
  misc_feature: MA Experiment ID: 20001560 Result: Up-regulated in Transcription
  misc_feature: MA Experiment 20001560 PARAMETER Experiment Name: At_Drought_Soil_Dry_P Parameter: Age (day) Value: 28
  misc_feature: MA Experiment 20001560 PARAMETER Experiment Name: At_Drought_Soil_Dry_P Parameter: Organism Value: A. thaliana
  misc_feature: MA Experiment 20001560 PARAMETER Experiment Name: At_Drought_Soil_Dry_P Parameter: Plant Line Value: WS
  misc_feature: MA Experiment 20001560 PARAMETER Experiment Name: At_Drought_Soil_Dry_P Parameter: Post Timepoint (hr) Value: None
  misc_feature: MA Experiment 20001560 PARAMETER Experiment Name: At_Drought_Soil_Dry_P Parameter: Post-Treatment Value: None
  misc_feature: MA Experiment 20001560 PARAMETER Experiment Name: At_Drought_Soil_Dry_P Parameter: Timepoint (day) Value: 14
  misc_feature: MA Experiment 20001560 PARAMETER Experiment Name: At_Drought_Soil_Dry_P Parameter: Treatment Value: Drought vs. No Drought
ggcacgaggacggagggcgatggacggcgtcatatcgccgccgctaaagtactggcagagagttcacaacaatggagtacgtaaaccctgaaggtcttcgattagatggtcgccgattcaacgagatgaggcaaatcgtagctgaagttggagttgtttctaaggctgacggttctgctgtcttcgagatgggtaataccaaagtaattgcagctgtttatggtccaagagagattcaaaacaagagccagcaaaagaagaacgaccatgcagtggtgttgtgtgagtatagtatggctcagtttagtactggtgaccgtagaagacagaaattcgacaggcgatcaacagagctatctcttgtcatccgtcagacaatggaagcttgcatattaaccgaattgatgcctcactctcagatcgatattttccttcaggttctacaagctgatggaggaacgagatcagcttgtatcaatgccgcgactctagctctagcagatgctggaattccaatgcgtgatctcgctgtttcctgtagtgctggatatttaaacagtactcctcttcttgatctgaactatgttgaagacagtgctggaggagctgatgtaaccgtcggtattctacctaaattagacaaagtgtcactccttcagatggatgccaagttaccgatggaaacatttgagacagtgtttgcattggcttctgaaggttgcaaagcaattgcagagagaatacgcgaggtacttcaagaaaacaccaaacagctagagtatcgccgagctgcataaactttagagttagagaaaaaaacgtaaagctccaagatttttgttaattagattttgctgttgtttgtggaagttgaggataaaaagctagtagtgcaaactctttttgggaaaaatgaatcaatttggtaaaaagatcaaactg

SEQ ID NO: 108479 - protein, 241 aa, Arabidopsis thaliana; identical to SEQ ID NO: 100860
  peptide (1)..(241): Ceres Seq. ID no. 13667689
  misc_feature (18)..(148): Pfam Name: 3' exoribonuclease family, domain 1 Pfam Description: 3' exoribonuclease family, domain 1
  misc_feature (1)..(241): Homolog of NCBI NO: 15233167 NR Description: exonuclease RRP41 [Arabidopsis thaliana]
  misc_feature (1)..(234): Homolog of NCBI NO: 9506689 NR Description: exosome complex exonuclease RRP41; exosome
  misc_feature (1)..(234): Homolog of NCBI NO: 34866849 NR Description: similar to putative exosome complex exonuclease
  misc_feature (1)..(234): Homolog of NCBI NO: 29611663 NR Description: exosome complex exonuclease RRP41 [Mus musculus] Exosome complex exonuclease RRP41 (Ribosomal RNA processing
  misc_feature (1)..(230): Homolog of NCBI NO: 33411774 NR Description: putative exosome complex exonuclease RRP41 [Bos
  misc_feature (1)..(230): Homolog of NCBI NO: 18977940 NR Description: ribonuclease ph (rph) [Pyrococcus furiosus DSM >gi|29336822|sp|Q8U0L9|ECX1_PYRFU Probable exosome complex
  misc_feature (1)..(230): Homolog of NCBI NO: 14591333 NR Description: hypothetical protein [Pyrococcus horikoshii]
  misc_feature (4)..(230): Homolog of NCBI NO: 20093819 NR Description: Predicted exosome subunit, RNase PH [Methanopyrus AV19] >gi|29336819|sp|Q8TYC1|ECX1_METKA Probable exosome complex
  misc_feature (1)..(230): Homolog of NCBI NO: 14520826 NR Description: ribonuclease PH [Pyrococcus abyssi]
  misc_feature (2)..(235): Homolog of NCBI NO: 31240059 NR Description: ENSANGP00000017010 [Anopheles gambiae] ENSANGP00000009222 [Anopheles gambiae] ENSANGP00000017010 [Anopheles gambiae str. PEST]

SEQ ID NO: 108480 - protein, 223 aa, Arabidopsis thaliana; identical to SEQ ID NO: 100861
  peptide (1)..(223): Ceres Seq. ID no. 13667690
  misc_feature (1)..(130): Pfam Name: 3' exoribonuclease family, domain 1 Pfam Description: 3' exoribonuclease family, domain 1
  misc_feature (1)..(223): Homolog of NCBI NO: 15233167 NR Description: exonuclease RRP41 [Arabidopsis thaliana]
  misc_feature (1)..(216): Homolog of NCBI NO: 9506689 NR Description: exosome complex exonuclease RRP41; exosome
  misc_feature (1)..(216): Homolog of NCBI NO: 34866849 NR Description: similar to putative exosome complex exonuclease
  misc_feature (1)..(216): Homolog of NCBI NO: 29611663 NR Description: exosome complex exonuclease RRP41 [Mus musculus] Exosome complex exonuclease RRP41 (Ribosomal RNA processing
  misc_feature (1)..(212): Homolog of NCBI NO: 33411774 NR Description: putative exosome complex exonuclease RRP41 [Bos
  misc_feature (1)..(212): Homolog of NCBI NO: 18977940 NR Description: ribonuclease ph (rph) [Pyrococcus furiosus DSM >gi|29336822|sp|Q8U0L9|ECX1_PYRFU Probable exosome complex
  misc_feature (1)..(212): Homolog of NCBI NO: 14591333 NR Description: hypothetical protein [Pyrococcus horikoshii]
  misc_feature (1)..(212): Homolog of NCBI NO: 20093819 NR Description: Predicted exosome subunit, RNase PH [Methanopyrus AV19] >gi|29336819|sp|Q8TYC1|ECX1_METKA Probable exosome complex
  misc_feature (1)..(212): Homolog of NCBI NO: 14520826 NR Description: ribonuclease PH [Pyrococcus abyssi]
  misc_feature (1)..(217): Homolog of NCBI NO: 31240059 NR Description: ENSANGP00000017010 [Anopheles gambiae] ENSANGP00000009222 [Anopheles gambiae] ENSANGP00000017010 [Anopheles gambiae str. PEST]

SEQ ID NO: 108481 - protein, 202 aa, Arabidopsis thaliana; identical to SEQ ID NO: 100862
  peptide (1)..(202): Ceres Seq. ID no. 13667691
  misc_feature (1)..(109): Pfam Name: 3' exoribonuclease family, domain 1 Pfam Description: 3' exoribonuclease family, domain 1
  misc_feature (1)..(202): Homolog of NCBI NO: 15233167 NR Description: exonuclease RRP41 [Arabidopsis thaliana]
  misc_feature (1)..(195): Homolog of NCBI NO: 9506689 NR Description: exosome complex exonuclease RRP41; exosome
  misc_feature (1)..(195): Homolog of NCBI NO: 34866849 NR Description: similar to putative exosome complex exonuclease
  misc_feature (1)..(195): Homolog of NCBI NO: 29611663 NR Description: exosome complex exonuclease RRP41 [Mus musculus] Exosome complex exonuclease RRP41 (Ribosomal RNA processing
  misc_feature (1)..(191): Homolog of NCBI NO: 33411774 NR Description: putative exosome complex exonuclease RRP41 [Bos
  misc_feature (1)..(191): Homolog of NCBI NO: 18977940 NR Description: ribonuclease ph (rph) [Pyrococcus furiosus DSM >gi|29336822|sp|Q8U0L9|ECX1_PYRFU Probable exosome complex
  misc_feature (1)..(191): Homolog of NCBI NO: 14591333 NR Description: hypothetical protein [Pyrococcus horikoshii]
  misc_feature (1)..(191): Homolog of NCBI NO: 20093819 NR Description: Predicted exosome subunit, RNase PH [Methanopyrus AV19] >gi|29336819|sp|Q8TYC1|ECX1_METKA Probable exosome complex
  misc_feature (1)..(191): Homolog of NCBI NO: 14520826 NR Description: ribonuclease PH [Pyrococcus abyssi]
  misc_feature (1)..(196): Homolog of NCBI NO: 31240059 NR Description: ENSANGP00000017010 [Anopheles gambiae] ENSANGP00000009222 [Anopheles gambiae] ENSANGP00000017010 [Anopheles gambiae str. PEST]

SEQ ID NO: 108482 - DNA, 571 bp, Arabidopsis thaliana
  misc_feature (1)..(571): Ceres Seq. ID no. 13667695
  misc_feature: MA Experiment ID: 20000173 Result: Down-regulated in Transcription
  misc_feature: MA Experiment 20000173 PARAMETER Experiment Name: At_42deg_Heat_P Parameter: Age (day) Value: 14
  misc_feature: MA Experiment 20000173 PARAMETER Experiment Name: At_42deg_Heat_P Parameter: Organism Value: A. thaliana
  misc_feature: MA Experiment 20000173 PARAMETER Experiment Name: At_42deg_Heat_P Parameter: Plant Line Value: WS
  misc_feature: MA Experiment 20000173 PARAMETER Experiment Name: At_42deg_Heat_P Parameter: Temperature (deg C) Value: 42 vs. 22
  misc_feature: MA Experiment 20000173 PARAMETER Experiment Name: At_42deg_Heat_P Parameter: Timepoint (hr) Value: 6
  misc_feature: MA Experiment 20000173 PARAMETER Experiment Name: At_42deg_Heat_P Parameter: Tissue Value: Aerial
  misc_feature: MA Experiment ID: 20000179 Result: Up-regulated in Transcription
  misc_feature: MA Experiment 20000179 PARAMETER Experiment Name: At_Germinating_Seeds_P Parameter: Age (hr) Value: 6 vs. 0
  misc_feature: MA Experiment 20000179 PARAMETER Experiment Name: At_Germinating_Seeds_P Parameter: Tissue Value: Germinating Seeds
  misc_feature: MA Experiment ID: 20000180 Result: Up-regulated in Transcription
  misc_feature: MA Experiment 20000180 PARAMETER Experiment Name: At_Germinating_Seeds_P Parameter: Age (hr) Value: 24 vs. 0
  misc_feature: MA Experiment 20000180 PARAMETER Experiment Name: At_Germinating_Seeds_P Parameter: Tissue Value: Germinating Seeds
  misc_feature: MA Experiment ID: 20000184 Result: Down-regulated in Transcription
  misc_feature: MA Experiment 20000184 PARAMETER Experiment Name: At_Shoots__P Parameter: Age (day) Value: 7
  misc_feature: MA Experiment 20000184 PARAMETER Experiment Name: At_Shoots__P Parameter: Tissue Value: Shoots vs. Whole Plant
  misc_feature: MA Experiment ID: 20000185 Result: Down-regulated in Transcription
  misc_feature: MA Experiment 20000185 PARAMETER Experiment Name: At_Roots__P Parameter: Age (day) Value: 7 vs. 21
  misc_feature: MA Experiment 20000185 PARAMETER Experiment Name: At_Roots__P Parameter: Organism Value: A. thaliana
  misc_feature: MA Experiment 20000185 PARAMETER Experiment Name: At_Roots__P Parameter: Tissue Value: Roots vs. Whole Plant
  misc_feature: MA Experiment ID: 20000439 Result: Down-regulated in Transcription
  misc_feature: MA Experiment 20000439 PARAMETER Experiment Name: At_Roots__P Parameter: Age (day) Value: 14 vs. 21
  misc_feature: MA Experiment 20000439 PARAMETER Experiment Name: At_Roots__P Parameter: Organism Value: A. thaliana
  misc_feature: MA Experiment 20000439 PARAMETER Experiment Name: At_Roots__P Parameter: Tissue Value: Roots vs. Whole Plant
  misc_feature: MA Experiment ID: 20001247 Result: Down-regulated in Transcription
  misc_feature: MA Experiment 20001247 PARAMETER Experiment Name: At_Far-red-induction_P Parameter: Age (day) Value: 7
  misc_feature: MA Experiment 20001247 PARAMETER Experiment Name: At_Far-red-induction_P Parameter: Light Value: Far-red vs. White
  misc_feature: MA Experiment 20001247 PARAMETER Experiment Name: At_Far-red-induction_P Parameter: Organism Value: A. thaliana
  misc_feature: MA Experiment 20001247 PARAMETER Experiment Name: At_Far-red-induction_P Parameter: Plant Line Value: Columbia
  misc_feature: MA Experiment 20001247 PARAMETER Experiment Name: At_Far-red-induction_P Parameter: Timepoint (hr) Value: 1
  misc_feature: MA Experiment 20001247 PARAMETER Experiment Name: At_Far-red-induction_P Parameter: Tissue Value: Whole Plant
  misc_feature: MA Experiment ID: 20001451 Result: Down-regulated in Transcription
  misc_feature: MA Experiment 20001451 PARAMETER Experiment Name: At_Far-red-induction_P Parameter: Age (day) Value: 7
  misc_feature: MA Experiment 20001451 PARAMETER Experiment Name: At_Far-red-induction_P Parameter: Light Value: Far-red vs. White
  misc_feature: MA Experiment 20001451 PARAMETER Experiment Name: At_Far-red-induction_P Parameter: Organism Value: A. thaliana
  misc_feature: MA Experiment 20001451 PARAMETER Experiment Name: At_Far-red-induction_P Parameter: Plant Line Value: Columbia
  misc_feature: MA Experiment 20001451 PARAMETER Experiment Name: At_Far-red-induction_P Parameter: Timepoint (hr) Value: 24
  misc_feature: MA Experiment 20001451 PARAMETER Experiment Name: At_Far-red-induction_P Parameter: Tissue Value: Whole Plant
  misc_feature: MA Experiment ID: 20001557 Result: Down-regulated in Transcription
  misc_feature: MA Experiment 20001557 PARAMETER Experiment Name: At_Drought_Soil_Dry_P Parameter: Age (day) Value: 27
  misc_feature: MA Experiment 20001557 PARAMETER Experiment Name: At_Drought_Soil_Dry_P Parameter: Organism Value: A. thaliana
  misc_feature: MA Experiment 20001557 PARAMETER Experiment Name: At_Drought_Soil_Dry_P Parameter: Plant Line Value: WS
  misc_feature: MA Experiment 20001557 PARAMETER Experiment Name: At_Drought_Soil_Dry_P Parameter: Post Timepoint (hr) Value: 3
  misc_feature: MA Experiment 20001557 PARAMETER Experiment Name: At_Drought_Soil_Dry_P Parameter: Post-Treatment Value: Re-Water vs. No Drought
  misc_feature: MA Experiment 20001557 PARAMETER Experiment Name: At_Drought_Soil_Dry_P Parameter: Timepoint (day) Value: 13
  misc_feature: MA Experiment 20001557 PARAMETER Experiment Name: At_Drought_Soil_Dry_P Parameter: Treatment Value: Drought vs. No Drought
  misc_feature: MA Experiment ID: 20001905 Result: Down-regulated in Transcription
  misc_feature: MA Experiment 20001905 PARAMETER Experiment Name: At_Drought_Reproduction_P Parameter: Age (day) Value: 40
  misc_feature: MA Experiment 20001905 PARAMETER Experiment Name: At_Drought_Reproduction_P Parameter: Organism Value: A. thaliana
  misc_feature: MA Experiment 20001905 PARAMETER Experiment Name: At_Drought_Reproduction_P Parameter: Plant Line Value: WS
  misc_feature: MA Experiment 20001905 PARAMETER Experiment Name: At_Drought_Reproduction_P Parameter: Timepoint (day) Value: 10
  misc_feature: MA Experiment 20001905 PARAMETER Experiment Name: At_Drought_Reproduction_P Parameter: Tissue Value: Rosettes
  misc_feature: MA Experiment 20001905 PARAMETER Experiment Name: At_Drought_Reproduction_P Parameter: Treatment Value: Drought vs. No Drought
  misc_feature: MA Experiment ID: 20001906 Result: Down-regulated in Transcription
  misc_feature: MA Experiment 20001906 PARAMETER Experiment Name: At_Drought_Reproduction_P Parameter: Age (day) Value: 35
  misc_feature: MA Experiment 20001906 PARAMETER Experiment Name: At_Drought_Reproduction_P Parameter: Organism Value: A. thaliana
  misc_feature: MA Experiment 20001906 PARAMETER Experiment Name: At_Drought_Reproduction_P Parameter: Plant Line Value: WS
  misc_feature: MA Experiment 20001906 PARAMETER Experiment Name: At_Drought_Reproduction_P Parameter: Timepoint (day) Value: 5
  misc_feature: MA Experiment 20001906 PARAMETER Experiment Name: At_Drought_Reproduction_P Parameter: Tissue Value: Siliques
  misc_feature: MA Experiment 20001906 PARAMETER Experiment Name: At_Drought_Reproduction_P Parameter: Treatment Value: Drought vs. No Drought
  misc_feature: Pfam Name: Alpha-amyl_C2 Pfam Description: Alpha-amylase C-terminal beta-sheet domain
gtaacattcatcgagaatcatgacactggctctacacagggtcattggagatttcggaggaaggaaatgcaaggatatgcttacatcctaactcatccaggaacaccagcggtcttcttcgaccatatctctcggattatcaattccgagattgctgcacttctctctctcaggaacagacagaaactccactgtcggagtgaggtgaatatagacaagagtgagagagatgtgtatgcggctataatagatgaaaaggttgcaatgaagatcggaccagggcattatgaaccaccaaacggatcgcaaaactggtctgtagccgttgaaggcagagactacaaggtgtgggaaacatcttaagaagaaggttcccaatttttatgtgtatctagtagtaaataaaattgttcctggaggatatattatttcagggaataagattacctggaaatgttatatttagagtggattaaaaccagactagattgtccactttttcaatgctgagagatattcatattgttgtattggatgctgtaagtgtatgccatatatatatgaattaatt

SEQ ID NO: 108483 - protein, 120 aa, Arabidopsis thaliana
  peptide (1)..(120): Ceres Seq. ID no. 13667696
  misc_feature: Pfam Name: Alpha-amyl_C2 Pfam Description: Alpha-amylase C-terminal beta-sheet domain
  misc_feature (1)..(120): Homolog of NCBI NO: 11139274 NR Description: PRLI-interacting factor E [Arabidopsis thaliana]
  misc_feature (1)..(120): Homolog of NCBI NO: 25404842 NR Description: probable alpha-amylase T17F3.14 [imported] -
  misc_feature (1)..(120): Homolog of NCBI NO: 18409378 NR Description: alpha-amylase (1,4-alpha-D-glucan putative [Arabidopsis thaliana] >gi|15215738|gb|AAK91414.1| [Arabidopsis thaliana] >gi|23308479|gb|AAN18209.1|
  misc_feature (1)..(120): Homolog of NCBI NO: 34910588 NR Description: putative alpha-amylase [Oryza sativa (japonica
  misc_feature (1)..(118): Homolog of NCBI NO: 1220453 NR Description: alpha-amylase
  misc_feature (1)..(117): Homolog of NCBI NO: 15222959 NR Description: alpha-amylase (1,4-alpha-D-glucan
  misc_feature (1)..(117): Homolog of NCBI NO: 25289325 NR Description: protein T23E18.6 [imported] - Arabidopsis >gi|6573706|gb|AAF17626.1|AC009978_2 T23E18.6 [Arabidopsis
  misc_feature (1)..(117): Homolog of NCBI NO: 38346145 NR Description: OSJNBb0118P14.5 [Oryza sativa (japonica
  misc_feature (1)..(117): Homolog of NCBI NO: 7532799 NR Description: alpha-amylase [Malus x domestica]
  misc_feature (1)..(118): Homolog of NCBI NO: 1220451 NR Description: alpha-amylase
VTFIENHDTGSTQGHWRFRRKEMQGYAYILTHPGTPAVFFDHISRIINSEIAALLSLRNRQKLHCRSEVNIDKSERDVYAAIIDEKVAMKIGPGHYEPPNGSQNWSVAVEGRDYKVWETS

SEQ ID NO: 108484 - protein, 98 aa, Arabidopsis thaliana
  peptide (1)..(98): Ceres Seq. ID no. 13667697
  misc_feature: Pfam Name: Alpha-amyl_C2 Pfam Description: Alpha-amylase C-terminal beta-sheet domain
  misc_feature (1)..(98): Homolog of NCBI NO: 11139274 NR Description: PRLI-interacting factor E [Arabidopsis thaliana]
  misc_feature (1)..(98): Homolog of NCBI NO: 25404842 NR Description: probable alpha-amylase T17F3.14 [imported] -
  misc_feature (1)..(98): Homolog of NCBI NO: 18409378 NR Description: alpha-amylase (1,4-alpha-D-glucan putative [Arabidopsis thaliana] >gi|15215738|gb|AAK91414.1| [Arabidopsis thaliana] >gi|23308479|gb|AAN18209.1|
  misc_feature (1)..(98): Homolog of NCBI NO: 34910588 NR Description: putative alpha-amylase [Oryza sativa (japonica
  misc_feature (1)..(96): Homolog of NCBI NO: 1220453 NR Description: alpha-amylase
  misc_feature (1)..(95): Homolog of NCBI NO: 15222959 NR Description: alpha-amylase (1,4-alpha-D-glucan
  misc_feature (1)..(95): Homolog of NCBI NO: 25289325 NR Description: protein T23E18.6 [imported] - Arabidopsis >gi|6573706|gb|AAF17626.1|AC009978_2 T23E18.6 [Arabidopsis
  misc_feature (1)..(95): Homolog of NCBI NO: 38346145 NR Description: OSJNBb0118P14.5 [Oryza sativa (japonica
  misc_feature (1)..(95): Homolog of NCBI NO: 7532799 NR Description: alpha-amylase [Malus x domestica]
  misc_feature (1)..(96): Homolog of NCBI NO: 1220451 NR Description: alpha-amylase
MQGYAYILTHPGTPAVFFDHISRIINSEIAALLSLRNRQKLHCRSEVNIDKSERDVYAAIIDEKVAMKIGPGHYEPPNGSQNWSVAVEGRDYKVWETS

SEQ ID NO: 108485 - DNA, 1440 bp, Arabidopsis thaliana
  misc_feature (1)..(1440): Ceres Seq. ID no. 13667698
  misc_feature: MA Experiment ID: 108434 Result: Up-regulated in Transcription
  misc_feature: MA Experiment 108434 PARAMETER Experiment Name: At_Root_Tips_cDNA_P Parameter: Tissue Value: Root Tips
  misc_feature: MA Experiment ID: 108461 Result: Down-regulated in Transcription
  misc_feature: MA Experiment 108461 PARAMETER Experiment Name: At_Germinating_Seeds_cDNA_P Parameter: Age (day) Value: 1 vs. 0
  misc_feature: MA Experiment 108461 PARAMETER Experiment Name: At_Germinating_Seeds_cDNA_P Parameter: Tissue Value: Germinating Seeds
  misc_feature: MA Experiment ID: 108462 Result: Down-regulated in Transcription
  misc_feature: MA Experiment 108462 PARAMETER Experiment Name: At_Germinating_Seeds_cDNA_P Parameter: Age (day) Value: 2 vs. 0
  misc_feature: MA Experiment 108462 PARAMETER Experiment Name: At_Germinating_Seeds_cDNA_P Parameter: Tissue Value: Germinating Seeds
  misc_feature: MA Experiment ID: 108463 Result: Down-regulated in Transcription
  misc_feature: MA Experiment 108463 PARAMETER Experiment Name: At_Germinating_Seeds_cDNA_P Parameter: Age (day) Value: 3 vs. 0
  misc_feature: MA Experiment 108463 PARAMETER Experiment Name: At_Germinating_Seeds_cDNA_P Parameter: Tissue Value: Germinating Seeds
  misc_feature: MA Experiment ID: 108464 Result: Down-regulated in Transcription
  misc_feature: MA Experiment 108464 PARAMETER Experiment Name: At_Germinating_Seeds_cDNA_P Parameter: Age (day) Value: 4 vs. 0
  misc_feature: MA Experiment 108464 PARAMETER Experiment Name: At_Germinating_Seeds_cDNA_P Parameter: Tissue Value: Germinating Seeds
  misc_feature: MA Experiment ID: 108469 Result: Up-regulated in Transcription
  misc_feature: MA Experiment ID: 108573 Result: Up-regulated in Transcription
  misc_feature: MA Experiment 108573 PARAMETER Experiment Name: At_Drought_cDNA_P Parameter: Timepoint (hr) Value: 6
  misc_feature: MA Experiment 108573 PARAMETER Experiment Name: At_Drought_cDNA_P Parameter: Tissue Value: Aerial
  misc_feature: MA Experiment 108573 PARAMETER Experiment Name: At_Drought_cDNA_P Parameter: Treatment Value: Drought vs. No Drought
  misc_feature: MA Experiment ID: 108585 Result: Up-regulated in Transcription
  misc_feature: MA Experiment 108585 PARAMETER Experiment Name: At_5mM_NaNP_cDNA_P Parameter: Timepoint (hr) Value: 6
  misc_feature: MA Experiment 108585 PARAMETER Experiment Name: At_5mM_NaNP_cDNA_P Parameter: Tissue Value: Aerial
  misc_feature: MA Experiment 108585 PARAMETER Experiment Name: At_5mM_NaNP_cDNA_P Parameter: Treatment Value: null
  misc_feature: MA Experiment ID: 20000069 Result: Up-regulated in Transcription
  misc_feature: MA Experiment 20000069 PARAMETER Experiment Name: At_100uM_ABA_Mutants_cDNA_P Parameter: Plant Line Value: CS23
  misc_feature: MA Experiment 20000069 PARAMETER Experiment Name: At_100uM_ABA_Mutants_cDNA_P Parameter: Timepoint (hr) Value: 6
  misc_feature: MA Experiment 20000069 PARAMETER Experiment Name: At_100uM_ABA_Mutants_cDNA_P Parameter: Tissue Value: Aerial
  misc_feature: MA Experiment 20000069 PARAMETER Experiment Name: At_100uM_ABA_Mutants_cDNA_P Parameter: Treatment Value: 100uM ABA vs. No Treatment
  misc_feature: MA Experiment ID: 20000070 Result: Up-regulated in Transcription
  misc_feature: MA Experiment 20000070 PARAMETER Experiment Name: At_100uM_ABA_Mutants_cDNA_P Parameter: Plant Line Value: CS24
  misc_feature: MA Experiment 20000070 PARAMETER Experiment Name: At_100uM_ABA_Mutants_cDNA_P Parameter: Timepoint (hr) Value: 6
  misc_feature: MA Experiment 20000070 PARAMETER Experiment Name: At_100uM_ABA_Mutants_cDNA_P Parameter: Tissue Value: Aerial
  misc_feature: MA Experiment 20000070 PARAMETER Experiment Name: At_100uM_ABA_Mutants_cDNA_P Parameter: Treatment Value: 100uM ABA vs. No Treatment
  misc_feature: MA Experiment ID: 20000071 Result: Up-regulated in Transcription
  misc_feature: MA Experiment 20000071 PARAMETER Experiment Name: At_100uM_ABA_Mutants_cDNA_P Parameter: Plant Line Value: CS8104
  misc_feature: MA Experiment 20000071 PARAMETER Experiment Name: At_100uM_ABA_Mutants_cDNA_P Parameter: Timepoint (hr) Value: 6
  misc_feature: MA Experiment 20000071 PARAMETER Experiment Name: At_100uM_ABA_Mutants_cDNA_P Parameter: Tissue Value: Aerial
  misc_feature: MA Experiment 20000071 PARAMETER Experiment Name: At_100uM_ABA_Mutants_cDNA_P Parameter: Treatment Value: 100uM ABA vs. No Treatment
  misc_feature: MA Experiment ID: 20000072 Result: Up-regulated in Transcription
  misc_feature: MA Experiment 20000072 PARAMETER Experiment Name: At_100uM_ABA_Mutants_cDNA_P Parameter: Plant Line Value: CS8105
  misc_feature: MA Experiment 20000072 PARAMETER Experiment Name: At_100uM_ABA_Mutants_cDNA_P Parameter: Timepoint (hr) Value: 6
  misc_feature: MA Experiment 20000072 PARAMETER Experiment Name: At_100uM_ABA_Mutants_cDNA_P Parameter: Tissue Value: Aerial
  misc_feature: MA Experiment 20000072 PARAMETER Experiment Name: At_100uM_ABA_Mutants_cDNA_P Parameter: Treatment Value: 100uM ABA vs. No Treatment
  misc_feature: MA Experiment ID: 20000086 Result: Up-regulated in Transcription
  misc_feature: MA Experiment 20000086 PARAMETER Experiment Name: At_100uM_ABA_Mutants_cDNA_P Parameter: Plant Line Value: CS22
  misc_feature: MA Experiment 20000086 PARAMETER Experiment Name: At_100uM_ABA_Mutants_cDNA_P Parameter: Timepoint (hr) Value: 6
  misc_feature: MA Experiment 20000086 PARAMETER Experiment Name: At_100uM_ABA_Mutants_cDNA_P Parameter: Tissue Value: Aerial
  misc_feature: MA Experiment 20000086 PARAMETER Experiment Name: At_100uM_ABA_Mutants_cDNA_P Parameter: Treatment Value: 100uM ABA vs. No Treatment
  misc_feature: MA Experiment ID: 20000088 Result: Up-regulated in Transcription
  misc_feature: MA Experiment 20000088 PARAMETER Experiment Name: At_100uM_ABA_Mutants_cDNA_P Parameter: Plant Line Value: Landsberg
  misc_feature: MA Experiment 20000088 PARAMETER Experiment Name: At_100uM_ABA_Mutants_cDNA_P Parameter: Timepoint (hr) Value: 6
  misc_feature: MA Experiment 20000088 PARAMETER Experiment Name: At_100uM_ABA_Mutants_cDNA_P Parameter: Tissue Value: Aerial
  misc_feature: MA Experiment 20000088 PARAMETER Experiment Name: At_100uM_ABA_Mutants_cDNA_P Parameter: Treatment Value: 100uM ABA vs. No Treatment
  misc_feature: MA Experiment ID: 20000117 Result: Up-regulated in Transcription
  misc_feature: MA Experiment 20000117 PARAMETER Experiment Name: At_100uM_ABA_Mutants_cDNA_P Parameter: Plant Line Value: Columbia
  misc_feature: MA Experiment 20000117 PARAMETER Experiment Name: At_100uM_ABA_Mutants_cDNA_P Parameter: Timepoint (hr) Value: 6
  misc_feature: MA Experiment 20000117 PARAMETER Experiment Name: At_100uM_ABA_Mutants_cDNA_P Parameter: Tissue Value: Aerial
  misc_feature: MA Experiment 20000117 PARAMETER Experiment Name: At_100uM_ABA_Mutants_cDNA_P Parameter: Treatment Value: 100uM ABA vs. No Treatment
  misc_feature: MA Experiment ID: 20000179 Result: Down-regulated in Transcription
  misc_feature: MA Experiment 20000179 PARAMETER Experiment Name: At_Germinating_Seeds_P Parameter: Age (hr) Value: 6 vs. 0
  misc_feature: MA Experiment 20000179 PARAMETER Experiment Name: At_Germinating_Seeds_P Parameter: Tissue Value: Germinating Seeds
  misc_feature: MA Experiment ID: 20001557 Result: Up-regulated in Transcription
  misc_feature: MA Experiment 20001557 PARAMETER Experiment Name: At_Drought_Soil_Dry_P Parameter: Age (day) Value: 27
  misc_feature: MA Experiment 20001557 PARAMETER Experiment Name: At_Drought_Soil_Dry_P Parameter: Organism Value: A. thaliana
  misc_feature: MA Experiment 20001557 PARAMETER Experiment Name: At_Drought_Soil_Dry_P Parameter: Plant Line Value: WS
  misc_feature: MA Experiment 20001557 PARAMETER Experiment Name: At_Drought_Soil_Dry_P Parameter: Post Timepoint (hr) Value: 3
  misc_feature: MA Experiment 20001557 PARAMETER Experiment Name: At_Drought_Soil_Dry_P Parameter: Post-Treatment Value: Re-Water vs. No Drought
  misc_feature: MA Experiment 20001557 PARAMETER Experiment Name: At_Drought_Soil_Dry_P Parameter: Timepoint (day) Value: 13
  misc_feature: MA Experiment 20001557 PARAMETER Experiment Name: At_Drought_Soil_Dry_P Parameter: Treatment Value: Drought vs. No Drought
ctcacttttctcttcccccaccctcaaagatctctcaaagaatggcttccgcggctgttgcatcgatggttcttgaccctaaagcatcaccggccttgatggatctatccaccgcagacgaagaagatctctatggccgcctcaaatcgcttgaacgacaactagagttcaccgatatccaagaagaatatgtgaaagacgagcaaaagaatctcaaacgagagctgttacgagcacaagaagaggtcaaacgaattcaatccgtgcctttggtgataggtcagttcatggagatggtagatcagaacaacggcatcgtcggatctactactggctccaattactatgtcagaattctcagcacaatcaatagagaactcttaaagccttctgcttccgtcgctcttcaccgtcactccaacgcccttgttgatgttttgcctccggaggctgattctagcatctcccttctcagccaatctgagaagcctgacgtctcctacaatgatattggaggatgcgatattcagaaacaggaaattcgtgaggctgttgaattgcctcttacccaccacgagctttacaaacagattggtattgacccacctcgtggagtcttgctctatggacctcctggtactggaaagactatgttggctaaggctgttgccaatcacacaactgctgccttcattagggttgttggatccgagtttgtgcaaaagtatctcggcgagggacctcgtatggttcgtgatgtcttccgtcttgccaaggaaaatgctccagctatcatcttcattgatgaggtagatgccatcgctactgctaggtttgatgctcaaacaggagccgatagggaagttcagcgtattctcatggagcttcttaatcagatggatggatttgaccagaccgtgaatgtcaaggtcataatggcaacaaacagggcagacactctagatcctgctctcttacgtcctggaagacttgatcgtaagattgagttcccccttcctgatagacgtcaaaagaggcttgttttccaggtatgcacctccaaaatgaaccttagcgatgaggttgacttggaagactatgtttcacggcctgataaaattagcgctgctgagatagcagcaatttgccaggaagctggtatgcatgcggtgcgaaagaacagatatgtgatactacctaaggatttcgagaagggctaccgcgcaaatgttaagaagccagacacggactttgagttttacaagtgaagagaaagcagaagtggaaccagattatggctgttgttaaaattccagtgtgttttgagaattattaaggacatggaatcaaatttgcagttaaattaagaactaagttgcatctcctaatttctgtaactcgagttcacatttgtttttagtctatcagctttttacagtt

SEQ ID NO: 108486 - protein, 421 aa, Arabidopsis thaliana
  peptide (1)..(421): Ceres Seq. ID no. 13667699
  misc_feature (204)..(391): Pfam Name: ATPase family associated with various cellular Pfam Description: ATPase family associated with various cellular
  misc_feature (14)..(421): Homolog of NCBI NO: 15237159 NR Description: 26S proteasome AAA-ATPase subunit RPT3 thaliana] >gi|28558168|sp|Q9SEI4|PRS6_ARATH 26S protease
  misc_feature (21)..(421): Homolog of NCBI NO: 1709798 NR Description: 26S PROTEASE REGULATORY SUBUNIT 6B HOMOLOG
  misc_feature (54)..(421): Homolog of NCBI NO: 17298145 NR Description: 26S proteasome regulatory particle triple-A
  misc_feature (25)..(421): Homolog of NCBI NO: 18860063 NR Description: CG16916-PA [Drosophila melanogaster]
  misc_feature (26)..(421): Homolog of NCBI NO: 1172638 NR Description: 26S PROTEASE REGULATORY SUBUNIT 6B (ATPASE MS73)
  misc_feature (20)..(421): Homolog of NCBI NO: 5729991 NR Description: proteasome 26S ATPase subunit 4 isoform 1;
  misc_feature (20)..(421): Homolog of NCBI NO: 30585275 NR Description: Homo sapiens proteasome (prosome, macropain) 26S
  misc_feature (20)..(421): Homolog of NCBI NO: 25742677 NR Description: proteasome 26S ATPase subunit 4 [Rattus
  misc_feature (18)..(421): Homolog of NCBI NO: 39584985 NR Description: Hypothetical protein CBG09101 [Caenorhabditis
  misc_feature (14)..(421): Homolog of NCBI NO: 39590031 NR Description: Hypothetical protein CBG04772 [Caenorhabditis
HFSLPPPSKISQRMASAAVASMVLDPKASPALMDLSTADEEDLYGRLKSLERQLEFTDIQEEYVKDEQKNLKRELLRAQEEVKRIQSVPLVIGQFMEMVDQNNGIVGSTTGSNYYVRILSTINRELLKPSASVALHRHSNALVDVLPPEADSSISLLSQSEKPDVSYNDIGGCDIQKQEIREAVELPLTHHELYKQIGIDPPRGVLLYGPPGTGKTMLAKAVANHTTAAFIRVVGSEFVQKYLGEGPRMVRDVFRLAKENAPAIIFIDEVDAIATARFDAQTGADREVQRILMELLNQMDGFDQTVNVKVIMATNRADTLDPALLRPGRLDRKIEFPLPDRRQKRLVFQVCTSKMNLSDEVDLEDYVSRPDKISAAEIAAICQEAGMHAVRKNRYVILPKDFEKGYRANVKKPDTDFEFYK

SEQ ID NO: 108487 - protein, 408 aa, Arabidopsis thaliana; identical to SEQ ID NO: 40993
  peptide (1)..(408): Ceres Seq. ID no. 13667700
  misc_feature (191)..(378): Pfam Name: ATPase family associated with various cellular Pfam Description: ATPase family associated with various cellular
  misc_feature (1)..(408): Homolog of NCBI NO: 15237159 NR Description: 26S proteasome AAA-ATPase subunit RPT3 thaliana] >gi|28558168|sp|Q9SEI4|PRS6_ARATH 26S protease
  misc_feature (8)..(408): Homolog of NCBI NO: 1709798 NR Description: 26S PROTEASE REGULATORY SUBUNIT 6B HOMOLOG
  misc_feature (41)..(408): Homolog of NCBI NO: 17298145 NR Description: 26S proteasome regulatory particle triple-A
  misc_feature (12)..(408): Homolog of NCBI NO: 18860063 NR Description: CG16916-PA [Drosophila melanogaster]
  misc_feature (13)..(408): Homolog of NCBI NO: 1172638 NR Description: 26S PROTEASE REGULATORY SUBUNIT 6B (ATPASE MS73)
  misc_feature (7)..(408): Homolog of NCBI NO: 5729991 NR Description: proteasome 26S ATPase subunit 4 isoform 1;
  misc_feature (7)..(408): Homolog of NCBI NO: 30585275 NR Description: Homo sapiens proteasome (prosome, macropain) 26S
  misc_feature (7)..(408): Homolog of NCBI NO: 25742677 NR Description: proteasome 26S ATPase subunit 4 [Rattus
  misc_feature (5)..(408): Homolog of NCBI NO: 39584985 NR Description: Hypothetical protein CBG09101 [Caenorhabditis
  misc_feature (1)..(408): Homolog of NCBI NO: 39590031 NR Description: Hypothetical protein CBG04772 [Caenorhabditis

SEQ ID NO: 108488 - protein, 400 aa, Arabidopsis thaliana; identical to SEQ ID NO: 40994
  peptide (1)..(400): Ceres Seq. ID no. 13667701
  misc_feature (183)..(370): Pfam Name: ATPase family associated with various cellular Pfam Description: ATPase family associated with various cellular
  misc_feature (1)..(400): Homolog of NCBI NO: 15237159 NR Description: 26S proteasome AAA-ATPase subunit RPT3 thaliana] >gi|28558168|sp|Q9SEI4|PRS6_ARATH 26S protease
  misc_feature (1)..(400): Homolog of NCBI NO: 1709798 NR Description: 26S PROTEASE REGULATORY SUBUNIT 6B HOMOLOG
  misc_feature (33)..(400): Homolog of NCBI NO: 17298145 NR Description: 26S proteasome regulatory particle triple-A
  misc_feature (4)..(400): Homolog of NCBI NO: 18860063 NR Description: CG16916-PA [Drosophila melanogaster]
  misc_feature (5)..(400): Homolog of NCBI NO: 1172638 NR Description: 26S PROTEASE REGULATORY SUBUNIT 6B (ATPASE MS73)
  misc_feature (1)..(400): Homolog of NCBI NO: 5729991 NR Description: proteasome 26S ATPase subunit 4 isoform 1;
  misc_feature (1)..(400): Homolog of NCBI NO: 30585275 NR Description: Homo sapiens proteasome (prosome, macropain) 26S
  misc_feature (1)..(400): Homolog of NCBI NO: 25742677 NR Description: proteasome 26S ATPase subunit 4 [Rattus
  misc_feature (1)..(400): Homolog of NCBI NO: 39584985 NR Description: Hypothetical protein CBG09101 [Caenorhabditis
  misc_feature (1)..(400): Homolog of NCBI NO: 39590031 NR Description: Hypothetical protein CBG04772 [Caenorhabditis

SEQ ID NO: 108489 - DNA, 1225 bp, Arabidopsis thaliana
  misc_feature (1)..(1225): Ceres Seq. ID no. 13667702
  misc_feature: MA Experiment ID: 20001905 Result: Down-regulated in Transcription
  misc_feature: MA Experiment 20001905 PARAMETER Experiment Name: At_Drought_Reproduction_P Parameter: Age (day) Value: 40
  misc_feature: MA Experiment 20001905 PARAMETER Experiment Name: At_Drought_Reproduction_P Parameter: Organism Value: A. thaliana
  misc_feature: MA Experiment 20001905 PARAMETER Experiment Name: At_Drought_Reproduction_P Parameter: Plant Line Value: WS
  misc_feature: MA Experiment 20001905 PARAMETER Experiment Name: At_Drought_Reproduction_P Parameter: Timepoint (day) Value: 10
  misc_feature: MA Experiment 20001905 PARAMETER Experiment Name: At_Drought_Reproduction_P Parameter: Tissue Value: Rosettes
  misc_feature: MA Experiment 20001905 PARAMETER Experiment Name: At_Drought_Reproduction_P Parameter: Treatment Value: Drought vs. No Drought
cgcgtccgctcactgtctctcttcttcaatccatgtcttcaacacaagaagcgtctgttactgatttgcccgtgaagagacctagagaagcagaggaggacaataacggcggcgccatggaaacagagaacggtggaggagagataaaggagccttcttgtatgtcctctattattcctggatggttctctgagattagtcctatgtggccaggagaagcacattctctcaaggtagagaagattctattccaagggaaatcagattaccaggatgttattgttttccagtctgcaacatatggaaaggttttggttttggatggagtgattcaactcactgagagagatgaatgtgcgtatcaagaaatgatcactcatcttcctttgtgctctatctccaaccccaaaaaggtactggtgattggaggaggagatggaggagtcctgagggaagtggcacgtcatagttctgttgagcagattgacatttgtgaaatagataaaatggtggttgatgtggctaagcagtatttccctaatgtagcagttggatacgaggatcctcgtgtcaacctcatcattggcgatggtgttgctttcttgaagaacgctgctgaaggaacctatgatgcagttattgttgattcatctgatccaatcggtccagcaaaagagctatttgagaaacctttctttgagtcagtgaatagagctcttcgtcctggtggagttgtgtgcacacaagctgaaagcttgtggcttcacatggatatcattgaagacattgtttctaattgccgtgacatctttaaaggatctgttaactacgcttggaccagtgttccaacttacccgagtggagtcattggattcatgctttgttcatctgaaggaccacaagtcgatttcaagaagccagtgagtctaatcgatactgatgaaagctctatcaaatcacactgtcccttgaagtattacaacgctgagattcactcagctgctttctgcttgccctcttttgctaagaaggtgattgattcgaaagccaactagaaaagagaagagaaatcatttgctttagagaaacttcatgtggaagtgataatatgatgatacaatgatcctttggaaaaaaataaagaagttttaatttttagaatgtaatgttctttcacctgcaatgttatgtgactgcactgagctatcaatctctttttataagc

SEQ ID NO: 108490 - protein, 350 aa, Arabidopsis thaliana
  peptide (1)..(350): Ceres Seq. ID no. 13667703
  misc_feature (60)..(305): Pfam Name: Spermine/spermidine synthase Pfam Description: Spermine/spermidine synthase
  misc_feature (11)..(350): Homolog of NCBI NO: 15223115 NR Description: spermidine synthase -related [Arabidopsis >gi|12644069|sp|O48661|SPD2_ARATH Spermidine synthase 2 aminopropyltransferase 2) (SPDSY 2) >gi|7434029|pir||T01492
  misc_feature (61)..(350): Homolog of NCBI NO: 2821961 NR Description: spermidine synthase [Arabidopsis thaliana]
  misc_feature (15)..(350): Homolog of NCBI NO: 15220885 NR Description: spermidine synthase -related [Arabidopsis >gi|12230014|sp|Q9ZUB3|SPD1_ARATH Spermidine synthase 1 aminopropyltransferase 1) (SPDSY 1) >gi|25287115|pir||F86372
  misc_feature (20)..(348): Homolog of NCBI NO: 12230013 NR Description: Spermidine synthase (Putrescine (SPDSY) >gi|4138109|emb|CAA07020.1| spermidine synthase
  misc_feature (20)..(348): Homolog of NCBI NO: 15150055 NR Description: spermidine synthase [Solanum tuberosum]
  misc_feature (21)..(349): Homolog of NCBI NO: 23495354 NR Description: spermidine synthase [Malus x domestica]
  misc_feature (49)..(348): Homolog of NCBI NO: 6094327 NR Description: Spermidine synthase 1 (Putrescine
  misc_feature (50)..(349): Homolog of NCBI NO: 6094330 NR Description: Spermidine synthase 2 (Putrescine
  misc_feature (11)..(349): Homolog of NCBI NO: 23495352 NR Description: spermidine synthase [Malus x domestica]
  misc_feature (20)..(350): Homolog of NCBI NO: 12229958 NR Description: Spermidine synthase 1 (Putrescine
RPLTVSLLQSMSSTQEASVTDLPVKRPREAEEDNNGGAMETENGGGEIKEPSCMSSIIPGWFSEISPMWPGEAHSLKVEKILFQGKSDYQDVIVFQSATYGKVLVLDGVIQLTERDECAYQEMITHLPLCSISNPKKVLVIGGGDGGVLREVARHSSVEQIDICEIDKMVVDVAKQYFPNVAVGYEDPRVNLIIGDGVAFLKNAAEGTYDAVIVDSSDPIGPAKELFEKPFFESVNRALRPGGVVCTQAESLWLHMDIIEDIVSNCRDIFKGSVNYAWTSVPTYPSGVIGFMLCSSEGPQVDFKKPVSLIDTDESSIKSHCPLKYYNAEIHSAAFCLPSFAKKVIDSKAN

SEQ ID NO: 108491 - protein, 340 aa, Arabidopsis thaliana; identical to SEQ ID NO: 90633
  peptide (1)..(340): Ceres Seq. ID no. 13667704
  misc_feature (50)..(295): Pfam Name: Spermine/spermidine synthase Pfam Description: Spermine/spermidine synthase
  misc_feature (1)..(340): Homolog of NCBI NO: 15223115 NR Description: spermidine synthase -related [Arabidopsis >gi|12644069|sp|O48661|SPD2_ARATH Spermidine synthase 2 aminopropyltransferase 2) (SPDSY 2) >gi|7434029|pir||T01492
  misc_feature (51)..(340): Homolog of NCBI NO: 2821961 NR Description: spermidine synthase [Arabidopsis thaliana]
  misc_feature (5)..(340): Homolog of NCBI NO: 15220885 NR Description: spermidine synthase -related [Arabidopsis >gi|12230014|sp|Q9ZUB3|SPD1_ARATH Spermidine synthase 1 aminopropyltransferase 1) (SPDSY 1) >gi|25287115|pir||F86372
  misc_feature (10)..(338): Homolog of NCBI NO: 12230013 NR Description: Spermidine synthase (Putrescine (SPDSY) >gi|4138109|emb|CAA07020.1| spermidine synthase
  misc_feature (10)..(338): Homolog of NCBI NO: 15150055 NR Description: spermidine synthase [Solanum tuberosum]
  misc_feature (11)..(339): Homolog of NCBI NO: 23495354 NR Description: spermidine synthase [Malus x domestica]
  misc_feature (39)..(338): Homolog of NCBI NO: 6094327 NR Description: Spermidine synthase 1 (Putrescine
  misc_feature (40)..(339): Homolog of NCBI NO: 6094330 NR Description: Spermidine synthase 2 (Putrescine
  misc_feature (1)..(339): Homolog of NCBI NO: 23495352 NR Description: spermidine synthase [Malus x domestica]
  misc_feature (10)..(340): Homolog of NCBI NO: 12229958 NR Description: Spermidine synthase 1 (Putrescine

SEQ ID NO: 108492 - protein, 312 aa, Arabidopsis thaliana; identical to SEQ ID NO: 90634
  peptide (1)..(312): Ceres Seq. ID no. 13667705
  misc_feature (22)..(267): Pfam Name: Spermine/spermidine synthase Pfam Description: Spermine/spermidine synthase
  misc_feature (1)..(312): Homolog of NCBI NO: 15223115 NR Description: spermidine synthase -related [Arabidopsis >gi|12644069|sp|O48661|SPD2_ARATH Spermidine synthase 2 aminopropyltransferase 2) (SPDSY 2) >gi|7434029|pir||T01492
  misc_feature (23)..(312): Homolog of NCBI NO: 2821961 NR Description: spermidine synthase [Arabidopsis thaliana]
  misc_feature (1)..(312): Homolog of NCBI NO: 15220885 NR Description: spermidine synthase -related [Arabidopsis >gi|12230014|sp|Q9ZUB3|SPD1_ARATH Spermidine synthase 1 aminopropyltransferase 1) (SPDSY 1) >gi|25287115|pir||F86372
  misc_feature (1)..(310): Homolog of NCBI NO: 12230013 NR Description: Spermidine synthase (Putrescine (SPDSY) >gi|4138109|emb|CAA07020.1| spermidine synthase
  misc_feature (1)..(310): Homolog of NCBI NO: 15150055 NR Description: spermidine synthase [Solanum tuberosum]
  misc_feature (1)..(311): Homolog of NCBI NO: 23495354 NR Description: spermidine synthase [Malus x domestica]
  misc_feature (11)..(310): Homolog of NCBI NO: 6094327 NR Description: Spermidine synthase 1 (Putrescine
  misc_feature (12)..(311): Homolog of NCBI NO: 6094330 NR Description: Spermidine synthase 2 (Putrescine
  misc_feature (1)..(311): Homolog of NCBI NO: 23495352 NR Description: spermidine synthase [Malus x domestica]
  misc_feature (1)..(312): Homolog of NCBI NO: 12229958 NR Description: Spermidine synthase 1 (Putrescine

SEQ ID NO: 108493 - DNA, 886 bp, Arabidopsis thaliana
  misc_feature (1)..(886): Ceres Seq. ID no. 13667714
  misc_feature: MA Experiment ID: 20000185 Result: Down-regulated in Transcription
  misc_feature: MA Experiment 20000185 PARAMETER Experiment Name: At_Roots__P Parameter: Age (day) Value: 7 vs. 21
  misc_feature: MA Experiment 20000185 PARAMETER Experiment Name: At_Roots__P Parameter: Organism Value: A. thaliana
  misc_feature: MA Experiment 20000185 PARAMETER Experiment Name: At_Roots__P Parameter: Tissue Value: Roots vs. Whole Plant
  misc_feature: MA Experiment ID: 20000234 Result: Down-regulated in Transcription
  misc_feature: MA Experiment 20000234 PARAMETER Experiment Name: At_Siliques_P Parameter: Age (day) Value: 21
  misc_feature: MA Experiment 20000234 PARAMETER Experiment Name: At_Siliques_P Parameter: Organism Value: A. thaliana
  misc_feature: MA Experiment 20000234 PARAMETER Experiment Name: At_Siliques_P Parameter: Plant Line Value: WS
  misc_feature: MA Experiment 20000234 PARAMETER Experiment Name: At_Siliques_P Parameter: Tissue Value: Less Than 5mm Siliques vs. Whole Plant
  misc_feature: MA Experiment ID: 20000265 Result: Down-regulated in Transcription
  misc_feature: MA Experiment 20000265 PARAMETER Experiment Name: At_Open_Flower_P Parameter: Age (day) Value: 21
  misc_feature: MA Experiment 20000265 PARAMETER Experiment Name: At_Open_Flower_P Parameter: Plant Line Value: WS
  misc_feature: MA Experiment 20000265 PARAMETER Experiment Name: At_Open_Flower_P Parameter: Tissue Value: Closed Flower vs. Whole Plant
  misc_feature: MA Experiment ID: 20000436 Result: Down-regulated in Transcription
  misc_feature: MA Experiment 20000436 PARAMETER Experiment Name: At_Drought_P Parameter: Age (day) Value: 7
  misc_feature: MA Experiment 20000436 PARAMETER Experiment Name: At_Drought_P Parameter: Organism Value: A. thaliana
  misc_feature: MA Experiment 20000436 PARAMETER Experiment Name: At_Drought_P Parameter: Plant Line Value: WS
  misc_feature: MA Experiment 20000436 PARAMETER Experiment Name: At_Drought_P Parameter: Timepoint (hr) Value: 12
  misc_feature: MA Experiment 20000436 PARAMETER Experiment Name: At_Drought_P Parameter: Tissue Value: Whole Plant
  misc_feature: MA Experiment 20000436 PARAMETER Experiment Name: At_Drought_P Parameter: Treatment Value: Drought vs. No Drought
  misc_feature: MA Experiment ID: 20000437 Result: Down-regulated in Transcription
  misc_feature: MA Experiment 20000437 PARAMETER Experiment Name: At_Drought_P Parameter: Age (day) Value: 8
  misc_feature: MA Experiment 20000437 PARAMETER Experiment Name: At_Drought_P Parameter: Organism Value: A. thaliana
  misc_feature: MA Experiment 20000437 PARAMETER Experiment Name: At_Drought_P Parameter: Plant Line Value: WS
  misc_feature: MA Experiment 20000437 PARAMETER Experiment Name: At_Drought_P Parameter: Timepoint (hr) Value: 24
  misc_feature: MA Experiment 20000437 PARAMETER Experiment Name: At_Drought_P Parameter: Tissue Value: Whole Plant
  misc_feature: MA Experiment 20000437 PARAMETER Experiment Name: At_Drought_P Parameter: Treatment Value: Drought vs. No Drought
  misc_feature: MA Experiment ID: 20000439 Result: Down-regulated in Transcription
  misc_feature: MA Experiment 20000439 PARAMETER Experiment Name: At_Roots__P Parameter: Age (day) Value: 14 vs. 21
  misc_feature: MA Experiment 20000439 PARAMETER Experiment Name: At_Roots__P Parameter: Organism Value: A. thaliana
  misc_feature: MA Experiment 20000439 PARAMETER Experiment Name: At_Roots__P Parameter: Tissue Value: Roots vs. Whole Plant
agtaatttagaaacaaattgatcccttaaccttcttcaccaacatctctcttacactcaacaagagatcatatcatgtcctctccaagagaaagaggaaagagtttgatggaatcatcaggatcagagccaccggtgacaccaagccgttacgagtcgcagaagagacgtgactggaacactttcggacagtacttgaagaatcagagaccgcctgtgccgatgtctcactgcagctgtaaccacgtgcttgatttcctcaggtacttagaccagttcggtaagacaaaggtgcacgtgcctggctgtatgttctacggccagcctgagccaccagctccttgcacgtgccctctcagacaagcttggggaagtcttgacgctttgatcggacggctgagagcggcttacgaggagaacggtggacctccggagactaaccctttcgctagcggagcgataagggtttatctgagggaggttagggagtgtcaggctaaggctagagggattccttacaagaagaagaagaagaagaagccaacgccggagatgggaggtgggagagaggactcttcttcctcctcctcttccttcagcttctcttaagagattctccatcgtcgtgaaagactttgtgaacttggcaggatcagtaagtctcaaagagggatcaaatgtaaaagagacctcaaatctatctactggtatcttcaacatatctttcgggaccatttttgcagctcttcgtcccctcctcttcatttccgcagatctccgtcgtcataaatatcttcatctattctcttattaagctctattcatatttattctcttattaagcacttttcttttgaataaagtaagtgtaaagagtttatatattg

SEQ ID NO: 108494 - protein, 177 aa, Arabidopsis thaliana; identical to SEQ ID NO: 106285
  peptide (1)..(177): Ceres Seq. ID no. 13667715
  misc_feature (7)..(139): Pfam Name: Protein of unknown function (DUF640) Pfam Description: Protein of unknown function (DUF640)
  misc_feature (1)..(177): Homolog of NCBI NO: 18406012 NR Description: expressed protein [Arabidopsis thaliana]
  misc_feature (14)..(173): Homolog of NCBI NO: 34907938 NR Description: B1088C09.17 [Oryza sativa (japonica
  misc_feature (17)..(173): Homolog of NCBI NO: 18390725 NR Description: expressed protein [Arabidopsis thaliana]
  misc_feature (14)..(174): Homolog of NCBI NO: 18402578 NR Description: expressed protein [Arabidopsis thaliana]
  misc_feature (8)..(172): Homolog of NCBI NO: 37535384 NR Description: hypothetical protein [Oryza sativa (japonica group)] >gi|10140752|gb|AAG13584.1| hypothetical protein [Oryza >gi|31432676|gb|AAP54281.1| hypothetical protein [Oryza sativa
  misc_feature (1)..(175): Homolog of NCBI NO: 21592379 NR Description: unknown [Arabidopsis thaliana]
  misc_feature (14)..(168): Homolog of NCBI NO: 38344650 NR Description: OSJNBb0072M01.12 [Oryza sativa (japonica
  misc_feature (2)..(175): Homolog of NCBI NO: 18412120 NR Description: expressed protein [Arabidopsis thaliana]
  misc_feature (1)..(177): Homolog of NCBI NO: 15233942 NR Description: expressed protein [Arabidopsis thaliana]
  misc_feature (8)..(173): Homolog of NCBI NO: 15237680 NR Description: hypothetical protein [Arabidopsis thaliana] gb|AAC63835.1~gene_id:MQJ2.11~similar to unknown protein

SEQ ID NO: 108495 - protein, 166 aa, Arabidopsis thaliana; identical to SEQ ID NO: 106286
  peptide (1)..(166): Ceres Seq. ID no. 13667716
  misc_feature (1)..(128): Pfam Name: Protein of unknown function (DUF640) Pfam Description: Protein of unknown function (DUF640)
  misc_feature (1)..(166): Homolog of NCBI NO: 18406012 NR Description: expressed protein [Arabidopsis thaliana]
  misc_feature (3)..(162): Homolog of NCBI NO: 34907938 NR Description: B1088C09.17 [Oryza sativa (japonica
  misc_feature (6)..(162): Homolog of NCBI NO: 18390725 NR Description: expressed protein [Arabidopsis thaliana]
  misc_feature (3)..(163): Homolog of NCBI NO: 18402578 NR Description: expressed protein [Arabidopsis thaliana]
  misc_feature (1)..(161): Homolog of NCBI NO: 37535384 NR Description: hypothetical protein [Oryza sativa (japonica group)] >gi|10140752|gb|AAG13584.1| hypothetical protein [Oryza >gi|31432676|gb|AAP54281.1| hypothetical protein [Oryza sativa
  misc_feature (1)..(164): Homolog of NCBI NO: 21592379 NR Description: unknown [Arabidopsis thaliana]
  misc_feature (3)..(157): Homolog of NCBI NO: 38344650 NR Description: OSJNBb0072M01.12 [Oryza sativa (japonica
  misc_feature (1)..(164): Homolog of NCBI NO: 18412120 NR Description: expressed protein [Arabidopsis thaliana]
  misc_feature (1)..(166): Homolog of NCBI NO: 15233942 NR Description: expressed protein [Arabidopsis thaliana]
  misc_feature (1)..(162): Homolog of NCBI NO: 15237680 NR Description: hypothetical protein [Arabidopsis thaliana] gb|AAC63835.1~gene_id:MQJ2.11~similar to unknown protein

SEQ ID NO: 108496 - protein, 128 aa, Arabidopsis thaliana; identical to SEQ ID NO: 106287
  peptide (1)..(128): Ceres Seq. ID no. 13667717
  misc_feature (1)..(90): Pfam Name: Protein of unknown function (DUF640) Pfam Description: Protein of unknown function (DUF640)
  misc_feature (1)..(128): Homolog of NCBI NO: 18406012 NR Description: expressed protein [Arabidopsis thaliana]
  misc_feature (1)..(124): Homolog of NCBI NO: 34907938 NR Description: B1088C09.17 [Oryza sativa (japonica
  misc_feature (1)..(124): Homolog of NCBI NO: 18390725 NR Description: expressed protein [Arabidopsis thaliana]
  misc_feature (1)..(125): Homolog of NCBI NO: 18402578 NR Description: expressed protein [Arabidopsis thaliana]
  misc_feature (1)..(123): Homolog of NCBI NO: 37535384 NR Description: hypothetical protein [Oryza sativa (japonica group)] >gi|10140752|gb|AAG13584.1| hypothetical protein [Oryza >gi|31432676|gb|AAP54281.1| hypothetical protein [Oryza sativa
  misc_feature (1)..(126): Homolog of NCBI NO: 21592379 NR Description: unknown [Arabidopsis thaliana]
  misc_feature (1)..(119): Homolog of NCBI NO: 38344650 NR Description: OSJNBb0072M01.12 [Oryza sativa (japonica
  misc_feature (1)..(126): Homolog of NCBI NO: 18412120 NR Description: expressed protein [Arabidopsis thaliana]
  misc_feature (1)..(128): Homolog of NCBI NO: 15233942 NR Description: expressed protein [Arabidopsis thaliana]
  misc_feature (1)..(124): Homolog of NCBI NO: 15237680 NR Description: hypothetical protein [Arabidopsis thaliana] gb|AAC63835.1~gene_id:MQJ2.11~similar to unknown protein

SEQ ID NO: 108497 - DNA, 661 bp, Arabidopsis thaliana
  misc_feature (1)..(661): Ceres Seq. ID no. 13667733
  misc_feature: MA Experiment ID: 20000171 Result: Up-regulated in Transcription
  misc_feature: MA Experiment 20000171 PARAMETER Experiment Name: At_42deg_Heat_P Parameter: Age (day) Value: 14
  misc_feature: MA Experiment 20000171 PARAMETER Experiment Name: At_42deg_Heat_P Parameter: Organism Value: A. thaliana
  misc_feature: MA Experiment 20000171 PARAMETER Experiment Name: At_42deg_Heat_P Parameter: Plant Line Value: WS
  misc_feature: MA Experiment 20000171 PARAMETER Experiment Name: At_42deg_Heat_P Parameter: Temperature (deg C) Value: 42 vs. 22
  misc_feature: MA Experiment 20000171 PARAMETER Experiment Name: At_42deg_Heat_P Parameter: Timepoint (hr) Value: 1
  misc_feature: MA Experiment 20000171 PARAMETER Experiment Name: At_42deg_Heat_P Parameter: Tissue Value: Aerial
  misc_feature: MA Experiment ID: 20000173 Result: Up-regulated in Transcription
  misc_feature: MA Experiment 20000173 PARAMETER Experiment Name: At_42deg_Heat_P Parameter: Age (day) Value: 14
  misc_feature: MA Experiment 20000173 PARAMETER Experiment Name: At_42deg_Heat_P Parameter: Organism Value: A. thaliana
  misc_feature: MA Experiment 20000173 PARAMETER Experiment Name: At_42deg_Heat_P Parameter: Plant Line Value: WS
  misc_feature: MA Experiment 20000173 PARAMETER Experiment Name: At_42deg_Heat_P Parameter: Temperature (deg C) Value: 42 vs. 22
  misc_feature: MA Experiment 20000173 PARAMETER Experiment Name: At_42deg_Heat_P Parameter: Timepoint (hr) Value: 6
  misc_feature: MA Experiment 20000173 PARAMETER Experiment Name: At_42deg_Heat_P Parameter: Tissue Value: Aerial
  misc_feature: MA Experiment ID: 20000214 Result: Down-regulated in Transcription
  misc_feature: MA Experiment 20000214 PARAMETER Experiment Name: At_4deg_Cold_P Parameter: Timepoint (hr) Value: 6
  misc_feature: MA Experiment ID: 20000794 Result: Up-regulated in Transcription
  misc_feature: MA Experiment 20000794 PARAMETER Experiment Name: At_Petals_P Parameter: Age (day) Value: 23-25 days
  misc_feature: MA Experiment 20000794 PARAMETER Experiment Name: At_Petals_P Parameter: Plant Line Value: WS
  misc_feature: MA Experiment 20000794 PARAMETER Experiment Name: At_Petals_P Parameter: Tissue Value: Petals vs. Whole plant
  misc_feature: MA Experiment ID: 20001554 Result: Up-regulated in Transcription
  misc_feature: MA Experiment 20001554 PARAMETER Experiment Name: At_Drought_Soil_Dry_P Parameter: Age (day) Value: 21
  misc_feature: MA Experiment 20001554 PARAMETER Experiment Name: At_Drought_Soil_Dry_P Parameter: Organism Value: A. thaliana
  misc_feature: MA Experiment 20001554 PARAMETER Experiment Name: At_Drought_Soil_Dry_P Parameter: Plant Line Value: WS
  misc_feature: MA Experiment 20001554 PARAMETER Experiment Name: At_Drought_Soil_Dry_P Parameter: Post Timepoint (hr) Value: None
  misc_feature: MA Experiment 20001554 PARAMETER Experiment Name: At_Drought_Soil_Dry_P Parameter: Post-Treatment Value: None
  misc_feature: MA Experiment 20001554 PARAMETER Experiment Name: At_Drought_Soil_Dry_P Parameter: Timepoint (day) Value: 7
  misc_feature: MA Experiment 20001554 PARAMETER Experiment Name: At_Drought_Soil_Dry_P Parameter: Treatment Value: Drought vs. No Drought
  misc_feature: MA Experiment ID: 20001555 Result: Up-regulated in Transcription
  misc_feature: MA Experiment 20001555 PARAMETER Experiment Name: At_Drought_Soil_Dry_P Parameter: Age (day) Value: 24
  misc_feature: MA Experiment 20001555 PARAMETER Experiment Name: At_Drought_Soil_Dry_P Parameter: Organism Value: A. thaliana
  misc_feature: MA Experiment 20001555 PARAMETER Experiment Name: At_Drought_Soil_Dry_P Parameter: Plant Line Value: WS
  misc_feature: MA Experiment 20001555 PARAMETER Experiment Name: At_Drought_Soil_Dry_P Parameter: Post Timepoint (hr) Value: None
  misc_feature: MA Experiment 20001555 PARAMETER Experiment Name: At_Drought_Soil_Dry_P Parameter: Post-Treatment Value: None
  misc_feature: MA Experiment 20001555 PARAMETER Experiment Name: At_Drought_Soil_Dry_P Parameter: Timepoint (day) Value: 10
  misc_feature: MA Experiment 20001555 PARAMETER Experiment Name: At_Drought_Soil_Dry_P Parameter: Treatment Value: Drought vs. No Drought
ccacgcgtccgctttcatttgtctcctttcgtcaactccacagagatctcctcatggctccaattgctgtcggcgatgtcgtaccagacggaactatctccttcttcgatgagaatgatcaacttcagaccgcctccgttcactctctcgccgccggtaaaaaagtcattctctttggtgttcctggtgctttcactcccacttgcagcatgaagcatgttcctgggttcattgagaaagcagaggagctgaagtcaaagggtgttgatgagatcatttgctttagcgtgaacgatccgtttgtgatgaaagcatggggaaaaacatacccagagaacaaacatgtgaagtttgtagctgatgggtctggagaatacacacaccttctcggacttgagcttgaccttaaagacaagggtcttggtgttaggtcaaggagatttgctctgttacttgatgatctcaaagtgactgtagccaatgtcgaatctggtggcgaattcacagtttccagcgccgatgatatcctcaaggctctctaagaaatgtaccacttgtgttgtctatgtaaaccgctgtatgtgtagtagaggattctatagcttgttctcagacattaaccaaggttgtaataaagcggtttcattgtgacttgtttggc

SEQ ID NO: 108498 - protein, 179 aa, Arabidopsis thaliana
  peptide (1)..(179): Ceres Seq. ID no. 13667734
  misc_feature (23)..(177): Pfam Name: AhpC/TSA family Pfam Description: AhpC/TSA family
  misc_feature (18)..(179): Homolog of NCBI NO: 15218877 NR Description: type 2 peroxiredoxin -related [Arabidopsis
  misc_feature (18)..(179): Homolog of NCBI NO: 4928472 NR Description: type 2 peroxiredoxin [Brassica rapa subsp.
  misc_feature (18)..(179): Homolog of NCBI NO: 21593881 NR Description: type 2 peroxiredoxin, putative [Arabidopsis
  misc_feature (18)..(179): Homolog of NCBI NO: 15218876 NR Description: type 2 peroxiredoxin -related [Arabidopsis
  misc_feature (18)..(179): Homolog of NCBI NO: 18406870 NR Description: peroxiredoxin -related [Arabidopsis thaliana]
  misc_feature (18)..(179): Homolog of NCBI NO: 4704732 NR Description: peroxiredoxin TPx2 [Arabidopsis thaliana]
  misc_feature (18)..(179): Homolog of NCBI NO: 21553913 NR Description: peroxiredoxin, putative [Arabidopsis thaliana]
  misc_feature (18)..(179): Homolog of NCBI NO: 30841938 NR Description: thioredoxin peroxidase 1 [Lycopersicon esculentum]
  misc_feature (18)..(179): Homolog of NCBI NO: 18654477 NR Description: thioredoxin peroxidase [Capsicum annuum]
  misc_feature (18)..(179): Homolog of NCBI NO: 19548660 NR Description: peroxiredoxin [Populus tremula x Populus
TRPLSFVSFRQLHRDLLMAPIAVGDVVPDGTISFFDENDQLQTASVHSLAAGKKVILFGVPGAFTPTCSMKHVPGFIEKAEELKSKGVDEIICFSVNDPFVMKAWGKTYPENKHVKFVADGSGEYTHLLGLELDLKDKGLGVRSRRFALLLDDLKVTVANVESGGEFTVSSADDILKAL

SEQ ID NO: 108499 - protein, 162 aa, Arabidopsis thaliana; identical to SEQ ID NO: 81388
  peptide (1)..(162): Ceres Seq. ID no. 13667735
  misc_feature (6)..(160): Pfam Name: AhpC/TSA family Pfam Description: AhpC/TSA family
  misc_feature (1)..(162): Homolog of NCBI NO: 15218877 NR Description: type 2 peroxiredoxin -related [Arabidopsis
  misc_feature (1)..(162): Homolog of NCBI NO: 4928472 NR Description: type 2 peroxiredoxin [Brassica rapa subsp.
  misc_feature (1)..(162): Homolog of NCBI NO: 21593881 NR Description: type 2 peroxiredoxin, putative [Arabidopsis
  misc_feature (1)..(162): Homolog of NCBI NO: 15218876 NR Description: type 2 peroxiredoxin -related [Arabidopsis
  misc_feature (1)..(162): Homolog of NCBI NO: 18406870 NR Description: peroxiredoxin -related [Arabidopsis thaliana]
  misc_feature (1)..(162): Homolog of NCBI NO: 4704732 NR Description: peroxiredoxin TPx2 [Arabidopsis thaliana]
  misc_feature (1)..(162): Homolog of NCBI NO: 21553913 NR Description: peroxiredoxin, putative [Arabidopsis thaliana]
  misc_feature (1)..(162): Homolog of NCBI NO: 30841938 NR Description: thioredoxin peroxidase 1 [Lycopersicon esculentum]
  misc_feature (1)..(162): Homolog of NCBI NO: 18654477 NR Description: thioredoxin peroxidase [Capsicum annuum]
  misc_feature (1)..(162): Homolog of NCBI NO: 19548660 NR Description: peroxiredoxin [Populus tremula x Populus

SEQ ID NO: 108500 - protein, 110 aa, Arabidopsis thaliana; identical to SEQ ID NO: 81389
  peptide (1)..(110): Ceres Seq. ID no. 13667736
  misc_feature (1)..(108): Pfam Name: AhpC/TSA family Pfam Description: AhpC/TSA family
  misc_feature (1)..(110): Homolog of NCBI NO: 15218877 NR Description: type 2 peroxiredoxin -related [Arabidopsis
  misc_feature (1)..(110): Homolog of NCBI NO: 4928472 NR Description: type 2 peroxiredoxin [Brassica rapa subsp.
  misc_feature (1)..(110): Homolog of NCBI NO: 21593881 NR Description: type 2 peroxiredoxin, putative [Arabidopsis
  misc_feature (1)..(110): Homolog of NCBI NO: 15218876 NR Description: type 2 peroxiredoxin -related [Arabidopsis
  misc_feature (1)..(110): Homolog of NCBI NO: 18406870 NR Description: peroxiredoxin -related [Arabidopsis thaliana]
  misc_feature (1)..(110): Homolog of NCBI NO: 4704732 NR Description: peroxiredoxin TPx2 [Arabidopsis thaliana]
  misc_feature (1)..(110): Homolog of NCBI NO: 21553913 NR Description: peroxiredoxin, putative [Arabidopsis thaliana]
  misc_feature (1)..(110): Homolog of NCBI NO: 30841938 NR Description: thioredoxin peroxidase 1 [Lycopersicon esculentum]
  misc_feature (1)..(110): Homolog of NCBI NO: 18654477 NR Description: thioredoxin peroxidase [Capsicum annuum]
  misc_feature (1)..(110): Homolog of NCBI NO: 19548660 NR Description: peroxiredoxin [Populus tremula x Populus

SEQ ID NO: 108501 - DNA, 1690 bp, Arabidopsis thaliana
  misc_feature (1)..(1690): Ceres Seq. ID no. 13667745
  misc_feature: MA Experiment ID: 20000315 Result: Down-regulated in Transcription
  misc_feature: MA Experiment 20000315 PARAMETER Experiment Name: At_14day_Shoots-Roots_Sub_P Parameter: Age (day) Value: 14
  misc_feature: MA Experiment 20000315 PARAMETER Experiment Name: At_14day_Shoots-Roots_Sub_P Parameter: Organism Value: A. thaliana
  misc_feature: MA Experiment 20000315 PARAMETER Experiment Name: At_14day_Shoots-Roots_Sub_P Parameter: Plant Line Value: WS
  misc_feature: MA Experiment 20000315 PARAMETER Experiment Name: At_14day_Shoots-Roots_Sub_P Parameter: Tissue Value: Shoots vs. Whole Plant
  misc_feature: MA Experiment ID: 20000347 Result: Up-regulated in Transcription
  misc_feature: MA Experiment 20000347 PARAMETER Experiment Name: At_2mM_SA_Sub_P Parameter: Age (day) Value: 14
  misc_feature: MA Experiment 20000347 PARAMETER Experiment Name: At_2mM_SA_Sub_P Parameter: Organism Value: A. thaliana
  misc_feature: MA Experiment 20000347 PARAMETER Experiment Name: At_2mM_SA_Sub_P Parameter: Plant Line Value: WS
  misc_feature: MA Experiment 20000347 PARAMETER Experiment Name: At_2mM_SA_Sub_P Parameter: Timepoint (hr) Value: 6
  misc_feature: MA Experiment 20000347 PARAMETER Experiment Name: At_2mM_SA_Sub_P Parameter: Tissue Value: Aerial
  misc_feature: MA Experiment 20000347 PARAMETER Experiment Name: At_2mM_SA_Sub_P Parameter: Treatment Value: 2mM SA vs. No Treatment
  misc_feature: MA Experiment ID: 20000355 Result: Up-regulated in Transcription
  misc_feature: MA Experiment 20000355 PARAMETER Experiment Name: At_Siliques_Sub_P Parameter: Age (day) Value: 21
  misc_feature: MA Experiment 20000355 PARAMETER Experiment Name: At_Siliques_Sub_P Parameter: Organism Value: A. thaliana
  misc_feature: MA Experiment 20000355 PARAMETER Experiment Name: At_Siliques_Sub_P Parameter: Plant Line Value: WS
  misc_feature: MA Experiment 20000355 PARAMETER Experiment Name: At_Siliques_Sub_P Parameter: Tissue Value: Less Than 5mm Siliques vs. Whole Plant
  misc_feature: MA Experiment ID: 20000440 Result: Up-regulated in Transcription
  misc_feature: MA Experiment 20000440 PARAMETER Experiment Name: At_Closed-Flower__Sub_P Parameter: Tissue Value: Closed Flower vs. Whole Plant
ctagtcagggttcttctctatctctctcgccaaagaatcgtacttcttctctcaggttttaaggagatgggatctggtcaatggcacgttgagaaaaggtctacgtttaggaatgattcgtttgtgagagaatatggtatagttccagaaactggttgtctttcaatcatagttcttggtgcttctggtgatcttgctaagaagaagacttttcctgctctttttaacttataccgtcagggatttctcaatccagatgaagttcatattttcgggtatgcgaggactaagatttctgatgaagagctgagagataggattcgtggatatcttgttgatgagaagaatgctgagcaagctgaagctttgtcaaagtttctgcagctgattaagtatgtgagtggcccttatgatgctgaggaggggttccagagattagacaaggcaatttcagagcacgaaatctccaaaaatagtactgaagggtcttctagaagactgttttatcttgcacttccaccgtctgtttatccttctgtatgcaagatgatcaagacgtgctgcatgaacaaatctgatcttggtggatggacacggattgttgtggagaagccatttggcaaggaccttgaatctgcagagcaactgagttctcagattggagagttatttgatgaatcacagatctatcgtatagaccattatcttgggaaggaattagttcaaaacatgttggtcctccggtttgcaaatcgctttttcttgccactttggaaccgtgacaatatcgagaacgtgcagattgttttcagggaagattttggaactgaagggcgtggcggatattttgacgaatatggaataatccgtgatattattcaaaaccatctgctacaggttctttgccttgttgccatggagaaaccaatatctcttaaacctgagcatatccgggatgagaaagtgaaggtgcttcaatctgtggttccgataagcgatgacgaggtagttcttggacaatacgaaggatatagggatgatgatactgttccaaacgactcaaacactccaacatttgccacaacaatccttcgcatacacaacgaaagatgggaaggtgttccatttatattaaaggccggaaaatcgttgaattcaaggaaggcagaaattcgcattcaattcaaggatgtcccaggcgacatattcagatgtcaaaagcaaggaaggaacgagtttgtgatacgcttgcaaccttcagaggcaatgtacatgaaactaactgttaagcaaccaggtctagatatgaatactgtgcaaagtgaactagacttgtcgtatgggcaacggtatcaaggtgtcgctatccctgaggcatacgagcgcttaattcttgacacaatcaaaggcgatcaacaacatttcgttcgtagagacgaattaaaggttgcgtgggagatcttcacgccgctactccacaggatcgacaaaggagaagtaaagtcaatcccatacaaaccaggaagccgaggaccgaaagaagctgatcagctactagagaaagctggttatcttcagactcacggctatatctggatccctcctacactataaaaccctacatatatataaatacacaatacatgtatctacatgtatatgtataaaaatttatgctgaatagtccctc

SEQ ID NO: 108502 - protein, 537 aa, Arabidopsis thaliana
  peptide (1)..(537): Ceres Seq. ID no. 13667746
  misc_feature (49)..(243): Pfam Name: Glucose-6-phosphate dehydrogenase, NAD binding domain Pfam Description: Glucose-6-phosphate dehydrogenase, NAD binding
  misc_feature (23)..(537): Homolog of NCBI NO: 25283727 NR Description: glucose-6-phosphate 1-dehydrogenase (EC 1.1.1.49)
  misc_feature (23)..(537): Homolog of NCBI NO: 15237485 NR Description: glucose-6-phosphate dehydrogenase [Arabidopsis
  misc_feature (23)..(537): Homolog of NCBI NO: 15232132 NR Description: glucose-6-phosphate 1-dehydrogenase -related
  misc_feature (23)..(537): Homolog of NCBI NO: 25283728 NR Description: glucose-6-phosphate 1-dehydrogenase (EC 1.1.1.49)
  misc_feature (23)..(537): Homolog of NCBI NO: 18086470 NR Description: AT3g27300/K17E12_12 [Arabidopsis thaliana]
  misc_feature (25)..(537): Homolog of NCBI NO: 585165 NR Description: Glucose-6-phosphate 1-dehydrogenase, cytoplasmic
  misc_feature (25)..(537): Homolog of NCBI NO: 3021508 NR Description: glucose-6-phosphate dehydrogenase [Nicotiana
  misc_feature (25)..(537): Homolog of NCBI NO: 3021510 NR Description: glucose-6-phosphate dehydrogenase [Nicotiana
  misc_feature (23)..(537): Homolog of NCBI NO: 3023815 NR Description: Glucose-6-phosphate 1-dehydrogenase, cytoplasmic
  misc_feature (25)..(537): Homolog of NCBI NO: 7431269 NR Description: glucose-6-phosphate 1-dehydrogenase (EC 1.1.1.49)
LVRVLLYLSRQRIVLLLSGFKEMGSGQWHVEKRSTFRNDSFVREYGIVPETGCLSIIVLGASGDLAKKKTFPALFNLYRQGFLNPDEVHIFGYARTKISDEELRDRIRGYLVDEKNAEQAEALSKFLQLIKYVSGPYDAEEGFQRLDKAISEHEISKNSTEGSSRRLFYLALPPSVYPSVCKMIKTCCMNKSDLGGWTRIVVEKPFGKDLESAEQLSSQIGELFDESQIYRIDHYLGKELVQNMLVLRFANRFFLPLWNRDNIENVQIVFREDFGTEGRGGYFDEYGIIRDIIQNHLLQVLCLVAMEKPISLKPEHIRDEKVKVLQSVVPISDDEVVLGQYEGYRDDDTVPNDSNTPTFATTILRIHNERWEGVPFILKAGKSLNSRKAEIRIQFKDVPGDIFRCQKQGRNEFVIRLQPSEAMYMKLTVKQPGLDMNTVQSELDLSYGQRYQGVAIPEAYERLILDTIKGDQQHFVRRDELKVAWEIFTPLLHRIDKGEVKSIPYKPGSRGPKEADQLLEKAGYLQTHGYIWIPPTL

SEQ ID NO: 108503 - protein, 515 aa, Arabidopsis thaliana
  peptide (1)..(515): Ceres Seq. ID no. 13667747
  misc_feature (27)..(221): Pfam Name: Glucose-6-phosphate dehydrogenase, NAD binding domain Pfam Description: Glucose-6-phosphate dehydrogenase, NAD binding
  misc_feature (1)..(515): Homolog of NCBI NO: 25283727 NR Description: glucose-6-phosphate 1-dehydrogenase (EC 1.1.1.49)
  misc_feature (1)..(515): Homolog of NCBI NO: 15237485 NR Description: glucose-6-phosphate dehydrogenase [Arabidopsis
  misc_feature (1)..(515): Homolog of NCBI NO: 15232132 NR Description: glucose-6-phosphate 1-dehydrogenase -related
  misc_feature (1)..(515): Homolog of NCBI NO: 25283728 NR Description: glucose-6-phosphate 1-dehydrogenase (EC 1.1.1.49)
  misc_feature (1)..(515): Homolog of NCBI NO: 18086470 NR Description: AT3g27300/K17E12_12 [Arabidopsis thaliana]
  misc_feature (3)..(515): Homolog of NCBI NO: 585165 NR Description: Glucose-6-phosphate 1-dehydrogenase, cytoplasmic
  misc_feature (3)..(515): Homolog of NCBI NO: 3021508 NR Description: glucose-6-phosphate dehydrogenase [Nicotiana
  misc_feature (3)..(515): Homolog of NCBI NO: 3021510 NR Description: glucose-6-phosphate dehydrogenase [Nicotiana
  misc_feature (1)..(515): Homolog of NCBI NO: 3023815 NR Description: Glucose-6-phosphate 1-dehydrogenase, cytoplasmic
  misc_feature (3)..(515): Homolog of NCBI NO: 7431269 NR Description: glucose-6-phosphate 1-dehydrogenase (EC 1.1.1.49)
MGSGQWHVEKRSTFRNDSFVREYGIVPETGCLSIIVLGASGDLAKKKTFPALFNLYRQGFLNPDEVHIFGYARTKISDEELRDRIRGYLVDEKNAEQAEALSKFLQLIKYVSGPYDAEEGFQRLDKAISEHEISKNSTEGSSRRLFYLALPPSVYPSVCKMIKTCCMNKSDLGGWTRIVVEKPFGKDLESAEQLSSQIGELFDESQIYRIDHYLGKELVQNMLVLRFANRFFLPLWNRDNIENVQIVFREDFGTEGRGGYFDEYGIIRDIIQNHLLQVLCLVAMEKPISLKPEHIRDEKVKVLQSVVPISDDEVVLGQYEGYRDDDTVPNDSNTPTFATTILRIHNERWEGVPFILKAGKSLNSRKAEIRIQFKDVPGDIFRCQKQGRNEFVIRLQPSEAMYMKLTVKQPGLDMNTVQSELDLSYGQRYQGVAIPEAYERLILDTIKGDQQHFVRRDELKVAWEIFTPLLHRIDKGEVKSIPYKPGSRGPKEADQLLEKAGYLQTHGYIWIPPTL

SEQ ID NO: 108504 - protein, 355 aa, Arabidopsis thaliana
  peptide (1)..(355): Ceres Seq. ID no. 13667748
  misc_feature (1)..(61): Pfam Name: Glucose-6-phosphate dehydrogenase, NAD binding domain Pfam Description: Glucose-6-phosphate dehydrogenase, NAD binding
  misc_feature (1)..(355): Homolog of NCBI NO: 25283727 NR Description: glucose-6-phosphate 1-dehydrogenase (EC 1.1.1.49)
  misc_feature (1)..(355): Homolog of NCBI NO: 15237485 NR Description: glucose-6-phosphate dehydrogenase [Arabidopsis
  misc_feature (1)..(355): Homolog of NCBI NO: 15232132 NR Description: glucose-6-phosphate 1-dehydrogenase -related
  misc_feature (1)..(355): Homolog of NCBI NO: 25283728 NR Description: glucose-6-phosphate 1-dehydrogenase (EC 1.1.1.49)
  misc_feature (1)..(355): Homolog of NCBI NO: 18086470 NR Description: AT3g27300/K17E12_12 [Arabidopsis thaliana]
  misc_feature (1)..(355): Homolog of NCBI NO: 585165 NR Description: Glucose-6-phosphate 1-dehydrogenase, cytoplasmic
  misc_feature (1)..(355): Homolog of NCBI NO: 3021508 NR Description: glucose-6-phosphate dehydrogenase [Nicotiana
  misc_feature (1)..(355): Homolog of NCBI NO: 3021510 NR Description: glucose-6-phosphate dehydrogenase [Nicotiana
  misc_feature (1)..(355): Homolog of NCBI NO: 3023815 NR Description: Glucose-6-phosphate 1-dehydrogenase, cytoplasmic
  misc_feature (1)..(355): Homolog of NCBI NO: 7431269 NR Description: glucose-6-phosphate 1-dehydrogenase (EC 1.1.1.49)
MIKTCCMNKSDLGGWTRIVVEKPFGKDLESAEQLSSQIGELFDESQIYRIDHYLGKELVQNMLVLRFANRFFLPLWNRDNIENVQIVFREDFGTEGRGGYFDEYGIIRDIIQNHLLQVLCLVAMEKPISLKPEHIRDEKVKVLQSVVPISDDEVVLGQYEGYRDDDTVPNDSNTPTFATTILRIHNERWEGVPFILKAGKSLNSRKAEIRIQFKDVPGDIFRCQKQGRNEFVIRLQPSEAMYMKLTVKQPGLDMNTVQSELDLSYGQRYQGVAIPEAYERLILDTIKGDQQHFVRRDELKVAWEIFTPLLHRIDKGEVKSIPYKPGSRGPKEADQLLEKAGYLQTHGYIWIPPTL

SEQ ID NO: 108505 - DNA, 1839 bp, Arabidopsis thaliana
  misc_feature (1)..(1839): Ceres Seq. ID no. 13667749
  misc_feature: MA Experiment ID: 108434 Result: Down-regulated in Transcription
  misc_feature: MA Experiment 108434 PARAMETER Experiment Name: At_Root_Tips_cDNA_P Parameter: Tissue Value: Root Tips
  misc_feature: MA Experiment ID: 108577 Result: Down-regulated in Transcription
  misc_feature: MA Experiment 108577 PARAMETER Experiment Name: At_42deg_Heat_cDNA_P Parameter: Temperature (deg C) Value: 42 vs. 22
  misc_feature: MA Experiment 108577 PARAMETER Experiment Name: At_42deg_Heat_cDNA_P Parameter: Timepoint (hr) Value: 6
  misc_feature: MA Experiment 108577 PARAMETER Experiment Name: At_42deg_Heat_cDNA_P Parameter: Tissue Value: Aerial
  misc_feature: MA Experiment ID: 20000070 Result: Up-regulated in Transcription
  misc_feature: MA Experiment 20000070 PARAMETER Experiment Name: At_100uM_ABA_Mutants_cDNA_P Parameter: Plant Line Value: CS24
  misc_feature: MA Experiment 20000070 PARAMETER Experiment Name: At_100uM_ABA_Mutants_cDNA_P Parameter: Timepoint (hr) Value: 6
  misc_feature: MA Experiment 20000070 PARAMETER Experiment Name: At_100uM_ABA_Mutants_cDNA_P Parameter: Tissue Value: Aerial
  misc_feature: MA Experiment 20000070 PARAMETER Experiment Name: At_100uM_ABA_Mutants_cDNA_P Parameter: Treatment Value: 100uM ABA vs. No Treatment
  misc_feature: MA Experiment ID: 20000086 Result: Up-regulated in Transcription
  misc_feature: MA Experiment 20000086 PARAMETER Experiment Name: At_100uM_ABA_Mutants_cDNA_P Parameter: Plant Line Value: CS22
  misc_feature: MA Experiment 20000086 PARAMETER Experiment Name: At_100uM_ABA_Mutants_cDNA_P Parameter: Timepoint (hr) Value: 6
  misc_feature: MA Experiment 20000086 PARAMETER Experiment Name: At_100uM_ABA_Mutants_cDNA_P Parameter: Tissue Value: Aerial
  misc_feature: MA Experiment 20000086 PARAMETER Experiment Name: At_100uM_ABA_Mutants_cDNA_P Parameter: Treatment Value: 100uM ABA vs. No Treatment
  misc_feature: MA Experiment ID: 20000089 Result: Up-regulated in Transcription
  misc_feature: MA Experiment ID: 20000117 Result: Up-regulated in Transcription
  misc_feature: MA Experiment 20000117 PARAMETER Experiment Name: At_100uM_ABA_Mutants_cDNA_P Parameter: Plant Line Value: Columbia
  misc_feature: MA Experiment 20000117 PARAMETER Experiment Name: At_100uM_ABA_Mutants_cDNA_P Parameter: Timepoint (hr) Value: 6
  misc_feature: MA Experiment 20000117 PARAMETER Experiment Name: At_100uM_ABA_Mutants_cDNA_P Parameter: Tissue Value: Aerial
  misc_feature: MA Experiment 20000117 PARAMETER Experiment Name: At_100uM_ABA_Mutants_cDNA_P Parameter: Treatment Value: 100uM ABA vs. No Treatment
  misc_feature: MA Experiment ID: 20001247 Result: Down-regulated in Transcription
  misc_feature: MA Experiment 20001247 PARAMETER Experiment Name: At_Far-red-induction_P Parameter: Age (day) Value: 7
  misc_feature: MA Experiment 20001247 PARAMETER Experiment Name: At_Far-red-induction_P Parameter: Light Value: Far-red vs. White
  misc_feature: MA Experiment 20001247 PARAMETER Experiment Name: At_Far-red-induction_P Parameter: Organism Value: A. thaliana
  misc_feature: MA Experiment 20001247 PARAMETER Experiment Name: At_Far-red-induction_P Parameter: Plant Line Value: Columbia
  misc_feature: MA Experiment 20001247 PARAMETER Experiment Name: At_Far-red-induction_P Parameter: Timepoint (hr) Value: 1
  misc_feature: MA Experiment 20001247 PARAMETER Experiment Name: At_Far-red-induction_P Parameter: Tissue Value: Whole Plant
ctacgtcagggtttggttagagtgttaaaaaactattggaagatgggttctggtcaatggcatatggagaagaggtctactttaaagaatgattcgtttgtaaaagaatacaatccaatcacggaaactgggagtctctctatcattgttcttggtgcttctggtgatcttgctaagaagaagacttttcctgcacttttcaatctatttcatcagggatttcttaatccagatgaagttcatatatttggatatgcaaggagtaagattactgatgaggagcttagagataaaatccgcggatatcttgttgatgagaagaatgcatctaagaaaacagaagctttgtccaagtttctaaagctgattaagtatgtgagtggaccttatgattctgaggaagggtttaagagattagacaaggcgattttggagcacgagatatctaaaaagactgctgaaggatcttcgaggagattgttttatcttgcacttcctccgtctgtataccctcctgtaagcaagatgatcaaggcatggtgcactaacaaatctgatcttggtggatggactaggattgttgttgagaaaccatttggaaaggatttggaatctgcagagcagctgagttctcagattggagccttgtttgaagaaccacagatttatcgtattgatcactatctgggaaaagagttagttcaaaacatgttggttcttcggtttgccaatcgcttgtttttgccactatggaaccgcgacaatattgcaaacgtacagatcgttttcagagaagattttggaactgaaggtcgcggtggatattttgatgaatacggaatcattcgtgatattattcaaaaccacttgctccaggttctttgccttgtcgccatggagaaaccaatctctcttaaacccgagcacatccgggatgagaaagtgaaggttcttcaatctgtgattcccataaaagatgaagaggtggttcttggacaatatgaaggatatagagatgatccaactgttccaaatgactcaaacactccaacgtttgccacaacaattcttcgcattaacaatgaaagatgggaaggtgttccttttatactgaaggccggaaaggcaatgagttcaaagaaggcagatattcgcattcagtttaaagatgttcctggcgacatattcaaatgtcaaaaccaagggaggaacgagtttgttatacgcttgcagccttcagaggccatgtacatgaagctaactgtgaagcaaccgggtctggagatgcaaaccgtgcagagtgaactagacctatcgtacaagcagcgttaccaagatgtctcaattccagaggcttacgaacgccttattcttgacacaatcagaggcgaccaacaacactttgttcgcagagacgaattaaaggcagcttgggaaatcttcactccactgcttcacaggatcgacaagggagaagtgaaatcggtcccatacaaacaaggtagccgtggcccagcggaagcagatcagctacttaagaaagctggttatatgcagactcatggctacatttggatccctcctacattgtaaatggtataatcatagagatgatgatgatgagtacacacaaaataagagggttttttttcttttttttccttgcttgctgaataaaaactcttcaccagtttggagtttgtttaagtgaatcttatgtatactagtgatcttcactaggacattgtttgtttatgccttgtagtttttgttgtactagtcccttgttttctttttttacataatgcaaaacagctttgtggaaaagctaattaaatt

SEQ ID NO: 108506 - protein, 530 aa, Arabidopsis thaliana
  peptide (1)..(530): Ceres Seq. ID no. 13667750
  misc_feature (238)..(522): Pfam Name: Glucose-6-phosphate dehydrogenase, C-terminal domain Pfam Description: Glucose-6-phosphate dehydrogenase, C-terminal
  misc_feature (15)..(530): Homolog of NCBI NO: 25283728 NR Description: glucose-6-phosphate 1-dehydrogenase (EC 1.1.1.49)
  misc_feature (15)..(530): Homolog of NCBI NO: 15232132 NR Description: glucose-6-phosphate 1-dehydrogenase -related
  misc_feature (15)..(530): Homolog of NCBI NO: 18086470 NR Description: AT3g27300/K17E12_12 [Arabidopsis thaliana]
  misc_feature (15)..(530): Homolog of NCBI NO: 15237485 NR Description: glucose-6-phosphate dehydrogenase [Arabidopsis
  misc_feature (15)..(530): Homolog of NCBI NO: 25283727 NR Description: glucose-6-phosphate 1-dehydrogenase (EC 1.1.1.49)
  misc_feature (17)..(530): Homolog of NCBI NO: 585165 NR Description: Glucose-6-phosphate 1-dehydrogenase, cytoplasmic
  misc_feature (15)..(530): Homolog of NCBI NO: 3023815 NR Description: Glucose-6-phosphate 1-dehydrogenase, cytoplasmic
  misc_feature (14)..(530): Homolog of NCBI NO: 7431269 NR Description: glucose-6-phosphate 1-dehydrogenase (EC 1.1.1.49)
  misc_feature (17)..(530): Homolog of NCBI NO: 3021508 NR Description: glucose-6-phosphate dehydrogenase [Nicotiana
  misc_feature (17)..(530): Homolog of NCBI NO: 3021510 NR Description: glucose-6-phosphate dehydrogenase [Nicotiana
LRQGLVRVLKNYWKMGSGQWHMEKRSTLKNDSFVKEYNPITETGSLSIIVLGASGDLAKKKTFPALFNLFHQGFLNPDEVHIFGYARSKITDEELRDKIRGYLVDEKNASKKTEALSKFLKLIKYVSGPYDSEEGFKRLDKAILEHEISKKTAEGSSRRLFYLALPPSVYPPVSKMIKAWCTNKSDLGGWTRIVVEKPFGKDLESAEQLSSQIGALFEEPQIYRIDHYLGKELVQNMLVLRFANRLFLPLWNRDNIANVQIVFREDFGTEGRGGYFDEYGIIRDIIQNHLLQVLCLVAMEKPISLKPEHIRDEKVKVLQSVIPIKDEEVVLGQYEGYRDDPTVPNDSNTPTFATTILRINNERWEGVPFILKAGKAMSSKKADIRIQFKDVPGDIFKCQNQGRNEFVIRLQPSEAMYMKLTVKQPGLEMQTVQSELDLSYKQRYQDVSIPEAYERLILDTIRGDQQHFVRRDELKAAWEIFTPLLHRIDKGEVKSVPYKQGSRGPAEADQLLKKAGYMQTHGYIWIPPTL

SEQ ID NO: 108507 - protein, 516 aa, Arabidopsis thaliana
  peptide (1)..(516): Ceres Seq. ID no. 13667751
  misc_feature (224)..(508): Pfam Name: Glucose-6-phosphate dehydrogenase, C-terminal domain Pfam Description: Glucose-6-phosphate dehydrogenase, C-terminal
  misc_feature (1)..(516): Homolog of NCBI NO: 25283728 NR Description: glucose-6-phosphate 1-dehydrogenase (EC 1.1.1.49)
  misc_feature (1)..(516): Homolog of NCBI NO: 15232132 NR Description: glucose-6-phosphate 1-dehydrogenase -related
  misc_feature (1)..(516): Homolog of NCBI NO: 18086470 NR Description: AT3g27300/K17E12_12 [Arabidopsis thaliana]
  misc_feature (1)..(516): Homolog of NCBI NO: 15237485 NR Description: glucose-6-phosphate dehydrogenase [Arabidopsis
  misc_feature (1)..(516): Homolog of NCBI NO: 25283727 NR Description: glucose-6-phosphate 1-dehydrogenase (EC 1.1.1.49)
  misc_feature (3)..(516): Homolog of NCBI NO: 585165 NR Description: Glucose-6-phosphate 1-dehydrogenase, cytoplasmic
  misc_feature (1)..(516): Homolog of NCBI NO: 3023815 NR Description: Glucose-6-phosphate 1-dehydrogenase, cytoplasmic
  misc_feature (1)..(516): Homolog of NCBI NO: 7431269 NR Description: glucose-6-phosphate 1-dehydrogenase (EC 1.1.1.49)
  misc_feature (3)..(516): Homolog of NCBI NO: 3021508 NR Description: glucose-6-phosphate dehydrogenase [Nicotiana
  misc_feature (3)..(516): Homolog of NCBI NO: 3021510 NR Description: glucose-6-phosphate dehydrogenase [Nicotiana
MGSGQWHMEKRSTLKNDSFVKEYNPITETGSLSIIVLGASGDLAKKKTFPALFNLFHQGFLNPDEVHIFGYARSKITDEELRDKIRGYLVDEKNASKKTEALSKFLKLIKYVSGPYDSEEGFKRLDKAILEHEISKKTAEGSSRRLFYLALPPSVYPPVSKMIKAWCTNKSDLGGWTRIVVEKPFGKDLESAEQLSSQIGALFEEPQIYRIDHYLGKELVQNMLVLRFANRLFLPLWNRDNIANVQIVFREDFGTEGRGGYFDEYGIIRDIIQNHLLQVLCLVAMEKPISLKPEHIRDEKVKVLQSVIPIKDEEVVLGQYEGYRDDPTVPNDSNTPTFATTILRINNERWEGVPFILKAGKAMSSKKADIRIQFKDVPGDIFKCQNQGRNEFVIRLQPSEAMYMKLTVKQPGLEMQTVQSELDLSYKQRYQDVSIPEAYERLILDTIRGDQQHFVRRDELKAAWEIFTPLLHRIDKGEVKSVPYKQGSRGPAEADQLLKKAGYMQTHGYIWIPPTL

SEQ ID NO: 108508 - protein, 509 aa, Arabidopsis thaliana
  peptide (1)..(509): Ceres Seq. ID no. 13667752
  misc_feature (217)..(501): Pfam Name: Glucose-6-phosphate dehydrogenase, C-terminal domain Pfam Description: Glucose-6-phosphate dehydrogenase, C-terminal
  misc_feature (1)..(509): Homolog of NCBI NO: 25283728 NR Description: glucose-6-phosphate 1-dehydrogenase (EC 1.1.1.49)
  misc_feature (1)..(509): Homolog of NCBI NO: 15232132 NR Description: glucose-6-phosphate 1-dehydrogenase -related
  misc_feature (1)..(509): Homolog of NCBI NO: 18086470 NR Description: AT3g27300/K17E12_12 [Arabidopsis thaliana]
  misc_feature (1)..(509): Homolog of NCBI NO: 15237485 NR Description: glucose-6-phosphate dehydrogenase [Arabidopsis
  misc_feature (1)..(509): Homolog of NCBI NO: 25283727 NR Description: glucose-6-phosphate 1-dehydrogenase (EC 1.1.1.49)
  misc_feature (1)..(509): Homolog of NCBI NO: 585165 NR Description: Glucose-6-phosphate 1-dehydrogenase, cytoplasmic
  misc_feature (1)..(509): Homolog of NCBI NO: 3023815 NR Description: Glucose-6-phosphate 1-dehydrogenase, cytoplasmic
  misc_feature (1)..(509): Homolog of NCBI NO: 7431269 NR Description: glucose-6-phosphate 1-dehydrogenase (EC 1.1.1.49)
  misc_feature (1)..(509): Homolog of NCBI NO: 3021508 NR Description: glucose-6-phosphate dehydrogenase [Nicotiana
  misc_feature (1)..(509): Homolog of NCBI NO: 3021510 NR Description: glucose-6-phosphate dehydrogenase [Nicotiana
MEKRSTLKNDSFVKEYNPITETGSLSIIVLGASGDLAKKKTFPALFNLFHQGFLNPDEVHIFGYARSKITDEELRDKIRGYLVDEKNASKKTEALSKFLKLIKYVSGPYDSEEGFKRLDKAILEHEISKKTAEGSSRRLFYLALPPSVYPPVSKMIKAWCTNKSDLGGWTRIVVEKPFGKDLESAEQLSSQIGALFEEPQIYRIDHYLGKELVQNMLVLRFANRLFLPLWNRDNIANVQIVFREDFGTEGRGGYFDEYGIIRDIIQNHLLQVLCLVAMEKPISLKPEHIRDEKVKVLQSVIPIKDEEVVLGQYEGYRDDPTVPNDSNTPTFATTILRINNERWEGVPFILKAGKAMSSKKADIRIQFKDVPGDIFKCQNQGRNEFVIRLQPSEAMYMKLTVKQPGLEMQTVQSELDLSYKQRYQDVSIPEAYERLILDTIRGDQQHFVRRDELKAAWEIFTPLLHRIDKGEVKSVPYKQGSRGPAEADQLLKKAGYMQTHGYIWIPPTL

SEQ ID NO: 108509 - DNA, 829 bp, Arabidopsis thaliana
  misc_feature (1)..(829): Ceres Seq. ID no. 13667753
  misc_feature: MA Experiment ID: 108561 Result: Down-regulated in Transcription
  misc_feature: MA Experiment 108561 PARAMETER Experiment Name: At_100uM_ABA_cDNA_P Parameter: Timepoint (hr) Value: 6
  misc_feature: MA Experiment 108561 PARAMETER Experiment Name: At_100uM_ABA_cDNA_P Parameter: Tissue Value: Aerial
  misc_feature: MA Experiment 108561 PARAMETER Experiment Name: At_100uM_ABA_cDNA_P Parameter: Treatment Value: 100uM ABA vs. No Treatment
  misc_feature: MA Experiment ID: 108572 Result: Down-regulated in Transcription
  misc_feature: MA Experiment 108572 PARAMETER Experiment Name: At_Drought_cDNA_P Parameter: Timepoint (hr) Value: 1
  misc_feature: MA Experiment 108572 PARAMETER Experiment Name: At_Drought_cDNA_P Parameter: Tissue Value: Aerial
  misc_feature: MA Experiment 108572 PARAMETER Experiment Name: At_Drought_cDNA_P Parameter: Treatment Value: Drought vs. No Drought
  misc_feature: MA Experiment ID: 108573 Result: Down-regulated in Transcription
  misc_feature: MA Experiment 108573 PARAMETER Experiment Name: At_Drought_cDNA_P Parameter: Timepoint (hr) Value: 6
  misc_feature: MA Experiment 108573 PARAMETER Experiment Name: At_Drought_cDNA_P Parameter: Tissue Value: Aerial
  misc_feature: MA Experiment 108573 PARAMETER Experiment Name: At_Drought_cDNA_P Parameter: Treatment Value: Drought vs. No Drought
  misc_feature: MA Experiment ID: 108577 Result: Down-regulated in Transcription
  misc_feature: MA Experiment 108577 PARAMETER Experiment Name: At_42deg_Heat_cDNA_P Parameter: Temperature (deg C) Value: 42 vs. 22
  misc_feature: MA Experiment 108577 PARAMETER Experiment Name: At_42deg_Heat_cDNA_P Parameter: Timepoint (hr) Value: 6
  misc_feature: MA Experiment 108577 PARAMETER Experiment Name: At_42deg_Heat_cDNA_P Parameter: Tissue Value: Aerial
  misc_feature: MA Experiment ID: 108595 Result: Down-regulated in Transcription
  misc_feature: MA Experiment 108595 PARAMETER Experiment Name: At_Ler-pi_Ovule_cDNA_P Parameter: Plant Line Value: null
  misc_feature: MA Experiment ID: 20000173 Result: Down-regulated in Transcription
  misc_feature: MA Experiment 20000173 PARAMETER Experiment Name: At_42deg_Heat_P Parameter: Age (day) Value: 14
  misc_feature: MA Experiment 20000173 PARAMETER Experiment Name: At_42deg_Heat_P Parameter: Organism Value: A. thaliana
  misc_feature: MA Experiment 20000173 PARAMETER Experiment Name: At_42deg_Heat_P Parameter: Plant Line Value: WS
  misc_feature: MA Experiment 20000173 PARAMETER Experiment Name: At_42deg_Heat_P Parameter: Temperature (deg C) Value: 42 vs. 22
  misc_feature: MA Experiment 20000173 PARAMETER Experiment Name: At_42deg_Heat_P Parameter: Timepoint (hr) Value: 6
  misc_feature: MA Experiment 20000173 PARAMETER Experiment Name: At_42deg_Heat_P Parameter: Tissue Value: Aerial
  misc_feature: MA Experiment ID: 20000179 Result: Down-regulated in Transcription
  misc_feature: MA Experiment 20000179 PARAMETER Experiment Name: At_Germinating_Seeds_P Parameter: Age (hr) Value: 6 vs. 0
  misc_feature: MA Experiment 20000179 PARAMETER Experiment Name: At_Germinating_Seeds_P Parameter: Tissue Value: Germinating Seeds
  misc_feature: MA Experiment ID: 20000185 Result: Down-regulated in Transcription
  misc_feature: MA Experiment 20000185 PARAMETER Experiment Name: At_Roots__P Parameter: Age (day) Value: 7 vs. 21
  misc_feature: MA Experiment 20000185 PARAMETER Experiment Name: At_Roots__P Parameter: Organism Value: A. thaliana
  misc_feature: MA Experiment 20000185 PARAMETER Experiment Name: At_Roots__P Parameter: Tissue Value: Roots vs. Whole Plant
  misc_feature: MA Experiment ID: 20000264 Result: Down-regulated in Transcription
  misc_feature: MA Experiment 20000264 PARAMETER Experiment Name: At_Open_Flower_P Parameter: Age (day) Value: 21
  misc_feature: MA Experiment 20000264 PARAMETER Experiment Name: At_Open_Flower_P Parameter: Plant Line Value: WS
  misc_feature: MA Experiment 20000264 PARAMETER Experiment Name: At_Open_Flower_P Parameter: Tissue Value: Open Flower vs. Whole Plant
  misc_feature: MA Experiment ID: 20000268 Result: Down-regulated in Transcription
  misc_feature: MA Experiment 20000268 PARAMETER Experiment Name: At_100mM_NaCl__P Parameter: Age (day) Value: 14
  misc_feature: MA Experiment 20000268 PARAMETER Experiment Name: At_100mM_NaCl__P Parameter: Organism Value: A. thaliana
  misc_feature: MA Experiment 20000268 PARAMETER Experiment Name: At_100mM_NaCl__P Parameter: Plant Line Value: WS
  misc_feature: MA Experiment 20000268 PARAMETER Experiment Name: At_100mM_NaCl__P Parameter: Timepoint (hr) Value: 6
  misc_feature: MA Experiment 20000268 PARAMETER Experiment Name: At_100mM_NaCl__P Parameter: Tissue Value: Whole Plant
  misc_feature: MA Experiment 20000268 PARAMETER Experiment Name: At_100mM_NaCl__P Parameter: Treatment Value: 100mM NaCl vs. No Treatment
  misc_feature: MA Experiment ID: 20000286 Result: Down-regulated in Transcription
  misc_feature: MA Experiment 20000286 PARAMETER Experiment Name: At_Open_Flower_P Parameter: Age (day) Value: 21
  misc_feature: MA Experiment 20000286 PARAMETER Experiment Name: At_Open_Flower_P Parameter: Plant Line Value: WS
  misc_feature: MA Experiment 20000286 PARAMETER Experiment Name: At_Open_Flower_P Parameter: Tissue Value: Half Open vs. Whole Plant
  misc_feature: MA Experiment ID: 20000436 Result: Down-regulated in Transcription
  misc_feature: MA Experiment 20000436 PARAMETER Experiment Name: At_Drought_P Parameter: Age (day) Value: 7
  misc_feature: MA Experiment 20000436 PARAMETER Experiment Name: At_Drought_P Parameter: Organism Value: A. thaliana
  misc_feature: MA Experiment 20000436 PARAMETER Experiment Name: At_Drought_P Parameter: Plant Line Value: WS
  misc_feature: MA Experiment 20000436 PARAMETER Experiment Name: At_Drought_P Parameter: Timepoint (hr) Value: 12
  misc_feature: MA Experiment 20000436 PARAMETER Experiment Name: At_Drought_P Parameter: Tissue Value: Whole Plant
  misc_feature: MA Experiment 20000436 PARAMETER Experiment Name: At_Drought_P Parameter: Treatment Value: Drought vs. No Drought
  misc_feature: MA Experiment ID: 20000437 Result: Down-regulated in Transcription
  misc_feature: MA Experiment 20000437 PARAMETER Experiment Name: At_Drought_P Parameter: Age (day) Value: 8
  misc_feature: MA Experiment 20000437 PARAMETER Experiment Name: At_Drought_P Parameter: Organism Value: A. thaliana
  misc_feature: MA Experiment 20000437 PARAMETER Experiment Name: At_Drought_P Parameter: Plant Line Value: WS
  misc_feature: MA Experiment 20000437 PARAMETER Experiment Name: At_Drought_P Parameter: Timepoint (hr) Value: 24
  misc_feature: MA Experiment 20000437 PARAMETER Experiment Name: At_Drought_P Parameter: Tissue Value: Whole Plant
  misc_feature: MA Experiment 20000437 PARAMETER Experiment Name: At_Drought_P Parameter: Treatment Value: Drought vs. No Drought
  misc_feature: MA Experiment ID: 20000439 Result: Down-regulated in Transcription
  misc_feature: MA Experiment 20000439 PARAMETER Experiment Name: At_Roots__P Parameter: Age (day) Value: 14 vs. 21
  misc_feature: MA Experiment 20000439 PARAMETER Experiment Name: At_Roots__P Parameter: Organism Value: A. thaliana
  misc_feature: MA Experiment 20000439 PARAMETER Experiment Name: At_Roots__P Parameter: Tissue Value: Roots vs. Whole Plant
  misc_feature: MA Experiment ID: 20000794 Result: Down-regulated in Transcription
  misc_feature: MA Experiment 20000794 PARAMETER Experiment Name: At_Petals_P Parameter: Age (day) Value: 23-25 days
  misc_feature: MA Experiment 20000794 PARAMETER Experiment Name: At_Petals_P Parameter: Plant Line Value: WS
  misc_feature: MA Experiment 20000794 PARAMETER Experiment Name: At_Petals_P Parameter: Tissue Value: Petals vs. Whole plant
  misc_feature: MA Experiment ID: 20001554 Result: Down-regulated in Transcription
  misc_feature: MA Experiment 20001554 PARAMETER Experiment Name: At_Drought_Soil_Dry_P Parameter: Age (day) Value: 21
  misc_feature: MA Experiment 20001554 PARAMETER Experiment Name: At_Drought_Soil_Dry_P Parameter: Organism Value: A. thaliana
  misc_feature: MA Experiment 20001554 PARAMETER Experiment Name: At_Drought_Soil_Dry_P Parameter: Plant Line Value: WS
  misc_feature: MA Experiment 20001554 PARAMETER Experiment Name: At_Drought_Soil_Dry_P Parameter: Post Timepoint (hr) Value: None
  misc_feature: MA Experiment 20001554 PARAMETER Experiment Name: At_Drought_Soil_Dry_P Parameter: Post-Treatment Value: None
  misc_feature: MA Experiment 20001554 PARAMETER Experiment Name: At_Drought_Soil_Dry_P Parameter: Timepoint (day) Value: 7
  misc_feature: MA Experiment 20001554 PARAMETER Experiment Name: At_Drought_Soil_Dry_P Parameter: Treatment Value: Drought vs. No Drought
  misc_feature: MA Experiment ID: 20001555 Result: Down-regulated in Transcription
  misc_feature: MA Experiment 20001555 PARAMETER Experiment Name: At_Drought_Soil_Dry_P Parameter: Age (day) Value: 24
  misc_feature: MA Experiment 20001555 PARAMETER Experiment Name: At_Drought_Soil_Dry_P Parameter: Organism Value: A. thaliana
  misc_feature: MA Experiment 20001555 PARAMETER Experiment Name: At_Drought_Soil_Dry_P Parameter: Plant Line Value: WS
  misc_feature: MA Experiment 20001555 PARAMETER Experiment Name: At_Drought_Soil_Dry_P Parameter: Post Timepoint (hr) Value: None
  misc_feature: MA Experiment 20001555 PARAMETER Experiment Name: At_Drought_Soil_Dry_P Parameter: Post-Treatment Value: None
  misc_feature: MA Experiment 20001555 PARAMETER Experiment Name: At_Drought_Soil_Dry_P Parameter: Timepoint (day) Value: 10
  misc_feature: MA Experiment 20001555 PARAMETER Experiment Name: At_Drought_Soil_Dry_P Parameter: Treatment Value: Drought vs. No Drought
  misc_feature: MA Experiment ID: 20001556 Result: Down-regulated in Transcription
  misc_feature: MA Experiment 20001556 PARAMETER Experiment Name: At_Drought_Soil_Dry_P Parameter: Age (day) Value: 26
  misc_feature: MA Experiment 20001556 PARAMETER Experiment Name: At_Drought_Soil_Dry_P Parameter: Organism Value: A. thaliana
  misc_feature: MA Experiment 20001556 PARAMETER Experiment Name: At_Drought_Soil_Dry_P Parameter: Plant Line Value: WS
  misc_feature: MA Experiment 20001556 PARAMETER Experiment Name: At_Drought_Soil_Dry_P Parameter: Post Timepoint (hr) Value: None
  misc_feature: MA Experiment 20001556 PARAMETER Experiment Name: At_Drought_Soil_Dry_P Parameter: Post-Treatment Value: None
  misc_feature: MA Experiment 20001556 PARAMETER Experiment Name: At_Drought_Soil_Dry_P Parameter: Timepoint (day) Value: 12
  misc_feature: MA Experiment 20001556 PARAMETER Experiment Name: At_Drought_Soil_Dry_P Parameter: Treatment Value: Drought vs. No Drought
  misc_feature: MA Experiment ID: 20001557 Result: Up-regulated in Transcription
  misc_feature: MA Experiment 20001557 PARAMETER Experiment Name: At_Drought_Soil_Dry_P Parameter: Age (day) Value: 27
  misc_feature: MA Experiment 20001557 PARAMETER Experiment Name: At_Drought_Soil_Dry_P Parameter: Organism Value: A. thaliana
  misc_feature: MA Experiment 20001557 PARAMETER Experiment Name: At_Drought_Soil_Dry_P Parameter: Plant Line Value: WS
  misc_feature: MA Experiment 20001557 PARAMETER Experiment Name: At_Drought_Soil_Dry_P Parameter: Post Timepoint (hr) Value: 3
  misc_feature: MA Experiment 20001557 PARAMETER Experiment Name: At_Drought_Soil_Dry_P Parameter: Post-Treatment Value: Re-Water vs. No Drought
  misc_feature: MA Experiment 20001557 PARAMETER Experiment Name: At_Drought_Soil_Dry_P Parameter: Timepoint (day) Value: 13
  misc_feature: MA Experiment 20001557 PARAMETER Experiment Name: At_Drought_Soil_Dry_P Parameter: Treatment Value: Drought vs. No Drought
  misc_feature: MA Experiment ID: 20001756 Result: Up-regulated in Transcription
  misc_feature: MA Experiment 20001756 PARAMETER Experiment Name: At_50mM_NH4NO3_L-to-H_P Parameter: Timepoint (hr) Value: 4
  misc_feature: MA Experiment 20001756 PARAMETER Experiment Name: At_50mM_NH4NO3_L-to-H_P Parameter: Tissue Value: Leaf
  misc_feature: MA Experiment 20001756 PARAMETER Experiment Name: At_50mM_NH4NO3_L-to-H_P Parameter: Treatment Value: 50mM NH4NO3 vs 100mM Mannitol
  misc_feature: MA Experiment ID: 20001757 Result: Up-regulated in Transcription
  misc_feature: MA Experiment 20001757 PARAMETER Experiment Name: At_50mM_NH4NO3_L-to-H_P Parameter: Timepoint (hr) Value: 6
  misc_feature: MA Experiment 20001757 PARAMETER Experiment Name: At_50mM_NH4NO3_L-to-H_P Parameter: Tissue Value: Leaf
  misc_feature: MA Experiment 20001757 PARAMETER Experiment Name: At_50mM_NH4NO3_L-to-H_P Parameter: Treatment Value: 50mM NH4NO3 vs 100mM Mannitol
  misc_feature: MA Experiment ID: 20001904 Result: Down-regulated in Transcription
  misc_feature: MA Experiment 20001904 PARAMETER Experiment Name: At_Drought_Reproduction_P Parameter: Age (day) Value: 37
  misc_feature: MA Experiment 20001904 PARAMETER Experiment Name: At_Drought_Reproduction_P Parameter: Organism Value: A. thaliana
  misc_feature: MA Experiment 20001904 PARAMETER Experiment Name: At_Drought_Reproduction_P Parameter: Plant Line Value: WS
  misc_feature: MA Experiment 20001904 PARAMETER Experiment Name: At_Drought_Reproduction_P Parameter: Timepoint (day) Value: 7
  misc_feature: MA Experiment 20001904 PARAMETER Experiment Name: At_Drought_Reproduction_P Parameter: Tissue Value: Rosettes
  misc_feature: MA Experiment 20001904 PARAMETER Experiment Name: At_Drought_Reproduction_P Parameter: Treatment Value: Drought vs. No Drought
  misc_feature: MA Experiment ID: 20001906 Result: Down-regulated in Transcription
  misc_feature: MA Experiment 20001906 PARAMETER Experiment Name: At_Drought_Reproduction_P Parameter: Age (day) Value: 35
  misc_feature: MA Experiment 20001906 PARAMETER Experiment Name: At_Drought_Reproduction_P Parameter: Organism Value: A. thaliana
  misc_feature: MA Experiment 20001906 PARAMETER Experiment Name: At_Drought_Reproduction_P Parameter: Plant Line Value: WS
  misc_feature: MA Experiment 20001906 PARAMETER Experiment Name: At_Drought_Reproduction_P Parameter: Timepoint (day) Value: 5
  misc_feature: MA Experiment 20001906 PARAMETER Experiment Name: At_Drought_Reproduction_P Parameter: Tissue Value: Siliques
  misc_feature: MA Experiment 20001906 PARAMETER Experiment Name: At_Drought_Reproduction_P Parameter: Treatment Value: Drought vs. No Drought
agaaaagaaaagtagagtactatcttcctcttaaaccaaccattcaaaatgttgcgtactatcttcctcttatctcttctctttgctctatccaatgcctctgttcaagatttctgtgtcgcaaacctgaaacgcgctgaaacccctgcgggttacccttgcattcgtcccattcatgtcaaagctacagactttgtcttctctggcttaggcactcctggaaacactacaaacatcatcaacgccgctgtcacacccgctttcgcagctcagttcccgggtctgaacggtctaggcctctctacagctagacttgacttagctcctaaaggtgtgatcccaatgcacactcaccctggtgcctctgaggttctctttgtccttactggctccattaccgctgggtttgtctcctcggcaaacgctgtctacgtgcagacactcaaaccaggacaggtcatggttttcccacagggcttgcttcatttccagatcaacgcgggaaaatcctctgcttcagccgttgtcactttcaacagcgctaatccgggtctgcagattctcgacttcgcactctttgctaacagtcttcccactgaactcgtcgtgggtactactttccttgacgccactacagtcaagaagctaaagggtgttcttggaggaactggctaaaaaaagacttaggactactccttgactaaaacaccaaaacctgtttcttcatctttttttctctttaattgattcttgtcttctctgttttgtgtgccttgtaattcttcaaaacctgtcaaaattgttacattgtatgtgagttttttcaatt

SEQ ID NO: 108510 - protein, 208 aa, Arabidopsis thaliana; identical to SEQ ID NO: 23207
  peptide (1)..(208): Ceres Seq. ID no. 13667754
  misc_feature (52)..(198): Pfam Name: Cupin Pfam Description: Cupin
  misc_feature (1)..(208): Homolog of NCBI NO: 15218535 NR Description: germin-like protein (AtGER1) [Arabidopsis
  misc_feature (1)..(208): Homolog of NCBI NO: 17473703 NR Description: germin-like protein [Arabidopsis thaliana]
  misc_feature (1)..(208): Homolog of NCBI NO: 1592672 NR Description: germin1 [Arabidopsis thaliana]
  misc_feature (5)..(208): Homolog of NCBI NO: 1934726 NR Description: germin-like protein [Arabidopsis thaliana]
  misc_feature (1)..(208): Homolog of NCBI NO: 1169941 NR Description: Germin-like protein 1 precursor
  misc_feature (1)..(208): Homolog of NCBI NO: 13277342 NR Description: Germin-like protein [Pisum sativum]
  misc_feature (5)..(207): Homolog of NCBI NO: 18201940 NR Description: Auxin-binding protein ABP20 precursor
  misc_feature (6)..(207): Homolog of NCBI NO: 18203684 NR Description: Auxin-binding protein ABP19a precursor
  misc_feature (3)..(207): Homolog of NCBI NO: 31711507 NR Description: 24K germin like protein [Nicotiana tabacum]
  misc_feature (1)..(207): Homolog of NCBI NO: 15242028 NR Description: germin-like protein (AtGER3) [Arabidopsis

SEQ ID NO: 108511 - protein, 110 aa, Arabidopsis thaliana; identical to SEQ ID NO: 31047
  peptide (1)..(110): Ceres Seq. ID no. 13667755
  misc_feature (1)..(100): Pfam Name: Cupin Pfam Description: Cupin
  misc_feature (1)..(110): Homolog of NCBI NO: 15218535 NR Description: germin-like protein (AtGER1) [Arabidopsis
  misc_feature (1)..(110): Homolog of NCBI NO: 17473703 NR Description: germin-like protein [Arabidopsis thaliana]
  misc_feature (1)..(110): Homolog of NCBI NO: 1592672 NR Description: germin1 [Arabidopsis thaliana]
  misc_feature (1)..(110): Homolog of NCBI NO: 1934726 NR Description: germin-like protein [Arabidopsis thaliana]
  misc_feature (1)..(110): Homolog of NCBI NO: 1169941 NR Description: Germin-like protein 1 precursor
  misc_feature (1)..(110): Homolog of NCBI NO: 13277342 NR Description: Germin-like protein [Pisum sativum]
  misc_feature (1)..(109): Homolog of NCBI NO: 18201940 NR Description: Auxin-binding protein ABP20 precursor
  misc_feature (1)..(109): Homolog of NCBI NO: 18203684 NR Description: Auxin-binding protein ABP19a precursor
  misc_feature (1)..(109): Homolog of NCBI NO: 31711507 NR Description: 24K germin like protein [Nicotiana tabacum]
  misc_feature (1)..(109): Homolog of NCBI NO: 15242028 NR Description: germin-like protein (AtGER3) [Arabidopsis

SEQ ID NO: 108512 - DNA, 1155 bp, Arabidopsis thaliana
  misc_feature (1)..(1155): Ceres Seq. ID no. 13667767
  misc_feature: MA Experiment ID: 108595 Result: Down-regulated in Transcription
  misc_feature: MA Experiment 108595 PARAMETER Experiment Name: At_Ler-pi_Ovule_cDNA_P Parameter: Plant Line Value: null
  misc_feature: MA Experiment ID: 20000184 Result: Down-regulated in Transcription
  misc_feature: MA Experiment 20000184 PARAMETER Experiment Name: At_Shoots__P Parameter: Age (day) Value: 7
  misc_feature: MA Experiment 20000184 PARAMETER Experiment Name: At_Shoots__P Parameter: Tissue Value: Shoots vs. Whole Plant
  misc_feature: MA Experiment ID: 20000185 Result: Down-regulated in Transcription
  misc_feature: MA Experiment 20000185 PARAMETER Experiment Name: At_Roots__P Parameter: Age (day) Value: 7 vs. 21
  misc_feature: MA Experiment 20000185 PARAMETER Experiment Name: At_Roots__P Parameter: Organism Value: A. thaliana
  misc_feature: MA Experiment 20000185 PARAMETER Experiment Name: At_Roots__P Parameter: Tissue Value: Roots vs. Whole Plant
  misc_feature: MA Experiment ID: 20000224 Result: Up-regulated in Transcription
  misc_feature: MA Experiment ID: 20000438 Result: Down-regulated in Transcription
  misc_feature: MA Experiment 20000438 PARAMETER Experiment Name: At_Shoots__P Parameter: Age (day) Value: 14
  misc_feature: MA Experiment 20000438 PARAMETER Experiment Name: At_Shoots__P Parameter: Tissue Value: Shoots vs. Whole Plant
  misc_feature: MA Experiment ID: 20000439 Result: Down-regulated in Transcription
  misc_feature: MA Experiment 20000439 PARAMETER Experiment Name: At_Roots__P Parameter: Age (day) Value: 14 vs. 21
  misc_feature: MA Experiment 20000439 PARAMETER Experiment Name: At_Roots__P Parameter: Organism Value: A. thaliana
  misc_feature: MA Experiment 20000439 PARAMETER Experiment Name: At_Roots__P Parameter: Tissue Value: Roots vs. Whole Plant
  misc_feature: MA Experiment ID: 20001247 Result: Down-regulated in Transcription
  misc_feature: MA Experiment 20001247 PARAMETER Experiment Name: At_Far-red-induction_P Parameter: Age (day) Value: 7
  misc_feature: MA Experiment 20001247 PARAMETER Experiment Name: At_Far-red-induction_P Parameter: Light Value: Far-red vs. White
  misc_feature: MA Experiment 20001247 PARAMETER Experiment Name: At_Far-red-induction_P Parameter: Organism Value: A. thaliana
  misc_feature: MA Experiment 20001247 PARAMETER Experiment Name: At_Far-red-induction_P Parameter: Plant Line Value: Columbia
  misc_feature: MA Experiment 20001247 PARAMETER Experiment Name: At_Far-red-induction_P Parameter: Timepoint (hr) Value: 1
  misc_feature: MA Experiment 20001247 PARAMETER Experiment Name: At_Far-red-induction_P Parameter: Tissue Value: Whole Plant
aaaaaaaaaaaaaaaaaaacatccaacaccaaagacaatggagatgagtttgcgtctcgcttcatcttcaacctcaaacccaatttgtctactaaaccctggaaaaaaccttaatttcccaatccgaaaccatagaatccctaaaacttcgaaacccttttgcgttaggtcttcaatgagcttgtctaaaccacccagacaaaccttatctagtaactgggatgtatctagcttctccattgattccgttgctcaatctccttcaagactcccaagtttcgaagaactcgataccaccaacatgttgctccgtcaaagaatcgtctttttgggttctcaggttgatgatatgacggcggatttggttataagtcagctattgttactagatgctgaggactcagaaagagacattacgctttttatcaattcacccggtggatctattactgctgggatgggaatatatgatgcaatgaaacaatgtaaggcggatgtatctactgtttgcttagggttagctgcatctatgggtgcgtttcttcttgcttctggttcaaaagggaaacggtattgtatgcctaactctaaagttatgatccatcagccacttggtactgctggaggcaaagcaacggaaatgagcatacgtataagagaaatgatgtaccacaagattaaacttaacaaaatcttctctagaatcactgggaagcctgaatcagagatcgaaagtgacacagaccgtgataacttcttgaatccatgggaggcgaaagaatatggtttgatcgacgctgtaatcgatgatgggaaaccgggactaatcgctccaattggagatggtactcctcctcctaaaaccaaagtctgggatctttggaaagtcgaaggaaccaaggaagacaacactaacttgccatctgagcgctccatgacacagaatggttatgccgccattgaatagaactgttgttgcagcgtttacgccttttatatgttattctggtggtacctgtaaccatataacgttgcatttcctgtgtttgtaccatttctctgatagatttttggaataatttgaaggcaaaagatagattattgtgtagagagctacaaatttaatgataaattgatcatcagcactggaaagct

SEQ ID NO: 108513 - protein, 321 aa, Arabidopsis thaliana
  peptide (1)..(321): Ceres Seq. ID no. 13667768
  misc_feature (92)..(271): Pfam Name: Clp protease Pfam Description: Clp protease
  misc_feature (13)..(321): Homolog of NCBI NO: 13899067 NR Description: ATP-dependent Clp protease; nClpP3 [Arabidopsis
  misc_feature (13)..(321): Homolog of NCBI NO: 18408572 NR Description: ATP-dependent Clp protease proteolytic subunit
  misc_feature (17)..(321): Homolog of NCBI NO: 25456012 NR Description: probable ATP-dependent clp proteinase (EC
  misc_feature (13)..(321): Homolog of NCBI NO: 15864561 NR Description: ClpP putative protein [Brassica napus]
  misc_feature (13)..(321): Homolog of NCBI NO: 7657879 NR Description: ClpP [Brassica napus var. napus]
  misc_feature (15)..(321): Homolog of NCBI NO: 6069464 NR Description: S-locus protein 2 [Brassica rapa]
  misc_feature (46)..(321): Homolog of NCBI NO: 17028170 NR Description: ClpP [Brassica oleracea]
  misc_feature (55)..(316): Homolog of NCBI NO: 34914540 NR Description: putative ATP-dependent Clp protease [Oryza sativa
  misc_feature (153)..(316): Homolog of NCBI NO: 21449427 NR Description: ATP-dependent Clp protease [Oryza sativa (indica
  misc_feature (1)..(268): Homolog of NCBI NO: 25019682 NR Description: ClpP2 [Synechococcus sp. PCC 7942]
KKKKKKHPTPKTMEMSLRLASSSTSNPICLLNPGKNLNFPIRNHRIPKTSKPFCVRSSMSLSKPPRQTLSSNWDVSSFSIDSVAQSPSRLPSFEELDTTNMLLRQRIVFLGSQVDDMTADLVISQLLLLDAEDSERDITLFINSPGGSITAGMGIYDAMKQCKADVSTVCLGLAASMGAFLLASGSKGKRYCMPNSKVMIHQPLGTAGGKATEMSIRIREMMYHKIKLNKIFSRITGKPESEIESDTDRDNFLNPWEAKEYGLIDAVIDDGKPGLIAPIGDGTPPPKTKVWDLWKVEGTKEDNTNLPSERSMTQNGYAAIE

SEQ ID NO: 108514 - protein, 309 aa, Arabidopsis thaliana
  peptide (1)..(309): Ceres Seq. ID no. 13667769
  misc_feature (80)..(259): Pfam Name: Clp protease Pfam Description: Clp protease
  misc_feature (1)..(309): Homolog of NCBI NO: 13899067 NR Description: ATP-dependent Clp protease; nClpP3 [Arabidopsis
  misc_feature (1)..(309): Homolog of NCBI NO: 18408572 NR Description: ATP-dependent Clp protease proteolytic subunit
  misc_feature (5)..(309): Homolog of NCBI NO: 25456012 NR Description: probable ATP-dependent clp proteinase (EC
  misc_feature (1)..(309): Homolog of NCBI NO: 15864561 NR Description: ClpP putative protein [Brassica napus]
  misc_feature (1)..(309): Homolog of NCBI NO: 7657879 NR Description: ClpP [Brassica napus var. napus]
  misc_feature (3)..(309): Homolog of NCBI NO: 6069464 NR Description: S-locus protein 2 [Brassica rapa]
  misc_feature (34)..(309): Homolog of NCBI NO: 17028170 NR Description: ClpP [Brassica oleracea]
  misc_feature (43)..(304): Homolog of NCBI NO: 34914540 NR Description: putative ATP-dependent Clp protease [Oryza sativa
  misc_feature (141)..(304): Homolog of NCBI NO: 21449427 NR Description: ATP-dependent Clp protease [Oryza sativa (indica
  misc_feature (1)..(256): Homolog of NCBI NO: 25019682 NR Description: ClpP2 [Synechococcus sp. PCC 7942]
MEMSLRLASSSTSNPICLLNPGKNLNFPIRNHRIPKTSKPFCVRSSMSLSKPPRQTLSSNWDVSSFSIDSVAQSPSRLPSFEELDTTNMLLRQRIVFLGSQVDDMTADLVISQLLLLDAEDSERDITLFINSPGGSITAGMGIYDAMKQCKADVSTVCLGLAASMGAFLLASGSKGKRYCMPNSKVMIHQPLGTAGGKATEMSIRIREMMYHKIKLNKIFSRITGKPESEIESDTDRDNFLNPWEAKEYGLIDAVIDDGKPGLIAPIGDGTPPPKTKVWDLWKVEGTKEDNTNLPSERSMTQNGYAAIE

SEQ ID NO: 108515 - protein, 307 aa, Arabidopsis thaliana
  peptide (1)..(307): Ceres Seq. ID no. 13667770
  misc_feature (78)..(257): Pfam Name: Clp protease Pfam Description: Clp protease
  misc_feature (1)..(307): Homolog of NCBI NO: 13899067 NR Description: ATP-dependent Clp protease; nClpP3 [Arabidopsis
  misc_feature (1)..(307): Homolog of NCBI NO: 18408572 NR Description: ATP-dependent Clp protease proteolytic subunit
  misc_feature (3)..(307): Homolog of NCBI NO: 25456012 NR Description: probable ATP-dependent clp proteinase (EC
  misc_feature (1)..(307): Homolog of NCBI NO: 15864561 NR Description: ClpP putative protein [Brassica napus]
  misc_feature (1)..(307): Homolog of NCBI NO: 7657879 NR Description: ClpP [Brassica napus var. napus]
  misc_feature (1)..(307): Homolog of NCBI NO: 6069464 NR Description: S-locus protein 2 [Brassica rapa]
  misc_feature (32)..(307): Homolog of NCBI NO: 17028170 NR Description: ClpP [Brassica oleracea]
  misc_feature (41)..(302): Homolog of NCBI NO: 34914540 NR Description: putative ATP-dependent Clp protease [Oryza sativa
  misc_feature (139)..(302): Homolog of NCBI NO: 21449427 NR Description: ATP-dependent Clp protease [Oryza sativa (indica
  misc_feature (1)..(254): Homolog of NCBI NO: 25019682 NR Description: ClpP2 [Synechococcus sp. PCC 7942]
MSLRLASSSTSNPICLLNPGKNLNFPIRNHRIPKTSKPFCVRSSMSLSKPPRQTLSSNWDVSSFSIDSVAQSPSRLPSFEELDTTNMLLRQRIVFLGSQVDDMTADLVISQLLLLDAEDSERDITLFINSPGGSITAGMGIYDAMKQCKADVSTVCLGLAASMGAFLLASGSKGKRYCMPNSKVMIHQPLGTAGGKATEMSIRIREMMYHKIKLNKIFSRITGKPESEIESDTDRDNFLNPWEAKEYGLIDAVIDDGKPGLIAPIGDGTPPPKTKVWDLWKVEGTKEDNTNLPSERSMTQNGYAAIE

SEQ ID NO: 108516 - DNA, 1210 bp, Arabidopsis thaliana
  misc_feature (1)..(1210): Ceres Seq. ID no. 13667771
  misc_feature: MA Experiment ID: 108433 Result: Down-regulated in Transcription
  misc_feature: MA Experiment 108433 PARAMETER Experiment Name: At_rhl_Mutant2_cDNA_P Parameter: Age (day) Value: 7
  misc_feature: MA Experiment 108433 PARAMETER Experiment Name: At_rhl_Mutant2_cDNA_P Parameter: Organism Value: A. thaliana
  misc_feature: MA Experiment 108433 PARAMETER Experiment Name: At_rhl_Mutant2_cDNA_P Parameter: Plant Line Value: rhl Mutant vs. wt landsburg
  misc_feature: MA Experiment 108433 PARAMETER Experiment Name: At_rhl_Mutant2_cDNA_P Parameter: Tissue Value: Roots
  misc_feature: MA Experiment ID: 108434 Result: Down-regulated in Transcription
  misc_feature: MA Experiment 108434 PARAMETER Experiment Name: At_Root_Tips_cDNA_P Parameter: Tissue Value: Root Tips
  misc_feature: MA Experiment ID: 108435 Result: Up-regulated in Transcription
  misc_feature: MA Experiment 108435 PARAMETER Experiment Name: At_stm_Mutants_cDNA_P Parameter: Plant Line Value: wt Landsburg vs stm
  misc_feature: MA Experiment 108435 PARAMETER Experiment Name: At_stm_Mutants_cDNA_P Parameter: Tissue Value: Shoot Apical Meristem Region
  misc_feature: MA Experiment ID: 108461 Result: Up-regulated in Transcription
  misc_feature: MA Experiment 108461 PARAMETER Experiment Name: At_Germinating_Seeds_cDNA_P Parameter: Age (day) Value: 1 vs. 0
  misc_feature: MA Experiment 108461 PARAMETER Experiment Name: At_Germinating_Seeds_cDNA_P Parameter: Tissue Value: Germinating Seeds
  misc_feature: MA Experiment ID: 108462 Result: Up-regulated in Transcription
  misc_feature: MA Experiment 108462 PARAMETER Experiment Name: At_Germinating_Seeds_cDNA_P Parameter: Age (day) Value: 2 vs. 0
  misc_feature: MA Experiment 108462 PARAMETER Experiment Name: At_Germinating_Seeds_cDNA_P Parameter: Tissue Value: Germinating Seeds
  misc_feature: MA Experiment ID: 108463 Result: Up-regulated in Transcription
  misc_feature: MA Experiment 108463 PARAMETER Experiment Name: At_Germinating_Seeds_cDNA_P Parameter: Age (day) Value: 3 vs. 0
  misc_feature: MA Experiment 108463 PARAMETER Experiment Name: At_Germinating_Seeds_cDNA_P Parameter: Tissue Value: Germinating Seeds
  misc_feature: MA Experiment ID: 108464 Result: Up-regulated in Transcription
  misc_feature: MA Experiment 108464 PARAMETER Experiment Name: At_Germinating_Seeds_cDNA_P Parameter: Age (day) Value: 4 vs. 0
  misc_feature: MA Experiment 108464 PARAMETER Experiment Name: At_Germinating_Seeds_cDNA_P Parameter: Tissue Value: Germinating Seeds
  misc_feature: MA Experiment ID: 108473 Result: Up-regulated in Transcription
  misc_feature: MA Experiment 108473 PARAMETER Experiment Name: At_Drought_Flowers_cDNA_P Parameter: Timepoint (hr) Value: 7 d
  misc_feature: MA Experiment 108473 PARAMETER Experiment Name: At_Drought_Flowers_cDNA_P Parameter: Tissue Value: Flower
  misc_feature: MA Experiment 108473 PARAMETER Experiment Name: At_Drought_Flowers_cDNA_P Parameter: Treatment Value: Drought vs. No Drought
  misc_feature: MA Experiment ID: 108474 Result: Up-regulated in Transcription
  misc_feature: MA Experiment 108474 PARAMETER Experiment Name: At_Drought_Flowers_cDNA_P Parameter: Timepoint (hr) Value: null
  misc_feature: MA Experiment 108474 PARAMETER Experiment Name: At_Drought_Flowers_cDNA_P Parameter: Treatment Value: Drought vs. No Drought
  misc_feature: MA Experiment ID: 108488 Result: Up-regulated in Transcription
  misc_feature: MA Experiment ID: 108489 Result: Up-regulated in Transcription
  misc_feature: MA Experiment ID: 108501 Result: Up-regulated in Transcription
  misc_feature: MA Experiment 108501 PARAMETER Experiment Name: At_ap2_floral_buds_cDNA_P Parameter: Plant Line Value: ap2 (Ler.)
  misc_feature: MA Experiment 108501 PARAMETER Experiment Name: At_ap2_floral_buds_cDNA_P Parameter: Tissue Value: Closed Flower
  misc_feature: MA Experiment ID: 108561 Result: Up-regulated in Transcription
  misc_feature: MA Experiment 108561 PARAMETER Experiment Name: At_100uM_ABA_cDNA_P Parameter: Timepoint (hr) Value: 6
  misc_feature: MA Experiment 108561 PARAMETER Experiment Name: At_100uM_ABA_cDNA_P Parameter: Tissue Value: Aerial
  misc_feature: MA Experiment 108561 PARAMETER Experiment Name: At_100uM_ABA_cDNA_P Parameter: Treatment Value: 100uM ABA vs. No Treatment
  misc_feature: MA Experiment ID: 108573 Result: Up-regulated in Transcription
  misc_feature: MA Experiment 108573 PARAMETER Experiment Name: At_Drought_cDNA_P Parameter: Timepoint (hr) Value: 6
  misc_feature: MA Experiment 108573 PARAMETER Experiment Name: At_Drought_cDNA_P Parameter: Tissue Value: Aerial
  misc_feature: MA Experiment 108573 PARAMETER Experiment Name: At_Drought_cDNA_P Parameter: Treatment Value: Drought vs. No Drought
  misc_feature: MA Experiment ID: 108594 Result: Down-regulated in Transcription
  misc_feature: MA Experiment 108594 PARAMETER Experiment Name: At_Ler-rhl_Root_cDNA_P Parameter: Plant Line Value: null
  misc_feature: MA Experiment ID: 108605 Result: Up-regulated in Transcription
  misc_feature: MA Experiment 108605 PARAMETER Experiment Name: At_100uM_ABA_cDNA_P Parameter: Timepoint (hr) Value: 6
  misc_feature: MA Experiment 108605 PARAMETER Experiment Name: At_100uM_ABA_cDNA_P Parameter: Tissue Value: Aerial
  misc_feature: MA Experiment 108605 PARAMETER Experiment Name: At_100uM_ABA_cDNA_P Parameter: Treatment Value: 100uM ABA vs. No Treatment
  misc_feature: MA Experiment ID: 108607 Result: Up-regulated in Transcription
  misc_feature: MA Experiment 108607 PARAMETER Experiment Name: At_100uM_ABA_cDNA_P Parameter: Timepoint (hr) Value: 4
  misc_feature: MA Experiment 108607 PARAMETER Experiment Name: At_100uM_ABA_cDNA_P Parameter: Tissue Value: Aerial
  misc_feature: MA Experiment 108607 PARAMETER Experiment Name: At_100uM_ABA_cDNA_P Parameter: Treatment Value: 100uM ABA vs. No Treatment
  misc_feature: MA Experiment ID: 108609 Result: Up-regulated in Transcription
  misc_feature: MA Experiment 108609 PARAMETER Experiment Name: At_100uM_ABA_cDNA_P Parameter: Timepoint (hr) Value: 24
  misc_feature: MA Experiment 108609 PARAMETER Experiment Name: At_100uM_ABA_cDNA_P Parameter: Tissue Value: Aerial
  misc_feature: MA Experiment 108609 PARAMETER Experiment Name: At_100uM_ABA_cDNA_P Parameter: Treatment Value: 100uM ABA vs. No Treatment
  misc_feature: MA Experiment ID: 20000069 Result: Up-regulated in Transcription
  misc_feature: MA Experiment 20000069 PARAMETER Experiment Name: At_100uM_ABA_Mutants_cDNA_P Parameter: Plant Line Value: CS23
  misc_feature: MA Experiment 20000069 PARAMETER Experiment Name: At_100uM_ABA_Mutants_cDNA_P Parameter: Timepoint (hr) Value: 6
  misc_feature: MA Experiment 20000069 PARAMETER Experiment Name: At_100uM_ABA_Mutants_cDNA_P Parameter: Tissue Value: Aerial
  misc_feature: MA Experiment 20000069 PARAMETER Experiment Name: At_100uM_ABA_Mutants_cDNA_P Parameter: Treatment Value: 100uM ABA vs. No Treatment
  misc_feature: MA Experiment ID: 20000070 Result: Up-regulated in Transcription
  misc_feature: MA Experiment 20000070 PARAMETER Experiment Name: At_100uM_ABA_Mutants_cDNA_P Parameter: Plant Line Value: CS24
  misc_feature: MA Experiment 20000070 PARAMETER Experiment Name: At_100uM_ABA_Mutants_cDNA_P Parameter: Timepoint (hr) Value: 6
  misc_feature: MA Experiment 20000070 PARAMETER Experiment Name: At_100uM_ABA_Mutants_cDNA_P Parameter: Tissue Value: Aerial
  misc_feature: MA Experiment 20000070 PARAMETER Experiment Name: At_100uM_ABA_Mutants_cDNA_P Parameter: Treatment Value: 100uM ABA vs. No Treatment
  misc_feature: MA Experiment ID: 20000071 Result: Up-regulated in Transcription
  misc_feature: MA Experiment 20000071 PARAMETER Experiment Name: At_100uM_ABA_Mutants_cDNA_P Parameter: Plant Line Value: CS8104
  misc_feature: MA Experiment 20000071 PARAMETER Experiment Name: At_100uM_ABA_Mutants_cDNA_P Parameter: Timepoint (hr) Value: 6
  misc_feature: MA Experiment 20000071 PARAMETER Experiment Name: At_100uM_ABA_Mutants_cDNA_P Parameter: Tissue Value: Aerial
  misc_feature: MA Experiment 20000071 PARAMETER Experiment Name: At_100uM_ABA_Mutants_cDNA_P Parameter: Treatment Value: 100uM ABA vs. No Treatment
  misc_feature: MA Experiment ID: 20000072 Result: Up-regulated in Transcription
  misc_feature: MA Experiment 20000072 PARAMETER Experiment Name: At_100uM_ABA_Mutants_cDNA_P Parameter: Plant Line Value: CS8105
  misc_feature: MA Experiment 20000072 PARAMETER Experiment Name: At_100uM_ABA_Mutants_cDNA_P Parameter: Timepoint (hr) Value: 6
  misc_feature: MA Experiment 20000072 PARAMETER Experiment Name: At_100uM_ABA_Mutants_cDNA_P Parameter: Tissue Value: Aerial
  misc_feature: MA Experiment 20000072 PARAMETER Experiment Name: At_100uM_ABA_Mutants_cDNA_P Parameter: Treatment Value: 100uM ABA vs. No Treatment
  misc_feature: MA Experiment ID: 20000086 Result: Up-regulated in Transcription
  misc_feature: MA Experiment 20000086 PARAMETER Experiment Name: At_100uM_ABA_Mutants_cDNA_P Parameter: Plant Line Value: CS22
  misc_feature: MA Experiment 20000086 PARAMETER Experiment Name: At_100uM_ABA_Mutants_cDNA_P Parameter: Timepoint (hr) Value: 6
  misc_feature: MA Experiment 20000086 PARAMETER Experiment Name: At_100uM_ABA_Mutants_cDNA_P Parameter: Tissue Value: Aerial
  misc_feature: MA Experiment 20000086 PARAMETER Experiment Name: At_100uM_ABA_Mutants_cDNA_P Parameter: Treatment Value: 100uM ABA vs. No Treatment
  misc_feature: MA Experiment ID: 20000087 Result: Up-regulated in Transcription
  misc_feature: MA Experiment 20000087 PARAMETER Experiment Name: At_100uM_ABA_Mutants_cDNA_P Parameter: Plant Line Value: WS
  misc_feature: MA Experiment 20000087 PARAMETER Experiment Name: At_100uM_ABA_Mutants_cDNA_P Parameter: Timepoint (hr) Value: 6
  misc_feature: MA Experiment 20000087 PARAMETER Experiment Name: At_100uM_ABA_Mutants_cDNA_P Parameter: Tissue Value: Aerial
  misc_feature: MA Experiment 20000087 PARAMETER Experiment Name: At_100uM_ABA_Mutants_cDNA_P Parameter: Treatment Value: 100uM ABA vs. No Treatment
  misc_feature: MA Experiment ID: 20000088 Result: Up-regulated in Transcription
  misc_feature: MA Experiment 20000088 PARAMETER Experiment Name: At_100uM_ABA_Mutants_cDNA_P Parameter: Plant Line Value: Landsberg
  misc_feature: MA Experiment 20000088 PARAMETER Experiment Name: At_100uM_ABA_Mutants_cDNA_P Parameter: Timepoint (hr) Value: 6
  misc_feature: MA Experiment 20000088 PARAMETER Experiment Name: At_100uM_ABA_Mutants_cDNA_P Parameter: Tissue Value: Aerial
  misc_feature: MA Experiment 20000088 PARAMETER Experiment Name: At_100uM_ABA_Mutants_cDNA_P Parameter: Treatment Value: 100uM ABA vs. No Treatment
  misc_feature: MA Experiment ID: 20000090 Result: Up-regulated in Transcription
  misc_feature: MA Experiment ID: 20000117 Result: Up-regulated in Transcription
  misc_feature: MA Experiment 20000117 PARAMETER Experiment Name: At_100uM_ABA_Mutants_cDNA_P Parameter: Plant Line Value: Columbia
  misc_feature: MA Experiment 20000117 PARAMETER Experiment Name: At_100uM_ABA_Mutants_cDNA_P Parameter: Timepoint (hr) Value: 6
  misc_feature: MA Experiment 20000117 PARAMETER Experiment Name: At_100uM_ABA_Mutants_cDNA_P Parameter: Tissue Value: Aerial
  misc_feature: MA Experiment 20000117 PARAMETER Experiment Name: At_100uM_ABA_Mutants_cDNA_P Parameter: Treatment Value: 100uM ABA vs. No Treatment
  misc_feature: MA Experiment ID: 20000169 Result: Up-regulated in Transcription
  misc_feature: MA Experiment 20000169 PARAMETER Experiment Name: At_100uM_ABA_P Parameter: Age (day) Value: 14
  misc_feature: MA Experiment 20000169 PARAMETER Experiment Name: At_100uM_ABA_P Parameter: Organism Value: A. thaliana
  misc_feature: MA Experiment 20000169 PARAMETER Experiment Name: At_100uM_ABA_P Parameter: Plant Line Value: WS
  misc_feature: MA Experiment 20000169 PARAMETER Experiment Name: At_100uM_ABA_P Parameter: Timepoint (hr) Value: 6
  misc_feature: MA Experiment 20000169 PARAMETER Experiment Name: At_100uM_ABA_P Parameter: Tissue Value: Aerial
  misc_feature: MA Experiment 20000169 PARAMETER Experiment Name: At_100uM_ABA_P Parameter: Treatment Value: 100uM ABA vs. No Treatment
  misc_feature: MA Experiment ID: 20000180 Result: Up-regulated in Transcription
  misc_feature: MA Experiment 20000180 PARAMETER Experiment Name: At_Germinating_Seeds_P Parameter: Age (hr) Value: 24 vs. 0
  misc_feature: MA Experiment 20000180 PARAMETER Experiment Name: At_Germinating_Seeds_P Parameter: Tissue Value: Germinating Seeds
  misc_feature: MA Experiment ID: 20000185 Result: Up-regulated in Transcription
  misc_feature: MA Experiment 20000185 PARAMETER Experiment Name: At_Roots__P Parameter: Age (day) Value: 7 vs. 21
  misc_feature: MA Experiment 20000185 PARAMETER Experiment Name: At_Roots__P Parameter: Organism Value: A. thaliana
  misc_feature: MA Experiment 20000185 PARAMETER Experiment Name: At_Roots__P Parameter: Tissue Value: Roots vs. Whole Plant
  misc_feature: MA Experiment ID: 20000234 Result: Down-regulated in Transcription
  misc_feature: MA Experiment 20000234 PARAMETER Experiment Name: At_Siliques_P Parameter: Age (day) Value: 21
  misc_feature: MA Experiment 20000234 PARAMETER Experiment Name: At_Siliques_P Parameter: Organism Value: A. thaliana
  misc_feature: MA Experiment 20000234 PARAMETER Experiment Name: At_Siliques_P Parameter: Plant Line Value: WS
  misc_feature: MA Experiment 20000234 PARAMETER Experiment Name: At_Siliques_P Parameter: Tissue Value: Less Than 5mm Siliques vs. Whole Plant
  misc_feature: MA Experiment ID: 20000264 Result: Down-regulated in Transcription
  misc_feature: MA Experiment 20000264 PARAMETER Experiment Name: At_Open_Flower_P Parameter: Age (day) Value: 21
  misc_feature: MA Experiment 20000264 PARAMETER Experiment Name: At_Open_Flower_P Parameter: Plant Line Value: WS
  misc_feature: MA Experiment 20000264 PARAMETER Experiment Name: At_Open_Flower_P Parameter: Tissue Value: Open Flower vs. Whole Plant
  misc_feature: MA Experiment ID: 20000265 Result: Down-regulated in Transcription
  misc_feature: MA Experiment 20000265 PARAMETER Experiment Name: At_Open_Flower_P Parameter: Age (day) Value: 21
  misc_feature: MA Experiment 20000265 PARAMETER Experiment Name: At_Open_Flower_P Parameter: Plant Line Value: WS
  misc_feature: MA Experiment 20000265 PARAMETER Experiment Name: At_Open_Flower_P Parameter: Tissue Value: Closed Flower vs. Whole Plant
  misc_feature: MA Experiment ID: 20000267 Result: Up-regulated in Transcription
  misc_feature: MA Experiment 20000267 PARAMETER Experiment Name: At_Drought_P Parameter: Age (day) Value: 7
  misc_feature: MA Experiment 20000267 PARAMETER Experiment Name: At_Drought_P Parameter: Organism Value: A. thaliana
  misc_feature: MA Experiment 20000267 PARAMETER Experiment Name: At_Drought_P Parameter: Plant Line Value: WS
  misc_feature: MA Experiment 20000267 PARAMETER Experiment Name: At_Drought_P Parameter: Timepoint (hr) Value: 6
  misc_feature: MA Experiment 20000267 PARAMETER Experiment Name: At_Drought_P Parameter: Tissue Value: Whole Plant
  misc_feature: MA Experiment 20000267 PARAMETER Experiment Name: At_Drought_P Parameter: Treatment Value: Drought vs. No Drought
  misc_feature: MA Experiment ID: 20000268 Result: Up-regulated in Transcription
  misc_feature: MA Experiment 20000268 PARAMETER Experiment Name: At_100mM_NaCl__P Parameter: Age (day) Value: 14
  misc_feature: MA Experiment 20000268 PARAMETER Experiment Name: At_100mM_NaCl__P Parameter: Organism Value: A. thaliana
  misc_feature: MA Experiment 20000268 PARAMETER Experiment Name: At_100mM_NaCl__P Parameter: Plant Line Value: WS
  misc_feature: MA Experiment 20000268 PARAMETER Experiment Name: At_100mM_NaCl__P Parameter: Timepoint (hr) Value: 6
  misc_feature: MA Experiment 20000268 PARAMETER Experiment Name: At_100mM_NaCl__P Parameter: Tissue Value: Whole Plant
  misc_feature: MA Experiment 20000268 PARAMETER Experiment Name: At_100mM_NaCl__P Parameter: Treatment Value: 100mM NaCl vs. No Treatment
  misc_feature: MA Experiment ID: 20000286 Result: Down-regulated in Transcription
  misc_feature: MA Experiment 20000286 PARAMETER Experiment Name: At_Open_Flower_P Parameter: Age (day) Value: 21
  misc_feature: MA Experiment 20000286 PARAMETER Experiment Name: At_Open_Flower_P Parameter: Plant Line Value: WS
  misc_feature: MA Experiment 20000286 PARAMETER Experiment Name: At_Open_Flower_P Parameter: Tissue Value: Half Open vs. Whole Plant
  misc_feature: MA Experiment ID: 20000308 Result: Up-regulated in Transcription
  misc_feature: MA Experiment 20000308 PARAMETER Experiment Name: At_100mM_NaCl__P Parameter: Age (day) Value: 17
  misc_feature: MA Experiment 20000308 PARAMETER Experiment Name: At_100mM_NaCl__P Parameter: Organism Value: A. thaliana
  misc_feature: MA Experiment 20000308 PARAMETER Experiment Name: At_100mM_NaCl__P Parameter: Plant Line Value: WS
  misc_feature: MA Experiment 20000308 PARAMETER Experiment Name: At_100mM_NaCl__P Parameter: Timepoint (hr) Value: 72
  misc_feature: MA Experiment 20000308 PARAMETER Experiment Name: At_100mM_NaCl__P Parameter: Tissue Value: Whole Plant
  misc_feature: MA Experiment 20000308 PARAMETER Experiment Name: At_100mM_NaCl__P Parameter: Treatment Value: 100mM NaCl vs. No Treatment
  misc_feature: MA Experiment ID: 20000437 Result: Up-regulated in Transcription
  misc_feature: MA Experiment 20000437 PARAMETER Experiment Name: At_Drought_P Parameter: Age (day) Value: 8
  misc_feature: MA Experiment 20000437 PARAMETER Experiment Name: At_Drought_P Parameter: Organism Value: A. thaliana
  misc_feature: MA Experiment 20000437 PARAMETER Experiment Name: At_Drought_P Parameter: Plant Line Value: WS
  misc_feature: MA Experiment 20000437 PARAMETER Experiment Name: At_Drought_P Parameter: Timepoint (hr) Value: 24
  misc_feature: MA Experiment 20000437 PARAMETER Experiment Name: At_Drought_P Parameter: Tissue Value: Whole Plant
  misc_feature: MA Experiment 20000437 PARAMETER Experiment Name: At_Drought_P Parameter: Treatment Value: Drought vs. No Drought
  misc_feature: MA Experiment ID: 20000441 Result: Down-regulated in Transcription
  misc_feature: MA Experiment 20000441 PARAMETER Experiment Name: At_1uM_BR-BRZ__P Parameter: Tissue Value: Shoot Apices
  misc_feature: MA Experiment 20000441 PARAMETER Experiment Name: At_1uM_BR-BRZ__P Parameter: Treatment Value: 1uM BR vs. No Treatment
  misc_feature: MA Experiment ID: 20000451 Result: Up-regulated in Transcription
  misc_feature: MA Experiment 20000451 PARAMETER Experiment Name: At_CS6879_Shoots-Roots_P Parameter: Age (day) Value: 14
  misc_feature: MA Experiment 20000451 PARAMETER Experiment Name: At_CS6879_Shoots-Roots_P Parameter: Organism Value: A. thaliana
  misc_feature: MA Experiment 20000451 PARAMETER Experiment Name: At_CS6879_Shoots-Roots_P Parameter: Plant Line Value: CS6879 vs. WS
  misc_feature: MA Experiment 20000451 PARAMETER Experiment Name: At_CS6879_Shoots-Roots_P Parameter: Tissue Value: Roots
  misc_feature: MA Experiment ID: 20000452 Result: Up-regulated in Transcription
  misc_feature: MA Experiment 20000452 PARAMETER Experiment Name: At_CS6879_Shoots-Roots_P Parameter: Age (day) Value: 14
  misc_feature: MA Experiment 20000452 PARAMETER Experiment Name: At_CS6879_Shoots-Roots_P Parameter: Organism Value: A. thaliana
  misc_feature: MA Experiment 20000452 PARAMETER Experiment Name: At_CS6879_Shoots-Roots_P Parameter: Plant Line Value: CS6879 vs. WS
  misc_feature: MA Experiment 20000452 PARAMETER Experiment Name: At_CS6879_Shoots-Roots_P Parameter: Tissue Value: Shoots
  misc_feature: MA Experiment ID: 20000453 Result: Up-regulated in Transcription
  misc_feature: MA Experiment 20000453 PARAMETER Experiment Name: At_100uM_ABA_P Parameter: Age (day) Value: 15
  misc_feature: MA Experiment 20000453 PARAMETER Experiment Name: At_100uM_ABA_P Parameter: Organism Value: A. thaliana
  misc_feature: MA Experiment 20000453 PARAMETER Experiment Name: At_100uM_ABA_P Parameter: Plant Line Value: WS
  misc_feature: MA Experiment 20000453 PARAMETER Experiment Name: At_100uM_ABA_P Parameter: Timepoint (hr) Value: 24
  misc_feature: MA Experiment 20000453 PARAMETER Experiment Name: At_100uM_ABA_P Parameter: Tissue Value: Aerial
  misc_feature: MA Experiment 20000453 PARAMETER Experiment Name: At_100uM_ABA_P Parameter: Treatment Value: 100uM ABA vs. No Treatment
  misc_feature: MA Experiment ID: 20000455 Result: Up-regulated in Transcription
  misc_feature: MA Experiment 20000455 PARAMETER Experiment Name: At_100uM_ABA_P Parameter: Age (day) Value: 16
  misc_feature: MA Experiment 20000455 PARAMETER Experiment Name: At_100uM_ABA_P Parameter: Organism Value: A. thaliana
  misc_feature: MA Experiment 20000455 PARAMETER Experiment Name: At_100uM_ABA_P Parameter: Plant Line Value: WS
  misc_feature: MA Experiment 20000455 PARAMETER Experiment Name: At_100uM_ABA_P Parameter: Timepoint (hr) Value: 48
  misc_feature: MA Experiment 20000455 PARAMETER Experiment Name: At_100uM_ABA_P Parameter: Tissue Value: Aerial
  misc_feature: MA Experiment 20000455 PARAMETER Experiment Name: At_100uM_ABA_P Parameter: Treatment Value: 100uM ABA vs. No Treatment
  misc_feature: MA Experiment ID: 20000794 Result: Down-regulated in Transcription
  misc_feature: MA Experiment 20000794 PARAMETER Experiment Name: At_Petals_P Parameter: Age (day) Value: 23-25 days
  misc_feature: MA Experiment 20000794 PARAMETER Experiment Name: At_Petals_P Parameter: Plant Line Value: WS
  misc_feature: MA Experiment 20000794 PARAMETER Experiment Name: At_Petals_P Parameter: Tissue Value: Petals vs. Whole plant
  misc_feature: MA Experiment ID: 20001554 Result: Up-regulated in Transcription
  misc_feature: MA Experiment 20001554 PARAMETER Experiment Name: At_Drought_Soil_Dry_P Parameter: Age (day) Value: 21
  misc_feature: MA Experiment 20001554 PARAMETER Experiment Name: At_Drought_Soil_Dry_P Parameter: Organism Value: A. thaliana
  misc_feature: MA Experiment 20001554 PARAMETER Experiment Name: At_Drought_Soil_Dry_P Parameter: Plant Line Value: WS
  misc_feature: MA Experiment 20001554 PARAMETER Experiment Name: At_Drought_Soil_Dry_P Parameter: Post Timepoint (hr) Value: None
  misc_feature: MA Experiment 20001554 PARAMETER Experiment Name: At_Drought_Soil_Dry_P Parameter: Post-Treatment Value: None
  misc_feature: MA Experiment 20001554 PARAMETER Experiment Name: At_Drought_Soil_Dry_P Parameter: Timepoint (day) Value: 7
  misc_feature: MA Experiment 20001554 PARAMETER Experiment Name: At_Drought_Soil_Dry_P Parameter: Treatment Value: Drought vs. No Drought
  misc_feature: MA Experiment ID: 20001555 Result: Up-regulated in Transcription
  misc_feature: MA Experiment 20001555 PARAMETER Experiment Name: At_Drought_Soil_Dry_P Parameter: Age (day) Value: 24
  misc_feature: MA Experiment 20001555 PARAMETER Experiment Name: At_Drought_Soil_Dry_P Parameter: Organism Value: A. thaliana
  misc_feature: MA Experiment 20001555 PARAMETER Experiment Name: At_Drought_Soil_Dry_P Parameter: Plant Line Value: WS
  misc_feature: MA Experiment 20001555 PARAMETER Experiment Name: At_Drought_Soil_Dry_P Parameter: Post Timepoint (hr) Value: None
  misc_feature: MA Experiment 20001555 PARAMETER Experiment Name: At_Drought_Soil_Dry_P Parameter: Post-Treatment Value: None
  misc_feature: MA Experiment 20001555 PARAMETER Experiment Name: At_Drought_Soil_Dry_P Parameter: Timepoint (day) Value: 10
  misc_feature: MA Experiment 20001555 PARAMETER Experiment Name: At_Drought_Soil_Dry_P Parameter: Treatment Value: Drought vs. No Drought
  misc_feature: MA Experiment ID: 20001556 Result: Up-regulated in Transcription
  misc_feature: MA Experiment 20001556 PARAMETER Experiment Name: At_Drought_Soil_Dry_P Parameter: Age (day) Value: 26
  misc_feature: MA Experiment 20001556 PARAMETER Experiment Name: At_Drought_Soil_Dry_P Parameter: Organism Value: A. thaliana
  misc_feature: MA Experiment 20001556 PARAMETER Experiment Name: At_Drought_Soil_Dry_P Parameter: Plant Line Value: WS
  misc_feature: MA Experiment 20001556 PARAMETER Experiment Name: At_Drought_Soil_Dry_P Parameter: Post Timepoint (hr) Value: None
  misc_feature: MA Experiment 20001556 PARAMETER Experiment Name: At_Drought_Soil_Dry_P Parameter: Post-Treatment Value: None
  misc_feature: MA Experiment 20001556 PARAMETER Experiment Name: At_Drought_Soil_Dry_P Parameter: Timepoint (day) Value: 12
  misc_feature: MA Experiment 20001556 PARAMETER Experiment Name: At_Drought_Soil_Dry_P Parameter: Treatment Value: Drought vs. No Drought
  misc_feature: MA Experiment ID: 20001559 Result: Up-regulated in Transcription
  misc_feature: MA Experiment 20001559 PARAMETER Experiment Name: At_Drought_Soil_Dry_P Parameter: Age (day) Value: 28
  misc_feature: MA Experiment 20001559 PARAMETER Experiment Name: At_Drought_Soil_Dry_P Parameter: Organism Value: A. thaliana
  misc_feature: MA Experiment 20001559 PARAMETER Experiment Name: At_Drought_Soil_Dry_P Parameter: Plant Line Value: WS
  misc_feature: MA Experiment 20001559 PARAMETER Experiment Name: At_Drought_Soil_Dry_P Parameter: Post Timepoint (hr) Value: 29
  misc_feature: MA Experiment 20001559 PARAMETER Experiment Name: At_Drought_Soil_Dry_P Parameter: Post-Treatment Value: Re-Water vs. No Drought
  misc_feature: MA Experiment 20001559 PARAMETER Experiment Name: At_Drought_Soil_Dry_P Parameter: Timepoint (day) Value: 14
  misc_feature: MA Experiment 20001559 PARAMETER Experiment Name: At_Drought_Soil_Dry_P Parameter: Treatment Value: Drought vs. No Drought
  misc_feature: MA Experiment ID: 20001904 Result: Up-regulated in Transcription
  misc_feature: MA Experiment 20001904 PARAMETER Experiment Name: At_Drought_Reproduction_P Parameter: Age (day) Value: 37
  misc_feature: MA Experiment 20001904 PARAMETER Experiment Name: At_Drought_Reproduction_P Parameter: Organism Value: A. thaliana
  misc_feature: MA Experiment 20001904 PARAMETER Experiment Name: At_Drought_Reproduction_P Parameter: Plant Line Value: WS
  misc_feature: MA Experiment 20001904 PARAMETER Experiment Name: At_Drought_Reproduction_P Parameter: Timepoint (day) Value: 7
  misc_feature: MA Experiment 20001904 PARAMETER Experiment Name: At_Drought_Reproduction_P Parameter: Tissue Value: Rosettes
  misc_feature: MA Experiment 20001904 PARAMETER Experiment Name: At_Drought_Reproduction_P Parameter: Treatment Value: Drought vs. No Drought
  misc_feature: MA Experiment ID: 20001905 Result: Up-regulated in Transcription
  misc_feature: MA Experiment 20001905 PARAMETER Experiment Name: At_Drought_Reproduction_P Parameter: Age (day) Value: 40
  misc_feature: MA Experiment 20001905 PARAMETER Experiment Name: At_Drought_Reproduction_P Parameter: Organism Value: A. thaliana
  misc_feature: MA Experiment 20001905 PARAMETER Experiment Name: At_Drought_Reproduction_P Parameter: Plant Line Value: WS
  misc_feature: MA Experiment 20001905 PARAMETER Experiment Name: At_Drought_Reproduction_P Parameter: Timepoint (day) Value: 10
  misc_feature: MA Experiment 20001905 PARAMETER Experiment Name: At_Drought_Reproduction_P Parameter: Tissue Value: Rosettes
  misc_feature: MA Experiment 20001905 PARAMETER Experiment Name: At_Drought_Reproduction_P Parameter: Treatment Value: Drought vs. No Drought
  misc_feature: MA Experiment ID: 20001906 Result: Up-regulated in Transcription
  misc_feature: MA Experiment 20001906 PARAMETER Experiment Name: At_Drought_Reproduction_P Parameter: Age (day) Value: 35
  misc_feature: MA Experiment 20001906 PARAMETER Experiment Name: At_Drought_Reproduction_P Parameter: Organism Value: A. thaliana
  misc_feature: MA Experiment 20001906 PARAMETER Experiment Name: At_Drought_Reproduction_P Parameter: Plant Line Value: WS
  misc_feature: MA Experiment 20001906 PARAMETER Experiment Name: At_Drought_Reproduction_P Parameter: Timepoint (day) Value: 5
  misc_feature: MA Experiment 20001906 PARAMETER Experiment Name: At_Drought_Reproduction_P Parameter: Tissue Value: Siliques
  misc_feature: MA Experiment 20001906 PARAMETER Experiment Name: At_Drought_Reproduction_P Parameter: Treatment Value: Drought vs. No Drought
  misc_feature: MA Experiment ID: 20001910 Result: Up-regulated in Transcription
  misc_feature: MA Experiment 20001910 PARAMETER Experiment Name: At_Drought_Reproduction_P Parameter: Age (day) Value: 37
  misc_feature: MA Experiment 20001910 PARAMETER Experiment Name: At_Drought_Reproduction_P Parameter: Organism Value: A. thaliana
  misc_feature: MA Experiment 20001910 PARAMETER Experiment Name: At_Drought_Reproduction_P Parameter: Plant Line Value: WS
  misc_feature: MA Experiment 20001910 PARAMETER Experiment Name: At_Drought_Reproduction_P Parameter: Timepoint (day) Value: 7
  misc_feature: MA Experiment 20001910 PARAMETER Experiment Name: At_Drought_Reproduction_P Parameter: Tissue Value: Flowers
  misc_feature: MA Experiment 20001910 PARAMETER Experiment Name: At_Drought_Reproduction_P Parameter: Treatment Value: Drought vs. No Drought
  misc_feature: MA Experiment ID: 20001911 Result: Up-regulated in Transcription
  misc_feature: MA Experiment 20001911 PARAMETER Experiment Name: At_Drought_Reproduction_P Parameter: Age (day) Value: 40
  misc_feature: MA Experiment 20001911 PARAMETER Experiment Name: At_Drought_Reproduction_P Parameter: Organism Value: A. thaliana
  misc_feature: MA Experiment 20001911 PARAMETER Experiment Name: At_Drought_Reproduction_P Parameter: Plant Line Value: WS
  misc_feature: MA Experiment 20001911 PARAMETER Experiment Name: At_Drought_Reproduction_P Parameter: Timepoint (day) Value: 10
  misc_feature: MA Experiment 20001911 PARAMETER Experiment Name: At_Drought_Reproduction_P Parameter: Tissue Value: Flowers
  misc_feature: MA Experiment 20001911 PARAMETER Experiment Name: At_Drought_Reproduction_P Parameter: Treatment Value: Drought vs. No Drought
ccacgcgtccgaaacactaaaagtagaagaaaaatggcgactcttaaggtttctgattctgttcctgctccttctgatgatgctgagcaattgagaaccgcttttgaaggatggggtacgaacgaggacttgatcatatcaatcttggctcacagaagtgctgaacagaggaaagtcatcaggcaagcataccacgaaacctacggcgaagaccttctcaagactcttgacaaggagctctctaacgatttcgagagagctatcttgttgtggactcttgaacccggtgagcgtgatgctttattggctaatgaagctacaaaaagatggacttcaagcaaccaagttcttatggaagttgcttgcacaaggacatcaacgcagctgcttcacgctaggcaagcttaccatgctcgctacaagaagtctcttgaagaggacgttgctcaccacactaccggtgacttcagaaagcttttggtttctcttgttacctcatacaggtacgaaggagatgaagtgaacatgacattggctaagcaagaagctaagctggtccatgagaaaatcaaggacaagcactacaatgatgaggatgttattagaatcttgtccacaagaagcaaagctcagatcaatgctacttttaaccgttaccaagatgatcatggcgaggaaattctcaagagtcttgaggaaggagatgatgatgacaagttgccttgcacttttgaggtcaaccattcagtgcttgacaagaccagagctttactttgtcgatgttcttcgttcagcaatcaacaaaactggaactgatgaaggagcactcactagaattgtgaccacaagagctgagattgacttgaaggtcattggagaggagtaccagcgcaggaacagcattcctttggagaaagctattaccaaagacactcgtggagattacgagaagatgctcgtcgcacttctcggtgaagatgatgcttaatcaatcaatcctccacagagaaacataagctgctctacagcttctgttatctcttatctccctctctctctctttgatgagtttcaaatcgtttgattttgtttctacaaaaaccttgtttgtttctgttgtgtgttttgagttcctaaataatgcaaaagagagagacagagagaaccagtgtggtctcttaagttatatatatatgaagagcattggcct

SEQ ID NO: 108517 - protein, 271 aa, Arabidopsis thaliana
  peptide (1)..(271): Ceres Seq. ID no. 13667772
  misc_feature (24)..(91): Pfam Name: Annexin Pfam Description: Annexin
  misc_feature (12)..(243): Homolog of NCBI NO: 1621539 NR Description: annexin-like protein
  misc_feature (12)..(239): Homolog of NCBI NO: 15220216 NR Description: Ca2+-dependent membrane-binding protein annexin
  misc_feature (14)..(239): Homolog of NCBI NO: 1429207 NR Description: annexin [Arabidopsis thaliana]
  misc_feature (12)..(240): Homolog of NCBI NO: 7484723 NR Description: fiber annexin - upland cotton
  misc_feature (13)..(240): Homolog of NCBI NO: 15214410 NR Description: annexin [Gossypium hirsutum]
  misc_feature (13)..(240): Homolog of NCBI NO: 33357398 NR Description: Chain A, Annexin Gh1 From Cotton
  misc_feature (12)..(240): Homolog of NCBI NO: 2459926 NR Description: annexin [Lavatera thuringiaca]
  misc_feature (13)..(240): Homolog of NCBI NO: 7441510 NR Description: annexin - upland cotton (fragment)
  misc_feature (12)..(236): Homolog of NCBI NO: 2129923 NR Description: annexin - pepper >gi|1071660|emb|CAA63710.1|
  misc_feature (12)..(236): Homolog of NCBI NO: 12084607 NR Description: Chain A, Crystal Structure Of Annexin 24(Ca32) Capsicum Annuum >gi|12084608|pdb|1DK5|B Chain B, Crystal
PRVRNTKSRRKMATLKVSDSVPAPSDDAEQLRTAFEGWGTNEDLIISILAHRSAEQRKVIRQAYHETYGEDLLKTLDKELSNDFERAILLWTLEPGERDALLANEATKRWTSSNQVLMEVACTRTSTQLLHARQAYHARYKKSLEEDVAHHTTGDFRKLLVSLVTSYRYEGDEVNMTLAKQEAKLVHEKIKDKHYNDEDVIRILSTRSKAQINATFNRYQDDHGEEILKSLEEGDDDDKLPCTFEVNHSVLDKTRALLCRCSSFSNQQNWN

SEQ ID NO: 108518 - protein, 260 aa, Arabidopsis thaliana
  peptide (1)..(260): Ceres Seq. ID no. 13667773
  misc_feature (13)..(80): Pfam Name: Annexin Pfam Description: Annexin
  misc_feature (1)..(232): Homolog of NCBI NO: 1621539 NR Description: annexin-like protein
  misc_feature (1)..(228): Homolog of NCBI NO: 15220216 NR Description: Ca2+-dependent membrane-binding protein annexin
  misc_feature (3)..(228): Homolog of NCBI NO: 1429207 NR Description: annexin [Arabidopsis thaliana]
  misc_feature (1)..(229): Homolog of NCBI NO: 7484723 NR Description: fiber annexin - upland cotton
  misc_feature (2)..(229): Homolog of NCBI NO: 15214410 NR Description: annexin [Gossypium hirsutum]
  misc_feature (2)..(229): Homolog of NCBI NO: 33357398 NR Description: Chain A, Annexin Gh1 From Cotton
  misc_feature (1)..(229): Homolog of NCBI NO: 2459926 NR Description: annexin [Lavatera thuringiaca]
  misc_feature (2)..(229): Homolog of NCBI NO: 7441510 NR Description: annexin - upland cotton (fragment)
  misc_feature (1)..(225): Homolog of NCBI NO: 2129923 NR Description: annexin - pepper >gi|1071660|emb|CAA63710.1|
  misc_feature (1)..(225): Homolog of NCBI NO: 12084607 NR Description: Chain A, Crystal Structure Of Annexin 24(Ca32) Capsicum Annuum >gi|12084608|pdb|1DK5|B Chain B, Crystal
MATLKVSDSVPAPSDDAEQLRTAFEGWGTNEDLIISILAHRSAEQRKVIRQAYHETYGEDLLKTLDKELSNDFERAILLWTLEPGERDALLANEATKRWTSSNQVLMEVACTRTSTQLLHARQAYHARYKKSLEEDVAHHTTGDFRKLLVSLVTSYRYEGDEVNMTLAKQEAKLVHEKIKDKHYNDEDVIRILSTRSKAQINATFNRYQDDHGEEILKSLEEGDDDDKLPCTFEVNHSVLDKTRALLCRCSSFSNQQNWN

SEQ ID NO: 108519 - protein, 154 aa, Arabidopsis thaliana
  peptide (1)..(154): Ceres Seq. ID no. 13667774
  misc_feature (1)..(126): Homolog of NCBI NO: 1621539 NR Description: annexin-like protein
  misc_feature (1)..(122): Homolog of NCBI NO: 15220216 NR Description: Ca2+-dependent membrane-binding protein annexin
  misc_feature (1)..(122): Homolog of NCBI NO: 1429207 NR Description: annexin [Arabidopsis thaliana]
  misc_feature (1)..(123): Homolog of NCBI NO: 7484723 NR Description: fiber annexin - upland cotton
  misc_feature (1)..(123): Homolog of NCBI NO: 15214410 NR Description: annexin [Gossypium hirsutum]
  misc_feature (1)..(123): Homolog of NCBI NO: 33357398 NR Description: Chain A, Annexin Gh1 From Cotton
  misc_feature (1)..(123): Homolog of NCBI NO: 2459926 NR Description: annexin [Lavatera thuringiaca]
  misc_feature (1)..(123): Homolog of NCBI NO: 7441510 NR Description: annexin - upland cotton (fragment)
  misc_feature (1)..(119): Homolog of NCBI NO: 2129923 NR Description: annexin - pepper >gi|1071660|emb|CAA63710.1|
  misc_feature (1)..(119): Homolog of NCBI NO: 12084607 NR Description: Chain A, Crystal Structure Of Annexin 24(Ca32) Capsicum Annuum >gi|12084608|pdb|1DK5|B Chain B, Crystal
MEVACTRTSTQLLHARQAYHARYKKSLEEDVAHHTTGDFRKLLVSLVTSYRYEGDEVNMTLAKQEAKLVHEKIKDKHYNDEDVIRILSTRSKAQINATFNRYQDDHGEEILKSLEEGDDDDKLPCTFEVNHSVLDKTRALLCRCSSFSNQQNWN

SEQ ID NO: 108520 - DNA, 1619 bp, Arabidopsis thaliana
  misc_feature (1)..(1619): Ceres Seq. ID no. 13667775
  misc_feature: MA Experiment ID: 20000355 Result: Down-regulated in Transcription
  misc_feature: MA Experiment 20000355 PARAMETER Experiment Name: At_Siliques_Sub_P Parameter: Age (day) Value: 21
  misc_feature: MA Experiment 20000355 PARAMETER Experiment Name: At_Siliques_Sub_P Parameter: Organism Value: A. thaliana
  misc_feature: MA Experiment 20000355 PARAMETER Experiment Name: At_Siliques_Sub_P Parameter: Plant Line Value: WS
  misc_feature: MA Experiment 20000355 PARAMETER Experiment Name: At_Siliques_Sub_P Parameter: Tissue Value: Less Than 5mm Siliques vs. Whole Plant
  misc_feature: Pfam Name: Aa_trans Pfam Description: Transmembrane amino acid transporter protein
gtgtttcttctcagcaggactaaaaggaaaaaaggaaatcgattgctaatgtcgggtgagaaacaagcggaggagtcaatagtagtctccggggatgaggaggtggccggtagaaaagtggaagattcagcggcggaggaggatattgacggcaacgggggcaatggatttagtatgaagagcttcctctggcatggcgggtccgcttgggacgcctggtttagctgtgcatcaaatcaagtggcacaagtgctgttgacgctgccgtattcgttntcgcagttgggaatgttatcaggaatattgcttcaaatattctatgggttaatgggatcttggactgcttatctcatcagtgttctttacgtcgagtatcgtgcccgtatggagaaacaagaagccaaatccttcaaaaaccacgttattcaatggtttgaagtgcttgatgggctgctgggtccgtactggaaagcagcggggctcgcatttaattgcaccttcttgttattcggatcagtcatccaactcattgcttgtgctagcaatatatattacataaacgataggttagacaagaggacatggacttatatatttggggcttgctgtgccacgaccgttttcataccatctttccacaattaccgtatttggtctttcctcggccttggcatgaccacctacaccgcttggtacctcaccatcgcctcttttctccatggtcaggcggagggtgtgacacattccggtccaaccaagcttgtgttgtactttaccggagccaccaacatcctctataccttcggtggacacgctgtgaccgtggaaataatgcatgcgatgtggaaaccaaggaagtttaagagcatctacttgatggcaactctgtacgtcttcacattaacgcttccgtcagcctccgccctctactgggctttcggcgaccaacttctcaaccactcaaacgctttctctctcctccctaaaacgcgtttccgtgacaccgccgttatcctcatgctcatccatcagtttataacgttcgggtttgcgtgtacaccattgtacttcgtatgggaaaaagcgatcggaatgcaccacacaaagagcttatgtctaagagcgctggtgaggctaccgtgtgttccgatatggttttggccaatcatctttcctttttcggccattaactcggcagttggagccttacttgttaccttcaccgtctatatcatccctgccttagcccacatgctcacgtaccgcaccgcctctgccgccgaacgcgcggagaaaccaccgttttttatccctagctgggctggagtttacgtgataaacgctttcatagtggtttgggtcctagttctcgggttcgggtttggcggatgggccagtatgaccaacttcatcaggcaaattgatacttttggcctctttgccaaatgctaccaatgcaaaccacctccagctccgatcgccgccggagctcaccaccgccgttagttaacgtaagcgacgtgtgatagtgtgattgaacccttttttctttaattctgtatgaaagaaaatatctgtaattcagtgatttagtgaatctatgctataaaatttgcttg

SEQ ID NO: 108521 - protein, 501 aa, Arabidopsis thaliana
  peptide (1)..(501): Ceres Seq. ID no. 13667776
  misc_feature: Pfam Name: Aa_trans Pfam Description: Transmembrane amino acid transporter protein
  misc_feature (17)..(501): Homolog of NCBI NO: 5881784 NR Description: putative AUX1-like permease [Arabidopsis thaliana]
  misc_feature (17)..(501): Homolog of NCBI NO: 15240927 NR Description: amino acid permease, putative [Arabidopsis
  misc_feature (17)..(497): Homolog of NCBI NO: 37651177 NR Description: AUX1-like auxin influx carrier protein [Pisum
  misc_feature (17)..(499): Homolog of NCBI NO: 10800920 NR Description: putative AUX1-like permease [Medicago truncatula]
  misc_feature (17)..(500): Homolog of NCBI NO: 21586468 NR Description: auxin influx carrier protein [Medicago truncatula]
  misc_feature (25)..(500): Homolog of NCBI NO: 18404642 NR Description: amino acid permease, putative (AUX1) [Arabidopsis
  misc_feature (17)..(492): Homolog of NCBI NO: 6650716 NR Description: AUX1-like protein [Populus tremula x Populus
  misc_feature (17)..(498): Homolog of NCBI NO: 25956260 NR Description: AUX1-like auxin transport protein [Cucumis
  misc_feature (17)..(499): Homolog of NCBI NO: 10441742 NR Description: putative AUX1-like permease [Populus tremula x
  misc_feature (17)..(499): Homolog of NCBI NO: 10800918 NR Description: putative AUX1-like permease [Medicago truncatula]
  misc_feature (92)..(92): Xaa is any aa, unknown or other
VFLLSRTKRKKGNRLLMSGEKQAEESIVVSGDEEVAGRKVEDSAAEEDIDGNGGNGFSMKSFLWHGGSAWDAWFSCASNQVAQVLLTLPYSXSQLGMLSGILLQIFYGLMGSWTAYLISVLYVEYRARMEKQEAKSFKNHVIQWFEVLDGLLGPYWKAAGLAFNCTFLLFGSVIQLIACASNIYYINDRLDKRTWTYIFGACCATTVFIPSFHNYRIWSFLGLGMTTYTAWYLTIASFLHGQAEGVTHSGPTKLVLYFTGATNILYTFGGHAVTVEIMHAMWKPRKFKSIYLMATLYVFTLTLPSASALYWAFGDQLLNHSNAFSLLPKTRFRDTAVILMLIHQFITFGFACTPLYFVWEKAIGMHHTKSLCLRALVRLPCVPIWFWPIIFPFSAINSAVGALLVTFTVYIIPALAHMLTYRTASAAERAEKPPFFIPSWAGVYVINAFIVVWVLVLGFGFGGWASMTNFIRQIDTFGLFAKCYQCKPPPAPIAAGAHHRR

SEQ ID NO: 108522 - protein, 485 aa, Arabidopsis thaliana
  peptide (1)..(485): Ceres Seq. ID no. 13667777
  misc_feature: Pfam Name: Aa_trans Pfam Description: Transmembrane amino acid transporter protein
  misc_feature (1)..(485): Homolog of NCBI NO: 5881784 NR Description: putative AUX1-like permease [Arabidopsis thaliana]
  misc_feature (1)..(485): Homolog of NCBI NO: 15240927 NR Description: amino acid permease, putative [Arabidopsis
  misc_feature (1)..(481): Homolog of NCBI NO: 37651177 NR Description: AUX1-like auxin influx carrier protein [Pisum
  misc_feature (1)..(483): Homolog of NCBI NO: 10800920 NR Description: putative AUX1-like permease [Medicago truncatula]
  misc_feature (1)..(484): Homolog of NCBI NO: 21586468 NR Description: auxin influx carrier protein [Medicago truncatula]
  misc_feature (9)..(484): Homolog of NCBI NO: 18404642 NR Description: amino acid permease, putative (AUX1) [Arabidopsis
  misc_feature (1)..(476): Homolog of NCBI NO: 6650716 NR Description: AUX1-like protein [Populus tremula x Populus
  misc_feature (1)..(482): Homolog of NCBI NO: 25956260 NR Description: AUX1-like auxin transport protein [Cucumis
  misc_feature (1)..(483): Homolog of NCBI NO: 10441742 NR Description: putative AUX1-like permease [Populus tremula x
  misc_feature (1)..(483): Homolog of NCBI NO: 10800918 NR Description: putative AUX1-like permease [Medicago truncatula]
  misc_feature (76)..(76): Xaa is any aa, unknown or other
MSGEKQAEESIVVSGDEEVAGRKVEDSAAEEDIDGNGGNGFSMKSFLWHGGSAWDAWFSCASNQVAQVLLTLPYSXSQLGMLSGILLQIFYGLMGSWTAYLISVLYVEYRARMEKQEAKSFKNHVIQWFEVLDGLLGPYWKAAGLAFNCTFLLFGSVIQLIACASNIYYINDRLDKRTWTYIFGACCATTVFIPSFHNYRIWSFLGLGMTTYTAWYLTIASFLHGQAEGVTHSGPTKLVLYFTGATNILYTFGGHAVTVEIMHAMWKPRKFKSIYLMATLYVFTLTLPSASALYWAFGDQLLNHSNAFSLLPKTRFRDTAVILMLIHQFITFGFACTPLYFVWEKAIGMHHTKSLCLRALVRLPCVPIWFWPIIFPFSAINSAVGALLVTFTVYIIPALAHMLTYRTASAAERAEKPPFFIPSWAGVYVINAFIVVWVLVLGFGFGGWASMTNFIRQIDTFGLFAKCYQCKPPPAPIAAGAHHRR

SEQ ID NO: 108523 - protein, 443 aa, Arabidopsis thaliana
  peptide (1)..(443): Ceres Seq. ID no. 13667778
  misc_feature: Pfam Name: Aa_trans Pfam Description: Transmembrane amino acid transporter protein
  misc_feature (1)..(443): Homolog of NCBI NO: 5881784 NR Description: putative AUX1-like permease [Arabidopsis thaliana]
  misc_feature (1)..(443): Homolog of NCBI NO: 15240927 NR Description: amino acid permease, putative [Arabidopsis
  misc_feature (1)..(439): Homolog of NCBI NO: 37651177 NR Description: AUX1-like auxin influx carrier protein [Pisum
  misc_feature (1)..(441): Homolog of NCBI NO: 10800920 NR Description: putative AUX1-like permease [Medicago truncatula]
  misc_feature (1)..(442): Homolog of NCBI NO: 21586468 NR Description: auxin influx carrier protein [Medicago truncatula]
  misc_feature (1)..(442): Homolog of NCBI NO: 18404642 NR Description: amino acid permease, putative (AUX1) [Arabidopsis
  misc_feature (1)..(434): Homolog of NCBI NO: 6650716 NR Description: AUX1-like protein [Populus tremula x Populus
  misc_feature (1)..(440): Homolog of NCBI NO: 25956260 NR Description: AUX1-like auxin transport protein [Cucumis
  misc_feature (1)..(441): Homolog of NCBI NO: 10441742 NR Description: putative AUX1-like permease [Populus tremula x
  misc_feature (1)..(441): Homolog of NCBI NO: 10800918 NR Description: putative AUX1-like permease [Medicago truncatula]
  misc_feature (34)..(34): Xaa is any aa, unknown or other
MKSFLWHGGSAWDAWFSCASNQVAQVLLTLPYSXSQLGMLSGILLQIFYGLMGSWTAYLISVLYVEYRARMEKQEAKSFKNHVIQWFEVLDGLLGPYWKAAGLAFNCTFLLFGSVIQLIACASNIYYINDRLDKRTWTYIFGACCATTVFIPSFHNYRIWSFLGLGMTTYTAWYLTIASFLHGQAEGVTHSGPTKLVLYFTGATNILYTFGGHAVTVEIMHAMWKPRKFKSIYLMATLYVFTLTLPSASALYWAFGDQLLNHSNAFSLLPKTRFRDTAVILMLIHQFITFGFACTPLYFVWEKAIGMHHTKSLCLRALVRLPCVPIWFWPIIFPFSAINSAVGALLVTFTVYIIPALAHMLTYRTASAAERAEKPPFFIPSWAGVYVINAFIVVWVLVLGFGFGGWASMTNFIRQIDTFGLFAKCYQCKPPPAPIAAGAHHRR

SEQ ID NO: 108524 - DNA, 1478 bp, Arabidopsis thaliana
  misc_feature (1)..(1478): Ceres Seq. ID no. 13667779
  misc_feature: MA Experiment ID: 108434 Result: Down-regulated in Transcription
  misc_feature: MA Experiment 108434 PARAMETER Experiment Name: At_Root_Tips_cDNA_P Parameter: Tissue Value: Root Tips
  misc_feature: MA Experiment ID: 108461 Result: Up-regulated in Transcription
  misc_feature: MA Experiment 108461 PARAMETER Experiment Name: At_Germinating_Seeds_cDNA_P Parameter: Age (day) Value: 1 vs. 0
  misc_feature: MA Experiment 108461 PARAMETER Experiment Name: At_Germinating_Seeds_cDNA_P Parameter: Tissue Value: Germinating Seeds
  misc_feature: MA Experiment ID: 108462 Result: Up-regulated in Transcription
  misc_feature: MA Experiment 108462 PARAMETER Experiment Name: At_Germinating_Seeds_cDNA_P Parameter: Age (day) Value: 2 vs. 0
  misc_feature: MA Experiment 108462 PARAMETER Experiment Name: At_Germinating_Seeds_cDNA_P Parameter: Tissue Value: Germinating Seeds
  misc_feature: MA Experiment ID: 108463 Result: Up-regulated in Transcription
  misc_feature: MA Experiment 108463 PARAMETER Experiment Name: At_Germinating_Seeds_cDNA_P Parameter: Age (day) Value: 3 vs. 0
  misc_feature: MA Experiment 108463 PARAMETER Experiment Name: At_Germinating_Seeds_cDNA_P Parameter: Tissue Value: Germinating Seeds
  misc_feature: MA Experiment ID: 108464 Result: Up-regulated in Transcription
  misc_feature: MA Experiment 108464 PARAMETER Experiment Name: At_Germinating_Seeds_cDNA_P Parameter: Age (day) Value: 4 vs. 0
  misc_feature: MA Experiment 108464 PARAMETER Experiment Name: At_Germinating_Seeds_cDNA_P Parameter: Tissue Value: Germinating Seeds
  misc_feature: MA Experiment ID: 108595 Result: Down-regulated in Transcription
  misc_feature: MA Experiment 108595 PARAMETER Experiment Name: At_Ler-pi_Ovule_cDNA_P Parameter: Plant Line Value: null
  misc_feature: MA Experiment ID: 20000069 Result: Down-regulated in Transcription
  misc_feature: MA Experiment 20000069 PARAMETER Experiment Name: At_100uM_ABA_Mutants_cDNA_P Parameter: Plant Line Value: CS23
  misc_feature: MA Experiment 20000069 PARAMETER Experiment Name: At_100uM_ABA_Mutants_cDNA_P Parameter: Timepoint (hr) Value: 6
  misc_feature: MA Experiment 20000069 PARAMETER Experiment Name: At_100uM_ABA_Mutants_cDNA_P Parameter: Tissue Value: Aerial
  misc_feature: MA Experiment 20000069 PARAMETER Experiment Name: At_100uM_ABA_Mutants_cDNA_P Parameter: Treatment Value: 100uM ABA vs. No Treatment
  misc_feature: MA Experiment ID: 20000070 Result: Down-regulated in Transcription
  misc_feature: MA Experiment 20000070 PARAMETER Experiment Name: At_100uM_ABA_Mutants_cDNA_P Parameter: Plant Line Value: CS24
  misc_feature: MA Experiment 20000070 PARAMETER Experiment Name: At_100uM_ABA_Mutants_cDNA_P Parameter: Timepoint (hr) Value: 6
  misc_feature: MA Experiment 20000070 PARAMETER Experiment Name: At_100uM_ABA_Mutants_cDNA_P Parameter: Tissue Value: Aerial
  misc_feature: MA Experiment 20000070 PARAMETER Experiment Name: At_100uM_ABA_Mutants_cDNA_P Parameter: Treatment Value: 100uM ABA vs. No Treatment
  misc_feature: MA Experiment ID: 20000071 Result: Down-regulated in Transcription
  misc_feature: MA Experiment 20000071 PARAMETER Experiment Name: At_100uM_ABA_Mutants_cDNA_P Parameter: Plant Line Value: CS8104
  misc_feature: MA Experiment 20000071 PARAMETER Experiment Name: At_100uM_ABA_Mutants_cDNA_P Parameter: Timepoint (hr) Value: 6
  misc_feature: MA Experiment 20000071 PARAMETER Experiment Name: At_100uM_ABA_Mutants_cDNA_P Parameter: Tissue Value: Aerial
  misc_feature: MA Experiment 20000071 PARAMETER Experiment Name: At_100uM_ABA_Mutants_cDNA_P Parameter: Treatment Value: 100uM ABA vs. No Treatment
  misc_feature: MA Experiment ID: 20000072 Result: Down-regulated in Transcription
  misc_feature: MA Experiment 20000072 PARAMETER Experiment Name: At_100uM_ABA_Mutants_cDNA_P Parameter: Plant Line Value: CS8105
  misc_feature: MA Experiment 20000072 PARAMETER Experiment Name: At_100uM_ABA_Mutants_cDNA_P Parameter: Timepoint (hr) Value: 6
  misc_feature: MA Experiment 20000072 PARAMETER Experiment Name: At_100uM_ABA_Mutants_cDNA_P Parameter: Tissue Value: Aerial
  misc_feature: MA Experiment 20000072 PARAMETER Experiment Name: At_100uM_ABA_Mutants_cDNA_P Parameter: Treatment Value: 100uM ABA vs. No Treatment
  misc_feature: MA Experiment ID: 20000086 Result: Down-regulated in Transcription
  misc_feature: MA Experiment 20000086 PARAMETER Experiment Name: At_100uM_ABA_Mutants_cDNA_P Parameter: Plant Line Value: CS22
  misc_feature: MA Experiment 20000086 PARAMETER Experiment Name: At_100uM_ABA_Mutants_cDNA_P Parameter: Timepoint (hr) Value: 6
  misc_feature: MA Experiment 20000086 PARAMETER Experiment Name: At_100uM_ABA_Mutants_cDNA_P Parameter: Tissue Value: Aerial
  misc_feature: MA Experiment 20000086 PARAMETER Experiment Name: At_100uM_ABA_Mutants_cDNA_P Parameter: Treatment Value: 100uM ABA vs. No Treatment
  misc_feature: MA Experiment ID: 20000087 Result: Down-regulated in Transcription
  misc_feature: MA Experiment 20000087 PARAMETER Experiment Name: At_100uM_ABA_Mutants_cDNA_P Parameter: Plant Line Value: WS
  misc_feature: MA Experiment 20000087 PARAMETER Experiment Name: At_100uM_ABA_Mutants_cDNA_P Parameter: Timepoint (hr) Value: 6
  misc_feature: MA Experiment 20000087 PARAMETER Experiment Name: At_100uM_ABA_Mutants_cDNA_P Parameter: Tissue Value: Aerial
  misc_feature: MA Experiment 20000087 PARAMETER Experiment Name: At_100uM_ABA_Mutants_cDNA_P Parameter: Treatment Value: 100uM ABA vs. No Treatment
  misc_feature: MA Experiment ID: 20000089 Result: Down-regulated in Transcription
  misc_feature: MA Experiment ID: 20000090 Result: Down-regulated in Transcription
  misc_feature: MA Experiment ID: 20000117 Result: Down-regulated in Transcription
  misc_feature: MA Experiment 20000117 PARAMETER Experiment Name: At_100uM_ABA_Mutants_cDNA_P Parameter: Plant Line Value: Columbia
  misc_feature: MA Experiment 20000117 PARAMETER Experiment Name: At_100uM_ABA_Mutants_cDNA_P Parameter: Timepoint (hr) Value: 6
  misc_feature: MA Experiment 20000117 PARAMETER Experiment Name: At_100uM_ABA_Mutants_cDNA_P Parameter: Tissue Value: Aerial
  misc_feature: MA Experiment 20000117 PARAMETER Experiment Name: At_100uM_ABA_Mutants_cDNA_P Parameter: Treatment Value: 100uM ABA vs. No Treatment
  misc_feature: MA Experiment ID: 20000180 Result: Up-regulated in Transcription
  misc_feature: MA Experiment 20000180 PARAMETER Experiment Name: At_Germinating_Seeds_P Parameter: Age (hr) Value: 24 vs. 0
  misc_feature: MA Experiment 20000180 PARAMETER Experiment Name: At_Germinating_Seeds_P Parameter: Tissue Value: Germinating Seeds
  misc_feature: MA Experiment ID: 20000184 Result: Up-regulated in Transcription
  misc_feature: MA Experiment 20000184 PARAMETER Experiment Name: At_Shoots__P Parameter: Age (day) Value: 7
  misc_feature: MA Experiment 20000184 PARAMETER Experiment Name: At_Shoots__P Parameter: Tissue Value: Shoots vs. Whole Plant
  misc_feature: MA Experiment ID: 20000234 Result: Up-regulated in Transcription
  misc_feature: MA Experiment 20000234 PARAMETER Experiment Name: At_Siliques_P Parameter: Age (day) Value: 21
  misc_feature: MA Experiment 20000234 PARAMETER Experiment Name: At_Siliques_P Parameter: Organism Value: A. thaliana
  misc_feature: MA Experiment 20000234 PARAMETER Experiment Name: At_Siliques_P Parameter: Plant Line Value: WS
  misc_feature: MA Experiment 20000234 PARAMETER Experiment Name: At_Siliques_P Parameter: Tissue Value: Less Than 5mm Siliques vs. Whole Plant
  misc_feature: MA Experiment ID: 20000265 Result: Up-regulated in Transcription
  misc_feature: MA Experiment 20000265 PARAMETER Experiment Name: At_Open_Flower_P Parameter: Age (day) Value: 21
  misc_feature: MA Experiment 20000265 PARAMETER Experiment Name: At_Open_Flower_P Parameter: Plant Line Value: WS
  misc_feature: MA Experiment 20000265 PARAMETER Experiment Name: At_Open_Flower_P Parameter: Tissue Value: Closed Flower vs. Whole Plant
  misc_feature: MA Experiment ID: 20000438 Result: Up-regulated in Transcription
  misc_feature: MA Experiment 20000438 PARAMETER Experiment Name: At_Shoots__P Parameter: Age (day) Value: 14
  misc_feature: MA Experiment 20000438 PARAMETER Experiment Name: At_Shoots__P Parameter: Tissue Value: Shoots vs. Whole Plant
  misc_feature: MA Experiment ID: 20000452 Result: Up-regulated in Transcription
  misc_feature: MA Experiment 20000452 PARAMETER Experiment Name: At_CS6879_Shoots-Roots_P Parameter: Age (day) Value: 14
  misc_feature: MA Experiment 20000452 PARAMETER Experiment Name: At_CS6879_Shoots-Roots_P Parameter: Organism Value: A. thaliana
  misc_feature: MA Experiment 20000452 PARAMETER Experiment Name: At_CS6879_Shoots-Roots_P Parameter: Plant Line Value: CS6879 vs. WS
  misc_feature: MA Experiment 20000452 PARAMETER Experiment Name: At_CS6879_Shoots-Roots_P Parameter: Tissue Value: Shoots
  misc_feature: MA Experiment ID: 20001248 Result: Down-regulated in Transcription
  misc_feature: MA Experiment 20001248 PARAMETER Experiment Name: At_Far-red-induction_P Parameter: Age (day) Value: 7
  misc_feature: MA Experiment 20001248 PARAMETER Experiment Name: At_Far-red-induction_P Parameter: Light Value: Far-red vs. White
  misc_feature: MA Experiment 20001248 PARAMETER Experiment Name: At_Far-red-induction_P Parameter: Organism Value: A. thaliana
  misc_feature: MA Experiment 20001248 PARAMETER Experiment Name: At_Far-red-induction_P Parameter: Plant Line Value: Columbia
  misc_feature: MA Experiment 20001248 PARAMETER Experiment Name: At_Far-red-induction_P Parameter: Timepoint (hr) Value: 4
  misc_feature: MA Experiment 20001248 PARAMETER Experiment Name: At_Far-red-induction_P Parameter: Tissue Value: Whole Plant
  misc_feature: MA Experiment ID: 20001557 Result: Down-regulated in Transcription
  misc_feature: MA Experiment 20001557 PARAMETER Experiment Name: At_Drought_Soil_Dry_P Parameter: Age (day) Value: 27
  misc_feature: MA Experiment 20001557 PARAMETER Experiment Name: At_Drought_Soil_Dry_P Parameter: Organism Value: A. thaliana
  misc_feature: MA Experiment 20001557 PARAMETER Experiment Name: At_Drought_Soil_Dry_P Parameter: Plant Line Value: WS
  misc_feature: MA Experiment 20001557 PARAMETER Experiment Name: At_Drought_Soil_Dry_P Parameter: Post Timepoint (hr) Value: 3
  misc_feature: MA Experiment 20001557 PARAMETER Experiment Name: At_Drought_Soil_Dry_P Parameter: Post-Treatment Value: Re-Water vs. No Drought
  misc_feature: MA Experiment 20001557 PARAMETER Experiment Name: At_Drought_Soil_Dry_P Parameter: Timepoint (day) Value: 13
  misc_feature: MA Experiment 20001557 PARAMETER Experiment Name: At_Drought_Soil_Dry_P Parameter: Treatment Value: Drought vs. No Drought
  misc_feature: MA Experiment ID: 20001905 Result: Down-regulated in Transcription
  misc_feature: MA Experiment 20001905 PARAMETER Experiment Name: At_Drought_Reproduction_P Parameter: Age (day) Value: 40
  misc_feature: MA Experiment 20001905 PARAMETER Experiment Name: At_Drought_Reproduction_P Parameter: Organism Value: A. thaliana
  misc_feature: MA Experiment 20001905 PARAMETER Experiment Name: At_Drought_Reproduction_P Parameter: Plant Line Value: WS
  misc_feature: MA Experiment 20001905 PARAMETER Experiment Name: At_Drought_Reproduction_P Parameter: Timepoint (day) Value: 10
  misc_feature: MA Experiment 20001905 PARAMETER Experiment Name: At_Drought_Reproduction_P Parameter: Tissue Value: Rosettes
  misc_feature: MA Experiment 20001905 PARAMETER Experiment Name: At_Drought_Reproduction_P Parameter: Treatment Value: Drought vs. No Drought
tttgaatacatatccaccacttgtcttgttcttgaaacacacggtcgtggccatgtctgttctgcttccgatgtatcctctccaatccttggccagaagcaagagattgtttccgattcgaaccagatcaaaaccggtttgtttagcactgaccaatgctcaaacaaacggtggtgaccaagaggagaaagtagtgattgttggcgccgggattggcggacttgccactgccgtttcacttcacaggcttggaatccggtcggtggtgttggagcaggcagagtcgcttcgtactggtggaacatcactgacgctattcaagaatgggtggcgcgttcttgacgccatttccgtcgggcctcaactccgaacgcagtttcttgaaatcgaagggatggtagtgaagaaggaagatggaagagagcttcgttctttcaaattcaaagacgatgatcaaagccaagaagttcgggccgtggagaggcgagtactcttggaaacacttgcaagccagcttcctccacaaaccattcggttttcctcaaaactggaaagtatacaaagcaatgccaatggtgacactctccttcaacttggagatggaacccggttgcttgcacagattgttattggttgtgacggtatccggtctaaggttgcaacttggatggggttcagtgagccgaaatatgttggccattgcgcttaccgtggtcttgggttctatccaaatggacagccatttcagaaaaaggtgaactacatatacggtaaagggattagagctggatatgtacctgtatctacaacaaaagtctactggttcatctgtttcaacagcccatctctagggcccaaaattacggatccagcgatcctaaaaaaacaagccaaagaactggttagtacatggccagaagatctgcaaaacctcatcgatttaacacctgatgaaactatcagcagaactcctctagtagaccggtggctatggcctggcattgctcctccagcatcaaaaggacgagtggttcttgttggagatgcttggcacccaatgactccaaatcttggacaaggtgcttgttgtgccttggaagattcagtagttctggcaaataaacttgccaatgcaataaatggaggaaccgaatcaattgaagtagcaatggaatcatacgggagtgagagatggtctcgagcattcccgttgacagtacgtgcaaacctagttggcgcacttctgcaatgggagaatcctctagtgtgttccattagaaacaatattgtcataccaaagttactgaggcttggaccaatgcttgaacacacaaactttgagtgtgaacctctctttgtttctaaaagctgaatttcgtatatatagtgagatccattgaatagagagacttgaacaatgtataatcataggaacaatataaactctgtgattgaatgtaaaagaatcatacaatgta

SEQ ID NO: 108525 - protein, 456 aa, Arabidopsis thaliana
  peptide (1)..(456): Ceres Seq. ID no. 13667780
  misc_feature (205)..(409): Pfam Name: Monooxygenase Pfam Description: Monooxygenase
  misc_feature (8)..(456): Homolog of NCBI NO: 4164576 NR Description: CTF2A [Arabidopsis thaliana]
  misc_feature (18)..(456): Homolog of NCBI NO: 18403916 NR Description: monooxygenase family [Arabidopsis thaliana]
  misc_feature (18)..(456): Homolog of NCBI NO: 21536869 NR Description: putative monooxygenase [Arabidopsis thaliana]
  misc_feature (18)..(456): Homolog of NCBI NO: 25453534 NR Description: CTF2A protein [imported] - Arabidopsis thaliana
  misc_feature (139)..(456): Homolog of NCBI NO: 25408403 NR Description: probable monooxygenase [imported] - Arabidopsis
  misc_feature (24)..(142): Homolog of NCBI NO: 25408403 NR Description: probable monooxygenase [imported] - Arabidopsis
  misc_feature (18)..(430): Homolog of NCBI NO: 18402126 NR Description: monooxygenase family [Arabidopsis thaliana] putative monooxygenase [Arabidopsis thaliana] putative monooxygenase [Arabidopsis thaliana]
  misc_feature (18)..(430): Homolog of NCBI NO: 25453535 NR Description: CTF2B protein [imported] - Arabidopsis thaliana
  misc_feature (18)..(430): Homolog of NCBI NO: 21592928 NR Description: putative monooxygenase [Arabidopsis thaliana]
  misc_feature (29)..(448): Homolog of NCBI NO: 34393624 NR Description: putative monooxygenase 2 [Oryza sativa (japonica
LNTYPPLVLFLKHTVVAMSVLLPMYPLQSLARSKRLFPIRTRSKPVCLALTNAQTNGGDQEEKVVIVGAGIGGLATAVSLHRLGIRSVVLEQAESLRTGGTSLTLFKNGWRVLDAISVGPQLRTQFLEIEGMVVKKEDGRELRSFKFKDDDQSQEVRAVERRVLLETLASQLPPQTIRFSSKLESIQSNANGDTLLQLGDGTRLLAQIVIGCDGIRSKVATWMGFSEPKYVGHCAYRGLGFYPNGQPFQKKVNYIYGKGIRAGYVPVSTTKVYWFICFNSPSLGPKITDPAILKKQAKELVSTWPEDLQNLIDLTPDETISRTPLVDRWLWPGIAPPASKGRVVLVGDAWHPMTPNLGQGACCALEDSVVLANKLANAINGGTESIEVAMESYGSERWSRAFPLTVRANLVGALLQWENPLVCSIRNNIVIPKLLRLGPMLEHTNFECEPLFVSKS

SEQ ID NO: 108526 - protein, 439 aa, Arabidopsis thaliana
  peptide (1)..(439): Ceres Seq. ID no. 13667781
  misc_feature (188)..(392): Pfam Name: Monooxygenase Pfam Description: Monooxygenase
  misc_feature (1)..(439): Homolog of NCBI NO: 4164576 NR Description: CTF2A [Arabidopsis thaliana]
  misc_feature (1)..(439): Homolog of NCBI NO: 18403916 NR Description: monooxygenase family [Arabidopsis thaliana]
  misc_feature (1)..(439): Homolog of NCBI NO: 21536869 NR Description: putative monooxygenase [Arabidopsis thaliana]
  misc_feature (1)..(439): Homolog of NCBI NO: 25453534 NR Description: CTF2A protein [imported] - Arabidopsis thaliana
  misc_feature (122)..(439): Homolog of NCBI NO: 25408403 NR Description: probable monooxygenase [imported] - Arabidopsis
  misc_feature (7)..(125): Homolog of NCBI NO: 25408403 NR Description: probable monooxygenase [imported] - Arabidopsis
  misc_feature (1)..(413): Homolog of NCBI NO: 18402126 NR Description: monooxygenase family [Arabidopsis thaliana] putative monooxygenase [Arabidopsis thaliana] putative monooxygenase [Arabidopsis thaliana]
  misc_feature (1)..(413): Homolog of NCBI NO: 25453535 NR Description: CTF2B protein [imported] - Arabidopsis thaliana
  misc_feature (1)..(413): Homolog of NCBI NO: 21592928 NR Description: putative monooxygenase [Arabidopsis thaliana]
  misc_feature (12)..(431): Homolog of NCBI NO: 34393624 NR Description: putative monooxygenase 2 [Oryza sativa (japonica
MSVLLPMYPLQSLARSKRLFPIRTRSKPVCLALTNAQTNGGDQEEKVVIVGAGIGGLATAVSLHRLGIRSVVLEQAESLRTGGTSLTLFKNGWRVLDAISVGPQLRTQFLEIEGMVVKKEDGRELRSFKFKDDDQSQEVRAVERRVLLETLASQLPPQTIRFSSKLESIQSNANGDTLLQLGDGTRLLAQIVIGCDGIRSKVATWMGFSEPKYVGHCAYRGLGFYPNGQPFQKKVNYIYGKGIRAGYVPVSTTKVYWFICFNSPSLGPKITDPAILKKQAKELVSTWPEDLQNLIDLTPDETISRTPLVDRWLWPGIAPPASKGRVVLVGDAWHPMTPNLGQGACCALEDSVVLANKLANAINGGTESIEVAMESYGSERWSRAFPLTVRANLVGALLQWENPLVCSIRNNIVIPKLLRLGPMLEHTNFECEPLFVSKS

SEQ ID NO: 108527 - protein, 433 aa, Arabidopsis thaliana
  peptide (1)..(433): Ceres Seq. ID no. 13667782
  misc_feature (182)..(386): Pfam Name: Monooxygenase Pfam Description: Monooxygenase
  misc_feature (1)..(433): Homolog of NCBI NO: 4164576 NR Description: CTF2A [Arabidopsis thaliana]
  misc_feature (1)..(433): Homolog of NCBI NO: 18403916 NR Description: monooxygenase family [Arabidopsis thaliana]
  misc_feature (1)..(433): Homolog of NCBI NO: 21536869 NR Description: putative monooxygenase [Arabidopsis thaliana]
  misc_feature (1)..(433): Homolog of NCBI NO: 25453534 NR Description: CTF2A protein [imported] - Arabidopsis thaliana
  misc_feature (116)..(433): Homolog of NCBI NO: 25408403 NR Description: probable monooxygenase [imported] - Arabidopsis
  misc_feature (1)..(119): Homolog of NCBI NO: 25408403 NR Description: probable monooxygenase [imported] - Arabidopsis
  misc_feature (1)..(407): Homolog of NCBI NO: 18402126 NR Description: monooxygenase family [Arabidopsis thaliana] putative monooxygenase [Arabidopsis thaliana] putative monooxygenase [Arabidopsis thaliana]
  misc_feature (1)..(407): Homolog of NCBI NO: 25453535 NR Description: CTF2B protein [imported] - Arabidopsis thaliana
  misc_feature (1)..(407): Homolog of NCBI NO: 21592928 NR Description: putative monooxygenase [Arabidopsis thaliana]
  misc_feature (6)..(425): Homolog of NCBI NO: 34393624 NR Description: putative monooxygenase 2 [Oryza sativa (japonica
MYPLQSLARSKRLFPIRTRSKPVCLALTNAQTNGGDQEEKVVIVGAGIGGLATAVSLHRLGIRSVVLEQAESLRTGGTSLTLFKNGWRVLDAISVGPQLRTQFLEIEGMVVKKEDGRELRSFKFKDDDQSQEVRAVERRVLLETLASQLPPQTIRFSSKLESIQSNANGDTLLQLGDGTRLLAQIVIGCDGIRSKVATWMGFSEPKYVGHCAYRGLGFYPNGQPFQKKVNYIYGKGIRAGYVPVSTTKVYWFICFNSPSLGPKITDPAILKKQAKELVSTWPEDLQNLIDLTPDETISRTPLVDRWLWPGIAPPASKGRVVLVGDAWHPMTPNLGQGACCALEDSVVLANKLANAINGGTESIEVAMESYGSERWSRAFPLTVRANLVGALLQWENPLVCSIRNNIVIPKLLRLGPMLEHTNFECEPLFVSKS

SEQ ID NO: 108528 - DNA, 793 bp, Arabidopsis thaliana
  misc_feature (1)..(793): Ceres Seq. ID no. 13667786
  misc_feature: MA Experiment ID: 108434 Result: Down-regulated in Transcription
  misc_feature: MA Experiment 108434 PARAMETER Experiment Name: At_Root_Tips_cDNA_P Parameter: Tissue Value: Root Tips
  misc_feature: MA Experiment ID: 108435 Result: Down-regulated in Transcription
  misc_feature: MA Experiment 108435 PARAMETER Experiment Name: At_stm_Mutants_cDNA_P Parameter: Plant Line Value: wt Landsburg vs stm
  misc_feature: MA Experiment 108435 PARAMETER Experiment Name: At_stm_Mutants_cDNA_P Parameter: Tissue Value: Shoot Apical Meristem Region
  misc_feature: MA Experiment ID: 108501 Result: Down-regulated in Transcription
  misc_feature: MA Experiment 108501 PARAMETER Experiment Name: At_ap2_floral_buds_cDNA_P Parameter: Plant Line Value: ap2 (Ler.)
  misc_feature: MA Experiment 108501 PARAMETER Experiment Name: At_ap2_floral_buds_cDNA_P Parameter: Tissue Value: Closed Flower
  misc_feature: MA Experiment ID: 108573 Result: Up-regulated in Transcription
  misc_feature: MA Experiment 108573 PARAMETER Experiment Name: At_Drought_cDNA_P Parameter: Timepoint (hr) Value: 6
  misc_feature: MA Experiment 108573 PARAMETER Experiment Name: At_Drought_cDNA_P Parameter: Tissue Value: Aerial
  misc_feature: MA Experiment 108573 PARAMETER Experiment Name: At_Drought_cDNA_P Parameter: Treatment Value: Drought vs. No Drought
  misc_feature: MA Experiment ID: 108579 Result: Up-regulated in Transcription
  misc_feature: MA Experiment 108579 PARAMETER Experiment Name: At_4deg_Cold_cDNA_P Parameter: Temperature (deg C) Value: 4 vs. 22
  misc_feature: MA Experiment 108579 PARAMETER Experiment Name: At_4deg_Cold_cDNA_P Parameter: Timepoint (hr) Value: 6
  misc_feature: MA Experiment 108579 PARAMETER Experiment Name: At_4deg_Cold_cDNA_P Parameter: Tissue Value: Aerial
  misc_feature: MA Experiment ID: 108668 Result: Up-regulated in Transcription
  misc_feature: MA Experiment 108668 PARAMETER Experiment Name: At_2mM_SA_cDNA_P Parameter: Plant Line Value: WS
  misc_feature: MA Experiment 108668 PARAMETER Experiment Name: At_2mM_SA_cDNA_P Parameter: Timepoint (hr) Value: 6
  misc_feature: MA Experiment 108668 PARAMETER Experiment Name: At_2mM_SA_cDNA_P Parameter: Treatment Value: 2mM SA vs. No Treatment
  misc_feature: MA Experiment ID: 20000068 Result: Down-regulated in Transcription
  misc_feature: MA Experiment ID: 20000069 Result: Up-regulated in Transcription
  misc_feature: MA Experiment 20000069 PARAMETER Experiment Name: At_100uM_ABA_Mutants_cDNA_P Parameter: Plant Line Value: CS23
  misc_feature: MA Experiment 20000069 PARAMETER Experiment Name: At_100uM_ABA_Mutants_cDNA_P Parameter: Timepoint (hr) Value: 6
  misc_feature: MA Experiment 20000069 PARAMETER Experiment Name: At_100uM_ABA_Mutants_cDNA_P Parameter: Tissue Value: Aerial
  misc_feature: MA Experiment 20000069 PARAMETER Experiment Name: At_100uM_ABA_Mutants_cDNA_P Parameter: Treatment Value: 100uM ABA vs. No Treatment
  misc_feature: MA Experiment ID: 20000070 Result: Up-regulated in Transcription
  misc_feature: MA Experiment 20000070 PARAMETER Experiment Name: At_100uM_ABA_Mutants_cDNA_P Parameter: Plant Line Value: CS24
  misc_feature: MA Experiment 20000070 PARAMETER Experiment Name: At_100uM_ABA_Mutants_cDNA_P Parameter: Timepoint (hr) Value: 6
  misc_feature: MA Experiment 20000070 PARAMETER Experiment Name: At_100uM_ABA_Mutants_cDNA_P Parameter: Tissue Value: Aerial
  misc_feature: MA Experiment 20000070 PARAMETER Experiment Name: At_100uM_ABA_Mutants_cDNA_P Parameter: Treatment Value: 100uM ABA vs. No Treatment
  misc_feature: MA Experiment ID: 20000071 Result: Up-regulated in Transcription
  misc_feature: MA Experiment 20000071 PARAMETER Experiment Name: At_100uM_ABA_Mutants_cDNA_P Parameter: Plant Line Value: CS8104
  misc_feature: MA Experiment 20000071 PARAMETER Experiment Name: At_100uM_ABA_Mutants_cDNA_P Parameter: Timepoint (hr) Value: 6
  misc_feature: MA Experiment 20000071 PARAMETER Experiment Name: At_100uM_ABA_Mutants_cDNA_P Parameter: Tissue Value: Aerial
  misc_feature: MA Experiment 20000071 PARAMETER Experiment Name: At_100uM_ABA_Mutants_cDNA_P Parameter: Treatment Value: 100uM ABA vs. No Treatment
  misc_feature: MA Experiment ID: 20000072 Result: Up-regulated in Transcription
  misc_feature: MA Experiment 20000072 PARAMETER Experiment Name: At_100uM_ABA_Mutants_cDNA_P Parameter: Plant Line Value: CS8105
  misc_feature: MA Experiment 20000072 PARAMETER Experiment Name: At_100uM_ABA_Mutants_cDNA_P Parameter: Timepoint (hr) Value: 6
  misc_feature: MA Experiment 20000072 PARAMETER Experiment Name: At_100uM_ABA_Mutants_cDNA_P Parameter: Tissue Value: Aerial
  misc_feature: MA Experiment 20000072 PARAMETER Experiment Name: At_100uM_ABA_Mutants_cDNA_P Parameter: Treatment Value: 100uM ABA vs. No Treatment
  misc_feature: MA Experiment ID: 20000087 Result: Up-regulated in Transcription
  misc_feature: MA Experiment 20000087 PARAMETER Experiment Name: At_100uM_ABA_Mutants_cDNA_P Parameter: Plant Line Value: WS
  misc_feature: MA Experiment 20000087 PARAMETER Experiment Name: At_100uM_ABA_Mutants_cDNA_P Parameter: Timepoint (hr) Value: 6
  misc_feature: MA Experiment 20000087 PARAMETER Experiment Name: At_100uM_ABA_Mutants_cDNA_P Parameter: Tissue Value: Aerial
  misc_feature: MA Experiment 20000087 PARAMETER Experiment Name: At_100uM_ABA_Mutants_cDNA_P Parameter: Treatment Value: 100uM ABA vs. No Treatment
  misc_feature: MA Experiment ID: 20000088 Result: Up-regulated in Transcription
  misc_feature: MA Experiment 20000088 PARAMETER Experiment Name: At_100uM_ABA_Mutants_cDNA_P Parameter: Plant Line Value: Landsberg
  misc_feature: MA Experiment 20000088 PARAMETER Experiment Name: At_100uM_ABA_Mutants_cDNA_P Parameter: Timepoint (hr) Value: 6
  misc_feature: MA Experiment 20000088 PARAMETER Experiment Name: At_100uM_ABA_Mutants_cDNA_P Parameter: Tissue Value: Aerial
  misc_feature: MA Experiment 20000088 PARAMETER Experiment Name: At_100uM_ABA_Mutants_cDNA_P Parameter: Treatment Value: 100uM ABA vs. No Treatment
  misc_feature: MA Experiment ID: 20000089 Result: Up-regulated in Transcription
  misc_feature: MA Experiment ID: 20000093 Result: Down-regulated in Transcription
  misc_feature: MA Experiment 20000093 PARAMETER Experiment Name: At_42deg_Heat_cDNA_P Parameter: Temperature (deg C) Value: 42 vs. 22
  misc_feature: MA Experiment 20000093 PARAMETER Experiment Name: At_42deg_Heat_cDNA_P Parameter: Timepoint (hr) Value: 0.5
  misc_feature: MA Experiment 20000093 PARAMETER Experiment Name: At_42deg_Heat_cDNA_P Parameter: Tissue Value: Aerial
  misc_feature: MA Experiment ID: 20000111 Result: Down-regulated in Transcription
  misc_feature: MA Experiment 20000111 PARAMETER Experiment Name: At_42deg_Heat_cDNA_P Parameter: Temperature (deg C) Value: 42 vs. 22
  misc_feature: MA Experiment 20000111 PARAMETER Experiment Name: At_42deg_Heat_cDNA_P Parameter: Timepoint (hr) Value: 6
  misc_feature: MA Experiment 20000111 PARAMETER Experiment Name: At_42deg_Heat_cDNA_P Parameter: Tissue Value: Aerial
  misc_feature: MA Experiment ID: 20000113 Result: Down-regulated in Transcription
  misc_feature: MA Experiment 20000113 PARAMETER Experiment Name: At_42deg_Heat_cDNA_P Parameter: Temperature (deg C) Value: 42 vs. 22
  misc_feature: MA Experiment 20000113 PARAMETER Experiment Name: At_42deg_Heat_cDNA_P Parameter: Timepoint (hr) Value: 8
  misc_feature: MA Experiment 20000113 PARAMETER Experiment Name: At_42deg_Heat_cDNA_P Parameter: Tissue Value: Aerial
  misc_feature: MA Experiment ID: 20000117 Result: Up-regulated in Transcription
  misc_feature: MA Experiment 20000117 PARAMETER Experiment Name: At_100uM_ABA_Mutants_cDNA_P Parameter: Plant Line Value: Columbia
  misc_feature: MA Experiment 20000117 PARAMETER Experiment Name: At_100uM_ABA_Mutants_cDNA_P Parameter: Timepoint (hr) Value: 6
  misc_feature: MA Experiment 20000117 PARAMETER Experiment Name: At_100uM_ABA_Mutants_cDNA_P Parameter: Tissue Value: Aerial
  misc_feature: MA Experiment 20000117 PARAMETER Experiment Name: At_100uM_ABA_Mutants_cDNA_P Parameter: Treatment Value: 100uM ABA vs. No Treatment
  misc_feature: MA Experiment ID: 20000173 Result: Down-regulated in Transcription
  misc_feature: MA Experiment 20000173 PARAMETER Experiment Name: At_42deg_Heat_P Parameter: Age (day) Value: 14
  misc_feature: MA Experiment 20000173 PARAMETER Experiment Name: At_42deg_Heat_P Parameter: Organism Value: A. thaliana
  misc_feature: MA Experiment 20000173 PARAMETER Experiment Name: At_42deg_Heat_P Parameter: Plant Line Value: WS
  misc_feature: MA Experiment 20000173 PARAMETER Experiment Name: At_42deg_Heat_P Parameter: Temperature (deg C) Value: 42 vs. 22
  misc_feature: MA Experiment 20000173 PARAMETER Experiment Name: At_42deg_Heat_P Parameter: Timepoint (hr) Value: 6
  misc_feature: MA Experiment 20000173 PARAMETER Experiment Name: At_42deg_Heat_P Parameter: Tissue Value: Aerial
  misc_feature: MA Experiment ID: 20000182 Result: Up-regulated in Transcription
  misc_feature: MA Experiment 20000182 PARAMETER Experiment Name: At_2mM_SA_P Parameter: Age (day) Value: 14
  misc_feature: MA Experiment 20000182 PARAMETER Experiment Name: At_2mM_SA_P Parameter: Organism Value: A. thaliana
  misc_feature: MA Experiment 20000182 PARAMETER Experiment Name: At_2mM_SA_P Parameter: Plant Line Value: WS
  misc_feature: MA Experiment 20000182 PARAMETER Experiment Name: At_2mM_SA_P Parameter: Timepoint (hr) Value: 6
  misc_feature: MA Experiment 20000182 PARAMETER Experiment Name: At_2mM_SA_P Parameter: Tissue Value: Aerial
  misc_feature: MA Experiment 20000182 PARAMETER Experiment Name: At_2mM_SA_P Parameter: Treatment Value: 2mM SA vs. No Treatment
  misc_feature: MA Experiment ID: 20000184 Result: Down-regulated in Transcription
  misc_feature: MA Experiment 20000184 PARAMETER Experiment Name: At_Shoots__P Parameter: Age (day) Value: 7
  misc_feature: MA Experiment 20000184 PARAMETER Experiment Name: At_Shoots__P Parameter: Tissue Value: Shoots vs. Whole Plant
  misc_feature: MA Experiment ID: 20000185 Result: Down-regulated in Transcription
  misc_feature: MA Experiment 20000185 PARAMETER Experiment Name: At_Roots__P Parameter: Age (day) Value: 7 vs. 21
  misc_feature: MA Experiment 20000185 PARAMETER Experiment Name: At_Roots__P Parameter: Organism Value: A. thaliana
  misc_feature: MA Experiment 20000185 PARAMETER Experiment Name: At_Roots__P Parameter: Tissue Value: Roots vs. Whole Plant
  misc_feature: MA Experiment ID: 20000227 Result: Down-regulated in Transcription
  misc_feature: MA Experiment 20000227 PARAMETER Experiment Name: At_Root-Tips-vs-Tops_P Parameter: Tissue Value: Root Tips vs. Root Tops
  misc_feature: MA Experiment ID: 20000234 Result: Down-regulated in Transcription
  misc_feature: MA Experiment 20000234 PARAMETER Experiment Name: At_Siliques_P Parameter: Age (day) Value: 21
  misc_feature: MA Experiment 20000234 PARAMETER Experiment Name: At_Siliques_P Parameter: Organism Value: A. thaliana
  misc_feature: MA Experiment 20000234 PARAMETER Experiment Name: At_Siliques_P Parameter: Plant Line Value: WS
  misc_feature: MA Experiment 20000234 PARAMETER Experiment Name: At_Siliques_P Parameter: Tissue Value: Less Than 5mm Siliques vs. Whole Plant
  misc_feature: MA Experiment ID: 20000265 Result: Down-regulated in Transcription
  misc_feature: MA Experiment 20000265 PARAMETER Experiment Name: At_Open_Flower_P Parameter: Age (day) Value: 21
  misc_feature: MA Experiment 20000265 PARAMETER Experiment Name: At_Open_Flower_P Parameter: Plant Line Value: WS
  misc_feature: MA Experiment 20000265 PARAMETER Experiment Name: At_Open_Flower_P Parameter: Tissue Value: Closed Flower vs. Whole Plant
  misc_feature: MA Experiment ID: 20000437 Result: Up-regulated in Transcription
  misc_feature: MA Experiment 20000437 PARAMETER Experiment Name: At_Drought_P Parameter: Age (day) Value: 8
  misc_feature: MA Experiment 20000437 PARAMETER Experiment Name: At_Drought_P Parameter: Organism Value: A. thaliana
  misc_feature: MA Experiment 20000437 PARAMETER Experiment Name: At_Drought_P Parameter: Plant Line Value: WS
  misc_feature: MA Experiment 20000437 PARAMETER Experiment Name: At_Drought_P Parameter: Timepoint (hr) Value: 24
  misc_feature: MA Experiment 20000437 PARAMETER Experiment Name: At_Drought_P Parameter: Tissue Value: Whole Plant
  misc_feature: MA Experiment 20000437 PARAMETER Experiment Name: At_Drought_P Parameter: Treatment Value: Drought vs. No Drought
  misc_feature: MA Experiment ID: 20000438 Result: Down-regulated in Transcription
  misc_feature: MA Experiment 20000438 PARAMETER Experiment Name: At_Shoots__P Parameter: Age (day) Value: 14
  misc_feature: MA Experiment 20000438 PARAMETER Experiment Name: At_Shoots__P Parameter: Tissue Value: Shoots vs. Whole Plant
  misc_feature: MA Experiment ID: 20000451 Result: Down-regulated in Transcription
  misc_feature: MA Experiment 20000451 PARAMETER Experiment Name: At_CS6879_Shoots-Roots_P Parameter: Age (day) Value: 14
  misc_feature: MA Experiment 20000451 PARAMETER Experiment Name: At_CS6879_Shoots-Roots_P Parameter: Organism Value: A. thaliana
  misc_feature: MA Experiment 20000451 PARAMETER Experiment Name: At_CS6879_Shoots-Roots_P Parameter: Plant Line Value: CS6879 vs. WS
  misc_feature: MA Experiment 20000451 PARAMETER Experiment Name: At_CS6879_Shoots-Roots_P Parameter: Tissue Value: Roots
  misc_feature: MA Experiment ID: 20000573 Result: Up-regulated in Transcription
  misc_feature: MA Experiment 20000573 PARAMETER Experiment Name: At_100uM_ABA_Mutants__P Parameter: Organism Value: A. thaliana
  misc_feature: MA Experiment 20000573 PARAMETER Experiment Name: At_100uM_ABA_Mutants__P Parameter: Plant Line Value: CS22 vs. Ler wt
  misc_feature: MA Experiment 20000573 PARAMETER Experiment Name: At_100uM_ABA_Mutants__P Parameter: Timepoint (hr) Value: N/A
  misc_feature: MA Experiment 20000573 PARAMETER Experiment Name: At_100uM_ABA_Mutants__P Parameter: Tissue Value: Whole Plant
  misc_feature: MA Experiment 20000573 PARAMETER Experiment Name: At_100uM_ABA_Mutants__P Parameter: Treatment Value: None
  misc_feature: MA Experiment ID: 20000574 Result: Up-regulated in Transcription
  misc_feature: MA Experiment 20000574 PARAMETER Experiment Name: At_100uM_ABA_Mutants__P Parameter: Organism Value: A. thaliana
  misc_feature: MA Experiment 20000574 PARAMETER Experiment Name: At_100uM_ABA_Mutants__P Parameter: Plant Line Value: CS23 vs. Ler wt
  misc_feature: MA Experiment 20000574 PARAMETER Experiment Name: At_100uM_ABA_Mutants__P Parameter: Timepoint (hr) Value: N/A
  misc_feature: MA Experiment 20000574 PARAMETER Experiment Name: At_100uM_ABA_Mutants__P Parameter: Tissue Value: Whole Plant
  misc_feature: MA Experiment 20000574 PARAMETER Experiment Name: At_100uM_ABA_Mutants__P Parameter: Treatment Value: None
  misc_feature: MA Experiment ID: 20001904 Result: Up-regulated in Transcription
  misc_feature: MA Experiment 20001904 PARAMETER Experiment Name: At_Drought_Reproduction_P Parameter: Age (day) Value: 37
  misc_feature: MA Experiment 20001904 PARAMETER Experiment Name: At_Drought_Reproduction_P Parameter: Organism Value: A. thaliana
  misc_feature: MA Experiment 20001904 PARAMETER Experiment Name: At_Drought_Reproduction_P Parameter: Plant Line Value: WS
  misc_feature: MA Experiment 20001904 PARAMETER Experiment Name: At_Drought_Reproduction_P Parameter: Timepoint (day) Value: 7
  misc_feature: MA Experiment 20001904 PARAMETER Experiment Name: At_Drought_Reproduction_P Parameter: Tissue Value: Rosettes
  misc_feature: MA Experiment 20001904 PARAMETER Experiment Name: At_Drought_Reproduction_P Parameter: Treatment Value: Drought vs. No Drought
  misc_feature: MA Experiment ID: 20001905 Result: Up-regulated in Transcription
  misc_feature: MA Experiment 20001905 PARAMETER Experiment Name: At_Drought_Reproduction_P Parameter: Age (day) Value: 40
  misc_feature: MA Experiment 20001905 PARAMETER Experiment Name: At_Drought_Reproduction_P Parameter: Organism Value: A. thaliana
  misc_feature: MA Experiment 20001905 PARAMETER Experiment Name: At_Drought_Reproduction_P Parameter: Plant Line Value: WS
  misc_feature: MA Experiment 20001905 PARAMETER Experiment Name: At_Drought_Reproduction_P Parameter: Timepoint (day) Value: 10
  misc_feature: MA Experiment 20001905 PARAMETER Experiment Name: At_Drought_Reproduction_P Parameter: Tissue Value: Rosettes
  misc_feature: MA Experiment 20001905 PARAMETER Experiment Name: At_Drought_Reproduction_P Parameter: Treatment Value: Drought vs. No Drought
  misc_feature: MA Experiment ID: 20001911 Result: Up-regulated in Transcription
  misc_feature: MA Experiment 20001911 PARAMETER Experiment Name: At_Drought_Reproduction_P Parameter: Age (day) Value: 40
  misc_feature: MA Experiment 20001911 PARAMETER Experiment Name: At_Drought_Reproduction_P Parameter: Organism Value: A. thaliana
  misc_feature: MA Experiment 20001911 PARAMETER Experiment Name: At_Drought_Reproduction_P Parameter: Plant Line Value: WS
  misc_feature: MA Experiment 20001911 PARAMETER Experiment Name: At_Drought_Reproduction_P Parameter: Timepoint (day) Value: 10
  misc_feature: MA Experiment 20001911 PARAMETER Experiment Name: At_Drought_Reproduction_P Parameter: Tissue Value: Flowers
  misc_feature: MA Experiment 20001911 PARAMETER Experiment Name: At_Drought_Reproduction_P Parameter: Treatment Value: Drought vs. No Drought
ccacgcgtccgccacgcctaaaaaaaagaaaaaagagacagaagaagaaaaagataaagaagaatcaaactttgtaaccctttagcagcaatggcgatggctttcaagatggcgacgacggggatgcgtgtgacggatgagtgtacgagttcattcatggacatgaaatggaagaaagttcatagatacatcgttttcaagatcgaagagaagtcacgtaaagtcaccgtcgataaagtcggcggcgccggtgaaagctaccacgatctcgaagattctttaccggtggatgattgtcgctacgctgtctttgatttcgactttgtcaccgtcgataactgccgcaagagcaagatcttcttcattgcatggtcaccggaggcatcaaagataagggcaaagatattgtacgcaacgtcgaaagatgggctgaggagagtgttggaagggattcactatgaactccaagctactgatccgacggagatgggtttcgatattatccaagaccgtgccaaatagattgatcacttaagagaatatgatttgactcactttgtcaataattaacattaattaggtcatcggttaatgtttaattattgctggttagtgcttactcttttttgagtttattatccttgatcagtcttaccggcactatcctttaattatgacgtttgtgttttgattgtgttgttaaaatatttttttgtcggttaagcaaacataaaaagctacgaatttgtcctacgagtaacggatattatacatttatgagagattttatttt

SEQ ID NO: 108529 - protein, 143 aa, Arabidopsis thaliana; identical to SEQ ID NO: 36262
  peptide (1)..(143): Ceres Seq. ID no. 13667787
  misc_feature (16)..(143): Pfam Name: Cofilin/tropomyosin-type actin-binding protein Pfam Description: Cofilin/tropomyosin-type actin-binding protein
  misc_feature (1)..(143): Homolog of NCBI NO: 18398187 NR Description: actin depolymerizing factor 5 [Arabidopsis
  misc_feature (12)..(143): Homolog of NCBI NO: 25295742 NR Description: actin depolymerizing factor 5 [imported] -
  misc_feature (14)..(143): Homolog of NCBI NO: 15236233 NR Description: actin depolymerizing factor - like protein
  misc_feature (7)..(143): Homolog of NCBI NO: 7330254 NR Description: actin depolymerizing factor [Elaeis guineensis]
  misc_feature (8)..(142): Homolog of NCBI NO: 4566614 NR Description: actin depolymerizing factor [Populus x canescens]
  misc_feature (3)..(142): Homolog of NCBI NO: 32363121 NR Description: Actin-depolymerizing factor (ADF)
  misc_feature (8)..(142): Homolog of NCBI NO: 24745620 NR Description: actin depolymerizing factor 6 [Solanum tuberosum]
  misc_feature (8)..(142): Homolog of NCBI NO: 18402587 NR Description: actin depolymerizing factor 6 [Arabidopsis
  misc_feature (8)..(142): Homolog of NCBI NO: 17366768 NR Description: Actin-depolymerizing factor 1 (ADF 1)
  misc_feature (8)..(142): Homolog of NCBI NO: 21554405 NR Description: Actin-depolymerizing factor ADF-6 [Arabidopsis

SEQ ID NO: 108530 - protein, 141 aa, Arabidopsis thaliana; identical to SEQ ID NO: 36263
  peptide (1)..(141): Ceres Seq. ID no. 13667788
  misc_feature (14)..(141): Pfam Name: Cofilin/tropomyosin-type actin-binding protein Pfam Description: Cofilin/tropomyosin-type actin-binding protein
  misc_feature (1)..(141): Homolog of NCBI NO: 18398187 NR Description: actin depolymerizing factor 5 [Arabidopsis
  misc_feature (10)..(141): Homolog of NCBI NO: 25295742 NR Description: actin depolymerizing factor 5 [imported] -
  misc_feature (12)..(141): Homolog of NCBI NO: 15236233 NR Description: actin depolymerizing factor - like protein
  misc_feature (5)..(141): Homolog of NCBI NO: 7330254 NR Description: actin depolymerizing factor [Elaeis guineensis]
  misc_feature (6)..(140): Homolog of NCBI NO: 4566614 NR Description: actin depolymerizing factor [Populus x canescens]
  misc_feature (1)..(140): Homolog of NCBI NO: 32363121 NR Description: Actin-depolymerizing factor (ADF)
  misc_feature (6)..(140): Homolog of NCBI NO: 24745620 NR Description: actin depolymerizing factor 6 [Solanum tuberosum]
  misc_feature (6)..(140): Homolog of NCBI NO: 18402587 NR Description: actin depolymerizing factor 6 [Arabidopsis
  misc_feature (6)..(140): Homolog of NCBI NO: 17366768 NR Description: Actin-depolymerizing factor 1 (ADF 1)
  misc_feature (6)..(140): Homolog of NCBI NO: 21554405 NR Description: Actin-depolymerizing factor ADF-6 [Arabidopsis

SEQ ID NO: 108531 - protein, 137 aa, Arabidopsis thaliana; identical to SEQ ID NO: 36264
  peptide (1)..(137): Ceres Seq. ID no. 13667789
  misc_feature (10)..(137): Pfam Name: Cofilin/tropomyosin-type actin-binding protein Pfam Description: Cofilin/tropomyosin-type actin-binding protein
  misc_feature (1)..(137): Homolog of NCBI NO: 18398187 NR Description: actin depolymerizing factor 5 [Arabidopsis
  misc_feature (6)..(137): Homolog of NCBI NO: 25295742 NR Description: actin depolymerizing factor 5 [imported] -
  misc_feature (8)..(137): Homolog of NCBI NO: 15236233 NR Description: actin depolymerizing factor - like protein
  misc_feature (1)..(137): Homolog of NCBI NO: 7330254 NR Description: actin depolymerizing factor [Elaeis guineensis]
  misc_feature (2)..(136): Homolog of NCBI NO: 4566614 NR Description: actin depolymerizing factor [Populus x canescens]
  misc_feature (1)..(136): Homolog of NCBI NO: 32363121 NR Description: Actin-depolymerizing factor (ADF)
  misc_feature (2)..(136): Homolog of NCBI NO: 24745620 NR Description: actin depolymerizing factor 6 [Solanum tuberosum]
  misc_feature (2)..(136): Homolog of NCBI NO: 18402587 NR Description: actin depolymerizing factor 6 [Arabidopsis
  misc_feature (2)..(136): Homolog of NCBI NO: 17366768 NR Description: Actin-depolymerizing factor 1 (ADF 1)
  misc_feature (2)..(136): Homolog of NCBI NO: 21554405 NR Description: Actin-depolymerizing factor ADF-6 [Arabidopsis

SEQ ID NO: 108532 - DNA, 903 bp, Arabidopsis thaliana
  misc_feature (1)..(903): Ceres Seq. ID no. 13667790
  misc_feature: MA Experiment ID: 108434 Result: Up-regulated in Transcription
  misc_feature: MA Experiment 108434 PARAMETER Experiment Name: At_Root_Tips_cDNA_P Parameter: Tissue Value: Root Tips
  misc_feature: MA Experiment ID: 108461 Result: Up-regulated in Transcription
  misc_feature: MA Experiment 108461 PARAMETER Experiment Name: At_Germinating_Seeds_cDNA_P Parameter: Age (day) Value: 1 vs. 0
  misc_feature: MA Experiment 108461 PARAMETER Experiment Name: At_Germinating_Seeds_cDNA_P Parameter: Tissue Value: Germinating Seeds
  misc_feature: MA Experiment ID: 108488 Result: Up-regulated in Transcription
  misc_feature: MA Experiment ID: 20000069 Result: Up-regulated in Transcription
  misc_feature: MA Experiment 20000069 PARAMETER Experiment Name: At_100uM_ABA_Mutants_cDNA_P Parameter: Plant Line Value: CS23
  misc_feature: MA Experiment 20000069 PARAMETER Experiment Name: At_100uM_ABA_Mutants_cDNA_P Parameter: Timepoint (hr) Value: 6
  misc_feature: MA Experiment 20000069 PARAMETER Experiment Name: At_100uM_ABA_Mutants_cDNA_P Parameter: Tissue Value: Aerial
  misc_feature: MA Experiment 20000069 PARAMETER Experiment Name: At_100uM_ABA_Mutants_cDNA_P Parameter: Treatment Value: 100uM ABA vs. No Treatment
  misc_feature: MA Experiment ID: 20000072 Result: Up-regulated in Transcription
  misc_feature: MA Experiment 20000072 PARAMETER Experiment Name: At_100uM_ABA_Mutants_cDNA_P Parameter: Plant Line Value: CS8105
  misc_feature: MA Experiment 20000072 PARAMETER Experiment Name: At_100uM_ABA_Mutants_cDNA_P Parameter: Timepoint (hr) Value: 6
  misc_feature: MA Experiment 20000072 PARAMETER Experiment Name: At_100uM_ABA_Mutants_cDNA_P Parameter: Tissue Value: Aerial
  misc_feature: MA Experiment 20000072 PARAMETER Experiment Name: At_100uM_ABA_Mutants_cDNA_P Parameter: Treatment Value: 100uM ABA vs. No Treatment
  misc_feature: MA Experiment ID: 20000086 Result: Up-regulated in Transcription
  misc_feature: MA Experiment 20000086 PARAMETER Experiment Name: At_100uM_ABA_Mutants_cDNA_P Parameter: Plant Line Value: CS22
  misc_feature: MA Experiment 20000086 PARAMETER Experiment Name: At_100uM_ABA_Mutants_cDNA_P Parameter: Timepoint (hr) Value: 6
  misc_feature: MA Experiment 20000086 PARAMETER Experiment Name: At_100uM_ABA_Mutants_cDNA_P Parameter: Tissue Value: Aerial
  misc_feature: MA Experiment 20000086 PARAMETER Experiment Name: At_100uM_ABA_Mutants_cDNA_P Parameter: Treatment Value: 100uM ABA vs. No Treatment
  misc_feature: MA Experiment ID: 20000087 Result: Up-regulated in Transcription
  misc_feature: MA Experiment 20000087 PARAMETER Experiment Name: At_100uM_ABA_Mutants_cDNA_P Parameter: Plant Line Value: WS
  misc_feature: MA Experiment 20000087 PARAMETER Experiment Name: At_100uM_ABA_Mutants_cDNA_P Parameter: Timepoint (hr) Value: 6
  misc_feature: MA Experiment 20000087 PARAMETER Experiment Name: At_100uM_ABA_Mutants_cDNA_P Parameter: Tissue Value: Aerial
  misc_feature: MA Experiment 20000087 PARAMETER Experiment Name: At_100uM_ABA_Mutants_cDNA_P Parameter: Treatment Value: 100uM ABA vs. No Treatment
  misc_feature: MA Experiment ID: 20000089 Result: Up-regulated in Transcription
  misc_feature: MA Experiment ID: 20000090 Result: Up-regulated in Transcription
  misc_feature: MA Experiment ID: 20000117 Result: Up-regulated in Transcription
  misc_feature: MA Experiment 20000117 PARAMETER Experiment Name: At_100uM_ABA_Mutants_cDNA_P Parameter: Plant Line Value: Columbia
  misc_feature: MA Experiment 20000117 PARAMETER Experiment Name: At_100uM_ABA_Mutants_cDNA_P Parameter: Timepoint (hr) Value: 6
  misc_feature: MA Experiment 20000117 PARAMETER Experiment Name: At_100uM_ABA_Mutants_cDNA_P Parameter: Tissue Value: Aerial
  misc_feature: MA Experiment 20000117 PARAMETER Experiment Name: At_100uM_ABA_Mutants_cDNA_P Parameter: Treatment Value: 100uM ABA vs. No Treatment
  misc_feature: MA Experiment ID: 20000173 Result: Down-regulated in Transcription
  misc_feature: MA Experiment 20000173 PARAMETER Experiment Name: At_42deg_Heat_P Parameter: Age (day) Value: 14
  misc_feature: MA Experiment 20000173 PARAMETER Experiment Name: At_42deg_Heat_P Parameter: Organism Value: A. thaliana
  misc_feature: MA Experiment 20000173 PARAMETER Experiment Name: At_42deg_Heat_P Parameter: Plant Line Value: WS
  misc_feature: MA Experiment 20000173 PARAMETER Experiment Name: At_42deg_Heat_P Parameter: Temperature (deg C) Value: 42 vs. 22
  misc_feature: MA Experiment 20000173 PARAMETER Experiment Name: At_42deg_Heat_P Parameter: Timepoint (hr) Value: 6
  misc_feature: MA Experiment 20000173 PARAMETER Experiment Name: At_42deg_Heat_P Parameter: Tissue Value: Aerial
  misc_feature: MA Experiment ID: 20000439 Result: Up-regulated in Transcription
  misc_feature: MA Experiment 20000439 PARAMETER Experiment Name: At_Roots__P Parameter: Age (day) Value: 14 vs. 21
  misc_feature: MA Experiment 20000439 PARAMETER Experiment Name: At_Roots__P Parameter: Organism Value: A. thaliana
  misc_feature: MA Experiment 20000439 PARAMETER Experiment Name: At_Roots__P Parameter: Tissue Value: Roots vs. Whole Plant
  misc_feature: MA Experiment ID: 20000794 Result: Down-regulated in Transcription
  misc_feature: MA Experiment 20000794 PARAMETER Experiment Name: At_Petals_P Parameter: Age (day) Value: 23-25 days
  misc_feature: MA Experiment 20000794 PARAMETER Experiment Name: At_Petals_P Parameter: Plant Line Value: WS
  misc_feature: MA Experiment 20000794 PARAMETER Experiment Name: At_Petals_P Parameter: Tissue Value: Petals vs. Whole plant
  misc_feature: MA Experiment ID: 20001905 Result: Down-regulated in Transcription
  misc_feature: MA Experiment 20001905 PARAMETER Experiment Name: At_Drought_Reproduction_P Parameter: Age (day) Value: 40
  misc_feature: MA Experiment 20001905 PARAMETER Experiment Name: At_Drought_Reproduction_P Parameter: Organism Value: A. thaliana
  misc_feature: MA Experiment 20001905 PARAMETER Experiment Name: At_Drought_Reproduction_P Parameter: Plant Line Value: WS
  misc_feature: MA Experiment 20001905 PARAMETER Experiment Name: At_Drought_Reproduction_P Parameter: Timepoint (day) Value: 10
  misc_feature: MA Experiment 20001905 PARAMETER Experiment Name: At_Drought_Reproduction_P Parameter: Tissue Value: Rosettes
  misc_feature: MA Experiment 20001905 PARAMETER Experiment Name: At_Drought_Reproduction_P Parameter: Treatment Value: Drought vs. No Drought
  misc_feature: MA Experiment ID: 20001911 Result: Down-regulated in Transcription
  misc_feature: MA Experiment 20001911 PARAMETER Experiment Name: At_Drought_Reproduction_P Parameter: Age (day) Value: 40
  misc_feature: MA Experiment 20001911 PARAMETER Experiment Name: At_Drought_Reproduction_P Parameter: Organism Value: A. thaliana
  misc_feature: MA Experiment 20001911 PARAMETER Experiment Name: At_Drought_Reproduction_P Parameter: Plant Line Value: WS
  misc_feature: MA Experiment 20001911 PARAMETER Experiment Name: At_Drought_Reproduction_P Parameter: Timepoint (day) Value: 10
  misc_feature: MA Experiment 20001911 PARAMETER Experiment Name: At_Drought_Reproduction_P Parameter: Tissue Value: Flowers
  misc_feature: MA Experiment 20001911 PARAMETER Experiment Name: At_Drought_Reproduction_P Parameter: Treatment Value: Drought vs. No Drought
ccacgcgtccgcgttgaccagaaaaacacacagagaaaggagaaaaacatggaggagttggcgcatccgtacgttccgagagatctgaacctacccggatacgtaccaatctcaatgtcaatgtcctccatcgtctctatctacctcggttcttccctccttgttgtctccctcgtctggcttctcttcgggaggaagaaagctaaacttgataagttgcttatgtgttggtggacattcactggtctcactcatgttattctcgagggctatttcgttttctcccctgagtttttcaaggacaacacttctgcttatcttgctgaagtttggaaagaatatagcaaaggtgattcgagatacgtaggtagagattctgcagttgtatctgttgaagggatcactgctgttatcgttggcccagcttctctcctagcaatttacgccattgctaaggagaagtcgtatagttacgtgcttcagcttgcgatttcggtttgccagctctacggatgtgtggtttatttcattactgctatcttggaaggagacaactttgccacaaactctttctactattactcgtactacatcggggctaactgttggtgggtcttgataccttcactcatttctttccgttgctggaaaaagatttgtgcagctgctgccattgccaacaacaacgtcgagacaaagacgaagaagaaaacccgttgaagcaaggatcaaactctcttttatctcttcaggttactgcctctatagcaaatgaacatgagtctccttttgcggataatttctccaaattaaagactttaggtactgttgtctgtctctcttacagcaataaacttgtgaggataattaatccatttttcatatgatatttgcgcttttgtt

SEQ ID NO: 108533 - protein, 239 aa, Arabidopsis thaliana
  peptide (1)..(239): Ceres Seq. ID no. 13667791
  misc_feature (36)..(230): Pfam Name: Emopamil binding protein Pfam Description: Emopamil binding protein
  misc_feature (17)..(239): Homolog of NCBI NO: 4098989 NR Description: phenylalkylamine binding protein homolog
  misc_feature (17)..(239): Homolog of NCBI NO: 15223758 NR Description: C-8,7 sterol isomerase [Arabidopsis thaliana]
  misc_feature (17)..(239): Homolog of NCBI NO: 21554213 NR Description: C-8,7 sterol isomerase [Arabidopsis thaliana]
  misc_feature (22)..(233): Homolog of NCBI NO: 34894044 NR Description: putative C-8,7 sterol isomerase [Oryza sativa
  misc_feature (22)..(237): Homolog of NCBI NO: 33417065 NR Description: Unknown (protein for MGC:68833) [Xenopus laevis]
  misc_feature (16)..(237): Homolog of NCBI NO: 16923992 NR Description: phenylalkylamine Ca2+ antagonist (emopamil)
  misc_feature (22)..(237): Homolog of NCBI NO: 6681255 NR Description: phenylalkylamine Ca2+ antagonist (emopamil)
  misc_feature (22)..(211): Homolog of NCBI NO: 12848900 NR Description: unnamed protein product [Mus musculus]
  misc_feature (22)..(236): Homolog of NCBI NO: 18202586 NR Description: 3-beta-hydroxysteroid-delta(8),delta(7)-isomerase
  misc_feature (22)..(237): Homolog of NCBI NO: 5729810 NR Description: emopamil binding protein (sterol isomerase);
PRVRVDQKNTQRKEKNMEELAHPYVPRDLNLPGYVPISMSMSSIVSIYLGSSLLVVSLVWLLFGRKKAKLDKLLMCWWTFTGLTHVILEGYFVFSPEFFKDNTSAYLAEVWKEYSKGDSRYVGRDSAVVSVEGITAVIVGPASLLAIYAIAKEKSYSYVLQLAISVCQLYGCVVYFITAILEGDNFATNSFYYYSYYIGANCWWVLIPSLISFRCWKKICAAAAIANNNVETKTKKKTR

SEQ ID NO: 108534 - protein, 223 aa, Arabidopsis thaliana
  peptide (1)..(223): Ceres Seq. ID no. 13667792
  misc_feature (20)..(214): Pfam Name: Emopamil binding protein Pfam Description: Emopamil binding protein
  misc_feature (1)..(223): Homolog of NCBI NO: 4098989 NR Description: phenylalkylamine binding protein homolog
  misc_feature (1)..(223): Homolog of NCBI NO: 15223758 NR Description: C-8,7 sterol isomerase [Arabidopsis thaliana]
  misc_feature (1)..(223): Homolog of NCBI NO: 21554213 NR Description: C-8,7 sterol isomerase [Arabidopsis thaliana]
  misc_feature (6)..(217): Homolog of NCBI NO: 34894044 NR Description: putative C-8,7 sterol isomerase [Oryza sativa
  misc_feature (6)..(221): Homolog of NCBI NO: 33417065 NR Description: Unknown (protein for MGC:68833) [Xenopus laevis]
  misc_feature (1)..(221): Homolog of NCBI NO: 16923992 NR Description: phenylalkylamine Ca2+ antagonist (emopamil)
  misc_feature (6)..(221): Homolog of NCBI NO: 6681255 NR Description: phenylalkylamine Ca2+ antagonist (emopamil)
  misc_feature (6)..(195): Homolog of NCBI NO: 12848900 NR Description: unnamed protein product [Mus musculus]
  misc_feature (6)..(220): Homolog of NCBI NO: 18202586 NR Description: 3-beta-hydroxysteroid-delta(8),delta(7)-isomerase
  misc_feature (6)..(221): Homolog of NCBI NO: 5729810 NR Description: emopamil binding protein (sterol isomerase);
MEELAHPYVPRDLNLPGYVPISMSMSSIVSIYLGSSLLVVSLVWLLFGRKKAKLDKLLMCWWTFTGLTHVILEGYFVFSPEFFKDNTSAYLAEVWKEYSKGDSRYVGRDSAVVSVEGITAVIVGPASLLAIYAIAKEKSYSYVLQLAISVCQLYGCVVYFITAILEGDNFATNSFYYYSYYIGANCWWVLIPSLISFRCWKKICAAAAIANNNVETKTKKKTR

SEQ ID NO: 108535 - protein, 201 aa, Arabidopsis thaliana
  peptide (1)..(201): Ceres Seq. ID no. 13667793
  misc_feature (1)..(192): Pfam Name: Emopamil binding protein Pfam Description: Emopamil binding protein
  misc_feature (1)..(201): Homolog of NCBI NO: 4098989 NR Description: phenylalkylamine binding protein homolog
  misc_feature (1)..(201): Homolog of NCBI NO: 15223758 NR Description: C-8,7 sterol isomerase [Arabidopsis thaliana]
  misc_feature (1)..(201): Homolog of NCBI NO: 21554213 NR Description: C-8,7 sterol isomerase [Arabidopsis thaliana]
  misc_feature (1)..(195): Homolog of NCBI NO: 34894044 NR Description: putative C-8,7 sterol isomerase [Oryza sativa
  misc_feature (1)..(199): Homolog of NCBI NO: 33417065 NR Description: Unknown (protein for MGC:68833) [Xenopus laevis]
  misc_feature (1)..(199): Homolog of NCBI NO: 16923992 NR Description: phenylalkylamine Ca2+ antagonist (emopamil)
  misc_feature (1)..(199): Homolog of NCBI NO: 6681255 NR Description: phenylalkylamine Ca2+ antagonist (emopamil)
  misc_feature (1)..(173): Homolog of NCBI NO: 12848900 NR Description: unnamed protein product [Mus musculus]
  misc_feature (1)..(198): Homolog of NCBI NO: 18202586 NR Description: 3-beta-hydroxysteroid-delta(8),delta(7)-isomerase
  misc_feature (1)..(199): Homolog of NCBI NO: 5729810 NR Description: emopamil binding protein (sterol isomerase);
MSMSSIVSIYLGSSLLVVSLVWLLFGRKKAKLDKLLMCWWTFTGLTHVILEGYFVFSPEFFKDNTSAYLAEVWKEYSKGDSRYVGRDSAVVSVEGITAVIVGPASLLAIYAIAKEKSYSYVLQLAISVCQLYGCVVYFITAILEGDNFATNSFYYYSYYIGANCWWVLIPSLISFRCWKKICAAAAIANNNVETKTKKKTR

SEQ ID NO: 108536 - DNA, 987 bp, Arabidopsis thaliana
  misc_feature (1)..(987): Ceres Seq. ID no. 13667797
  misc_feature: MA Experiment ID: 20000184 Result: Down-regulated in Transcription
  misc_feature: MA Experiment 20000184 PARAMETER Experiment Name: At_Shoots__P Parameter: Age (day) Value: 7
  misc_feature: MA Experiment 20000184 PARAMETER Experiment Name: At_Shoots__P Parameter: Tissue Value: Shoots vs. Whole Plant
  misc_feature: MA Experiment ID: 20000211 Result: Up-regulated in Transcription
  misc_feature: MA Experiment 20000211 PARAMETER Experiment Name: At_0.001percent_MeJA__P Parameter: Age (day) Value: 14
  misc_feature: MA Experiment 20000211 PARAMETER Experiment Name: At_0.001percent_MeJA__P Parameter: Organism Value: A. thaliana
  misc_feature: MA Experiment 20000211 PARAMETER Experiment Name: At_0.001percent_MeJA__P Parameter: Plant Line Value: WS
  misc_feature: MA Experiment 20000211 PARAMETER Experiment Name: At_0.001percent_MeJA__P Parameter: Timepoint (hr) Value: 1
  misc_feature: MA Experiment 20000211 PARAMETER Experiment Name: At_0.001percent_MeJA__P Parameter: Tissue Value: Aerial
  misc_feature: MA Experiment 20000211 PARAMETER Experiment Name: At_0.001percent_MeJA__P Parameter: Treatment Value: 0.001percent MeJA vs. No Treatment
  misc_feature: MA Experiment ID: 20000227 Result: Down-regulated in Transcription
  misc_feature: MA Experiment 20000227 PARAMETER Experiment Name: At_Root-Tips-vs-Tops_P Parameter: Tissue Value: Root Tips vs. Root Tops
gtttctttaaggtcttagggtttagtgaagctatagatttcaatttcatacatagttaacgtatagaaggaatcttgggttgatcaatggaaggttgtccaagaaacagagaaatcggtccaaaacttcttgatttgattccacaaggaaggaaatggtaccaagaagacaagaacaacacagatcaggagaagaaacttgagctaaggctgcaccgtggtgatgaagaagatcattcagcaatcaagaagaagaacacagagataagaaacatcaagaaggaaacagaagacaaatctttccactgttttaatggcaatcacttctctccttccaacaaaaccacttctgttcctcacatctcacagaaaagaactgctcctggtccagtggtgggttggcctccggttcgttcgttcagaaagaatctagcgagcacaagctcttcaaagctaggtaacgaatcctctcatggaggtcaaatcaacaagagtgatgatggtgaaaaacaagttgaaaccaagaaggaaggaatgtttgtcaagatcaacatggatggtgttcctattggtcgtaaagttgatctcaatgcttacaacagctacgaacagctctcttttgtcgttgacaaactcttcagaggtctactcgcagctcaaagagatatctctgatggtcaaggagaagagaaacctatcattggattattagatgggaaaggagaatttactttaacctatgaagacaatgaaggggacaagatgcttgttggggatgttccatggcaaatgtttgtttcatctgtgaagagactgcgtgtgattaaaagctctgagatttcatctgccttgacatttggatgcagtaagcaagagaagatgatgcactgaagagtctttttagaaacttttatttcagacagagagtctcaaagctttataaatgtacatctggtttttgttatatataagagttaatcattggttt

SEQ ID NO: 108537 - protein, 267 aa, Arabidopsis thaliana
  peptide (1)..(267): Ceres Seq. ID no. 13667798
  misc_feature (36)..(261): Pfam Name: AUX/IAA family Pfam Description: AUX/IAA family
  misc_feature (1)..(267): Homolog of NCBI NO: 4093155 NR Description: phytochrome-associated protein 1 [Arabidopsis
  misc_feature (1)..(267): Homolog of NCBI NO: 15228226 NR Description: auxin-responsive protein (Indoleacetic protein), putative [Arabidopsis thaliana]
  misc_feature (1)..(267): Homolog of NCBI NO: 21593333 NR Description: phytochrome-associated protein 1 (PAP1)
  misc_feature (1)..(265): Homolog of NCBI NO: 21594025 NR Description: auxin regulated protein IAA18, putative
  misc_feature (1)..(265): Homolog of NCBI NO: 15218080 NR Description: auxin-responsive protein IAA18 (Indoleacetic
  misc_feature (34)..(265): Homolog of NCBI NO: 25296228 NR Description: auxin-induced protein IAA18 [imported] - thaliana (fragment) >gi|2618725|gb|AAB84355.1| IAA18 [Arabidopsis
  misc_feature (79)..(255): Homolog of NCBI NO: 34909384 NR Description: putative phytochrome-associated protein [Oryza
  misc_feature (98)..(251): Homolog of NCBI NO: 34906394 NR Description: P0710E05.9 [Oryza sativa (japonica
  misc_feature (88)..(250): Homolog of NCBI NO: 15225833 NR Description: auxin-responsive protein IAA13 (Indoleacetic
  misc_feature (102)..(250): Homolog of NCBI NO: 30685642 NR Description: auxin-responsive protein IAA13 (Indoleacetic protein 13) [Arabidopsis thaliana] >gi|29028860|gb|AAO64809.1|
MEGCPRNREIGPKLLDLIPQGRKWYQEDKNNTDQEKKLELRLHRGDEEDHSAIKKKNTEIRNIKKETEDKSFHCFNGNHFSPSNKTTSVPHISQKRTAPGPVVGWPPVRSFRKNLASTSSSKLGNESSHGGQINKSDDGEKQVETKKEGMFVKINMDGVPIGRKVDLNAYNSYEQLSFVVDKLFRGLLAAQRDISDGQGEEKPIIGLLDGKGEFTLTYEDNEGDKMLVGDVPWQMFVSSVKRLRVIKSSEISSALTFGCSKQEKMMH

SEQ ID NO: 108538 - DNA, 954 bp, Arabidopsis thaliana
  misc_feature (1)..(954): Ceres Seq. ID no. 13667799
  misc_feature: MA Experiment ID: 108434 Result: Up-regulated in Transcription
  misc_feature: MA Experiment 108434 PARAMETER Experiment Name: At_Root_Tips_cDNA_P Parameter: Tissue Value: Root Tips
  misc_feature: MA Experiment ID: 108462 Result: Down-regulated in Transcription
  misc_feature: MA Experiment 108462 PARAMETER Experiment Name: At_Germinating_Seeds_cDNA_P Parameter: Age (day) Value: 2 vs. 0
  misc_feature: MA Experiment 108462 PARAMETER Experiment Name: At_Germinating_Seeds_cDNA_P Parameter: Tissue Value: Germinating Seeds
  misc_feature: MA Experiment ID: 108463 Result: Down-regulated in Transcription
  misc_feature: MA Experiment 108463 PARAMETER Experiment Name: At_Germinating_Seeds_cDNA_P Parameter: Age (day) Value: 3 vs. 0
  misc_feature: MA Experiment 108463 PARAMETER Experiment Name: At_Germinating_Seeds_cDNA_P Parameter: Tissue Value: Germinating Seeds
  misc_feature: MA Experiment ID: 108464 Result: Down-regulated in Transcription
  misc_feature: MA Experiment 108464 PARAMETER Experiment Name: At_Germinating_Seeds_cDNA_P Parameter: Age (day) Value: 4 vs. 0
  misc_feature: MA Experiment 108464 PARAMETER Experiment Name: At_Germinating_Seeds_cDNA_P Parameter: Tissue Value: Germinating Seeds
  misc_feature: MA Experiment ID: 108585 Result: Up-regulated in Transcription
  misc_feature: MA Experiment 108585 PARAMETER Experiment Name: At_5mM_NaNP_cDNA_P Parameter: Timepoint (hr) Value: 6
  misc_feature: MA Experiment 108585 PARAMETER Experiment Name: At_5mM_NaNP_cDNA_P Parameter: Tissue Value: Aerial
  misc_feature: MA Experiment 108585 PARAMETER Experiment Name: At_5mM_NaNP_cDNA_P Parameter: Treatment Value: null
  misc_feature: MA Experiment ID: 20000068 Result: Down-regulated in Transcription
  misc_feature: MA Experiment ID: 20000224 Result: Down-regulated in Transcription
tgacaacatggagtcccacaggtcgactattccaagtcgaatacgccatggaagctgtgaaacaaggctccgcagcaataggactcagatctcgctctcatgtcgtcctcgcttgtgtcaacaaagcacaatcagagctctcttctcatcaaaggaagatctttaaagtcgatgatcatattggtgttgctattgctggtctcactgctgatggtcgtgttctctctcgatatatgagatctgagtctattaatcactcttttacttatgagtctcctcttcctgttggtcgtcttgttgttcatcttgctgataaagctcaggtatgtacccaacgatcatggaaacggccttatggtgtgggtttgctggtaggtggattggacgagtcaggagctcacctctactacaactgccctagcggaaactactttgaatatcaagcattcgctatcgggtctcgttcacaagctgcgaaaacctatctggagcgcaaattcgagagcttccaagaatcatcaaaagaagatctgataaaagatgctattatggccataagggaaactttgcaaggggaaacactgaagagctcgctctgcactgtttctgttctaggagtcgatgaaccattccatttcttggaccaggaaagcattcaaaaggtgattgatacgtttgagaaggttcctgaggaagaggaagatgctggtgagggtgaggccgaacccgaagctgctcctggtgctgctggaactggtgaacaaggtggttcaggtgatcaagatgttgcaccaatggaaatttgagcaagagggaatgagttcaaagttggattttctaaccaattttcttgtgtgtagctctttgatatgttccaacttccaagtacaattgtggtttttattcggctttgtttatttaacagcttggaacaaggagttattctaaattact

SEQ ID NO: 108539 - protein, 267 aa, Arabidopsis thaliana
  peptide (1)..(267): Ceres Seq. ID no. 13667800
  misc_feature (19)..(204): Pfam Name: Proteasome A-type and B-type Pfam Description: Proteasome A-type and B-type
  misc_feature (1)..(267): Homolog of NCBI NO: 2511586 NR Description: multicatalytic endopeptidase [Arabidopsis
  misc_feature (1)..(267): Homolog of NCBI NO: 15220151 NR Description: 20S proteasome alpha subunit F2 (PAF2)
  misc_feature (1)..(267): Homolog of NCBI NO: 25290066 NR Description: C 3.4.25.1 proteasome endopeptidase complex ()
  misc_feature (1)..(267): Homolog of NCBI NO: 21537234 NR Description: 20S proteasome subunit PAF1 [Arabidopsis thaliana]
  misc_feature (1)..(267): Homolog of NCBI NO: 15239061 NR Description: 20S proteasome alpha subunit F1 (PAF1)
  misc_feature (1)..(267): Homolog of NCBI NO: 22947842 NR Description: 20S proteasome alpha 6 subunit [Nicotiana
  misc_feature (1)..(240): Homolog of NCBI NO: 1709758 NR Description: Proteasome subunit alpha type 1 (20S proteasome
  misc_feature (1)..(152): Homolog of NCBI NO: 14594923 NR Description: putative alpha6 proteasome subunit [Nicotiana
  misc_feature (1)..(226): Homolog of NCBI NO: 12229911 NR Description: Proteasome subunit alpha type 1 (Proteasome
  misc_feature (1)..(255): Homolog of NCBI NO: 31236614 NR Description: ENSANGP00000014428 [Anopheles gambiae]
TTWSPTGRLFQVEYAMEAVKQGSAAIGLRSRSHVVLACVNKAQSELSSHQRKIFKVDDHIGVAIAGLTADGRVLSRYMRSESINHSFTYESPLPVGRLVVHLADKAQVCTQRSWKRPYGVGLLVGGLDESGAHLYYNCPSGNYFEYQAFAIGSRSQAAKTYLERKFESFQESSKEDLIKDAIMAIRETLQGETLKSSLCTVSVLGVDEPFHFLDQESIQKVIDTFEKVPEEEEDAGEGEAEPEAAPGAAGTGEQGGSGDQDVAPMEI

SEQ ID NO: 108540 - protein, 252 aa, Arabidopsis thaliana; identical to SEQ ID NO: 35616
  peptide (1)..(252): Ceres Seq. ID no. 13667801
  misc_feature (4)..(189): Pfam Name: Proteasome A-type and B-type Pfam Description: Proteasome A-type and B-type
  misc_feature (1)..(252): Homolog of NCBI NO: 2511586 NR Description: multicatalytic endopeptidase [Arabidopsis
  misc_feature (1)..(252): Homolog of NCBI NO: 15220151 NR Description: 20S proteasome alpha subunit F2 (PAF2)
  misc_feature (1)..(252): Homolog of NCBI NO: 25290066 NR Description: C 3.4.25.1 proteasome endopeptidase complex ()
  misc_feature (1)..(252): Homolog of NCBI NO: 21537234 NR Description: 20S proteasome subunit PAF1 [Arabidopsis thaliana]
  misc_feature (1)..(252): Homolog of NCBI NO: 15239061 NR Description: 20S proteasome alpha subunit F1 (PAF1)
  misc_feature (1)..(252): Homolog of NCBI NO: 22947842 NR Description: 20S proteasome alpha 6 subunit [Nicotiana
  misc_feature (1)..(225): Homolog of NCBI NO: 1709758 NR Description: Proteasome subunit alpha type 1 (20S proteasome
  misc_feature (1)..(137): Homolog of NCBI NO: 14594923 NR Description: putative alpha6 proteasome subunit [Nicotiana
  misc_feature (1)..(211): Homolog of NCBI NO: 12229911 NR Description: Proteasome subunit alpha type 1 (Proteasome
  misc_feature (1)..(240): Homolog of NCBI NO: 31236614 NR Description: ENSANGP00000014428 [Anopheles gambiae]

SEQ ID NO: 108541 - protein, 190 aa, Arabidopsis thaliana
  peptide (1)..(190): Ceres Seq. ID no. 13667802
  misc_feature (1)..(127): Pfam Name: Proteasome A-type and B-type Pfam Description: Proteasome A-type and B-type
  misc_feature (1)..(190): Homolog of NCBI NO: 2511586 NR Description: multicatalytic endopeptidase [Arabidopsis
  misc_feature (1)..(190): Homolog of NCBI NO: 15220151 NR Description: 20S proteasome alpha subunit F2 (PAF2)
  misc_feature (1)..(190): Homolog of NCBI NO: 25290066 NR Description: C 3.4.25.1 proteasome endopeptidase complex ()
  misc_feature (1)..(190): Homolog of NCBI NO: 21537234 NR Description: 20S proteasome subunit PAF1 [Arabidopsis thaliana]
  misc_feature (1)..(190): Homolog of NCBI NO: 15239061 NR Description: 20S proteasome alpha subunit F1 (PAF1)
  misc_feature (1)..(190): Homolog of NCBI NO: 22947842 NR Description: 20S proteasome alpha 6 subunit [Nicotiana
  misc_feature (1)..(163): Homolog of NCBI NO: 1709758 NR Description: Proteasome subunit alpha type 1 (20S proteasome
  misc_feature (1)..(75): Homolog of NCBI NO: 14594923 NR Description: putative alpha6 proteasome subunit [Nicotiana
  misc_feature (1)..(149): Homolog of NCBI NO: 12229911 NR Description: Proteasome subunit alpha type 1 (Proteasome
  misc_feature (1)..(178): Homolog of NCBI NO: 31236614 NR Description: ENSANGP00000014428 [Anopheles gambiae]
MRSESINHSFTYESPLPVGRLVVHLADKAQVCTQRSWKRPYGVGLLVGGLDESGAHLYYNCPSGNYFEYQAFAIGSRSQAAKTYLERKFESFQESSKEDLIKDAIMAIRETLQGETLKSSLCTVSVLGVDEPFHFLDQESIQKVIDTFEKVPEEEEDAGEGEAEPEAAPGAAGTGEQGGSGDQDVAPMEI

SEQ ID NO: 108542 - DNA, 1304 bp, Arabidopsis thaliana
  misc_feature (1)..(1304): Ceres Seq. ID no. 13667803
  misc_feature: MA Experiment ID: 108434 Result: Down-regulated in Transcription
  misc_feature: MA Experiment 108434 PARAMETER Experiment Name: At_Root_Tips_cDNA_P Parameter: Tissue Value: Root Tips
  misc_feature: MA Experiment ID: 108577 Result: Down-regulated in Transcription
  misc_feature: MA Experiment 108577 PARAMETER Experiment Name: At_42deg_Heat_cDNA_P Parameter: Temperature (deg C) Value: 42 vs. 22
  misc_feature: MA Experiment 108577 PARAMETER Experiment Name: At_42deg_Heat_cDNA_P Parameter: Timepoint (hr) Value: 6
  misc_feature: MA Experiment 108577 PARAMETER Experiment Name: At_42deg_Heat_cDNA_P Parameter: Tissue Value: Aerial
  misc_feature: MA Experiment ID: 108585 Result: Up-regulated in Transcription
  misc_feature: MA Experiment 108585 PARAMETER Experiment Name: At_5mM_NaNP_cDNA_P Parameter: Timepoint (hr) Value: 6
  misc_feature: MA Experiment 108585 PARAMETER Experiment Name: At_5mM_NaNP_cDNA_P Parameter: Tissue Value: Aerial
  misc_feature: MA Experiment 108585 PARAMETER Experiment Name: At_5mM_NaNP_cDNA_P Parameter: Treatment Value: null
  misc_feature: MA Experiment ID: 108667 Result: Up-regulated in Transcription
  misc_feature: MA Experiment 108667 PARAMETER Experiment Name: At_2mM_SA_cDNA_P Parameter: Plant Line Value: WS
  misc_feature: MA Experiment 108667 PARAMETER Experiment Name: At_2mM_SA_cDNA_P Parameter: Timepoint (hr) Value: 1
  misc_feature: MA Experiment 108667 PARAMETER Experiment Name: At_2mM_SA_cDNA_P Parameter: Treatment Value: 2mM SA vs. No Treatment
  misc_feature: MA Experiment ID: 108668 Result: Up-regulated in Transcription
  misc_feature: MA Experiment 108668 PARAMETER Experiment Name: At_2mM_SA_cDNA_P Parameter: Plant Line Value: WS
  misc_feature: MA Experiment 108668 PARAMETER Experiment Name: At_2mM_SA_cDNA_P Parameter: Timepoint (hr) Value: 6
  misc_feature: MA Experiment 108668 PARAMETER Experiment Name: At_2mM_SA_cDNA_P Parameter: Treatment Value: 2mM SA vs. No Treatment
  misc_feature: MA Experiment ID: 20000088 Result: Up-regulated in Transcription
  misc_feature: MA Experiment 20000088 PARAMETER Experiment Name: At_100uM_ABA_Mutants_cDNA_P Parameter: Plant Line Value: Landsberg
  misc_feature: MA Experiment 20000088 PARAMETER Experiment Name: At_100uM_ABA_Mutants_cDNA_P Parameter: Timepoint (hr) Value: 6
  misc_feature: MA Experiment 20000088 PARAMETER Experiment Name: At_100uM_ABA_Mutants_cDNA_P Parameter: Tissue Value: Aerial
  misc_feature: MA Experiment 20000088 PARAMETER Experiment Name: At_100uM_ABA_Mutants_cDNA_P Parameter: Treatment Value: 100uM ABA vs. No Treatment
  misc_feature: MA Experiment ID: 20000090 Result: Up-regulated in Transcription
  misc_feature: MA Experiment ID: 20000113 Result: Down-regulated in Transcription
  misc_feature: MA Experiment 20000113 PARAMETER Experiment Name: At_42deg_Heat_cDNA_P Parameter: Temperature (deg C) Value: 42 vs. 22
  misc_feature: MA Experiment 20000113 PARAMETER Experiment Name: At_42deg_Heat_cDNA_P Parameter: Timepoint (hr) Value: 8
  misc_feature: MA Experiment 20000113 PARAMETER Experiment Name: At_42deg_Heat_cDNA_P Parameter: Tissue Value: Aerial
  misc_feature: MA Experiment ID: 20000179 Result: Up-regulated in Transcription
  misc_feature: MA Experiment 20000179 PARAMETER Experiment Name: At_Germinating_Seeds_P Parameter: Age (hr) Value: 6 vs. 0
  misc_feature: MA Experiment 20000179 PARAMETER Experiment Name: At_Germinating_Seeds_P Parameter: Tissue Value: Germinating Seeds
  misc_feature: MA Experiment ID: 20000182 Result: Up-regulated in Transcription
  misc_feature: MA Experiment 20000182 PARAMETER Experiment Name: At_2mM_SA_P Parameter: Age (day) Value: 14
  misc_feature: MA Experiment 20000182 PARAMETER Experiment Name: At_2mM_SA_P Parameter: Organism Value: A. thaliana
  misc_feature: MA Experiment 20000182 PARAMETER Experiment Name: At_2mM_SA_P Parameter: Plant Line Value: WS
  misc_feature: MA Experiment 20000182 PARAMETER Experiment Name: At_2mM_SA_P Parameter: Timepoint (hr) Value: 6
  misc_feature: MA Experiment 20000182 PARAMETER Experiment Name: At_2mM_SA_P Parameter: Tissue Value: Aerial
  misc_feature: MA Experiment 20000182 PARAMETER Experiment Name: At_2mM_SA_P Parameter: Treatment Value: 2mM SA vs. No Treatment
  misc_feature: MA Experiment ID: 20000185 Result: Down-regulated in Transcription
  misc_feature: MA Experiment 20000185 PARAMETER Experiment Name: At_Roots__P Parameter: Age (day) Value: 7 vs. 21
  misc_feature: MA Experiment 20000185 PARAMETER Experiment Name: At_Roots__P Parameter: Organism Value: A. thaliana
  misc_feature: MA Experiment 20000185 PARAMETER Experiment Name: At_Roots__P Parameter: Tissue Value: Roots vs. Whole Plant
  misc_feature: MA Experiment ID: 20000234 Result: Down-regulated in Transcription
  misc_feature: MA Experiment 20000234 PARAMETER Experiment Name: At_Siliques_P Parameter: Age (day) Value: 21
  misc_feature: MA Experiment 20000234 PARAMETER Experiment Name: At_Siliques_P Parameter: Organism Value: A. thaliana
  misc_feature: MA Experiment 20000234 PARAMETER Experiment Name: At_Siliques_P Parameter: Plant Line Value: WS
  misc_feature: MA Experiment 20000234 PARAMETER Experiment Name: At_Siliques_P Parameter: Tissue Value: Less Than 5mm Siliques vs. Whole Plant
  misc_feature: MA Experiment ID: 20000264 Result: Down-regulated in Transcription
  misc_feature: MA Experiment 20000264 PARAMETER Experiment Name: At_Open_Flower_P Parameter: Age (day) Value: 21
  misc_feature: MA Experiment 20000264 PARAMETER Experiment Name: At_Open_Flower_P Parameter: Plant Line Value: WS
  misc_feature: MA Experiment 20000264 PARAMETER Experiment Name: At_Open_Flower_P Parameter: Tissue Value: Open Flower vs. Whole Plant
  misc_feature: MA Experiment ID: 20000265 Result: Down-regulated in Transcription
  misc_feature: MA Experiment 20000265 PARAMETER Experiment Name: At_Open_Flower_P Parameter: Age (day) Value: 21
  misc_feature: MA Experiment 20000265 PARAMETER Experiment Name: At_Open_Flower_P Parameter: Plant Line Value: WS
  misc_feature: MA Experiment 20000265 PARAMETER Experiment Name: At_Open_Flower_P Parameter: Tissue Value: Closed Flower vs. Whole Plant
  misc_feature: MA Experiment ID: 20000286 Result: Down-regulated in Transcription
  misc_feature: MA Experiment 20000286 PARAMETER Experiment Name: At_Open_Flower_P Parameter: Age (day) Value: 21
  misc_feature: MA Experiment 20000286 PARAMETER Experiment Name: At_Open_Flower_P Parameter: Plant Line Value: WS
  misc_feature: MA Experiment 20000286 PARAMETER Experiment Name: At_Open_Flower_P Parameter: Tissue Value: Half Open vs. Whole Plant
  misc_feature: MA Experiment ID: 20000438 Result: Down-regulated in Transcription
  misc_feature: MA Experiment 20000438 PARAMETER Experiment Name: At_Shoots__P Parameter: Age (day) Value: 14
  misc_feature: MA Experiment 20000438 PARAMETER Experiment Name: At_Shoots__P Parameter: Tissue Value: Shoots vs. Whole Plant
  misc_feature: MA Experiment ID: 20000439 Result: Down-regulated in Transcription
  misc_feature: MA Experiment 20000439 PARAMETER Experiment Name: At_Roots__P Parameter: Age (day) Value: 14 vs. 21
  misc_feature: MA Experiment 20000439 PARAMETER Experiment Name: At_Roots__P Parameter: Organism Value: A. thaliana
  misc_feature: MA Experiment 20000439 PARAMETER Experiment Name: At_Roots__P Parameter: Tissue Value: Roots vs. Whole Plant
  misc_feature: MA Experiment ID: 20000794 Result: Down-regulated in Transcription
  misc_feature: MA Experiment 20000794 PARAMETER Experiment Name: At_Petals_P Parameter: Age (day) Value: 23-25 days
  misc_feature: MA Experiment 20000794 PARAMETER Experiment Name: At_Petals_P Parameter: Plant Line Value: WS
  misc_feature: MA Experiment 20000794 PARAMETER Experiment Name: At_Petals_P Parameter: Tissue Value: Petals vs. Whole plant
  misc_feature: MA Experiment ID: 20001556 Result: Down-regulated in Transcription
  misc_feature: MA Experiment 20001556 PARAMETER Experiment Name: At_Drought_Soil_Dry_P Parameter: Age (day) Value: 26
  misc_feature: MA Experiment 20001556 PARAMETER Experiment Name: At_Drought_Soil_Dry_P Parameter: Organism Value: A. thaliana
  misc_feature: MA Experiment 20001556 PARAMETER Experiment Name: At_Drought_Soil_Dry_P Parameter: Plant Line Value: WS
  misc_feature: MA Experiment 20001556 PARAMETER Experiment Name: At_Drought_Soil_Dry_P Parameter: Post Timepoint (hr) Value: None
  misc_feature: MA Experiment 20001556 PARAMETER Experiment Name: At_Drought_Soil_Dry_P Parameter: Post-Treatment Value: None
  misc_feature: MA Experiment 20001556 PARAMETER Experiment Name: At_Drought_Soil_Dry_P Parameter: Timepoint (day) Value: 12
  misc_feature: MA Experiment 20001556 PARAMETER Experiment Name: At_Drought_Soil_Dry_P Parameter: Treatment Value: Drought vs. No Drought
  misc_feature: MA Experiment ID: 20001559 Result: Down-regulated in Transcription
  misc_feature: MA Experiment 20001559 PARAMETER Experiment Name: At_Drought_Soil_Dry_P Parameter: Age (day) Value: 28
  misc_feature: MA Experiment 20001559 PARAMETER Experiment Name: At_Drought_Soil_Dry_P Parameter: Organism Value: A. thaliana
  misc_feature: MA Experiment 20001559 PARAMETER Experiment Name: At_Drought_Soil_Dry_P Parameter: Plant Line Value: WS
  misc_feature: MA Experiment 20001559 PARAMETER Experiment Name: At_Drought_Soil_Dry_P Parameter: Post Timepoint (hr) Value: 29
  misc_feature: MA Experiment 20001559 PARAMETER Experiment Name: At_Drought_Soil_Dry_P Parameter: Post-Treatment Value: Re-Water vs. No Drought
  misc_feature: MA Experiment 20001559 PARAMETER Experiment Name: At_Drought_Soil_Dry_P Parameter: Timepoint (day) Value: 14
  misc_feature: MA Experiment 20001559 PARAMETER Experiment Name: At_Drought_Soil_Dry_P Parameter: Treatment Value: Drought vs. No Drought
  misc_feature: MA Experiment ID: 20001907 Result: Down-regulated in Transcription
  misc_feature: MA Experiment 20001907 PARAMETER Experiment Name: At_Drought_Reproduction_P Parameter: Age (day) Value: 37
  misc_feature: MA Experiment 20001907 PARAMETER Experiment Name: At_Drought_Reproduction_P Parameter: Organism Value: A. thaliana
  misc_feature: MA Experiment 20001907 PARAMETER Experiment Name: At_Drought_Reproduction_P Parameter: Plant Line Value: WS
  misc_feature: MA Experiment 20001907 PARAMETER Experiment Name: At_Drought_Reproduction_P Parameter: Timepoint (day) Value: 7
  misc_feature: MA Experiment 20001907 PARAMETER Experiment Name: At_Drought_Reproduction_P Parameter: Tissue Value: Siliques
  misc_feature: MA Experiment 20001907 PARAMETER Experiment Name: At_Drought_Reproduction_P Parameter: Treatment Value: Drought vs. No Drought
ctacgtcagggattcattccgatctgaaatctctctctagatttctctatttttcgaattttaaatgaacgatttgttttccagctcattctctcgcttccgcagcggagaaccatcccctcgccgagacgttgccggcggtggcgacggagttcagatggcgaatcccgcgggatcaaccggtggtgtgaacctcgacaagttcttcgaagatgttgaatctgtgaaagaagagctaaaggagctagatcggctcaacgaaacactctcttcatgtcacgagcagagcaagacgcttcacaatgctaaagccgttaaagatctccggtctaaaatggacggtgacgttggagtcgcgttgaagaaggcgaagatgattaaagttaaactcgaggcgctagatcgtgccaatgctgctaatcggagtctccctggctgtggacctggttcttcctccgatcgaaccaggacctctgtcctcaatggtctcaggaagaaattgatggactctatggatagtttcaaccgattgagggagcttatctcgtccgagtatagagaaactgtacagaggaggtacttcaccgtcaccggcgagaatccggatgaacgaaccctagatcgactgatttccactggagagagtgagagattcttgcagaaagcaatacaagaacaaggaagaggaagggtgttagacaccattaacgagattcaagaaaggcatgatgcggttaaagacattgagaagaatctcagggagcttcaccaggtgtttctagacatggccgtgctggtagagcaccagggagctcagcttgatgacatcgagagtcatgtgggtcgagctagctcctttatcagaggcggaactgaccagctacaaaccgctcgggtttaccagaagaacacgcgaaaatggacatgtattgccattattattctcatcatcatcataactgttgtggttcttgctgttttaaaaccgtggaacaacagcagtggcggcggcggcggtggtggtggtgggggtaccactggaggaagtcaaccaaattcagggacaccaccaaatcctcctcaggcaaggcgtctattgcgttgaagttgaagttgaagttgagtttcgttatttgcatatatattctttctttgaaaaaccttattatcaaaccagctttgtgttactactttctactgctggtttgttgttaatctcccgtttatttggtttttgtgaaagaatttaaaatgtgggttagatgagaaaattagtacaacattctcttgtatctatgtttgct

SEQ ID NO: 108543 - protein, 346 aa, Arabidopsis thaliana; identical to SEQ ID NO: 24734
  peptide (1)..(346): Ceres Seq. ID no. 13667804
  misc_feature (219)..(281): Pfam Name: SNARE domain Pfam Description: SNARE domain
  misc_feature (1)..(346): Homolog of NCBI NO: 15229865 NR Description: syntaxin of plants SYP121 [Arabidopsis thaliana]
  misc_feature (1)..(309): Homolog of NCBI NO: 4206787 NR Description: syntaxin-related protein Nt-syr1 [Nicotiana
  misc_feature (1)..(346): Homolog of NCBI NO: 15231205 NR Description: syntaxin of plants SYP122 [Arabidopsis thaliana]
  misc_feature (1)..(346): Homolog of NCBI NO: 11358871 NR Description: syntaxin synt4 [imported] - Arabidopsis thaliana
  misc_feature (1)..(306): Homolog of NCBI NO: 15219900 NR Description: syntaxin of plants SYP124 [Arabidopsis thaliana]
  misc_feature (1)..(306): Homolog of NCBI NO: 15220328 NR Description: syntaxin of plants SYP125 [Arabidopsis thaliana]
  misc_feature (1)..(306): Homolog of NCBI NO: 15236285 NR Description: syntaxin of plants SYP123 [Arabidopsis thaliana]
  misc_feature (1)..(313): Homolog of NCBI NO: 18415701 NR Description: syntaxin of plants SYP132 [Arabidopsis thaliana] Syntaxin 132 (AtSYP132) >gi|17380724|gb|AAL36192.1| putative [Arabidopsis thaliana] >gi|21436145|gb|AAM51319.1| putative
  misc_feature (1)..(312): Homolog of NCBI NO: 28974542 NR Description: knolle [Antirrhinum majus]
  misc_feature (1)..(312): Homolog of NCBI NO: 5912543 NR Description: Knolle [Capsicum annuum]

SEQ ID NO: 108544 - protein, 315 aa, Arabidopsis thaliana; identical to SEQ ID NO: 24735
  peptide (1)..(315): Ceres Seq. ID no. 13667805
  misc_feature (188)..(250): Pfam Name: SNARE domain Pfam Description: SNARE domain
  misc_feature (1)..(315): Homolog of NCBI NO: 15229865 NR Description: syntaxin of plants SYP121 [Arabidopsis thaliana]
  misc_feature (1)..(278): Homolog of NCBI NO: 4206787 NR Description: syntaxin-related protein Nt-syr1 [Nicotiana
  misc_feature (1)..(315): Homolog of NCBI NO: 15231205 NR Description: syntaxin of plants SYP122 [Arabidopsis thaliana]
  misc_feature (1)..(315): Homolog of NCBI NO: 11358871 NR Description: syntaxin synt4 [imported] - Arabidopsis thaliana
  misc_feature (1)..(275): Homolog of NCBI NO: 15219900 NR Description: syntaxin of plants SYP124 [Arabidopsis thaliana]
  misc_feature (1)..(275): Homolog of NCBI NO: 15220328 NR Description: syntaxin of plants SYP125 [Arabidopsis thaliana]
  misc_feature (1)..(275): Homolog of NCBI NO: 15236285 NR Description: syntaxin of plants SYP123 [Arabidopsis thaliana]
  misc_feature (1)..(282): Homolog of NCBI NO: 18415701 NR Description: syntaxin of plants SYP132 [Arabidopsis thaliana] Syntaxin 132 (AtSYP132) >gi|17380724|gb|AAL36192.1| putative [Arabidopsis thaliana] >gi|21436145|gb|AAM51319.1| putative
  misc_feature (1)..(281): Homolog of NCBI NO: 28974542 NR Description: knolle [Antirrhinum majus]
  misc_feature (1)..(281): Homolog of NCBI NO: 5912543 NR Description: Knolle [Capsicum annuum]

SEQ ID NO: 108545 - protein, 256 aa, Arabidopsis thaliana; identical to SEQ ID NO: 24736
  peptide (1)..(256): Ceres Seq. ID no. 13667806
  misc_feature (129)..(191): Pfam Name: SNARE domain Pfam Description: SNARE domain
  misc_feature (1)..(256): Homolog of NCBI NO: 15229865 NR Description: syntaxin of plants SYP121 [Arabidopsis thaliana]
  misc_feature (1)..(219): Homolog of NCBI NO: 4206787 NR Description: syntaxin-related protein Nt-syr1 [Nicotiana
  misc_feature (1)..(256): Homolog of NCBI NO: 15231205 NR Description: syntaxin of plants SYP122 [Arabidopsis thaliana]
  misc_feature (1)..(256): Homolog of NCBI NO: 11358871 NR Description: syntaxin synt4 [imported] - Arabidopsis thaliana
  misc_feature (1)..(216): Homolog of NCBI NO: 15219900 NR Description: syntaxin of plants SYP124 [Arabidopsis thaliana]
  misc_feature (1)..(216): Homolog of NCBI NO: 15220328 NR Description: syntaxin of plants SYP125 [Arabidopsis thaliana]
  misc_feature (1)..(216): Homolog of NCBI NO: 15236285 NR Description: syntaxin of plants SYP123 [Arabidopsis thaliana]
  misc_feature (1)..(223): Homolog of NCBI NO: 18415701 NR Description: syntaxin of plants SYP132 [Arabidopsis thaliana] Syntaxin 132 (AtSYP132) >gi|17380724|gb|AAL36192.1| putative [Arabidopsis thaliana] >gi|21436145|gb|AAM51319.1| putative
  misc_feature (1)..(222): Homolog of NCBI NO: 28974542 NR Description: knolle [Antirrhinum majus]
  misc_feature (1)..(222): Homolog of NCBI NO: 5912543 NR Description: Knolle [Capsicum annuum]

SEQ ID NO: 108546 - DNA, 1952 bp, Arabidopsis thaliana
  misc_feature (1)..(1952): Ceres Seq. ID no. 13667807
  misc_feature: MA Experiment ID: 20000182 Result: Up-regulated in Transcription
  misc_feature: MA Experiment 20000182 PARAMETER Experiment Name: At_2mM_SA_P Parameter: Age (day) Value: 14
  misc_feature: MA Experiment 20000182 PARAMETER Experiment Name: At_2mM_SA_P Parameter: Organism Value: A. thaliana
  misc_feature: MA Experiment 20000182 PARAMETER Experiment Name: At_2mM_SA_P Parameter: Plant Line Value: WS
  misc_feature: MA Experiment 20000182 PARAMETER Experiment Name: At_2mM_SA_P Parameter: Timepoint (hr) Value: 6
  misc_feature: MA Experiment 20000182 PARAMETER Experiment Name: At_2mM_SA_P Parameter: Tissue Value: Aerial
  misc_feature: MA Experiment 20000182 PARAMETER Experiment Name: At_2mM_SA_P Parameter: Treatment Value: 2mM SA vs. No Treatment
  misc_feature: MA Experiment ID: 20000185 Result: Down-regulated in Transcription
  misc_feature: MA Experiment 20000185 PARAMETER Experiment Name: At_Roots__P Parameter: Age (day) Value: 7 vs. 21
  misc_feature: MA Experiment 20000185 PARAMETER Experiment Name: At_Roots__P Parameter: Organism Value: A. thaliana
  misc_feature: MA Experiment 20000185 PARAMETER Experiment Name: At_Roots__P Parameter: Tissue Value: Roots vs. Whole Plant
  misc_feature: MA Experiment ID: 20000234 Result: Down-regulated in Transcription
  misc_feature: MA Experiment 20000234 PARAMETER Experiment Name: At_Siliques_P Parameter: Age (day) Value: 21
  misc_feature: MA Experiment 20000234 PARAMETER Experiment Name: At_Siliques_P Parameter: Organism Value: A. thaliana
  misc_feature: MA Experiment 20000234 PARAMETER Experiment Name: At_Siliques_P Parameter: Plant Line Value: WS
  misc_feature: MA Experiment 20000234 PARAMETER Experiment Name: At_Siliques_P Parameter: Tissue Value: Less Than 5mm Siliques vs. Whole Plant
  misc_feature: MA Experiment ID: 20000235 Result: Down-regulated in Transcription
  misc_feature: MA Experiment 20000235 PARAMETER Experiment Name: At_Siliques_P Parameter: Age (day) Value: 21
  misc_feature: MA Experiment 20000235 PARAMETER Experiment Name: At_Siliques_P Parameter: Organism Value: A. thaliana
  misc_feature: MA Experiment 20000235 PARAMETER Experiment Name: At_Siliques_P Parameter: Plant Line Value: WS
  misc_feature: MA Experiment 20000235 PARAMETER Experiment Name: At_Siliques_P Parameter: Tissue Value: 5-10mm Siliques vs. Whole Plant
  misc_feature: MA Experiment ID: 20000264 Result: Down-regulated in Transcription
  misc_feature: MA Experiment 20000264 PARAMETER Experiment Name: At_Open_Flower_P Parameter: Age (day) Value: 21
  misc_feature: MA Experiment 20000264 PARAMETER Experiment Name: At_Open_Flower_P Parameter: Plant Line Value: WS
  misc_feature: MA Experiment 20000264 PARAMETER Experiment Name: At_Open_Flower_P Parameter: Tissue Value: Open Flower vs. Whole Plant
  misc_feature: MA Experiment ID: 20000265 Result: Down-regulated in Transcription
  misc_feature: MA Experiment 20000265 PARAMETER Experiment Name: At_Open_Flower_P Parameter: Age (day) Value: 21
  misc_feature: MA Experiment 20000265 PARAMETER Experiment Name: At_Open_Flower_P Parameter: Plant Line Value: WS
  misc_feature: MA Experiment 20000265 PARAMETER Experiment Name: At_Open_Flower_P Parameter: Tissue Value: Closed Flower vs. Whole Plant
  misc_feature: MA Experiment ID: 20000286 Result: Down-regulated in Transcription
  misc_feature: MA Experiment 20000286 PARAMETER Experiment Name: At_Open_Flower_P Parameter: Age (day) Value: 21
  misc_feature: MA Experiment 20000286 PARAMETER Experiment Name: At_Open_Flower_P Parameter: Plant Line Value: WS
  misc_feature: MA Experiment 20000286 PARAMETER Experiment Name: At_Open_Flower_P Parameter: Tissue Value: Half Open vs. Whole Plant
  misc_feature: MA Experiment ID: 20000438 Result: Down-regulated in Transcription
  misc_feature: MA Experiment 20000438 PARAMETER Experiment Name: At_Shoots__P Parameter: Age (day) Value: 14
  misc_feature: MA Experiment 20000438 PARAMETER Experiment Name: At_Shoots__P Parameter: Tissue Value: Shoots vs. Whole Plant
  misc_feature: MA Experiment ID: 20000439 Result: Down-regulated in Transcription
  misc_feature: MA Experiment 20000439 PARAMETER Experiment Name: At_Roots__P Parameter: Age (day) Value: 14 vs. 21
  misc_feature: MA Experiment 20000439 PARAMETER Experiment Name: At_Roots__P Parameter: Organism Value: A. thaliana
  misc_feature: MA Experiment 20000439 PARAMETER Experiment Name: At_Roots__P Parameter: Tissue Value: Roots vs. Whole Plant
  misc_feature: MA Experiment ID: 20000453 Result: Up-regulated in Transcription
  misc_feature: MA Experiment 20000453 PARAMETER Experiment Name: At_100uM_ABA_P Parameter: Age (day) Value: 15
  misc_feature: MA Experiment 20000453 PARAMETER Experiment Name: At_100uM_ABA_P Parameter: Organism Value: A. thaliana
  misc_feature: MA Experiment 20000453 PARAMETER Experiment Name: At_100uM_ABA_P Parameter: Plant Line Value: WS
  misc_feature: MA Experiment 20000453 PARAMETER Experiment Name: At_100uM_ABA_P Parameter: Timepoint (hr) Value: 24
  misc_feature: MA Experiment 20000453 PARAMETER Experiment Name: At_100uM_ABA_P Parameter: Tissue Value: Aerial
  misc_feature: MA Experiment 20000453 PARAMETER Experiment Name: At_100uM_ABA_P Parameter: Treatment Value: 100uM ABA vs. No Treatment
  misc_feature: MA Experiment ID: 20001558 Result: Down-regulated in Transcription
  misc_feature: MA Experiment 20001558 PARAMETER Experiment Name: At_Drought_Soil_Dry_P Parameter: Age (day) Value: 27
  misc_feature: MA Experiment 20001558 PARAMETER Experiment Name: At_Drought_Soil_Dry_P Parameter: Organism Value: A. thaliana
  misc_feature: MA Experiment 20001558 PARAMETER Experiment Name: At_Drought_Soil_Dry_P Parameter: Plant Line Value: WS
  misc_feature: MA Experiment 20001558 PARAMETER Experiment Name: At_Drought_Soil_Dry_P Parameter: Post Timepoint (hr) Value: 6
  misc_feature: MA Experiment 20001558 PARAMETER Experiment Name: At_Drought_Soil_Dry_P Parameter: Post-Treatment Value: Re-Water vs. No Drought
  misc_feature: MA Experiment 20001558 PARAMETER Experiment Name: At_Drought_Soil_Dry_P Parameter: Timepoint (day) Value: 13
  misc_feature: MA Experiment 20001558 PARAMETER Experiment Name: At_Drought_Soil_Dry_P Parameter: Treatment Value: Drought vs. No Drought
  misc_feature: MA Experiment ID: 20001560 Result: Down-regulated in Transcription
  misc_feature: MA Experiment 20001560 PARAMETER Experiment Name: At_Drought_Soil_Dry_P Parameter: Age (day) Value: 28
  misc_feature: MA Experiment 20001560 PARAMETER Experiment Name: At_Drought_Soil_Dry_P Parameter: Organism Value: A. thaliana
  misc_feature: MA Experiment 20001560 PARAMETER Experiment Name: At_Drought_Soil_Dry_P Parameter: Plant Line Value: WS
  misc_feature: MA Experiment 20001560 PARAMETER Experiment Name: At_Drought_Soil_Dry_P Parameter: Post Timepoint (hr) Value: None
  misc_feature: MA Experiment 20001560 PARAMETER Experiment Name: At_Drought_Soil_Dry_P Parameter: Post-Treatment Value: None
  misc_feature: MA Experiment 20001560 PARAMETER Experiment Name: At_Drought_Soil_Dry_P Parameter: Timepoint (day) Value: 14
  misc_feature: MA Experiment 20001560 PARAMETER Experiment Name: At_Drought_Soil_Dry_P Parameter: Treatment Value: Drought vs. No Drought
  misc_feature: MA Experiment ID: 20001911 Result: Up-regulated in Transcription
  misc_feature: MA Experiment 20001911 PARAMETER Experiment Name: At_Drought_Reproduction_P Parameter: Age (day) Value: 40
  misc_feature: MA Experiment 20001911 PARAMETER Experiment Name: At_Drought_Reproduction_P Parameter: Organism Value: A. thaliana
  misc_feature: MA Experiment 20001911 PARAMETER Experiment Name: At_Drought_Reproduction_P Parameter: Plant Line Value: WS
  misc_feature: MA Experiment 20001911 PARAMETER Experiment Name: At_Drought_Reproduction_P Parameter: Timepoint (day) Value: 10
  misc_feature: MA Experiment 20001911 PARAMETER Experiment Name: At_Drought_Reproduction_P Parameter: Tissue Value: Flowers
  misc_feature: MA Experiment 20001911 PARAMETER Experiment Name: At_Drought_Reproduction_P Parameter: Treatment Value: Drought vs. No Drought
  misc_feature: Pfam Name: Pkinase Pfam Description: Protein kinase domain
tcgagagcgaaggaagagagagagagagggagagatcaaaaaaatttgtgaaaaaagagatttattttagggttttgttgattttctttgttcattttgccgtcgtctctttctctttctcttgtgaagaaaaagaagaaaaatgaaacttctgggtttggtcttcttgctgtttaatctgtttatgttttcgttttctcggaaacttttaaccgagagtggtggtggtctccacgacgaagctgctctgttgaagttgaagagtagtttcttggatccaaatggagttctgtctagctgggtttccgacagctcatcaaaccattgttcttggtacggtgtctcttgcaactctgattcgagagtcgtttctttaattctcagaggctgtgatgagcttgaaggtagtggtgttcttcatctcccagatttgtcttcttgttcttcaagtaaaagaagacttggtggtgtaatctctcctgttgttggagatttgtctgaaattagggttttatctctgtcttttaatgatcttagaggtgagattccaaaggagatttgggggttggagaaattagagattcttgatcttaaaggtaacaactttatcggtggaattagggttgttgataatgttgttcttaggaaacttatgagttttgaggatgaagatgaaattggtccaagctcagctgatgatgattctcctggtaaatctggattgtatccgattgagatagcttctattgtgtcagcttcagtgattgtctttgtgcttcttgttcttgtgatcttgttcatctacacgaggaaatggaaacgaaactctcaggttcaggtagatgagatcaaggagattaaagtgtttgttgacattggtattcctctgacgtatgagatcattgttagagctactggttactttagtaactctaactgtatcggtcacggcggtttcggttcgacttataaagcagaggtgtctccaacgaatgtgtttgctgttaaaagactctctgttgggaggtttcaaggtgatcaacagtttcatgctgagatctctgctcttgagatggttaggcatccgaatcttgttatgttaatcggttaccatgcgagcgaaaccgagatgtttcttatttacaactacttatctggaggaaaccttcaagatttcattaaagagagatcgaaagctgctattgagtggaaggtacttcacaagattgctcttgatgtagcgcgtgctctctcctatcttcacgaacagtgttctcctaaagtcttgcatagagatatcaaaccgagtaacatactcttggacaacaactacaacgcttatctatctgatttcggactctcgaaactcttgggaacttcgcagtctcatgtcacaactggtgtggctggaacattcggatatgtagctccagagtacgcaatgacatgccgagtctcggagaaagcagatgtttacagctatgggatagtcctcttggagctgatatcggacaaacgagctctggatccttctttctcatcgcatgagaacgggttcaacattgtctcgtgggctcatatgatgttgagtcaaggcaaagcgaaagaagtcttcaccacaggactatgggagactggtcctccagacgatttggtcgaggttctacatttggcactcaaatgcaccgtcgatagcctctcgataaggccgacaatgaaacaagctgtaagactgctgaaacgaatccagccttctagattgtgatacaaagctagaagaaaggtgtttttagaggatttgtacagcagcaaacaagtgcctagccattagaatctttctcaagtctgttttttatattttcagtgctagggaggtttttcatatgcatcatcaaaatgttattctcagtctactctcttgaaaactgatataaatgatgctctgcggccgc

SEQ ID NO: 108547 - protein, 540 aa, Arabidopsis thaliana; identical to SEQ ID NO: 36330
  peptide (1)..(540): Ceres Seq. ID no. 13667808
  misc_feature: Pfam Name: Pkinase Pfam Description: Protein kinase domain
  misc_feature (1)..(540): Homolog of NCBI NO: 6730642 NR Description: F4N2.23 [Arabidopsis thaliana]
  misc_feature (1)..(540): Homolog of NCBI NO: 15222260 NR Description: receptor protein kinase -related [Arabidopsis
  misc_feature (92)..(537): Homolog of NCBI NO: 6041804 NR Description: putative protein kinase [Arabidopsis thaliana]
  misc_feature (92)..(537): Homolog of NCBI NO: 30678490 NR Description: leucine-rich repeat transmembrane protein kinase,
  misc_feature (77)..(537): Homolog of NCBI NO: 34394917 NR Description: putative receptor-like protein kinase [Oryza
  misc_feature (58)..(532): Homolog of NCBI NO: 21326117 NR Description: putative protein kinase [Sorghum bicolor]
  misc_feature (92)..(495): Homolog of NCBI NO: 26449973 NR Description: putative protein kinase [Arabidopsis thaliana]
  misc_feature (254)..(535): Homolog of NCBI NO: 23304947 NR Description: extra sporogenous cells [Arabidopsis thaliana]
  misc_feature (6)..(174): Homolog of NCBI NO: 23304947 NR Description: extra sporogenous cells [Arabidopsis thaliana]
  misc_feature (254)..(535): Homolog of NCBI NO: 15240747 NR Description: receptor-related protein kinase-like protein

SEQ ID NO: 108548 - protein, 526 aa, Arabidopsis thaliana; identical to SEQ ID NO: 36331
  peptide (1)..(526): Ceres Seq. ID no. 13667809
  misc_feature: Pfam Name: Pkinase Pfam Description: Protein kinase domain
  misc_feature (1)..(526): Homolog of NCBI NO: 6730642 NR Description: F4N2.23 [Arabidopsis thaliana]
  misc_feature (1)..(526): Homolog of NCBI NO: 15222260 NR Description: receptor protein kinase -related [Arabidopsis
  misc_feature (78)..(523): Homolog of NCBI NO: 6041804 NR Description: putative protein kinase [Arabidopsis thaliana]
  misc_feature (78)..(523): Homolog of NCBI NO: 30678490 NR Description: leucine-rich repeat transmembrane protein kinase,
  misc_feature (63)..(523): Homolog of NCBI NO: 34394917 NR Description: putative receptor-like protein kinase [Oryza
  misc_feature (44)..(518): Homolog of NCBI NO: 21326117 NR Description: putative protein kinase [Sorghum bicolor]
  misc_feature (78)..(481): Homolog of NCBI NO: 26449973 NR Description: putative protein kinase [Arabidopsis thaliana]
  misc_feature (240)..(521): Homolog of NCBI NO: 23304947 NR Description: extra sporogenous cells [Arabidopsis thaliana]
  misc_feature (1)..(160): Homolog of NCBI NO: 23304947 NR Description: extra sporogenous cells [Arabidopsis thaliana]
  misc_feature (240)..(521): Homolog of NCBI NO: 15240747 NR Description: receptor-related protein kinase-like protein

SEQ ID NO: 108549 - protein, 370 aa, Arabidopsis thaliana; identical to SEQ ID NO: 36332
  peptide (1)..(370): Ceres Seq. ID no. 13667810
  misc_feature: Pfam Name: Pkinase Pfam Description: Protein kinase domain
  misc_feature (1)..(370): Homolog of NCBI NO: 6730642 NR Description: F4N2.23 [Arabidopsis thaliana]
  misc_feature (1)..(370): Homolog of NCBI NO: 15222260 NR Description: receptor protein kinase -related [Arabidopsis
  misc_feature (1)..(367): Homolog of NCBI NO: 6041804 NR Description: putative protein kinase [Arabidopsis thaliana]
  misc_feature (1)..(367): Homolog of NCBI NO: 30678490 NR Description: leucine-rich repeat transmembrane protein kinase,
  misc_feature (1)..(367): Homolog of NCBI NO: 34394917 NR Description: putative receptor-like protein kinase [Oryza
  misc_feature (1)..(362): Homolog of NCBI NO: 21326117 NR Description: putative protein kinase [Sorghum bicolor]
  misc_feature (1)..(325): Homolog of NCBI NO: 26449973 NR Description: putative protein kinase [Arabidopsis thaliana]
  misc_feature (84)..(365): Homolog of NCBI NO: 23304947 NR Description: extra sporogenous cells [Arabidopsis thaliana]
  misc_feature (84)..(365): Homolog of NCBI NO: 15240747 NR Description: receptor-related protein kinase-like protein
  misc_feature (1)..(363): Homolog of NCBI NO: 25404291 NR Description: probable Serine/Threonine protein kinase F8A5.31

SEQ ID NO: 108550 - DNA, 1005 bp, Arabidopsis thaliana
  misc_feature (1)..(1005): Ceres Seq. ID no. 13667815
  misc_feature: MA Experiment ID: 20000314 Result: Up-regulated in Transcription
  misc_feature: MA Experiment 20000314 PARAMETER Experiment Name: At_14day_Shoots-Roots_Sub_P Parameter: Age (day) Value: 14
  misc_feature: MA Experiment 20000314 PARAMETER Experiment Name: At_14day_Shoots-Roots_Sub_P Parameter: Organism Value: A. thaliana
  misc_feature: MA Experiment 20000314 PARAMETER Experiment Name: At_14day_Shoots-Roots_Sub_P Parameter: Plant Line Value: WS
  misc_feature: MA Experiment 20000314 PARAMETER Experiment Name: At_14day_Shoots-Roots_Sub_P Parameter: Tissue Value: Roots vs. Whole Plant
  misc_feature: MA Experiment ID: 20000315 Result: Down-regulated in Transcription
  misc_feature: MA Experiment 20000315 PARAMETER Experiment Name: At_14day_Shoots-Roots_Sub_P Parameter: Age (day) Value: 14
  misc_feature: MA Experiment 20000315 PARAMETER Experiment Name: At_14day_Shoots-Roots_Sub_P Parameter: Organism Value: A. thaliana
  misc_feature: MA Experiment 20000315 PARAMETER Experiment Name: At_14day_Shoots-Roots_Sub_P Parameter: Plant Line Value: WS
  misc_feature: MA Experiment 20000315 PARAMETER Experiment Name: At_14day_Shoots-Roots_Sub_P Parameter: Tissue Value: Shoots vs. Whole Plant
  misc_feature: MA Experiment ID: 20000327 Result: Down-regulated in Transcription
  misc_feature: MA Experiment 20000327 PARAMETER Experiment Name: At_42deg_Heat_Sub_P Parameter: Age (day) Value: 14
  misc_feature: MA Experiment 20000327 PARAMETER Experiment Name: At_42deg_Heat_Sub_P Parameter: Organism Value: A. thaliana
  misc_feature: MA Experiment 20000327 PARAMETER Experiment Name: At_42deg_Heat_Sub_P Parameter: Plant Line Value: WS
  misc_feature: MA Experiment 20000327 PARAMETER Experiment Name: At_42deg_Heat_Sub_P Parameter: Temperature (deg C) Value: 42 vs. 22
  misc_feature: MA Experiment 20000327 PARAMETER Experiment Name: At_42deg_Heat_Sub_P Parameter: Timepoint (hr) Value: 1
  misc_feature: MA Experiment 20000327 PARAMETER Experiment Name: At_42deg_Heat_Sub_P Parameter: Tissue Value: Aerial
  misc_feature: MA Experiment ID: 20000328 Result: Down-regulated in Transcription
  misc_feature: MA Experiment 20000328 PARAMETER Experiment Name: At_42deg_Heat_Sub_P Parameter: Age (day) Value: 14
  misc_feature: MA Experiment 20000328 PARAMETER Experiment Name: At_42deg_Heat_Sub_P Parameter: Organism Value: A. thaliana
  misc_feature: MA Experiment 20000328 PARAMETER Experiment Name: At_42deg_Heat_Sub_P Parameter: Plant Line Value: WS
  misc_feature: MA Experiment 20000328 PARAMETER Experiment Name: At_42deg_Heat_Sub_P Parameter: Temperature (deg C) Value: 42 vs. 22
  misc_feature: MA Experiment 20000328 PARAMETER Experiment Name: At_42deg_Heat_Sub_P Parameter: Timepoint (hr) Value: 6
  misc_feature: MA Experiment 20000328 PARAMETER Experiment Name: At_42deg_Heat_Sub_P Parameter: Tissue Value: Aerial
  misc_feature: MA Experiment ID: 20000348 Result: Down-regulated in Transcription
  misc_feature: MA Experiment 20000348 PARAMETER Experiment Name: At_100uM_ABA_Sub_P Parameter: Age (day) Value: 14
  misc_feature: MA Experiment 20000348 PARAMETER Experiment Name: At_100uM_ABA_Sub_P Parameter: Organism Value: A. thaliana
  misc_feature: MA Experiment 20000348 PARAMETER Experiment Name: At_100uM_ABA_Sub_P Parameter: Plant Line Value: WS
  misc_feature: MA Experiment 20000348 PARAMETER Experiment Name: At_100uM_ABA_Sub_P Parameter: Timepoint (hr) Value: 1
  misc_feature: MA Experiment 20000348 PARAMETER Experiment Name: At_100uM_ABA_Sub_P Parameter: Tissue Value: Aerial
  misc_feature: MA Experiment 20000348 PARAMETER Experiment Name: At_100uM_ABA_Sub_P Parameter: Treatment Value: 100uM ABA vs. No Treatment
  misc_feature: MA Experiment ID: 20000355 Result: Down-regulated in Transcription
  misc_feature: MA Experiment 20000355 PARAMETER Experiment Name: At_Siliques_Sub_P Parameter: Age (day) Value: 21
  misc_feature: MA Experiment 20000355 PARAMETER Experiment Name: At_Siliques_Sub_P Parameter: Organism Value: A. thaliana
  misc_feature: MA Experiment 20000355 PARAMETER Experiment Name: At_Siliques_Sub_P Parameter: Plant Line Value: WS
  misc_feature: MA Experiment 20000355 PARAMETER Experiment Name: At_Siliques_Sub_P Parameter: Tissue Value: Less Than 5mm Siliques vs. Whole Plant
  misc_feature: MA Experiment ID: 20000440 Result: Down-regulated in Transcription
  misc_feature: MA Experiment 20000440 PARAMETER Experiment Name: At_Closed-Flower__Sub_P Parameter: Tissue Value: Closed Flower vs. Whole Plant
acccacgcgtccggagaagtaaaattttctattgcagagagaaagagagttagagaaagagagagagagatgaaacttgtgcaagaagaataccgtaaaggaccgtggacagaacaggaggacatcctcttggtcaactttgtccacttgttcggagatcgaagatgggattttgtagcgaaagtttcaggtttaaacagaacaggaaagagttgcaggttaaggtgggttaattacctgcatcctggtctcaaacgtggtaagatgactccacaagaagagcgtttagtccttgagcttcacgccaaatggggaaacaggtggtcaaaaattgcccggaaattaccggggagaacagataatgagataaagaactactggaggactcatatgaggaagaaggctcaagagaagaagcgacctatgtctcctacttcctcatcttcaaactgttgctcatcatctatgaccactactactagtcaagacactggaggctccaacgggaaaatgaatcaagaatgcgaagacgggtactactccatggatgacatatggagagagattgatcagtctggagcaaacgttattaaaccggtaaaagacaactactactcagagcaaagctgttacttgaatttccctcctctggcttctccaacatgggaaagttccttggaatctatatggaacatggatgcagatgaaagtaagatgtcttcttttgctattgatcagtttcctctaagttttgaacatggtagtggtcgcctttagtctaggatttgattcatttggaatgtttatatgtgcagcatatatatgttatcaaacgacgactgtagtagtttcctatgacttacatcaaaaaacaccacccactgtactaatctcataagtagtcatcatcctatgcctttgtttagtttgtagagtgagtgaaaagatgtgtaatacaagtcagaactctaattccaaaataaatagacttttgaagcttctgtg

SEQ ID NO: 108551 - protein, 258 aa, Arabidopsis thaliana
  peptide (1)..(258): Ceres Seq. ID no. 13667816
  misc_feature (33)..(80): Pfam Name: Myb-like DNA-binding domain Pfam Description: Myb-like DNA-binding domain
  misc_feature (24)..(258): Homolog of NCBI NO: 15238519 NR Description: myb family transcription factor [Arabidopsis
  misc_feature (24)..(258): Homolog of NCBI NO: 11358547 NR Description: myb-related transcription factor MYB59 [imported] Arabidopsis thaliana >gi|3941480|gb|AAC83616.1| putative
  misc_feature (64)..(258): Homolog of NCBI NO: 30697277 NR Description: myb family transcription factor [Arabidopsis
  misc_feature (89)..(258): Homolog of NCBI NO: 30697275 NR Description: myb family transcription factor [Arabidopsis
  misc_feature (26)..(196): Homolog of NCBI NO: 15231343 NR Description: Myb family transcription factor [Arabidopsis
  misc_feature (32)..(223): Homolog of NCBI NO: 34906070 NR Description: putative Myb factor protein [Oryza sativa
  misc_feature (32)..(223): Homolog of NCBI NO: 11967859 NR Description: Myb factor protein [Oryza sativa (japonica
  misc_feature (26)..(148): Homolog of NCBI NO: 15230095 NR Description: myb family transcription factor [Arabidopsis
  misc_feature (26)..(136): Homolog of NCBI NO: 15236297 NR Description: myb family transcription factor [Arabidopsis
  misc_feature (26)..(136): Homolog of NCBI NO: 1732513 NR Description: snapdragon myb protein 305 homolog [Arabidopsis
THASGEVKFSIAERKRVREREREMKLVQEEYRKGPWTEQEDILLVNFVHLFGDRRWDFVAKVSGLNRTGKSCRLRWVNYLHPGLKRGKMTPQEERLVLELHAKWGNRWSKIARKLPGRTDNEIKNYWRTHMRKKAQEKKRPMSPTSSSSNCCSSSMTTTTSQDTGGSNGKMNQECEDGYYSMDDIWREIDQSGANVIKPVKDNYYSEQSCYLNFPPLASPTWESSLESIWNMDADESKMSSFAIDQFPLSFEHGSGRL

SEQ ID NO: 108552 - protein, 235 aa, Arabidopsis thaliana; identical to SEQ ID NO: 106919
  peptide (1)..(235): Ceres Seq. ID no. 13667817
  misc_feature (10)..(57): Pfam Name: Myb-like DNA-binding domain Pfam Description: Myb-like DNA-binding domain
  misc_feature (1)..(235): Homolog of NCBI NO: 15238519 NR Description: myb family transcription factor [Arabidopsis
  misc_feature (1)..(235): Homolog of NCBI NO: 11358547 NR Description: myb-related transcription factor MYB59 [imported] Arabidopsis thaliana >gi|3941480|gb|AAC83616.1| putative
  misc_feature (41)..(235): Homolog of NCBI NO: 30697277 NR Description: myb family transcription factor [Arabidopsis
  misc_feature (66)..(235): Homolog of NCBI NO: 30697275 NR Description: myb family transcription factor [Arabidopsis
  misc_feature (3)..(173): Homolog of NCBI NO: 15231343 NR Description: Myb family transcription factor [Arabidopsis
  misc_feature (9)..(200): Homolog of NCBI NO: 34906070 NR Description: putative Myb factor protein [Oryza sativa
  misc_feature (9)..(200): Homolog of NCBI NO: 11967859 NR Description: Myb factor protein [Oryza sativa (japonica
  misc_feature (3)..(125): Homolog of NCBI NO: 15230095 NR Description: myb family transcription factor [Arabidopsis
  misc_feature (3)..(113): Homolog of NCBI NO: 15236297 NR Description: myb family transcription factor [Arabidopsis
  misc_feature (3)..(113): Homolog of NCBI NO: 1732513 NR Description: snapdragon myb protein 305 homolog [Arabidopsis

SEQ ID NO: 108553 - protein, 170 aa, Arabidopsis thaliana; identical to SEQ ID NO: 106920
  peptide (1)..(170): Ceres Seq. ID no. 13667818
  misc_feature (1)..(170): Homolog of NCBI NO: 15238519 NR Description: myb family transcription factor [Arabidopsis
  misc_feature (1)..(170): Homolog of NCBI NO: 11358547 NR Description: myb-related transcription factor MYB59 [imported] Arabidopsis thaliana >gi|3941480|gb|AAC83616.1| putative
  misc_feature (1)..(170): Homolog of NCBI NO: 30697277 NR Description: myb family transcription factor [Arabidopsis
  misc_feature (1)..(170): Homolog of NCBI NO: 30697275 NR Description: myb family transcription factor [Arabidopsis
  misc_feature (1)..(108): Homolog of NCBI NO: 15231343 NR Description: Myb family transcription factor [Arabidopsis
  misc_feature (1)..(135): Homolog of NCBI NO: 34906070 NR Description: putative Myb factor protein [Oryza sativa
  misc_feature (1)..(135): Homolog of NCBI NO: 11967859 NR Description: Myb factor protein [Oryza sativa (japonica
  misc_feature (1)..(60): Homolog of NCBI NO: 15230095 NR Description: myb family transcription factor [Arabidopsis
  misc_feature (1)..(48): Homolog of NCBI NO: 15236297 NR Description: myb family transcription factor [Arabidopsis
  misc_feature (1)..(48): Homolog of NCBI NO: 1732513 NR Description: snapdragon myb protein 305 homolog [Arabidopsis

SEQ ID NO: 108554 - DNA, 1392 bp, Arabidopsis thaliana
  misc_feature (1)..(1392): Ceres Seq. ID no. 13667821
  misc_feature: MA Experiment ID: 108433 Result: Down-regulated in Transcription
  misc_feature: MA Experiment 108433 PARAMETER Experiment Name: At_rhl_Mutant2_cDNA_P Parameter: Age (day) Value: 7
  misc_feature: MA Experiment 108433 PARAMETER Experiment Name: At_rhl_Mutant2_cDNA_P Parameter: Organism Value: A. thaliana
  misc_feature: MA Experiment 108433 PARAMETER Experiment Name: At_rhl_Mutant2_cDNA_P Parameter: Plant Line Value: rhl Mutant vs. wt landsburg
  misc_feature: MA Experiment 108433 PARAMETER Experiment Name: At_rhl_Mutant2_cDNA_P Parameter: Tissue Value: Roots
  misc_feature: MA Experiment ID: 108434 Result: Up-regulated in Transcription
  misc_feature: MA Experiment 108434 PARAMETER Experiment Name: At_Root_Tips_cDNA_P Parameter: Tissue Value: Root Tips
  misc_feature: MA Experiment ID: 108573 Result: Up-regulated in Transcription
  misc_feature: MA Experiment 108573 PARAMETER Experiment Name: At_Drought_cDNA_P Parameter: Timepoint (hr) Value: 6
  misc_feature: MA Experiment 108573 PARAMETER Experiment Name: At_Drought_cDNA_P Parameter: Tissue Value: Aerial
  misc_feature: MA Experiment 108573 PARAMETER Experiment Name: At_Drought_cDNA_P Parameter: Treatment Value: Drought vs. No Drought
  misc_feature: MA Experiment ID: 108577 Result: Down-regulated in Transcription
  misc_feature: MA Experiment 108577 PARAMETER Experiment Name: At_42deg_Heat_cDNA_P Parameter: Temperature (deg C) Value: 42 vs. 22
  misc_feature: MA Experiment 108577 PARAMETER Experiment Name: At_42deg_Heat_cDNA_P Parameter: Timepoint (hr) Value: 6
  misc_feature: MA Experiment 108577 PARAMETER Experiment Name: At_42deg_Heat_cDNA_P Parameter: Tissue Value: Aerial
  misc_feature: MA Experiment ID: 108595 Result: Down-regulated in Transcription
  misc_feature: MA Experiment 108595 PARAMETER Experiment Name: At_Ler-pi_Ovule_cDNA_P Parameter: Plant Line Value: null
  misc_feature: MA Experiment ID: 20000086 Result: Up-regulated in Transcription
  misc_feature: MA Experiment 20000086 PARAMETER Experiment Name: At_100uM_ABA_Mutants_cDNA_P Parameter: Plant Line Value: CS22
  misc_feature: MA Experiment 20000086 PARAMETER Experiment Name: At_100uM_ABA_Mutants_cDNA_P Parameter: Timepoint (hr) Value: 6
  misc_feature: MA Experiment 20000086 PARAMETER Experiment Name: At_100uM_ABA_Mutants_cDNA_P Parameter: Tissue Value: Aerial
  misc_feature: MA Experiment 20000086 PARAMETER Experiment Name: At_100uM_ABA_Mutants_cDNA_P Parameter: Treatment Value: 100uM ABA vs. No Treatment
  misc_feature: MA Experiment ID: 20000112 Result: Down-regulated in Transcription
  misc_feature: MA Experiment 20000112 PARAMETER Experiment Name: At_42deg_Heat_cDNA_P Parameter: Temperature (deg C) Value: 42 vs. 22
  misc_feature: MA Experiment 20000112 PARAMETER Experiment Name: At_42deg_Heat_cDNA_P Parameter: Timepoint (hr) Value: 2
  misc_feature: MA Experiment 20000112 PARAMETER Experiment Name: At_42deg_Heat_cDNA_P Parameter: Tissue Value: Aerial
  misc_feature: MA Experiment ID: 20000113 Result: Down-regulated in Transcription
  misc_feature: MA Experiment 20000113 PARAMETER Experiment Name: At_42deg_Heat_cDNA_P Parameter: Temperature (deg C) Value: 42 vs. 22
  misc_feature: MA Experiment 20000113 PARAMETER Experiment Name: At_42deg_Heat_cDNA_P Parameter: Timepoint (hr) Value: 8
  misc_feature: MA Experiment 20000113 PARAMETER Experiment Name: At_42deg_Heat_cDNA_P Parameter: Tissue Value: Aerial
  misc_feature: MA Experiment ID: 20000173 Result: Down-regulated in Transcription
  misc_feature: MA Experiment 20000173 PARAMETER Experiment Name: At_42deg_Heat_P Parameter: Age (day) Value: 14
  misc_feature: MA Experiment 20000173 PARAMETER Experiment Name: At_42deg_Heat_P Parameter: Organism Value: A. thaliana
  misc_feature: MA Experiment 20000173 PARAMETER Experiment Name: At_42deg_Heat_P Parameter: Plant Line Value: WS
  misc_feature: MA Experiment 20000173 PARAMETER Experiment Name: At_42deg_Heat_P Parameter: Temperature (deg C) Value: 42 vs. 22
  misc_feature: MA Experiment 20000173 PARAMETER Experiment Name: At_42deg_Heat_P Parameter: Timepoint (hr) Value: 6
  misc_feature: MA Experiment 20000173 PARAMETER Experiment Name: At_42deg_Heat_P Parameter: Tissue Value: Aerial
  misc_feature: MA Experiment ID: 20001451 Result: Down-regulated in Transcription
  misc_feature: MA Experiment 20001451 PARAMETER Experiment Name: At_Far-red-induction_P Parameter: Age (day) Value: 7
  misc_feature: MA Experiment 20001451 PARAMETER Experiment Name: At_Far-red-induction_P Parameter: Light Value: Far-red vs. White
  misc_feature: MA Experiment 20001451 PARAMETER Experiment Name: At_Far-red-induction_P Parameter: Organism Value: A. thaliana
  misc_feature: MA Experiment 20001451 PARAMETER Experiment Name: At_Far-red-induction_P Parameter: Plant Line Value: Columbia
  misc_feature: MA Experiment 20001451 PARAMETER Experiment Name: At_Far-red-induction_P Parameter: Timepoint (hr) Value: 24
  misc_feature: MA Experiment 20001451 PARAMETER Experiment Name: At_Far-red-induction_P Parameter: Tissue Value: Whole Plant
ggaattcggcacgagcggcacgagcggcacgagagagcgatagtgagatttagatcaacagatttgaatcgatttctgaaaacatgcagtacaagaatctggggaaatcgggtttaaaagtgagcacgctctcgttcggagcgtgggttacgttcgggaaccagctcgatgtgaaagaagcgaaatcgattcttcagtgttgtcgtgatcatggagtcaatttcttcgataacgctgaggtttacgctaatggtcgcgctgaggagattatgggtcaagcgattcgtgaactgggttggcgtcgatccgatatcgtcatctctaccaagatcttctggggtggtcctggtcctaacgataagggtttatctaggaaacatatcgttgaaggcactaaagcttctctcaaacgacttgatatggattacgttgatgtgctctattgccacaggccggatgcttcaactcctatcgaagagactgtgagggcgatgaactacgtgattgataagggttgggccttctattggggaaccagtgaatggtcagctcaacaaattacggaggcatggggagctgctgaccggttggatttggttggtccaattgtcgaacagccagaatacaacatgttcgctaggcacaaagttgagacagagtttcttcctctgtacaccaaccatggtataggtctcactacctggagcccacttgcatctggtgtgctcactggtaaatacaacaagggagctattccctcagacagccgatttgcattggagaactacaaaaaccttgccaatagatcacttgtggatgacgtgctgaggaaagttagcggtctcaaacccattgcagatgagctaggtgtaactttggctcagcttgcaatcgcatggtgtgcttcaaatcctaatgtgtcatctgttatcactggtgccacaagggagtcacagattcaagaaaatatgaaagctgttgatgtgatcccattgttgacccctattgttctggacaagattgagcaagtgatacagagcaaaccaaaacgtcctgaatcatataggtaaaaccaacatccaagatctctcttccctattcaatcgtttacaaaagagtgttgcaggaaaaagaaaacattagaagaagctctgtgatgtatgttgttggatgttgtctcgttttcgctttgtttgttctctttagcagcttatgcatttttaagactcagacaaagagaaagagagactaatgttttttttttagtttttcttgtttcatcatttaaaaaacggtcttatttgttacttgttagtgcagcttaaagtttggttcttgtagtttgccatgtcatgacgtcaatatattgaatagctataaacaattctggtt

SEQ ID NO: 108555 - protein, 328 aa, Arabidopsis thaliana; identical to SEQ ID NO: 35459
  peptide (1)..(328): Ceres Seq. ID no. 13667822
  misc_feature (1)..(328): Homolog of NCBI NO: 15219795 NR Description: potassium channel protein, putative [Arabidopsis
  misc_feature (1)..(328): Homolog of NCBI NO: 1063415 NR Description: K+ channel protein
  misc_feature (1)..(328): Homolog of NCBI NO: 7447934 NR Description: probable potassium channel beta chain KB1 - potato
  misc_feature (1)..(328): Homolog of NCBI NO: 2832783 NR Description: potassium channel beta subunit [Egeria densa]
  misc_feature (1)..(328): Homolog of NCBI NO: 7447935 NR Description: probable potassium channel beta chain - rice
  misc_feature (1)..(322): Homolog of NCBI NO: 23394348 NR Description: K+ channel protein [Phytophthora infestans]
  misc_feature (1)..(317): Homolog of NCBI NO: 22987410 NR Description: hypothetical protein [Burkholderia fungorum]
  misc_feature (1)..(317): Homolog of NCBI NO: 15643082 NR Description: K+ channel, beta subunit [Thermotoga maritima]
  misc_feature (1)..(328): Homolog of NCBI NO: 7914982 NR Description: potassium channel Kv beta 2.1 subunit
  misc_feature (1)..(328): Homolog of NCBI NO: 7914984 NR Description: potassium channel Kv beta 2.2 subunit

SEQ ID NO: 108556 - protein, 266 aa, Arabidopsis thaliana; identical to SEQ ID NO: 35460
  peptide (1)..(266): Ceres Seq. ID no. 13667823
  misc_feature (1)..(266): Homolog of NCBI NO: 15219795 NR Description: potassium channel protein, putative [Arabidopsis
  misc_feature (1)..(266): Homolog of NCBI NO: 1063415 NR Description: K+ channel protein
  misc_feature (1)..(266): Homolog of NCBI NO: 7447934 NR Description: probable potassium channel beta chain KB1 - potato
  misc_feature (1)..(266): Homolog of NCBI NO: 2832783 NR Description: potassium channel beta subunit [Egeria densa]
  misc_feature (1)..(266): Homolog of NCBI NO: 7447935 NR Description: probable potassium channel beta chain - rice
  misc_feature (1)..(260): Homolog of NCBI NO: 23394348 NR Description: K+ channel protein [Phytophthora infestans]
  misc_feature (1)..(255): Homolog of NCBI NO: 22987410 NR Description: hypothetical protein [Burkholderia fungorum]
  misc_feature (1)..(255): Homolog of NCBI NO: 15643082 NR Description: K+ channel, beta subunit [Thermotoga maritima]
  misc_feature (1)..(266): Homolog of NCBI NO: 7914982 NR Description: potassium channel Kv beta 2.1 subunit
  misc_feature (1)..(266): Homolog of NCBI NO: 7914984 NR Description: potassium channel Kv beta 2.2 subunit

SEQ ID NO: 108557 - protein, 216 aa, Arabidopsis thaliana; identical to SEQ ID NO: 35461
  peptide (1)..(216): Ceres Seq. ID no. 13667824
  misc_feature (1)..(216): Homolog of NCBI NO: 15219795 NR Description: potassium channel protein, putative [Arabidopsis
  misc_feature (1)..(216): Homolog of NCBI NO: 1063415 NR Description: K+ channel protein
  misc_feature (1)..(216): Homolog of NCBI NO: 7447934 NR Description: probable potassium channel beta chain KB1 - potato
  misc_feature (1)..(216): Homolog of NCBI NO: 2832783 NR Description: potassium channel beta subunit [Egeria densa]
  misc_feature (1)..(216): Homolog of NCBI NO: 7447935 NR Description: probable potassium channel beta chain - rice
  misc_feature (1)..(210): Homolog of NCBI NO: 23394348 NR Description: K+ channel protein [Phytophthora infestans]
  misc_feature (1)..(205): Homolog of NCBI NO: 22987410 NR Description: hypothetical protein [Burkholderia fungorum]
  misc_feature (1)..(205): Homolog of NCBI NO: 15643082 NR Description: K+ channel, beta subunit [Thermotoga maritima]
  misc_feature (1)..(216): Homolog of NCBI NO: 7914982 NR Description: potassium channel Kv beta 2.1 subunit
  misc_feature (1)..(216): Homolog of NCBI NO: 7914984 NR Description: potassium channel Kv beta 2.2 subunit

SEQ ID NO: 108558 - DNA, 1122 bp, Arabidopsis thaliana
  misc_feature (1)..(1122): Ceres Seq. ID no. 13667833
  misc_feature: MA Experiment ID: 108595 Result: Down-regulated in Transcription
  misc_feature: MA Experiment 108595 PARAMETER Experiment Name: At_Ler-pi_Ovule_cDNA_P Parameter: Plant Line Value: null
  misc_feature: MA Experiment ID: 20000184 Result: Down-regulated in Transcription
  misc_feature: MA Experiment 20000184 PARAMETER Experiment Name: At_Shoots__P Parameter: Age (day) Value: 7
  misc_feature: MA Experiment 20000184 PARAMETER Experiment Name: At_Shoots__P Parameter: Tissue Value: Shoots vs. Whole Plant
  misc_feature: MA Experiment ID: 20000185 Result: Down-regulated in Transcription
  misc_feature: MA Experiment 20000185 PARAMETER Experiment Name: At_Roots__P Parameter: Age (day) Value: 7 vs. 21
  misc_feature: MA Experiment 20000185 PARAMETER Experiment Name: At_Roots__P Parameter: Organism Value: A. thaliana
  misc_feature: MA Experiment 20000185 PARAMETER Experiment Name: At_Roots__P Parameter: Tissue Value: Roots vs. Whole Plant
  misc_feature: MA Experiment ID: 20000224 Result: Up-regulated in Transcription
  misc_feature: MA Experiment ID: 20000438 Result: Down-regulated in Transcription
  misc_feature: MA Experiment 20000438 PARAMETER Experiment Name: At_Shoots__P Parameter: Age (day) Value: 14
  misc_feature: MA Experiment 20000438 PARAMETER Experiment Name: At_Shoots__P Parameter: Tissue Value: Shoots vs. Whole Plant
  misc_feature: MA Experiment ID: 20000439 Result: Down-regulated in Transcription
  misc_feature: MA Experiment 20000439 PARAMETER Experiment Name: At_Roots__P Parameter: Age (day) Value: 14 vs. 21
  misc_feature: MA Experiment 20000439 PARAMETER Experiment Name: At_Roots__P Parameter: Organism Value: A. thaliana
  misc_feature: MA Experiment 20000439 PARAMETER Experiment Name: At_Roots__P Parameter: Tissue Value: Roots vs. Whole Plant
  misc_feature: MA Experiment ID: 20001247 Result: Down-regulated in Transcription
  misc_feature: MA Experiment 20001247 PARAMETER Experiment Name: At_Far-red-induction_P Parameter: Age (day) Value: 7
  misc_feature: MA Experiment 20001247 PARAMETER Experiment Name: At_Far-red-induction_P Parameter: Light Value: Far-red vs. White
  misc_feature: MA Experiment 20001247 PARAMETER Experiment Name: At_Far-red-induction_P Parameter: Organism Value: A. thaliana
  misc_feature: MA Experiment 20001247 PARAMETER Experiment Name: At_Far-red-induction_P Parameter: Plant Line Value: Columbia
  misc_feature: MA Experiment 20001247 PARAMETER Experiment Name: At_Far-red-induction_P Parameter: Timepoint (hr) Value: 1
  misc_feature: MA Experiment 20001247 PARAMETER Experiment Name: At_Far-red-induction_P Parameter: Tissue Value: Whole Plant
aattcggcacgaggtttgcgtctcgcttcatcttcaacctcaaacccaatttgtctactaaaccctggaaaaaaccttaatttcccaatccgaaaccatagaatccctaaaacttcgaaacccttttgcgttaggtcttcaatgagcttgtctaaaccacccagacaaaccttatctagtaactgggatgtatctagcttctccattgattccgttgctcaatctccttcaagactcccaagtttcgaagaactcgataccaccaacatgttgctccgtcaaagaatcgtctttttgggttctcaggttgatgatatgacggcggatttggttataagtcagctattgttactagatgctgaggactcagaaagagacattacgctttttatcaattcacccggtggatctattactgctgggatgggaatatatgatgcaatgaaacaatgtaaggcggatgtatctactgtttgcttagggttagctgcatctatgggtgcgtttcttcttgcttctggttcaaaagggaaacggtattgtatgcctaactctaaagttatgatccatcagccacttggtactgctggaggcaaagcaacggaaatgagcatacgtataagagaaatgatgtaccacaagattaaacttaacaaaatcttctctagaatcactgggaagcctgaatcagagatcgaaagtgacacagaccgtgataacttcttgaatccatgggaggcgaaagaatatggtttgatcgacgctgtaatcgatgatgggaaaccgggactaatcgctccaattggagatggtactcctcctcctaaaaccaaagtctgggatctttggaaagtcgaaggaaccaagaaagacaacactaacttgccatctgagcgctccatgacacagaatggttatgccgccattgaatagaactgttgttgcagcgtttacgccttttatatgttattctggtggtacctgtaaccatataacgttgcatttcctgtgtttgtaccatttctctgatagatttttggaataatttgaaggcaaaagatagattatttgttgtagaagaagctacaaaatttaatgattaaattgaatcatcaagccatg

SEQ ID NO: 108559 - protein, 310 aa, Arabidopsis thaliana
  peptide (1)..(310): Ceres Seq. ID no. 13667834
  misc_feature (81)..(260): Pfam Name: Clp protease Pfam Description: Clp protease
  misc_feature (1)..(310): Homolog of NCBI NO: 25456012 NR Description: probable ATP-dependent clp proteinase (EC
  misc_feature (6)..(310): Homolog of NCBI NO: 18408572 NR Description: ATP-dependent Clp protease proteolytic subunit
  misc_feature (6)..(310): Homolog of NCBI NO: 13899067 NR Description: ATP-dependent Clp protease; nClpP3 [Arabidopsis
  misc_feature (6)..(310): Homolog of NCBI NO: 15864561 NR Description: ClpP putative protein [Brassica napus]
  misc_feature (6)..(310): Homolog of NCBI NO: 7657879 NR Description: ClpP [Brassica napus var. napus]
  misc_feature (6)..(310): Homolog of NCBI NO: 6069464 NR Description: S-locus protein 2 [Brassica rapa]
  misc_feature (35)..(310): Homolog of NCBI NO: 17028170 NR Description: ClpP [Brassica oleracea]
  misc_feature (44)..(305): Homolog of NCBI NO: 34914540 NR Description: putative ATP-dependent Clp protease [Oryza sativa
  misc_feature (142)..(305): Homolog of NCBI NO: 21449427 NR Description: ATP-dependent Clp protease [Oryza sativa (indica
  misc_feature (86)..(269): Homolog of NCBI NO: 17228733 NR Description: ATP-dependent Clp protease proteolytic subunit
NSARGLRLASSSTSNPICLLNPGKNLNFPIRNHRIPKTSKPFCVRSSMSLSKPPRQTLSSNWDVSSFSIDSVAQSPSRLPSFEELDTTNMLLRQRIVFLGSQVDDMTADLVISQLLLLDAEDSERDITLFINSPGGSITAGMGIYDAMKQCKADVSTVCLGLAASMGAFLLASGSKGKRYCMPNSKVMIHQPLGTAGGKATEMSIRIREMMYHKIKLNKIFSRITGKPESEIESDTDRDNFLNPWEAKEYGLIDAVIDDGKPGLIAPIGDGTPPPKTKVWDLWKVEGTKKDNTNLPSERSMTQNGYAAIE

SEQ ID NO: 108560 - protein, 263 aa, Arabidopsis thaliana
  peptide (1)..(263): Ceres Seq. ID no. 13667835
  misc_feature (34)..(213): Pfam Name: Clp protease Pfam Description: Clp protease
  misc_feature (1)..(263): Homolog of NCBI NO: 25456012 NR Description: probable ATP-dependent clp proteinase (EC
  misc_feature (1)..(263): Homolog of NCBI NO: 18408572 NR Description: ATP-dependent Clp protease proteolytic subunit
  misc_feature (1)..(263): Homolog of NCBI NO: 13899067 NR Description: ATP-dependent Clp protease; nClpP3 [Arabidopsis
  misc_feature (1)..(263): Homolog of NCBI NO: 15864561 NR Description: ClpP putative protein [Brassica napus]
  misc_feature (1)..(263): Homolog of NCBI NO: 7657879 NR Description: ClpP [Brassica napus var. napus]
  misc_feature (1)..(263): Homolog of NCBI NO: 6069464 NR Description: S-locus protein 2 [Brassica rapa]
  misc_feature (1)..(263): Homolog of NCBI NO: 17028170 NR Description: ClpP [Brassica oleracea]
  misc_feature (1)..(258): Homolog of NCBI NO: 34914540 NR Description: putative ATP-dependent Clp protease [Oryza sativa
  misc_feature (95)..(258): Homolog of NCBI NO: 21449427 NR Description: ATP-dependent Clp protease [Oryza sativa (indica
  misc_feature (39)..(222): Homolog of NCBI NO: 17228733 NR Description: ATP-dependent Clp protease proteolytic subunit
MSLSKPPRQTLSSNWDVSSFSIDSVAQSPSRLPSFEELDTTNMLLRQRIVFLGSQVDDMTADLVISQLLLLDAEDSERDITLFINSPGGSITAGMGIYDAMKQCKADVSTVCLGLAASMGAFLLASGSKGKRYCMPNSKVMIHQPLGTAGGKATEMSIRIREMMYHKIKLNKIFSRITGKPESEIESDTDRDNFLNPWEAKEYGLIDAVIDDGKPGLIAPIGDGTPPPKTKVWDLWKVEGTKKDNTNLPSERSMTQNGYAAIE

SEQ ID NO: 108561 - protein, 221 aa, Arabidopsis thaliana
  peptide (1)..(221): Ceres Seq. ID no. 13667836
  misc_feature (1)..(171): Pfam Name: Clp protease Pfam Description: Clp protease
  misc_feature (1)..(221): Homolog of NCBI NO: 25456012 NR Description: probable ATP-dependent clp proteinase (EC
  misc_feature (1)..(221): Homolog of NCBI NO: 18408572 NR Description: ATP-dependent Clp protease proteolytic subunit
  misc_feature (1)..(221): Homolog of NCBI NO: 13899067 NR Description: ATP-dependent Clp protease; nClpP3 [Arabidopsis
  misc_feature (1)..(221): Homolog of NCBI NO: 15864561 NR Description: ClpP putative protein [Brassica napus]
  misc_feature (1)..(221): Homolog of NCBI NO: 7657879 NR Description: ClpP [Brassica napus var. napus]
  misc_feature (1)..(221): Homolog of NCBI NO: 6069464 NR Description: S-locus protein 2 [Brassica rapa]
  misc_feature (1)..(221): Homolog of NCBI NO: 17028170 NR Description: ClpP [Brassica oleracea]
  misc_feature (1)..(216): Homolog of NCBI NO: 34914540 NR Description: putative ATP-dependent Clp protease [Oryza sativa
  misc_feature (53)..(216): Homolog of NCBI NO: 21449427 NR Description: ATP-dependent Clp protease [Oryza sativa (indica
  misc_feature (1)..(180): Homolog of NCBI NO: 17228733 NR Description: ATP-dependent Clp protease proteolytic subunit
MLLRQRIVFLGSQVDDMTADLVISQLLLLDAEDSERDITLFINSPGGSITAGMGIYDAMKQCKADVSTVCLGLAASMGAFLLASGSKGKRYCMPNSKVMIHQPLGTAGGKATEMSIRIREMMYHKIKLNKIFSRITGKPESEIESDTDRDNFLNPWEAKEYGLIDAVIDDGKPGLIAPIGDGTPPPKTKVWDLWKVEGTKKDNTNLPSERSMTQNGYAAIE

SEQ ID NO: 108562 - DNA, 1298 bp, Arabidopsis thaliana
  misc_feature (1)..(1298): Ceres Seq. ID no. 13667837
  misc_feature: MA Experiment ID: 20000171 Result: Down-regulated in Transcription
  misc_feature: MA Experiment 20000171 PARAMETER Experiment Name: At_42deg_Heat_P Parameter: Age (day) Value: 14
  misc_feature: MA Experiment 20000171 PARAMETER Experiment Name: At_42deg_Heat_P Parameter: Organism Value: A. thaliana
  misc_feature: MA Experiment 20000171 PARAMETER Experiment Name: At_42deg_Heat_P Parameter: Plant Line Value: WS
  misc_feature: MA Experiment 20000171 PARAMETER Experiment Name: At_42deg_Heat_P Parameter: Temperature (deg C) Value: 42 vs. 22
  misc_feature: MA Experiment 20000171 PARAMETER Experiment Name: At_42deg_Heat_P Parameter: Timepoint (hr) Value: 1
  misc_feature: MA Experiment 20000171 PARAMETER Experiment Name: At_42deg_Heat_P Parameter: Tissue Value: Aerial
  misc_feature: MA Experiment ID: 20000173 Result: Down-regulated in Transcription
  misc_feature: MA Experiment 20000173 PARAMETER Experiment Name: At_42deg_Heat_P Parameter: Age (day) Value: 14
  misc_feature: MA Experiment 20000173 PARAMETER Experiment Name: At_42deg_Heat_P Parameter: Organism Value: A. thaliana
  misc_feature: MA Experiment 20000173 PARAMETER Experiment Name: At_42deg_Heat_P Parameter: Plant Line Value: WS
  misc_feature: MA Experiment 20000173 PARAMETER Experiment Name: At_42deg_Heat_P Parameter: Temperature (deg C) Value: 42 vs. 22
  misc_feature: MA Experiment 20000173 PARAMETER Experiment Name: At_42deg_Heat_P Parameter: Timepoint (hr) Value: 6
  misc_feature: MA Experiment 20000173 PARAMETER Experiment Name: At_42deg_Heat_P Parameter: Tissue Value: Aerial
  misc_feature: MA Experiment ID: 20000224 Result: Down-regulated in Transcription
  misc_feature: MA Experiment ID: 20001248 Result: Down-regulated in Transcription
  misc_feature: MA Experiment 20001248 PARAMETER Experiment Name: At_Far-red-induction_P Parameter: Age (day) Value: 7
  misc_feature: MA Experiment 20001248 PARAMETER Experiment Name: At_Far-red-induction_P Parameter: Light Value: Far-red vs. White
  misc_feature: MA Experiment 20001248 PARAMETER Experiment Name: At_Far-red-induction_P Parameter: Organism Value: A. thaliana
  misc_feature: MA Experiment 20001248 PARAMETER Experiment Name: At_Far-red-induction_P Parameter: Plant Line Value: Columbia
  misc_feature: MA Experiment 20001248 PARAMETER Experiment Name: At_Far-red-induction_P Parameter: Timepoint (hr) Value: 4
  misc_feature: MA Experiment 20001248 PARAMETER Experiment Name: At_Far-red-induction_P Parameter: Tissue Value: Whole Plant
  misc_feature: MA Experiment ID: 20001450 Result: Down-regulated in Transcription
  misc_feature: MA Experiment 20001450 PARAMETER Experiment Name: At_Far-red-induction_P Parameter: Age (day) Value: 7
  misc_feature: MA Experiment 20001450 PARAMETER Experiment Name: At_Far-red-induction_P Parameter: Light Value: Far-red vs. White
  misc_feature: MA Experiment 20001450 PARAMETER Experiment Name: At_Far-red-induction_P Parameter: Organism Value: A. thaliana
  misc_feature: MA Experiment 20001450 PARAMETER Experiment Name: At_Far-red-induction_P Parameter: Plant Line Value: Columbia
  misc_feature: MA Experiment 20001450 PARAMETER Experiment Name: At_Far-red-induction_P Parameter: Timepoint (hr) Value: 8
  misc_feature: MA Experiment 20001450 PARAMETER Experiment Name: At_Far-red-induction_P Parameter: Tissue Value: Whole Plant
  misc_feature: MA Experiment ID: 20001560 Result: Up-regulated in Transcription
  misc_feature: MA Experiment 20001560 PARAMETER Experiment Name: At_Drought_Soil_Dry_P Parameter: Age (day) Value: 28
  misc_feature: MA Experiment 20001560 PARAMETER Experiment Name: At_Drought_Soil_Dry_P Parameter: Organism Value: A. thaliana
  misc_feature: MA Experiment 20001560 PARAMETER Experiment Name: At_Drought_Soil_Dry_P Parameter: Plant Line Value: WS
  misc_feature: MA Experiment 20001560 PARAMETER Experiment Name: At_Drought_Soil_Dry_P Parameter: Post Timepoint (hr) Value: None
  misc_feature: MA Experiment 20001560 PARAMETER Experiment Name: At_Drought_Soil_Dry_P Parameter: Post-Treatment Value: None
  misc_feature: MA Experiment 20001560 PARAMETER Experiment Name: At_Drought_Soil_Dry_P Parameter: Timepoint (day) Value: 14
  misc_feature: MA Experiment 20001560 PARAMETER Experiment Name: At_Drought_Soil_Dry_P Parameter: Treatment Value: Drought vs. No Drought
  misc_feature: MA Experiment ID: 20001905 Result: Down-regulated in Transcription
  misc_feature: MA Experiment 20001905 PARAMETER Experiment Name: At_Drought_Reproduction_P Parameter: Age (day) Value: 40
  misc_feature: MA Experiment 20001905 PARAMETER Experiment Name: At_Drought_Reproduction_P Parameter: Organism Value: A. thaliana
  misc_feature: MA Experiment 20001905 PARAMETER Experiment Name: At_Drought_Reproduction_P Parameter: Plant Line Value: WS
  misc_feature: MA Experiment 20001905 PARAMETER Experiment Name: At_Drought_Reproduction_P Parameter: Timepoint (day) Value: 10
  misc_feature: MA Experiment 20001905 PARAMETER Experiment Name: At_Drought_Reproduction_P Parameter: Tissue Value: Rosettes
  misc_feature: MA Experiment 20001905 PARAMETER Experiment Name: At_Drought_Reproduction_P Parameter: Treatment Value: Drought vs. No Drought
  misc_feature: MA Experiment ID: 20001911 Result: Down-regulated in Transcription
  misc_feature: MA Experiment 20001911 PARAMETER Experiment Name: At_Drought_Reproduction_P Parameter: Age (day) Value: 40
  misc_feature: MA Experiment 20001911 PARAMETER Experiment Name: At_Drought_Reproduction_P Parameter: Organism Value: A. thaliana
  misc_feature: MA Experiment 20001911 PARAMETER Experiment Name: At_Drought_Reproduction_P Parameter: Plant Line Value: WS
  misc_feature: MA Experiment 20001911 PARAMETER Experiment Name: At_Drought_Reproduction_P Parameter: Timepoint (day) Value: 10
  misc_feature: MA Experiment 20001911 PARAMETER Experiment Name: At_Drought_Reproduction_P Parameter: Tissue Value: Flowers
  misc_feature: MA Experiment 20001911 PARAMETER Experiment Name: At_Drought_Reproduction_P Parameter: Treatment Value: Drought vs. No Drought
  misc_feature: Pfam Name: Inositol_P Pfam Description: Inositol monophosphatase family
gaattcggcacgagtcgagacctagaaattcatcgaaccgtctcgtttctgtattcggacgcaagtcttcttctccttcatttgttactctcagagttgtttcatcgatggcttacgagaaagagcttgatgctgctaagaaagctgcttcactcgctgctcgtctctgtcagaaagttcaaaaggctttgttgcaatcagatgtgcaatcaaaatctgataaaagtccagtgaccgttgctgattatggttcacaagcagttgttagtttagtcttagaaaaagagctcagttctgaacccttttcattggtggctgaagaggactcaggcgatctacgcaaggatggttctcaggatactctggagcgcatcacaaaactcgtgaacgacactttggctaccgaggaatcgtttaatggctctactttgtctactgatgatctacttagagccattgactgtggaacatctgaaggtggtccaaatggtcgacactgggtcttggatccaattgatggcactaaaggatttctgaggggagatcaatacgcagtagcactaggattgctcgaggaagggaaagtagttttaggtgtgcttgcttgtccaaacttgccgttagcatccatagcaggaaacaacaagaacaaatcttcgtcagacgaaattggatgcctcttctttgctacaattggttcagggacatatatgcagctcctagattcaaaatcttctcctgtaaaagtgcaagtctctagtgttgagaatcctgaagaggcatcgttcttcgagtcattcgaaggagctcactctctacatgacttatccagctccattgccaataaactcggtgtcaaagctccaccagtccgtattgatagccaagcaaagtatggagctttatcaagaggagatggagctatatacttacggtttcctcataaaggataccgcgaaaagatttgggaccatgtcgctggtgctatagttgttacagaggcgggtggaatagtgacagatgcagcaggaaagccactggatttctcgaaagggaagtatcttgatttggacacaggcattatcgttgctaacgagaagctaatgcctctgcttttgaaagcagttcgtgactccatagctgagcaagagaaagcttcagctctttgatttgtttttttctctcgtacgttctttgtttctctgtaactgttgtttcattttctttcaccgaatttcaccagtgagaatttcttccattttcgaaaaagaaataaaaatgaaattctgttttgggct

SEQ ID NO: 108563 - protein, 388 aa, Arabidopsis thaliana
  peptide (1)..(388): Ceres Seq. ID no. 13667838
  misc_feature: Pfam Name: Inositol_P Pfam Description: Inositol monophosphatase family
  misc_feature (36)..(388): Homolog of NCBI NO: 15237567 NR Description: 3(2),5-bisphosphate nucleotidase [Arabidopsis
  misc_feature (32)..(388): Homolog of NCBI NO: 14268820 NR Description: diphosphonucleotide phosphatase 1 [Zea mays]
  misc_feature (38)..(387): Homolog of NCBI NO: 3913517 NR Description: 3'(2'),5'-BISPHOSPHATE NUCLEOTIDASE (3'(2'),5-
  misc_feature (36)..(382): Homolog of NCBI NO: 15237589 NR Description: 3(2),5-bisphosphate nucleotidase (emb|CAB05889.1)
  misc_feature (36)..(384): Homolog of NCBI NO: 18424775 NR Description: 3(2),5-bisphosphate nucleotidase [Arabidopsis
  misc_feature (36)..(384): Homolog of NCBI NO: 21618152 NR Description: 3(2),5-bisphosphate nucleotidase [Arabidopsis
  misc_feature (36)..(382): Homolog of NCBI NO: 34395640 NR Description: Probable SAL4 phosphatase (3'(2'),5'-bisphosphate
  misc_feature (36)..(384): Homolog of NCBI NO: 8777312 NR Description: 3'(2'),5'-bisphosphate nucleotidase [Arabidopsis
  misc_feature (36)..(382): Homolog of NCBI NO: 15242383 NR Description: 3'(2'),5'-bisphosphate nucleotidase-related
  misc_feature (168)..(388): Homolog of NCBI NO: 17017951 NR Description: 3'(2'),5'-bisphosphate nucleotidase [Gossypium
IRHESRPRNSSNRLVSVFGRKSSSPSFVTLRVVSSMAYEKELDAAKKAASLAARLCQKVQKALLQSDVQSKSDKSPVTVADYGSQAVVSLVLEKELSSEPFSLVAEEDSGDLRKDGSQDTLERITKLVNDTLATEESFNGSTLSTDDLLRAIDCGTSEGGPNGRHWVLDPIDGTKGFLRGDQYAVALGLLEEGKVVLGVLACPNLPLASIAGNNKNKSSSDEIGCLFFATIGSGTYMQLLDSKSSPVKVQVSSVENPEEASFFESFEGAHSLHDLSSSIANKLGVKAPPVRIDSQAKYGALSRGDGAIYLRFPHKGYREKIWDHVAGAIVVTEAGGIVTDAAGKPLDFSKGKYLDLDTGIIVANEKLMPLLLKAVRDSIAEQEKASAL

SEQ ID NO: 108564 - protein, 353 aa, Arabidopsis thaliana; identical to SEQ ID NO: 78395
  peptide (1)..(353): Ceres Seq. ID no. 13667839
  misc_feature: Pfam Name: Inositol_P Pfam Description: Inositol monophosphatase family
  misc_feature (1)..(353): Homolog of NCBI NO: 15237567 NR Description: 3(2),5-bisphosphate nucleotidase [Arabidopsis
  misc_feature (1)..(353): Homolog of NCBI NO: 14268820 NR Description: diphosphonucleotide phosphatase 1 [Zea mays]
  misc_feature (3)..(352): Homolog of NCBI NO: 3913517 NR Description: 3'(2'),5'-BISPHOSPHATE NUCLEOTIDASE (3'(2'),5-
  misc_feature (1)..(347): Homolog of NCBI NO: 15237589 NR Description: 3(2),5-bisphosphate nucleotidase (emb|CAB05889.1)
  misc_feature (1)..(349): Homolog of NCBI NO: 18424775 NR Description: 3(2),5-bisphosphate nucleotidase [Arabidopsis
  misc_feature (1)..(349): Homolog of NCBI NO: 21618152 NR Description: 3(2),5-bisphosphate nucleotidase [Arabidopsis
  misc_feature (1)..(347): Homolog of NCBI NO: 34395640 NR Description: Probable SAL4 phosphatase (3'(2'),5'-bisphosphate
  misc_feature (1)..(349): Homolog of NCBI NO: 8777312 NR Description: 3'(2'),5'-bisphosphate nucleotidase [Arabidopsis
  misc_feature (1)..(347): Homolog of NCBI NO: 15242383 NR Description: 3'(2'),5'-bisphosphate nucleotidase-related
  misc_feature (133)..(353): Homolog of NCBI NO: 17017951 NR Description: 3'(2'),5'-bisphosphate nucleotidase [Gossypium

SEQ ID NO: 108565 - DNA, 1346 bp, Arabidopsis thaliana
  misc_feature (1)..(1346): Ceres Seq. ID no. 13667842
  misc_feature: MA Experiment ID: 20000185 Result: Up-regulated in Transcription
  misc_feature: MA Experiment 20000185 PARAMETER Experiment Name: At_Roots__P Parameter: Age (day) Value: 7 vs. 21
  misc_feature: MA Experiment 20000185 PARAMETER Experiment Name: At_Roots__P Parameter: Organism Value: A. thaliana
  misc_feature: MA Experiment 20000185 PARAMETER Experiment Name: At_Roots__P Parameter: Tissue Value: Roots vs. Whole Plant
  misc_feature: MA Experiment ID: 20000439 Result: Up-regulated in Transcription
  misc_feature: MA Experiment 20000439 PARAMETER Experiment Name: At_Roots__P Parameter: Age (day) Value: 14 vs. 21
  misc_feature: MA Experiment 20000439 PARAMETER Experiment Name: At_Roots__P Parameter: Organism Value: A. thaliana
  misc_feature: MA Experiment 20000439 PARAMETER Experiment Name: At_Roots__P Parameter: Tissue Value: Roots vs. Whole Plant
  misc_feature: MA Experiment ID: 20001756 Result: Up-regulated in Transcription
  misc_feature: MA Experiment 20001756 PARAMETER Experiment Name: At_50mM_NH4NO3_L-to-H_P Parameter: Timepoint (hr) Value: 4
  misc_feature: MA Experiment 20001756 PARAMETER Experiment Name: At_50mM_NH4NO3_L-to-H_P Parameter: Tissue Value: Leaf
  misc_feature: MA Experiment 20001756 PARAMETER Experiment Name: At_50mM_NH4NO3_L-to-H_P Parameter: Treatment Value: 50mM NH4NO3 vs 100mM Mannitol
  misc_feature: MA Experiment ID: 20001757 Result: Up-regulated in Transcription
  misc_feature: MA Experiment 20001757 PARAMETER Experiment Name: At_50mM_NH4NO3_L-to-H_P Parameter: Timepoint (hr) Value: 6
  misc_feature: MA Experiment 20001757 PARAMETER Experiment Name: At_50mM_NH4NO3_L-to-H_P Parameter: Tissue Value: Leaf
  misc_feature: MA Experiment 20001757 PARAMETER Experiment Name: At_50mM_NH4NO3_L-to-H_P Parameter: Treatment Value: 50mM NH4NO3 vs 100mM Mannitol
tgaaaaatacaaacccccttttatttctcctcttctctcctacaagctcattcagaactctcaacatttccggtagagaaaaaaaaaccgttttttttttaatctctttctaaagaaggatatcaaaacaaaacacaaagttgaaaactttgcatctgggtttgtctattttagattcagatcttagtttttttcgattgaatatctacaatggtaatggaaacagagtcaaagttccatgttttagctgttgatgatagtctttttgatcggaaaatgattgagagattgcttcaaaagtcttcatgtcaagtaactacagttgattcaggctctaaagctctggaatttctgggtttaagagtagatgacaacgacccaaatgcactctctacatcgccacaaattcatcaggaagttgaaataaatctaataattacagattactgtatgcctggcatgactggttatgatttgctcaagaaagttaaggaatcagcggcgtttagaagtatacctgtagttataatgtcatctgagaacgttcctgcaagaatctccagatgtttggaagaaggagctgaagagtttttcttgaaaccagtgaagttagctgatcttaccaagttgaaacctcatatgatgaaaacgaagttgaagaaagaaagtgagaaaccagttgccatagaagagattgtggtgtctaaaccggagatagaagaagaagaagaagagtcatcagtgattgaaatcttgcctctccaccaagaaattgaatccgaacaacttgaaccaatgttgagtagtaataagagaaaagcaatggaagaagtggtttctactgatcgatcacgtcctaaatacaatgatatcacaacctcggtctgaaggaggactaacgcaacccgagaagccactacaagacctatatggagaatgccaacagaatctctcagtagaagatctgctaactcttgaatatgaagcaaacaacaacggactgctaggagtaataccgcagcaacatcgttatcatcaggaaaaagagacaatgcagacacaaggagatccactaaatcgaatacctattcaatcagaagcttcaaaccattcagatagtggtgatagcacactaacaatggctcaaaaccaggatggtctcggacacagtagttgttttattctctgtcaatttacttctctcccctagattagctttcttcgtttttttcttttatttttcatgctgttaaacccacaagatttttgggaagtttcttgctactagcttaagaatccaaaactattgcaaagattgaagctttcgagaattagtaatgaatctt

SEQ ID NO: 108566 - protein, 225 aa, Arabidopsis thaliana
  peptide (1)..(225): Ceres Seq. ID no. 13667843
  misc_feature (9)..(139): Pfam Name: Response regulator receiver domain Pfam Description: Response regulator receiver domain
  misc_feature (1)..(225): Homolog of NCBI NO: 15227325 NR Description: two-component response regulator 3 protein
  misc_feature (1)..(225): Homolog of NCBI NO: 15230202 NR Description: responce reactor 4 [Arabidopsis thaliana]
  misc_feature (89)..(225): Homolog of NCBI NO: 15225720 NR Description: two-component response regulator protein -related
  misc_feature (2)..(225): Homolog of NCBI NO: 34906626 NR Description: putative response regulator [Oryza sativa
  misc_feature (2)..(207): Homolog of NCBI NO: 12060386 NR Description: response regulator 5 [Zea mays]
  misc_feature (2)..(224): Homolog of NCBI NO: 12060384 NR Description: response regulator 4 [Zea mays]
  misc_feature (5)..(155): Homolog of NCBI NO: 12060388 NR Description: response regulator 6 [Zea mays]
  misc_feature (9)..(142): Homolog of NCBI NO: 33330868 NR Description: type-A response regulator [Catharanthus roseus]
  misc_feature (4)..(158): Homolog of NCBI NO: 13173408 NR Description: response regulator protein [Dianthus caryophyllus]
  misc_feature (1)..(148): Homolog of NCBI NO: 11358763 NR Description: response regulator 5 [imported] - Arabidopsis >gi|3953599|dbj|BAA34727.1| response regulator 5 [Arabidopsis
MVMETESKFHVLAVDDSLFDRKMIERLLQKSSCQVTTVDSGSKALEFLGLRVDDNDPNALSTSPQIHQEVEINLIITDYCMPGMTGYDLLKKVKESAAFRSIPVVIMSSENVPARISRCLEEGAEEFFLKPVKLADLTKLKPHMMKTKLKKESEKPVAIEEIVVSKPEIEEEEEESSVIEILPLHQEIESEQLEPMLSSNKRKAMEEVVSTDRSRPKYNDITTSV

SEQ ID NO: 108567 - protein, 223 aa, Arabidopsis thaliana
  peptide (1)..(223): Ceres Seq. ID no. 13667844
  misc_feature (7)..(137): Pfam Name: Response regulator receiver domain Pfam Description: Response regulator receiver domain
  misc_feature (1)..(223): Homolog of NCBI NO: 15227325 NR Description: two-component response regulator 3 protein
  misc_feature (1)..(223): Homolog of NCBI NO: 15230202 NR Description: responce reactor 4 [Arabidopsis thaliana]
  misc_feature (87)..(223): Homolog of NCBI NO: 15225720 NR Description: two-component response regulator protein -related
  misc_feature (1)..(223): Homolog of NCBI NO: 34906626 NR Description: putative response regulator [Oryza sativa
  misc_feature (1)..(205): Homolog of NCBI NO: 12060386 NR Description: response regulator 5 [Zea mays]
  misc_feature (1)..(222): Homolog of NCBI NO: 12060384 NR Description: response regulator 4 [Zea mays]
  misc_feature (3)..(153): Homolog of NCBI NO: 12060388 NR Description: response regulator 6 [Zea mays]
  misc_feature (7)..(140): Homolog of NCBI NO: 33330868 NR Description: type-A response regulator [Catharanthus roseus]
  misc_feature (2)..(156): Homolog of NCBI NO: 13173408 NR Description: response regulator protein [Dianthus caryophyllus]
  misc_feature (1)..(146): Homolog of NCBI NO: 11358763 NR Description: response regulator 5 [imported] - Arabidopsis >gi|3953599|dbj|BAA34727.1| response regulator 5 [Arabidopsis
METESKFHVLAVDDSLFDRKMIERLLQKSSCQVTTVDSGSKALEFLGLRVDDNDPNALSTSPQIHQEVEINLIITDYCMPGMTGYDLLKKVKESAAFRSIPVVIMSSENVPARISRCLEEGAEEFFLKPVKLADLTKLKPHMMKTKLKKESEKPVAIEEIVVSKPEIEEEEEESSVIEILPLHQEIESEQLEPMLSSNKRKAMEEVVSTDRSRPKYNDITTSV

SEQ ID NO: 108568 - protein, 203 aa, Arabidopsis thaliana
  peptide (1)..(203): Ceres Seq. ID no. 13667845
  misc_feature (1)..(117): Pfam Name: Response regulator receiver domain Pfam Description: Response regulator receiver domain
  misc_feature (1)..(203): Homolog of NCBI NO: 15227325 NR Description: two-component response regulator 3 protein
  misc_feature (1)..(203): Homolog of NCBI NO: 15230202 NR Description: responce reactor 4 [Arabidopsis thaliana]
  misc_feature (67)..(203): Homolog of NCBI NO: 15225720 NR Description: two-component response regulator protein -related
  misc_feature (1)..(203): Homolog of NCBI NO: 34906626 NR Description: putative response regulator [Oryza sativa
  misc_feature (1)..(185): Homolog of NCBI NO: 12060386 NR Description: response regulator 5 [Zea mays]
  misc_feature (1)..(202): Homolog of NCBI NO: 12060384 NR Description: response regulator 4 [Zea mays]
  misc_feature (1)..(133): Homolog of NCBI NO: 12060388 NR Description: response regulator 6 [Zea mays]
  misc_feature (1)..(120): Homolog of NCBI NO: 33330868 NR Description: type-A response regulator [Catharanthus roseus]
  misc_feature (1)..(136): Homolog of NCBI NO: 13173408 NR Description: response regulator protein [Dianthus caryophyllus]
  misc_feature (1)..(126): Homolog of NCBI NO: 11358763 NR Description: response regulator 5 [imported] - Arabidopsis >gi|3953599|dbj|BAA34727.1| response regulator 5 [Arabidopsis
MIERLLQKSSCQVTTVDSGSKALEFLGLRVDDNDPNALSTSPQIHQEVEINLIITDYCMPGMTGYDLLKKVKESAAFRSIPVVIMSSENVPARISRCLEEGAEEFFLKPVKLADLTKLKPHMMKTKLKKESEKPVAIEEIVVSKPEIEEEEEESSVIEILPLHQEIESEQLEPMLSSNKRKAMEEVVSTDRSRPKYNDITTSV

SEQ ID NO: 108569 - DNA, 1183 bp, Arabidopsis thaliana
  misc_feature (1)..(1183): Ceres Seq. ID no. 13667846
  misc_feature: MA Experiment ID: 108577 Result: Down-regulated in Transcription
  misc_feature: MA Experiment 108577 PARAMETER Experiment Name: At_42deg_Heat_cDNA_P Parameter: Temperature (deg C) Value: 42 vs. 22
  misc_feature: MA Experiment 108577 PARAMETER Experiment Name: At_42deg_Heat_cDNA_P Parameter: Timepoint (hr) Value: 6
  misc_feature: MA Experiment 108577 PARAMETER Experiment Name: At_42deg_Heat_cDNA_P Parameter: Tissue Value: Aerial
  misc_feature: MA Experiment ID: 20000069 Result: Up-regulated in Transcription
  misc_feature: MA Experiment 20000069 PARAMETER Experiment Name: At_100uM_ABA_Mutants_cDNA_P Parameter: Plant Line Value: CS23
  misc_feature: MA Experiment 20000069 PARAMETER Experiment Name: At_100uM_ABA_Mutants_cDNA_P Parameter: Timepoint (hr) Value: 6
  misc_feature: MA Experiment 20000069 PARAMETER Experiment Name: At_100uM_ABA_Mutants_cDNA_P Parameter: Tissue Value: Aerial
  misc_feature: MA Experiment 20000069 PARAMETER Experiment Name: At_100uM_ABA_Mutants_cDNA_P Parameter: Treatment Value: 100uM ABA vs. No Treatment
  misc_feature: MA Experiment ID: 20000070 Result: Up-regulated in Transcription
  misc_feature: MA Experiment 20000070 PARAMETER Experiment Name: At_100uM_ABA_Mutants_cDNA_P Parameter: Plant Line Value: CS24
  misc_feature: MA Experiment 20000070 PARAMETER Experiment Name: At_100uM_ABA_Mutants_cDNA_P Parameter: Timepoint (hr) Value: 6
  misc_feature: MA Experiment 20000070 PARAMETER Experiment Name: At_100uM_ABA_Mutants_cDNA_P Parameter: Tissue Value: Aerial
  misc_feature: MA Experiment 20000070 PARAMETER Experiment Name: At_100uM_ABA_Mutants_cDNA_P Parameter: Treatment Value: 100uM ABA vs. No Treatment
  misc_feature: MA Experiment ID: 20000071 Result: Up-regulated in Transcription
  misc_feature: MA Experiment 20000071 PARAMETER Experiment Name: At_100uM_ABA_Mutants_cDNA_P Parameter: Plant Line Value: CS8104
  misc_feature: MA Experiment 20000071 PARAMETER Experiment Name: At_100uM_ABA_Mutants_cDNA_P Parameter: Timepoint (hr) Value: 6
  misc_feature: MA Experiment 20000071 PARAMETER Experiment Name: At_100uM_ABA_Mutants_cDNA_P Parameter: Tissue Value: Aerial
  misc_feature: MA Experiment 20000071 PARAMETER Experiment Name: At_100uM_ABA_Mutants_cDNA_P Parameter: Treatment Value: 100uM ABA vs. No Treatment
  misc_feature: MA Experiment ID: 20000072 Result: Up-regulated in Transcription
  misc_feature: MA Experiment 20000072 PARAMETER Experiment Name: At_100uM_ABA_Mutants_cDNA_P Parameter: Plant Line Value: CS8105
  misc_feature: MA Experiment 20000072 PARAMETER Experiment Name: At_100uM_ABA_Mutants_cDNA_P Parameter: Timepoint (hr) Value: 6
  misc_feature: MA Experiment 20000072 PARAMETER Experiment Name: At_100uM_ABA_Mutants_cDNA_P Parameter: Tissue Value: Aerial
  misc_feature: MA Experiment 20000072 PARAMETER Experiment Name: At_100uM_ABA_Mutants_cDNA_P Parameter: Treatment Value: 100uM ABA vs. No Treatment
  misc_feature: MA Experiment ID: 20000088 Result: Up-regulated in Transcription
  misc_feature: MA Experiment 20000088 PARAMETER Experiment Name: At_100uM_ABA_Mutants_cDNA_P Parameter: Plant Line Value: Landsberg
  misc_feature: MA Experiment 20000088 PARAMETER Experiment Name: At_100uM_ABA_Mutants_cDNA_P Parameter: Timepoint (hr) Value: 6
  misc_feature: MA Experiment 20000088 PARAMETER Experiment Name: At_100uM_ABA_Mutants_cDNA_P Parameter: Tissue Value: Aerial
  misc_feature: MA Experiment 20000088 PARAMETER Experiment Name: At_100uM_ABA_Mutants_cDNA_P Parameter: Treatment Value: 100uM ABA vs. No Treatment
  misc_feature: MA Experiment ID: 20000089 Result: Up-regulated in Transcription
  misc_feature: MA Experiment ID: 20000090 Result: Up-regulated in Transcription
  misc_feature: MA Experiment ID: 20000224 Result: Down-regulated in Transcription
ctacgtcagggccacgatccacgccttgaccttcgtttttttttttctcagagattagagaaaactccgataaccaatttctcaatctttttgtagatccaatttttccaggaaaaaaagaggtttcgcgaagaagatgagttttcaagatttagaatcaggaagaggaagatcaacgaggaaattcaatggtggtcgacaagattcgacacaagccgttgcttctggaatattccagatcaataccggagtctccacgtttcagcgactcgttaacacacttggtactcccaaagatacaccggagctccgggagaagctgcacaagacaaggttgcatattggacagcttgtgaaggatacttcagctaaacttaaagaagctagtgaaactgatcatcaaagcggtgtcaatccaagtaagaagattgcagatgctaagcttgcaagggactttcaagctgttttaaaagagtttcagaaagctcaacaaactgctgctgaaagagaaaccacttatactcctttcgtgcctcaatctgctcttccctctagctatacggcgggtgaggtggataaggtaccggaacagcgggcacaacttcaggagtcgaaaagacaagaacttgtattgttagacaacgagattgcattcaacgaggctgtgattgaagaaagagagcaaggaatacaagaaatccatcagcaaattggtgaggttaacgagatattcaaagatcttgcggttctggttaacgatcaaggagtcatgatagatgatattggtactcacattgacaactcccgtgctgcaacttcacaaggaaaatctcagcttgtgcaagccgcgaaaacacaaaaatcaaactcctctctgacatgcttgctcttggtgatatttggcattgttctcctgatcgtgattatagtactcgcagcttgatttcgaacagcaagaacatttcgtttgtgtgtgttcattgatcttaaggcatcaatgactggaactacttggtatatattatatgttgaagagaacacttagaagttggttttgtgtttgtttgggttggttcagttcggtttgaggttctattggttaatgtaatagtgtgtgcgtgtgtggcttttttgttgtgcaaacattttgttggagatgacagaaactctgttttgtttgtgg

SEQ ID NO: 108570 - protein, 268 aa, Arabidopsis thaliana; identical to SEQ ID NO: 29132
  peptide (1)..(268): Ceres Seq. ID no. 13667847
  misc_feature (180)..(242): Pfam Name: SNARE domain Pfam Description: SNARE domain
  misc_feature (1)..(268): Homolog of NCBI NO: 18422725 NR Description: syntaxin of plants SYP22 (VAM3p) [Arabidopsis >gi|28380153|sp|P93654|SY22_ARATH Syntaxin 22 (AtSYP22) (AtVAM3) syntaxin related protein AtVam3p protein AtVam3p [Arabidopsis

SEQ ID NO: 108571 - DNA, 1438 bp, Arabidopsis thaliana
  misc_feature (1)..(1438): Ceres Seq. ID no. 13667848
  misc_feature: MA Experiment ID: 108569 Result: Up-regulated in Transcription
  misc_feature: MA Experiment 108569 PARAMETER Experiment Name: At_0.001%_MeJA__cDNA_P Parameter: Timepoint (hr) Value: 6
  misc_feature: MA Experiment 108569 PARAMETER Experiment Name: At_0.001%_MeJA__cDNA_P Parameter: Tissue Value: Aerial
  misc_feature: MA Experiment 108569 PARAMETER Experiment Name: At_0.001%_MeJA__cDNA_P Parameter: Treatment Value: 0.001% MeJA vs. No Treatment
  misc_feature: MA Experiment ID: 108573 Result: Up-regulated in Transcription
  misc_feature: MA Experiment 108573 PARAMETER Experiment Name: At_Drought_cDNA_P Parameter: Timepoint (hr) Value: 6
  misc_feature: MA Experiment 108573 PARAMETER Experiment Name: At_Drought_cDNA_P Parameter: Tissue Value: Aerial
  misc_feature: MA Experiment 108573 PARAMETER Experiment Name: At_Drought_cDNA_P Parameter: Treatment Value: Drought vs. No Drought
  misc_feature: MA Experiment ID: 108594 Result: Down-regulated in Transcription
  misc_feature: MA Experiment 108594 PARAMETER Experiment Name: At_Ler-rhl_Root_cDNA_P Parameter: Plant Line Value: null
  misc_feature: MA Experiment ID: 108595 Result: Down-regulated in Transcription
  misc_feature: MA Experiment 108595 PARAMETER Experiment Name: At_Ler-pi_Ovule_cDNA_P Parameter: Plant Line Value: null
  misc_feature: MA Experiment ID: 108668 Result: Up-regulated in Transcription
  misc_feature: MA Experiment 108668 PARAMETER Experiment Name: At_2mM_SA_cDNA_P Parameter: Plant Line Value: WS
  misc_feature: MA Experiment 108668 PARAMETER Experiment Name: At_2mM_SA_cDNA_P Parameter: Timepoint (hr) Value: 6
  misc_feature: MA Experiment 108668 PARAMETER Experiment Name: At_2mM_SA_cDNA_P Parameter: Treatment Value: 2mM SA vs. No Treatment
  misc_feature: MA Experiment ID: 20000111 Result: Down-regulated in Transcription
  misc_feature: MA Experiment 20000111 PARAMETER Experiment Name: At_42deg_Heat_cDNA_P Parameter: Temperature (deg C) Value: 42 vs. 22
  misc_feature: MA Experiment 20000111 PARAMETER Experiment Name: At_42deg_Heat_cDNA_P Parameter: Timepoint (hr) Value: 6
  misc_feature: MA Experiment 20000111 PARAMETER Experiment Name: At_42deg_Heat_cDNA_P Parameter: Tissue Value: Aerial
  misc_feature: MA Experiment ID: 20000113 Result: Down-regulated in Transcription
  misc_feature: MA Experiment 20000113 PARAMETER Experiment Name: At_42deg_Heat_cDNA_P Parameter: Temperature (deg C) Value: 42 vs. 22
  misc_feature: MA Experiment 20000113 PARAMETER Experiment Name: At_42deg_Heat_cDNA_P Parameter: Timepoint (hr) Value: 8
  misc_feature: MA Experiment 20000113 PARAMETER Experiment Name: At_42deg_Heat_cDNA_P Parameter: Tissue Value: Aerial
  misc_feature: MA Experiment ID: 20000173 Result: Down-regulated in Transcription
  misc_feature: MA Experiment 20000173 PARAMETER Experiment Name: At_42deg_Heat_P Parameter: Age (day) Value: 14
  misc_feature: MA Experiment 20000173 PARAMETER Experiment Name: At_42deg_Heat_P Parameter: Organism Value: A. thaliana
  misc_feature: MA Experiment 20000173 PARAMETER Experiment Name: At_42deg_Heat_P Parameter: Plant Line Value: WS
  misc_feature: MA Experiment 20000173 PARAMETER Experiment Name: At_42deg_Heat_P Parameter: Temperature (deg C) Value: 42 vs. 22
  misc_feature: MA Experiment 20000173 PARAMETER Experiment Name: At_42deg_Heat_P Parameter: Timepoint (hr) Value: 6
  misc_feature: MA Experiment 20000173 PARAMETER Experiment Name: At_42deg_Heat_P Parameter: Tissue Value: Aerial
  misc_feature: MA Experiment ID: 20000180 Result: Up-regulated in Transcription
  misc_feature: MA Experiment 20000180 PARAMETER Experiment Name: At_Germinating_Seeds_P Parameter: Age (hr) Value: 24 vs. 0
  misc_feature: MA Experiment 20000180 PARAMETER Experiment Name: At_Germinating_Seeds_P Parameter: Tissue Value: Germinating Seeds
  misc_feature: MA Experiment ID: 20000185 Result: Up-regulated in Transcription
  misc_feature: MA Experiment 20000185 PARAMETER Experiment Name: At_Roots__P Parameter: Age (day) Value: 7 vs. 21
  misc_feature: MA Experiment 20000185 PARAMETER Experiment Name: At_Roots__P Parameter: Organism Value: A. thaliana
  misc_feature: MA Experiment 20000185 PARAMETER Experiment Name: At_Roots__P Parameter: Tissue Value: Roots vs. Whole Plant
  misc_feature: MA Experiment ID: 20000234 Result: Down-regulated in Transcription
  misc_feature: MA Experiment 20000234 PARAMETER Experiment Name: At_Siliques_P Parameter: Age (day) Value: 21
  misc_feature: MA Experiment 20000234 PARAMETER Experiment Name: At_Siliques_P Parameter: Organism Value: A. thaliana
  misc_feature: MA Experiment 20000234 PARAMETER Experiment Name: At_Siliques_P Parameter: Plant Line Value: WS
  misc_feature: MA Experiment 20000234 PARAMETER Experiment Name: At_Siliques_P Parameter: Tissue Value: Less Than 5mm Siliques vs. Whole Plant
  misc_feature: MA Experiment ID: 20000439 Result: Up-regulated in Transcription
  misc_feature: MA Experiment 20000439 PARAMETER Experiment Name: At_Roots__P Parameter: Age (day) Value: 14 vs. 21
  misc_feature: MA Experiment 20000439 PARAMETER Experiment Name: At_Roots__P Parameter: Organism Value: A. thaliana
  misc_feature: MA Experiment 20000439 PARAMETER Experiment Name: At_Roots__P Parameter: Tissue Value: Roots vs. Whole Plant
ccacgcttccgactcttcttcatcttcttcctctgacgatcattttcagaagactctgattccgatcaaaattgcagaagaagatgtctcgccaatcgtcttctctactgaagaatcttcgtagcatcgcttcccgttccaaaatccagacccgatccgtgacttacatgcccagacccggtgacggaaaaccaagaccagtgacgttaatccccggagacggagttggtccgttggtaacaaacgcggttcaacaagtgatggaagcgatgcacgctccggtttacttcgaaccgttcgaagttcatggagatatgaagagtttacctgaaggattgttggaatcgattaagaagaacaaagtttgtttgaaaggtggtcttaagactcccgtcggtggtggtgtgagctctctcaatgttaatctgagaaaggagcttgatctctttgcttctctcgtcaactgtttcaatttgcctggtttagcttctcgtcatgagaatgttgatattgttgtgattagagagaacactgaaggtgaatatgcaggtcttgaacatgaagttgttcctggtgttgttgagagccttaaggtgattacaaagttctgttcagagcgtatcgcaaagtatgcgtttgagtatgcctacttgaacaacaggaagaaagttacagcagtgcacaaggctaatatcatgaaattggctgatggtttgttcttggagtcttgtcaagaggttgctaagaagtatccaagcattgcttacaatgaaatcattgttgataattgttgtatgcaacttgtggctagaccagagcaattcgatgtcatggtgacgcctaatctctatggtaatctagtggcaaacactgctgctggtattgctggaggctctggagtcatgcctggaggaaatgttggggcggagtatgcggtctttgagcaaggtgcatcagcgggaaacgtggggaaggatacaacggaagagcaaaagaacgcaaaccctgtggctttgttgctgtcatcagccatgatgcttagacaccttcagttcccttcttttgctgacaggcttgaaaccgctgtgaagcgtgttatcgctgaagggaattgtcggactgaagatcttggtggaaacagtaccactcaagaggtcgttgacgctgtcattgcaaatttggattgactttgacaattccaacttcggcttgtgtaaagccatcagtcacacgtcggtatgattcacgcttactgggaaatacttctagttcccacattctttcgagataactcgaattgggatttcagatttcgagaaaaataacatatggttttttgttttgtttttcttctttttgttcatgtaatatgcaaagtgcaaagtgaaaactgcctcagagcattattttttgaataatgaaaattatgtttaacttc

SEQ ID NO: 108572 - protein, 367 aa, Arabidopsis thaliana
  peptide (1)..(367): Ceres Seq. ID no. 13667849
  misc_feature (39)..(362): Pfam Name: Isocitrate/isopropylmalate dehydrogenase Pfam Description: Isocitrate/isopropylmalate dehydrogenase
  misc_feature (1)..(367): Homolog of NCBI NO: 1766048 NR Description: NAD+ dependent isocitrate dehydrogenase subunit 2
  misc_feature (1)..(367): Homolog of NCBI NO: 15227370 NR Description: isocitrate dehydrogenase [NAD+] subunit 2
  misc_feature (1)..(367): Homolog of NCBI NO: 30679881 NR Description: isocitrate dehydrogenase [NAD+] subunit 2
  misc_feature (3)..(367): Homolog of NCBI NO: 28974504 NR Description: NAD-dependent isocitrate dehydrogenase gamma
  misc_feature (1)..(367): Homolog of NCBI NO: 15236932 NR Description: isocitrate dehydrogenase [NAD+] subunit 1 thaliana] >gi|7431337|pir||T06131 isocitrate dehydrogenase (NAD)
  misc_feature (1)..(367): Homolog of NCBI NO: 28974502 NR Description: NAD-dependent isocitrate dehydrogenase beta
  misc_feature (1)..(367): Homolog of NCBI NO: 28974498 NR Description: NAD-dependent isocitrate dehydrogenase beta
  misc_feature (1)..(367): Homolog of NCBI NO: 21537157 NR Description: NAD+ dependent isocitrate dehydrogenase subunit 1
  misc_feature (1)..(367): Homolog of NCBI NO: 1766046 NR Description: NAD+ dependent isocitrate dehydrogenase subunit 1
  misc_feature (1)..(367): Homolog of NCBI NO: 3790188 NR Description: NAD-dependent isocitrate dehydrogenase [Nicotiana
MSRQSSSLLKNLRSIASRSKIQTRSVTYMPRPGDGKPRPVTLIPGDGVGPLVTNAVQQVMEAMHAPVYFEPFEVHGDMKSLPEGLLESIKKNKVCLKGGLKTPVGGGVSSLNVNLRKELDLFASLVNCFNLPGLASRHENVDIVVIRENTEGEYAGLEHEVVPGVVESLKVITKFCSERIAKYAFEYAYLNNRKKVTAVHKANIMKLADGLFLESCQEVAKKYPSIAYNEIIVDNCCMQLVARPEQFDVMVTPNLYGNLVANTAAGIAGGSGVMPGGNVGAEYAVFEQGASAGNVGKDTTEEQKNANPVALLLSSAMMLRHLQFPSFADRLETAVKRVIAEGNCRTEDLGGNSTTQEVVDAVIANLD

SEQ ID NO: 108573 - protein, 339 aa, Arabidopsis thaliana
  peptide (1)..(339): Ceres Seq. ID no. 13667850
  misc_feature (11)..(334): Pfam Name: Isocitrate/isopropylmalate dehydrogenase Pfam Description: Isocitrate/isopropylmalate dehydrogenase
  misc_feature (1)..(339): Homolog of NCBI NO: 1766048 NR Description: NAD+ dependent isocitrate dehydrogenase subunit 2
  misc_feature (1)..(339): Homolog of NCBI NO: 15227370 NR Description: isocitrate dehydrogenase [NAD+] subunit 2
  misc_feature (1)..(339): Homolog of NCBI NO: 30679881 NR Description: isocitrate dehydrogenase [NAD+] subunit 2
  misc_feature (1)..(339): Homolog of NCBI NO: 28974504 NR Description: NAD-dependent isocitrate dehydrogenase gamma
  misc_feature (1)..(339): Homolog of NCBI NO: 15236932 NR Description: isocitrate dehydrogenase [NAD+] subunit 1 thaliana] >gi|7431337|pir||T06131 isocitrate dehydrogenase (NAD)
  misc_feature (1)..(339): Homolog of NCBI NO: 28974502 NR Description: NAD-dependent isocitrate dehydrogenase beta
  misc_feature (1)..(339): Homolog of NCBI NO: 28974498 NR Description: NAD-dependent isocitrate dehydrogenase beta
  misc_feature (1)..(339): Homolog of NCBI NO: 21537157 NR Description: NAD+ dependent isocitrate dehydrogenase subunit 1
  misc_feature (1)..(339): Homolog of NCBI NO: 1766046 NR Description: NAD+ dependent isocitrate dehydrogenase subunit 1
  misc_feature (1)..(339): Homolog of NCBI NO: 3790188 NR Description: NAD-dependent isocitrate dehydrogenase [Nicotiana
MPRPGDGKPRPVTLIPGDGVGPLVTNAVQQVMEAMHAPVYFEPFEVHGDMKSLPEGLLESIKKNKVCLKGGLKTPVGGGVSSLNVNLRKELDLFASLVNCFNLPGLASRHENVDIVVIRENTEGEYAGLEHEVVPGVVESLKVITKFCSERIAKYAFEYAYLNNRKKVTAVHKANIMKLADGLFLESCQEVAKKYPSIAYNEIIVDNCCMQLVARPEQFDVMVTPNLYGNLVANTAAGIAGGSGVMPGGNVGAEYAVFEQGASAGNVGKDTTEEQKNANPVALLLSSAMMLRHLQFPSFADRLETAVKRVIAEGNCRTEDLGGNSTTQEVVDAVIANLD

SEQ ID NO: 108574 - protein, 308 aa, Arabidopsis thaliana
  peptide (1)..(308): Ceres Seq. ID no. 13667851
  misc_feature (1)..(303): Pfam Name: Isocitrate/isopropylmalate dehydrogenase Pfam Description: Isocitrate/isopropylmalate dehydrogenase
  misc_feature (1)..(308): Homolog of NCBI NO: 1766048 NR Description: NAD+ dependent isocitrate dehydrogenase subunit 2
  misc_feature (1)..(308): Homolog of NCBI NO: 15227370 NR Description: isocitrate dehydrogenase [NAD+] subunit 2
  misc_feature (1)..(308): Homolog of NCBI NO: 30679881 NR Description: isocitrate dehydrogenase [NAD+] subunit 2
  misc_feature (1)..(308): Homolog of NCBI NO: 28974504 NR Description: NAD-dependent isocitrate dehydrogenase gamma
  misc_feature (1)..(308): Homolog of NCBI NO: 15236932 NR Description: isocitrate dehydrogenase [NAD+] subunit 1 thaliana] >gi|7431337|pir||T06131 isocitrate dehydrogenase (NAD)
  misc_feature (1)..(308): Homolog of NCBI NO: 28974502 NR Description: NAD-dependent isocitrate dehydrogenase beta
  misc_feature (1)..(308): Homolog of NCBI NO: 28974498 NR Description: NAD-dependent isocitrate dehydrogenase beta
  misc_feature (1)..(308): Homolog of NCBI NO: 21537157 NR Description: NAD+ dependent isocitrate dehydrogenase subunit 1
  misc_feature (1)..(308): Homolog of NCBI NO: 1766046 NR Description: NAD+ dependent isocitrate dehydrogenase subunit 1
  misc_feature (1)..(308): Homolog of NCBI NO: 3790188 NR Description: NAD-dependent isocitrate dehydrogenase [Nicotiana
MEAMHAPVYFEPFEVHGDMKSLPEGLLESIKKNKVCLKGGLKTPVGGGVSSLNVNLRKELDLFASLVNCFNLPGLASRHENVDIVVIRENTEGEYAGLEHEVVPGVVESLKVITKFCSERIAKYAFEYAYLNNRKKVTAVHKANIMKLADGLFLESCQEVAKKYPSIAYNEIIVDNCCMQLVARPEQFDVMVTPNLYGNLVANTAAGIAGGSGVMPGGNVGAEYAVFEQGASAGNVGKDTTEEQKNANPVALLLSSAMMLRHLQFPSFADRLETAVKRVIAEGNCRTEDLGGNSTTQEVVDAVIANLD

SEQ ID NO: 108575 - DNA, 1379 bp, Arabidopsis thaliana
  misc_feature (1)..(1379): Ceres Seq. ID no. 13667852
  misc_feature: MA Experiment ID: 108463 Result: Down-regulated in Transcription
  misc_feature: MA Experiment 108463 PARAMETER Experiment Name: At_Germinating_Seeds_cDNA_P Parameter: Age (day) Value: 3 vs. 0
  misc_feature: MA Experiment 108463 PARAMETER Experiment Name: At_Germinating_Seeds_cDNA_P Parameter: Tissue Value: Germinating Seeds
  misc_feature: MA Experiment ID: 108464 Result: Down-regulated in Transcription
  misc_feature: MA Experiment 108464 PARAMETER Experiment Name: At_Germinating_Seeds_cDNA_P Parameter: Age (day) Value: 4 vs. 0
  misc_feature: MA Experiment 108464 PARAMETER Experiment Name: At_Germinating_Seeds_cDNA_P Parameter: Tissue Value: Germinating Seeds
  misc_feature: MA Experiment ID: 108595 Result: Down-regulated in Transcription
  misc_feature: MA Experiment 108595 PARAMETER Experiment Name: At_Ler-pi_Ovule_cDNA_P Parameter: Plant Line Value: null
  misc_feature: MA Experiment ID: 20000088 Result: Up-regulated in Transcription
  misc_feature: MA Experiment 20000088 PARAMETER Experiment Name: At_100uM_ABA_Mutants_cDNA_P Parameter: Plant Line Value: Landsberg
  misc_feature: MA Experiment 20000088 PARAMETER Experiment Name: At_100uM_ABA_Mutants_cDNA_P Parameter: Timepoint (hr) Value: 6
  misc_feature: MA Experiment 20000088 PARAMETER Experiment Name: At_100uM_ABA_Mutants_cDNA_P Parameter: Tissue Value: Aerial
  misc_feature: MA Experiment 20000088 PARAMETER Experiment Name: At_100uM_ABA_Mutants_cDNA_P Parameter: Treatment Value: 100uM ABA vs. No Treatment
  misc_feature: MA Experiment ID: 20000111 Result: Down-regulated in Transcription
  misc_feature: MA Experiment 20000111 PARAMETER Experiment Name: At_42deg_Heat_cDNA_P Parameter: Temperature (deg C) Value: 42 vs. 22
  misc_feature: MA Experiment 20000111 PARAMETER Experiment Name: At_42deg_Heat_cDNA_P Parameter: Timepoint (hr) Value: 6
  misc_feature: MA Experiment 20000111 PARAMETER Experiment Name: At_42deg_Heat_cDNA_P Parameter: Tissue Value: Aerial
  misc_feature: MA Experiment ID: 20000113 Result: Down-regulated in Transcription
  misc_feature: MA Experiment 20000113 PARAMETER Experiment Name: At_42deg_Heat_cDNA_P Parameter: Temperature (deg C) Value: 42 vs. 22
  misc_feature: MA Experiment 20000113 PARAMETER Experiment Name: At_42deg_Heat_cDNA_P Parameter: Timepoint (hr) Value: 8
  misc_feature: MA Experiment 20000113 PARAMETER Experiment Name: At_42deg_Heat_cDNA_P Parameter: Tissue Value: Aerial
  misc_feature: MA Experiment ID: 20000117 Result: Up-regulated in Transcription
  misc_feature: MA Experiment 20000117 PARAMETER Experiment Name: At_100uM_ABA_Mutants_cDNA_P Parameter: Plant Line Value: Columbia
  misc_feature: MA Experiment 20000117 PARAMETER Experiment Name: At_100uM_ABA_Mutants_cDNA_P Parameter: Timepoint (hr) Value: 6
  misc_feature: MA Experiment 20000117 PARAMETER Experiment Name: At_100uM_ABA_Mutants_cDNA_P Parameter: Tissue Value: Aerial
  misc_feature: MA Experiment 20000117 PARAMETER Experiment Name: At_100uM_ABA_Mutants_cDNA_P Parameter: Treatment Value: 100uM ABA vs. No Treatment
ccacgcgtcgtcttcttcttctctttcgatcaaatcttttcagattcaacccaaaattgaagacaaaaatgtctcgcagatcgctaactctcctcaagaatctagctagaaacgcgaatggatcaggtattcaaacccgatccgtgacttacatgcccagacccggtgacggagcaccacgcgcagtgacgctgatccccggagatggaatcggtcctctggtgacgaacgccgtggaacaggtgatggaagcgatgcacgctccgatcttcttcgagaagtacgatgttcacggagaaatgagccgtgtgccgccggaagtgatggagtcgataaggaagaataaggtttgtttgaaaggtgggcttaagactcctgttggtggtggtgttagttctcttaacgtccagcttaggaaagagcttgacctctttgcttctctggtcaactgttttaatttgcctggtttacctactcgccatgagaatgttgacatcgttgtcatcagagagaacactgaaggtgagtacgcggggcttgagcacgaggttgttcctggtgtcgttgagagtctgaaggtgatcacgaagttctgttcggagcgtattgcaaagtatgcttttgagtatgcctacctgaacaacaggaagaaagttacagcggtgcataaggctaacatcatgaaacttgcggatggtttgttcttggaatcttgtcgcgaggttgcgaaaaagtatcccagcatcacctacaatgaaatcattgttgataactgctgtatgcaacttgtagccaaaccagagcaattcgatgtcatggtaacgccgaatctctatgggaatttagttgcaaacactgctgctggtattgctggaggcacaggagtcatgcctggaggaaatgttggggctgaccatgcggtattcgagcaaggtgcatcagcaggaaatgttgggaaagacaagatagtattggaaaacaaagcaaacccagtggcattgcttctctcatcagcgatgatgcttagacaccttcagtttccttcatttgctgaccggcccgaaacagcagtgaagaaagtcaccgctgaaggaaagtgccggacgaaagatcttggtggaacaagcacgacccaagaggtcgttgatgcgggcattgcaaaactagactgactttgacaaattacgtggtcccgccctgcataaatcatcaaaaccctgatacagattttgtgttgccaaaatatggggtatgatccaagcacaacggttatctggttttgtacctcgagttttattatattctttagccgtggaatatttcgataagaaaaaaaaacatgttccaaataattcatgttgctacgtttgttggcgcct

SEQ ID NO: 108576 - protein, 389 aa, Arabidopsis thaliana
  peptide (1)..(389): Ceres Seq. ID no. 13667853
  misc_feature (61)..(384): Pfam Name: Isocitrate/isopropylmalate dehydrogenase Pfam Description: Isocitrate/isopropylmalate dehydrogenase
  misc_feature (23)..(389): Homolog of NCBI NO: 1766046 NR Description: NAD+ dependent isocitrate dehydrogenase subunit 1
  misc_feature (23)..(389): Homolog of NCBI NO: 15236932 NR Description: isocitrate dehydrogenase [NAD+] subunit 1 thaliana] >gi|7431337|pir||T06131 isocitrate dehydrogenase (NAD)
  misc_feature (23)..(389): Homolog of NCBI NO: 21537157 NR Description: NAD+ dependent isocitrate dehydrogenase subunit 1
  misc_feature (23)..(389): Homolog of NCBI NO: 28974502 NR Description: NAD-dependent isocitrate dehydrogenase beta
  misc_feature (23)..(389): Homolog of NCBI NO: 28974498 NR Description: NAD-dependent isocitrate dehydrogenase beta
  misc_feature (23)..(389): Homolog of NCBI NO: 28974504 NR Description: NAD-dependent isocitrate dehydrogenase gamma
  misc_feature (23)..(389): Homolog of NCBI NO: 15227370 NR Description: isocitrate dehydrogenase [NAD+] subunit 2
  misc_feature (23)..(389): Homolog of NCBI NO: 1766048 NR Description: NAD+ dependent isocitrate dehydrogenase subunit 2
  misc_feature (23)..(389): Homolog of NCBI NO: 30679881 NR Description: isocitrate dehydrogenase [NAD+] subunit 2
  misc_feature (23)..(389): Homolog of NCBI NO: 3790188 NR Description: NAD-dependent isocitrate dehydrogenase [Nicotiana
TRRLLLLFRSNLFRFNPKLKTKMSRRSLTLLKNLARNANGSGIQTRSVTYMPRPGDGAPRAVTLIPGDGIGPLVTNAVEQVMEAMHAPIFFEKYDVHGEMSRVPPEVMESIRKNKVCLKGGLKTPVGGGVSSLNVQLRKELDLFASLVNCFNLPGLPTRHENVDIVVIRENTEGEYAGLEHEVVPGVVESLKVITKFCSERIAKYAFEYAYLNNRKKVTAVHKANIMKLADGLFLESCREVAKKYPSITYNEIIVDNCCMQLVAKPEQFDVMVTPNLYGNLVANTAAGIAGGTGVMPGGNVGADHAVFEQGASAGNVGKDKIVLENKANPVALLLSSAMMLRHLQFPSFADRPETAVKKVTAEGKCRTKDLGGTSTTQEVVDAGIAKLD

SEQ ID NO: 108577 - protein, 367 aa, Arabidopsis thaliana
  peptide (1)..(367): Ceres Seq. ID no. 13667854
  misc_feature (39)..(362): Pfam Name: Isocitrate/isopropylmalate dehydrogenase Pfam Description: Isocitrate/isopropylmalate dehydrogenase
  misc_feature (1)..(367): Homolog of NCBI NO: 1766046 NR Description: NAD+ dependent isocitrate dehydrogenase subunit 1
  misc_feature (1)..(367): Homolog of NCBI NO: 15236932 NR Description: isocitrate dehydrogenase [NAD+] subunit 1 thaliana] >gi|7431337|pir||T06131 isocitrate dehydrogenase (NAD)
  misc_feature (1)..(367): Homolog of NCBI NO: 21537157 NR Description: NAD+ dependent isocitrate dehydrogenase subunit 1
  misc_feature (1)..(367): Homolog of NCBI NO: 28974502 NR Description: NAD-dependent isocitrate dehydrogenase beta
  misc_feature (1)..(367): Homolog of NCBI NO: 28974498 NR Description: NAD-dependent isocitrate dehydrogenase beta
  misc_feature (1)..(367): Homolog of NCBI NO: 28974504 NR Description: NAD-dependent isocitrate dehydrogenase gamma
  misc_feature (1)..(367): Homolog of NCBI NO: 15227370 NR Description: isocitrate dehydrogenase [NAD+] subunit 2
  misc_feature (1)..(367): Homolog of NCBI NO: 1766048 NR Description: NAD+ dependent isocitrate dehydrogenase subunit 2
  misc_feature (1)..(367): Homolog of NCBI NO: 30679881 NR Description: isocitrate dehydrogenase [NAD+] subunit 2
  misc_feature (1)..(367): Homolog of NCBI NO: 3790188 NR Description: NAD-dependent isocitrate dehydrogenase [Nicotiana
MSRRSLTLLKNLARNANGSGIQTRSVTYMPRPGDGAPRAVTLIPGDGIGPLVTNAVEQVMEAMHAPIFFEKYDVHGEMSRVPPEVMESIRKNKVCLKGGLKTPVGGGVSSLNVQLRKELDLFASLVNCFNLPGLPTRHENVDIVVIRENTEGEYAGLEHEVVPGVVESLKVITKFCSERIAKYAFEYAYLNNRKKVTAVHKANIMKLADGLFLESCREVAKKYPSITYNEIIVDNCCMQLVAKPEQFDVMVTPNLYGNLVANTAAGIAGGTGVMPGGNVGADHAVFEQGASAGNVGKDKIVLENKANPVALLLSSAMMLRHLQFPSFADRPETAVKKVTAEGKCRTKDLGGTSTTQEVVDAGIAKLD

SEQ ID NO: 108578 - protein, 339 aa, Arabidopsis thaliana
  peptide (1)..(339): Ceres Seq. ID no. 13667855
  misc_feature (11)..(334): Pfam Name: Isocitrate/isopropylmalate dehydrogenase Pfam Description: Isocitrate/isopropylmalate dehydrogenase
  misc_feature (1)..(339): Homolog of NCBI NO: 1766046 NR Description: NAD+ dependent isocitrate dehydrogenase subunit 1
  misc_feature (1)..(339): Homolog of NCBI NO: 15236932 NR Description: isocitrate dehydrogenase [NAD+] subunit 1 thaliana] >gi|7431337|pir||T06131 isocitrate dehydrogenase (NAD)
  misc_feature (1)..(339): Homolog of NCBI NO: 21537157 NR Description: NAD+ dependent isocitrate dehydrogenase subunit 1
  misc_feature (1)..(339): Homolog of NCBI NO: 28974502 NR Description: NAD-dependent isocitrate dehydrogenase beta
  misc_feature (1)..(339): Homolog of NCBI NO: 28974498 NR Description: NAD-dependent isocitrate dehydrogenase beta
  misc_feature (1)..(339): Homolog of NCBI NO: 28974504 NR Description: NAD-dependent isocitrate dehydrogenase gamma
  misc_feature (1)..(339): Homolog of NCBI NO: 15227370 NR Description: isocitrate dehydrogenase [NAD+] subunit 2
  misc_feature (1)..(339): Homolog of NCBI NO: 1766048 NR Description: NAD+ dependent isocitrate dehydrogenase subunit 2
  misc_feature (1)..(339): Homolog of NCBI NO: 30679881 NR Description: isocitrate dehydrogenase [NAD+] subunit 2
  misc_feature (1)..(339): Homolog of NCBI NO: 3790188 NR Description: NAD-dependent isocitrate dehydrogenase [Nicotiana
MPRPGDGAPRAVTLIPGDGIGPLVTNAVEQVMEAMHAPIFFEKYDVHGEMSRVPPEVMESIRKNKVCLKGGLKTPVGGGVSSLNVQLRKELDLFASLVNCFNLPGLPTRHENVDIVVIRENTEGEYAGLEHEVVPGVVESLKVITKFCSERIAKYAFEYAYLNNRKKVTAVHKANIMKLADGLFLESCREVAKKYPSITYNEIIVDNCCMQLVAKPEQFDVMVTPNLYGNLVANTAAGIAGGTGVMPGGNVGADHAVFEQGASAGNVGKDKIVLENKANPVALLLSSAMMLRHLQFPSFADRPETAVKKVTAEGKCRTKDLGGTSTTQEVVDAGIAKLD

SEQ ID NO: 108579 - DNA, 949 bp, Arabidopsis thaliana
  misc_feature (1)..(949): Ceres Seq. ID no. 13667856
  misc_feature: MA Experiment ID: 20000179 Result: Up-regulated in Transcription
  misc_feature: MA Experiment 20000179 PARAMETER Experiment Name: At_Germinating_Seeds_P Parameter: Age (hr) Value: 6 vs. 0
  misc_feature: MA Experiment 20000179 PARAMETER Experiment Name: At_Germinating_Seeds_P Parameter: Tissue Value: Germinating Seeds
ccgggcaggtctctctccaatctctctgcgccacagaattgtgcgatttacgaaaatctctgaaacctccgatcgttaacggcgaccgccgattttcccggtaaaaatgaacgacggagatgtatcgaggcagatccagcagatggtgagatttatccgccaagaagcggaagagaaagcaaacgagatctcggttcctgctgaagaagaattcaacattgagaaactccagcttgttgaggcggagaagaagaagatcaggcaagattatgagaagaaggagaagcaagctgatgttcgcaagaagattgattactctatgcagctaaatgcatcaaggatcaaagttcttcaagcgcaagacgatattgtcaatgccatgaaagaccaagcagctaaggatcttctgaacgttagtcgcgatgagtatgcctacaaacagctcctcaaggatctaattgttcagtgtttgcttcggttgaaagaaccttctgtgttgttgcgttgtcgtgaagaggacttgggtttagtggaagctgtacttgatgacgcaaaggaggaatatgctggtaaagcaaaggttcatgccccagaggttgctgttgacacaaaaatattccttccccctcctcctaaatctaatgatcctcatggtctccactgctctggaggtgttgtgttagcttctcgtgatgggaaaatcgtgtgcgagaacacacttgatgcgcgtcttgatgtggcattccgtatgaaactcccagtgatccgtaagtcgttgttcggccaagttactgcctgatgaaagaaaggaaaagagaaaagagattattcaaaccggtttgcgtttggttatttacctattttgggagagatttctctttgttgtgattctttgtattttgcaaaatcttactttggtgccaaacccatcgaacgcttctttttttcg

SEQ ID NO: 108580 - protein, 230 aa, Arabidopsis thaliana
  peptide (1)..(230): Ceres Seq. ID no. 13667857
  misc_feature (16)..(225): Pfam Name: ATP synthase (E/31 kDa) subunit Pfam Description: ATP synthase (E/31 kDa) subunit
  misc_feature (1)..(230): Homolog of NCBI NO: 1143394 NR Description: V-type proton-ATPase [Arabidopsis thaliana]
  misc_feature (1)..(230): Homolog of NCBI NO: 15237054 NR Description: H+-transporting ATPase chain E, vacuolar
  misc_feature (1)..(230): Homolog of NCBI NO: 20340245 NR Description: vacuolar ATPase subunit E-like protein
  misc_feature (1)..(230): Homolog of NCBI NO: 15222641 NR Description: H+-transporting ATPase protein -related
  misc_feature (1)..(218): Homolog of NCBI NO: 25528534 NR Description: protein F22C12.4 [imported] - Arabidopsis >gi|6692094|gb|AAF24559.1|AC007764_1 F22C12.4 [Arabidopsis
  misc_feature (1)..(230): Homolog of NCBI NO: 12585492 NR Description: Vacuolar ATP synthase subunit E (V-ATPase E
  misc_feature (1)..(230): Homolog of NCBI NO: 34912000 NR Description: putative YLP [Oryza sativa (japonica
  misc_feature (1)..(230): Homolog of NCBI NO: 3334405 NR Description: Vacuolar ATP synthase subunit E (V-ATPase E
  misc_feature (1)..(230): Homolog of NCBI NO: 12585474 NR Description: Vacuolar ATP synthase subunit E (V-ATPase E
  misc_feature (7)..(230): Homolog of NCBI NO: 29290712 NR Description: vacuolar ATPase subunit E [Phaseolus acutifolius]
MNDGDVSRQIQQMVRFIRQEAEEKANEISVPAEEEFNIEKLQLVEAEKKKIRQDYEKKEKQADVRKKIDYSMQLNASRIKVLQAQDDIVNAMKDQAAKDLLNVSRDEYAYKQLLKDLIVQCLLRLKEPSVLLRCREEDLGLVEAVLDDAKEEYAGKAKVHAPEVAVDTKIFLPPPPKSNDPHGLHCSGGVVLASRDGKIVCENTLDARLDVAFRMKLPVIRKSLFGQVTA

SEQ ID NO: 108581 - protein, 218 aa, Arabidopsis thaliana
  peptide (1)..(218): Ceres Seq. ID no. 13667858
  misc_feature (4)..(213): Pfam Name: ATP synthase (E/31 kDa) subunit Pfam Description: ATP synthase (E/31 kDa) subunit
  misc_feature (1)..(218): Homolog of NCBI NO: 1143394 NR Description: V-type proton-ATPase [Arabidopsis thaliana]
  misc_feature (1)..(218): Homolog of NCBI NO: 15237054 NR Description: H+-transporting ATPase chain E, vacuolar
  misc_feature (1)..(218): Homolog of NCBI NO: 20340245 NR Description: vacuolar ATPase subunit E-like protein
  misc_feature (1)..(218): Homolog of NCBI NO: 15222641 NR Description: H+-transporting ATPase protein -related
  misc_feature (1)..(206): Homolog of NCBI NO: 25528534 NR Description: protein F22C12.4 [imported] - Arabidopsis >gi|6692094|gb|AAF24559.1|AC007764_1 F22C12.4 [Arabidopsis
  misc_feature (1)..(218): Homolog of NCBI NO: 12585492 NR Description: Vacuolar ATP synthase subunit E (V-ATPase E
  misc_feature (1)..(218): Homolog of NCBI NO: 34912000 NR Description: putative YLP [Oryza sativa (japonica
  misc_feature (1)..(218): Homolog of NCBI NO: 3334405 NR Description: Vacuolar ATP synthase subunit E (V-ATPase E
  misc_feature (1)..(218): Homolog of NCBI NO: 12585474 NR Description: Vacuolar ATP synthase subunit E (V-ATPase E
  misc_feature (1)..(218): Homolog of NCBI NO: 29290712 NR Description: vacuolar ATPase subunit E [Phaseolus acutifolius]
MVRFIRQEAEEKANEISVPAEEEFNIEKLQLVEAEKKKIRQDYEKKEKQADVRKKIDYSMQLNASRIKVLQAQDDIVNAMKDQAAKDLLNVSRDEYAYKQLLKDLIVQCLLRLKEPSVLLRCREEDLGLVEAVLDDAKEEYAGKAKVHAPEVAVDTKIFLPPPPKSNDPHGLHCSGGVVLASRDGKIVCENTLDARLDVAFRMKLPVIRKSLFGQVTA

SEQ ID NO: 108582 - protein, 159 aa, Arabidopsis thaliana; identical to SEQ ID NO: 47292
  peptide (1)..(159): Ceres Seq. ID no. 13667859
  misc_feature (1)..(154): Pfam Name: ATP synthase (E/31 kDa) subunit Pfam Description: ATP synthase (E/31 kDa) subunit
  misc_feature (1)..(159): Homolog of NCBI NO: 1143394 NR Description: V-type proton-ATPase [Arabidopsis thaliana]
  misc_feature (1)..(159): Homolog of NCBI NO: 15237054 NR Description: H+-transporting ATPase chain E, vacuolar
  misc_feature (1)..(159): Homolog of NCBI NO: 20340245 NR Description: vacuolar ATPase subunit E-like protein
  misc_feature (1)..(159): Homolog of NCBI NO: 15222641 NR Description: H+-transporting ATPase protein -related
  misc_feature (1)..(147): Homolog of NCBI NO: 25528534 NR Description: protein F22C12.4 [imported] - Arabidopsis >gi|6692094|gb|AAF24559.1|AC007764_1 F22C12.4 [Arabidopsis
  misc_feature (1)..(159): Homolog of NCBI NO: 12585492 NR Description: Vacuolar ATP synthase subunit E (V-ATPase E
  misc_feature (1)..(159): Homolog of NCBI NO: 34912000 NR Description: putative YLP [Oryza sativa (japonica
  misc_feature (1)..(159): Homolog of NCBI NO: 3334405 NR Description: Vacuolar ATP synthase subunit E (V-ATPase E
  misc_feature (1)..(159): Homolog of NCBI NO: 12585474 NR Description: Vacuolar ATP synthase subunit E (V-ATPase E
  misc_feature (1)..(159): Homolog of NCBI NO: 29290712 NR Description: vacuolar ATPase subunit E [Phaseolus acutifolius]

SEQ ID NO: 108583 - DNA, 1179 bp, Arabidopsis thaliana
  misc_feature (1)..(1179): Ceres Seq. ID no. 13667860
  misc_feature: MA Experiment ID: 20000111 Result: Down-regulated in Transcription
  misc_feature: MA Experiment 20000111 PARAMETER Experiment Name: At_42deg_Heat_cDNA_P Parameter: Temperature (deg C) Value: 42 vs. 22
  misc_feature: MA Experiment 20000111 PARAMETER Experiment Name: At_42deg_Heat_cDNA_P Parameter: Timepoint (hr) Value: 6
  misc_feature: MA Experiment 20000111 PARAMETER Experiment Name: At_42deg_Heat_cDNA_P Parameter: Tissue Value: Aerial
  misc_feature: MA Experiment ID: 20000113 Result: Down-regulated in Transcription
  misc_feature: MA Experiment 20000113 PARAMETER Experiment Name: At_42deg_Heat_cDNA_P Parameter: Temperature (deg C) Value: 42 vs. 22
  misc_feature: MA Experiment 20000113 PARAMETER Experiment Name: At_42deg_Heat_cDNA_P Parameter: Timepoint (hr) Value: 8
  misc_feature: MA Experiment 20000113 PARAMETER Experiment Name: At_42deg_Heat_cDNA_P Parameter: Tissue Value: Aerial
  misc_feature: MA Experiment ID: 20000224 Result: Down-regulated in Transcription
  misc_feature: MA Experiment ID: 20000264 Result: Down-regulated in Transcription
  misc_feature: MA Experiment 20000264 PARAMETER Experiment Name: At_Open_Flower_P Parameter: Age (day) Value: 21
  misc_feature: MA Experiment 20000264 PARAMETER Experiment Name: At_Open_Flower_P Parameter: Plant Line Value: WS
  misc_feature: MA Experiment 20000264 PARAMETER Experiment Name: At_Open_Flower_P Parameter: Tissue Value: Open Flower vs. Whole Plant
aattcggcacgaggaaaaattccattttcctccattgattgtgagtgagaacaaacatttaaagcttcttactcaaagtttctttctttatagatctcaaaaaattcgatatttttctcgattcatccgccattaaggttttattgcgagatcgaagagagaaggagaaaatgacgcatagagtagatcaggaatatgattatttgtttaagattgtgttgattggtgattctggtgttgggaaatcgaatatcttgtcgagattcaccaggaatgagttttgcttggaatctaaatccactattggtgttgaattcgccaccagaactactcaggttgaaggaaagaccattaaggcccagatctgggacactgcaggtcaggagaggtacagggcgatcacaagcgcgtattacagaggcgcagtgggtgcacttcttgtctacgacattactaagagacagacctttgacaatgttttaaggtggctgcgcgaactgagagaccatgcagattccaacattgtgatcatgatggctgggaacaaatccgatctgaaccacttgagatccgttgctgaggaagatggtcaaagtttggctgagaaggaaggtctctctttcctggagacatctgctcttgaagcaacaaacgtcgagaaagcgtttcagaccatcttaggtgagatctaccatatcataagcaaaaaggcactggctgcacaagaagcagcagcagctaattctgcaatccctgggcaaggaactacgattaacgtcgatgacacatctggaggcgcgaaacgagcatgttgctcttcttaaactaaaggtaaactgtttatttcggttgctccttgttcagagattcaaacttttgttttcactggcttctcttcttttcaagttttggctgatgaaacgtaactatgcaagactatgtagaatactctgtttttattctcttcggtttggggtttgtgttcagtttaaagcttgttagtagtatacttagaatcttctggtgcttgcttgctttcccttcttcttcccttggtgtgtttctattgatttctggtttataaagtattttttctatctccggtttagtccggttcgtcttggctttgtttaatcaaatcattgattcctctcttatcaatgtattgtatccggttcc

SEQ ID NO: 108584 - protein, 217 aa, Arabidopsis thaliana; identical to SEQ ID NO: 23142
  peptide (1)..(217): Ceres Seq. ID no. 13667861
  misc_feature (14)..(175): Pfam Name: Ras family Pfam Description: Ras family
  misc_feature (1)..(217): Homolog of NCBI NO: 15232652 NR Description: GTP-binding protein, putative [Arabidopsis
  misc_feature (1)..(217): Homolog of NCBI NO: 15237828 NR Description: GTP binding protein, putative [Arabidopsis
  misc_feature (1)..(217): Homolog of NCBI NO: 3024501 NR Description: RAS-RELATED PROTEIN RAB11C
  misc_feature (1)..(217): Homolog of NCBI NO: 15222396 NR Description: GTP-binding protein, putative [Arabidopsis
  misc_feature (1)..(217): Homolog of NCBI NO: 3024528 NR Description: RAS-RELATED PROTEIN RAB2BV
  misc_feature (58)..(217): Homolog of NCBI NO: 25294121 NR Description: protein F22G5.24 [imported] - Arabidopsis >gi|8778562|gb|AAF79570.1|AC022464_28 F22G5.24 [Arabidopsis
  misc_feature (1)..(56): Homolog of NCBI NO: 25294121 NR Description: protein F22G5.24 [imported] - Arabidopsis >gi|8778562|gb|AAF79570.1|AC022464_28 F22G5.24 [Arabidopsis
  misc_feature (1)..(217): Homolog of NCBI NO: 34897394 NR Description: Ras-related GTP-binding protein [Oryza sativa
  misc_feature (1)..(217): Homolog of NCBI NO: 3024506 NR Description: RAS-RELATED PROTEIN RAB11A
  misc_feature (1)..(217): Homolog of NCBI NO: 34908298 NR Description: Ras-related GTP-binding protein [Oryza sativa

SEQ ID NO: 108585 - DNA, 2178 bp, Arabidopsis thaliana
  misc_feature (1)..(2178): Ceres Seq. ID no. 13667862
  misc_feature: MA Experiment ID: 20000171 Result: Down-regulated in Transcription
  misc_feature: MA Experiment 20000171 PARAMETER Experiment Name: At_42deg_Heat_P Parameter: Age (day) Value: 14
  misc_feature: MA Experiment 20000171 PARAMETER Experiment Name: At_42deg_Heat_P Parameter: Organism Value: A. thaliana
  misc_feature: MA Experiment 20000171 PARAMETER Experiment Name: At_42deg_Heat_P Parameter: Plant Line Value: WS
  misc_feature: MA Experiment 20000171 PARAMETER Experiment Name: At_42deg_Heat_P Parameter: Temperature (deg C) Value: 42 vs. 22
  misc_feature: MA Experiment 20000171 PARAMETER Experiment Name: At_42deg_Heat_P Parameter: Timepoint (hr) Value: 1
  misc_feature: MA Experiment 20000171 PARAMETER Experiment Name: At_42deg_Heat_P Parameter: Tissue Value: Aerial
  misc_feature: MA Experiment ID: 20000184 Result: Up-regulated in Transcription
  misc_feature: MA Experiment 20000184 PARAMETER Experiment Name: At_Shoots__P Parameter: Age (day) Value: 7
  misc_feature: MA Experiment 20000184 PARAMETER Experiment Name: At_Shoots__P Parameter: Tissue Value: Shoots vs. Whole Plant
  misc_feature: MA Experiment ID: 20000185 Result: Down-regulated in Transcription
  misc_feature: MA Experiment 20000185 PARAMETER Experiment Name: At_Roots__P Parameter: Age (day) Value: 7 vs. 21
  misc_feature: MA Experiment 20000185 PARAMETER Experiment Name: At_Roots__P Parameter: Organism Value: A. thaliana
  misc_feature: MA Experiment 20000185 PARAMETER Experiment Name: At_Roots__P Parameter: Tissue Value: Roots vs. Whole Plant
  misc_feature: MA Experiment ID: 20000437 Result: Down-regulated in Transcription
  misc_feature: MA Experiment 20000437 PARAMETER Experiment Name: At_Drought_P Parameter: Age (day) Value: 8
  misc_feature: MA Experiment 20000437 PARAMETER Experiment Name: At_Drought_P Parameter: Organism Value: A. thaliana
  misc_feature: MA Experiment 20000437 PARAMETER Experiment Name: At_Drought_P Parameter: Plant Line Value: WS
  misc_feature: MA Experiment 20000437 PARAMETER Experiment Name: At_Drought_P Parameter: Timepoint (hr) Value: 24
  misc_feature: MA Experiment 20000437 PARAMETER Experiment Name: At_Drought_P Parameter: Tissue Value: Whole Plant
  misc_feature: MA Experiment 20000437 PARAMETER Experiment Name: At_Drought_P Parameter: Treatment Value: Drought vs. No Drought
  misc_feature: MA Experiment ID: 20001905 Result: Down-regulated in Transcription
  misc_feature: MA Experiment 20001905 PARAMETER Experiment Name: At_Drought_Reproduction_P Parameter: Age (day) Value: 40
  misc_feature: MA Experiment 20001905 PARAMETER Experiment Name: At_Drought_Reproduction_P Parameter: Organism Value: A. thaliana
  misc_feature: MA Experiment 20001905 PARAMETER Experiment Name: At_Drought_Reproduction_P Parameter: Plant Line Value: WS
  misc_feature: MA Experiment 20001905 PARAMETER Experiment Name: At_Drought_Reproduction_P Parameter: Timepoint (day) Value: 10
  misc_feature: MA Experiment 20001905 PARAMETER Experiment Name: At_Drought_Reproduction_P Parameter: Tissue Value: Rosettes
  misc_feature: MA Experiment 20001905 PARAMETER Experiment Name: At_Drought_Reproduction_P Parameter: Treatment Value: Drought vs. No Drought
gcacgagaagattcttcacctagagaagtcacatgttccttcttcttcttccttcatcatccccaaacacacacaaactaaaaaaaaggcaaaaccttagatccaagatcagacctaatctaatcgaaactcatagctgaaaaatgaagagagatcatcatcaattccaaggtcgattgtccaaccacgggacttcttcttcttcatcatcaatttctaaagataagatgatgatggtaaaaaaagaagaagacggtggaggtaacatggacgatgagcttctcgctgttttaggttacaaagttaggtcatcggagatggcggaggttgctttgaaactcgaacaattagagacgatgatgagtaatgttcaagaagatggtttatctcatctcgcggcggatactgttcattataatccgtcggagctttattcttggcttgataatatgctctctgagcttaatcctcctcctcttccggcgagttctaacggtttagatccggttcttccttcgccggagatttgtggttttccggcttcggattatgaccttgaagtcattcccggaaacgcgatttatcagtttccggcgattgattcttcgtcttcgtcgaataatcagaacaagcgtttgaaatcatgctcgagtcctgattcaatggttacatcgacctcgacgggtacgcagattggtggagtcataggaacgacggtgacgacaaccacgacgacaacgacggcggcggctgagtcaactcggtctgttatcctggttgactcgcaagagaacggtgttcgtttagtacacgcgcttatggcttgtgcagaagcaatccagcagaataatttgactctagcggaagctcttgtgaagcaaatcggatgcttagctgtgtctcaagccggagctatgagaaaagtggctacttacttcgccgaagctttagcgcggcggatctaccgtctctctccgccgcagaatcagatcgatcattgtctctccgatactcttcagatgcacttttacgagacttgtccttatcttaaattcgctcacttcacggcgaaccaagcgattctcgaagcttttgaaggtaagaagagagtacacgtcattgatttctcgatgaaccaaggtcttcaatggcctgcgcttatgcaagctcttgcgcttcgagaaggaggtcctccaactttccggttaaccggaattggtccaccggcgccggataattctgatcatcttcatgaagttggttgtaaattagctcagcttgcggaggcggttcacgtagaattcgaataccgtggattcgttgctaacagcttagccgatctcgatgcttcgatgcttgagcttagaccgagcgatacggaagctgttgcggtgaactctgtttttgagctacataagctcttaggtcgtcccggtgggatagagaaagttctcggcgttgtgaaacagattaaaccggtgattttcacggtggttgagcaagaatcgaaccataacggaccggttttcttagaccggtttactgaatcgttacattattattcgactctgtttgattcgttggaaggagttccgaatagtcaagacaaagtcatgtctgaagtttacttagggaaacagatttgtaatctggtggcttgtgaaggtcctgacagagtcgagagacacgaaacgttgagtcaatggggaaaccggtttggttcgtccggtttagcgccggcacatcttgggtctaacgcgtttaagcaagcgagtatgcttttgtctgtgtttaatagtggccaaggttatcgtgtggaggagagtaatggatgtttgatgttgggttggcacactcgtccactcattaccacctccgcttggaaactctcgacggcggcgtactgagtttgactcgaagcatacgacggtggtggagtcgagtcgagtgaatttgagattgagatcagtggaccggtgatgacatatgttcggaccaagacctaaaccgaactgaatcgaaccgttttgccttttgtttattttatttattttcgttcacttgtttaaaattcttatatatatcgttttggtaggtcatttttaatttatgcctttttgggatcaatttttaataggctgagtttgtatttattaataaattatctttatgaatttt

SEQ ID NO: 108586 - protein, 587 aa, Arabidopsis thaliana
  peptide (1)..(587): Ceres Seq. ID no. 13667863
  misc_feature (195)..(490): Pfam Name: GRAS family transcription factor Pfam Description: GRAS family transcription factor
  misc_feature (1)..(587): Homolog of NCBI NO: 2569940 NR Description: GRS protein [Arabidopsis thaliana]
  misc_feature (1)..(587): Homolog of NCBI NO: 15226311 NR Description: gibberellin response modulator (RGA1)
  misc_feature (1)..(587): Homolog of NCBI NO: 2339978 NR Description: RGA1 protein [Arabidopsis thaliana]
  misc_feature (1)..(587): Homolog of NCBI NO: 15529230 NR Description: At2g01570/F2I9.19 [Arabidopsis thaliana]
  misc_feature (134)..(584): Homolog of NCBI NO: 15223951 NR Description: gibberellin response modulator (GAI/RGA2)
  misc_feature (1)..(110): Homolog of NCBI NO: 15223951 NR Description: gibberellin response modulator (GAI/RGA2)
  misc_feature (134)..(584): Homolog of NCBI NO: 2569938 NR Description: GAI [Arabidopsis thaliana]
  misc_feature (26)..(110): Homolog of NCBI NO: 2569938 NR Description: GAI [Arabidopsis thaliana]
  misc_feature (1)..(583): Homolog of NCBI NO: 20334379 NR Description: GAI-like protein 1 [Vitis vinifera]
  misc_feature (134)..(584): Homolog of NCBI NO: 2339980 NR Description: RGA2 protein [Arabidopsis thaliana]
MKRDHHQFQGRLSNHGTSSSSSSISKDKMMMVKKEEDGGGNMDDELLAVLGYKVRSSEMAEVALKLEQLETMMSNVQEDGLSHLAADTVHYNPSELYSWLDNMLSELNPPPLPASSNGLDPVLPSPEICGFPASDYDLEVIPGNAIYQFPAIDSSSSSNNQNKRLKSCSSPDSMVTSTSTGTQIGGVIGTTVTTTTTTTTAAAESTRSVILVDSQENGVRLVHALMACAEAIQQNNLTLAEALVKQIGCLAVSQAGAMRKVATYFAEALARRIYRLSPPQNQIDHCLSDTLQMHFYETCPYLKFAHFTANQAILEAFEGKKRVHVIDFSMNQGLQWPALMQALALREGGPPTFRLTGIGPPAPDNSDHLHEVGCKLAQLAEAVHVEFEYRGFVANSLADLDASMLELRPSDTEAVAVNSVFELHKLLGRPGGIEKVLGVVKQIKPVIFTVVEQESNHNGPVFLDRFTESLHYYSTLFDSLEGVPNSQDKVMSEVYLGKQICNLVACEGPDRVERHETLSQWGNRFGSSGLAPAHLGSNAFKQASMLLSVFNSGQGYRVEESNGCLMLGWHTRPLITTSAWKLSTAAY

SEQ ID NO: 108587 - protein, 559 aa, Arabidopsis thaliana
  peptide (1)..(559): Ceres Seq. ID no. 13667864
  misc_feature (167)..(462): Pfam Name: GRAS family transcription factor Pfam Description: GRAS family transcription factor
  misc_feature (1)..(559): Homolog of NCBI NO: 2569940 NR Description: GRS protein [Arabidopsis thaliana]
  misc_feature (1)..(559): Homolog of NCBI NO: 15226311 NR Description: gibberellin response modulator (RGA1)
  misc_feature (1)..(559): Homolog of NCBI NO: 2339978 NR Description: RGA1 protein [Arabidopsis thaliana]
  misc_feature (1)..(559): Homolog of NCBI NO: 15529230 NR Description: At2g01570/F2I9.19 [Arabidopsis thaliana]
  misc_feature (106)..(556): Homolog of NCBI NO: 15223951 NR Description: gibberellin response modulator (GAI/RGA2)
  misc_feature (1)..(82): Homolog of NCBI NO: 15223951 NR Description: gibberellin response modulator (GAI/RGA2)
  misc_feature (106)..(556): Homolog of NCBI NO: 2569938 NR Description: GAI [Arabidopsis thaliana]
  misc_feature (1)..(82): Homolog of NCBI NO: 2569938 NR Description: GAI [Arabidopsis thaliana]
  misc_feature (1)..(555): Homolog of NCBI NO: 20334379 NR Description: GAI-like protein 1 [Vitis vinifera]
  misc_feature (106)..(556): Homolog of NCBI NO: 2339980 NR Description: RGA2 protein [Arabidopsis thaliana]
MMMVKKEEDGGGNMDDELLAVLGYKVRSSEMAEVALKLEQLETMMSNVQEDGLSHLAADTVHYNPSELYSWLDNMLSELNPPPLPASSNGLDPVLPSPEICGFPASDYDLEVIPGNAIYQFPAIDSSSSSNNQNKRLKSCSSPDSMVTSTSTGTQIGGVIGTTVTTTTTTTTAAAESTRSVILVDSQENGVRLVHALMACAEAIQQNNLTLAEALVKQIGCLAVSQAGAMRKVATYFAEALARRIYRLSPPQNQIDHCLSDTLQMHFYETCPYLKFAHFTANQAILEAFEGKKRVHVIDFSMNQGLQWPALMQALALREGGPPTFRLTGIGPPAPDNSDHLHEVGCKLAQLAEAVHVEFEYRGFVANSLADLDASMLELRPSDTEAVAVNSVFELHKLLGRPGGIEKVLGVVKQIKPVIFTVVEQESNHNGPVFLDRFTESLHYYSTLFDSLEGVPNSQDKVMSEVYLGKQICNLVACEGPDRVERHETLSQWGNRFGSSGLAPAHLGSNAFKQASMLLSVFNSGQGYRVEESNGCLMLGWHTRPLITTSAWKLSTAAY

SEQ ID NO: 108588 - protein, 558 aa, Arabidopsis thaliana
  peptide (1)..(558): Ceres Seq. ID no. 13667865
  misc_feature (166)..(461): Pfam Name: GRAS family transcription factor Pfam Description: GRAS family transcription factor
  misc_feature (1)..(558): Homolog of NCBI NO: 2569940 NR Description: GRS protein [Arabidopsis thaliana]
  misc_feature (1)..(558): Homolog of NCBI NO: 15226311 NR Description: gibberellin response modulator (RGA1)
  misc_feature (1)..(558): Homolog of NCBI NO: 2339978 NR Description: RGA1 protein [Arabidopsis thaliana]
  misc_feature (1)..(558): Homolog of NCBI NO: 15529230 NR Description: At2g01570/F2I9.19 [Arabidopsis thaliana]
  misc_feature (105)..(555): Homolog of NCBI NO: 15223951 NR Description: gibberellin response modulator (GAI/RGA2)
  misc_feature (1)..(81): Homolog of NCBI NO: 15223951 NR Description: gibberellin response modulator (GAI/RGA2)
  misc_feature (105)..(555): Homolog of NCBI NO: 2569938 NR Description: GAI [Arabidopsis thaliana]
  misc_feature (1)..(81): Homolog of NCBI NO: 2569938 NR Description: GAI [Arabidopsis thaliana]
  misc_feature (1)..(554): Homolog of NCBI NO: 20334379 NR Description: GAI-like protein 1 [Vitis vinifera]
  misc_feature (105)..(555): Homolog of NCBI NO: 2339980 NR Description: RGA2 protein [Arabidopsis thaliana]
MMVKKEEDGGGNMDDELLAVLGYKVRSSEMAEVALKLEQLETMMSNVQEDGLSHLAADTVHYNPSELYSWLDNMLSELNPPPLPASSNGLDPVLPSPEICGFPASDYDLEVIPGNAIYQFPAIDSSSSSNNQNKRLKSCSSPDSMVTSTSTGTQIGGVIGTTVTTTTTTTTAAAESTRSVILVDSQENGVRLVHALMACAEAIQQNNLTLAEALVKQIGCLAVSQAGAMRKVATYFAEALARRIYRLSPPQNQIDHCLSDTLQMHFYETCPYLKFAHFTANQAILEAFEGKKRVHVIDFSMNQGLQWPALMQALALREGGPPTFRLTGIGPPAPDNSDHLHEVGCKLAQLAEAVHVEFEYRGFVANSLADLDASMLELRPSDTEAVAVNSVFELHKLLGRPGGIEKVLGVVKQIKPVIFTVVEQESNHNGPVFLDRFTESLHYYSTLFDSLEGVPNSQDKVMSEVYLGKQICNLVACEGPDRVERHETLSQWGNRFGSSGLAPAHLGSNAFKQASMLLSVFNSGQGYRVEESNGCLMLGWHTRPLITTSAWKLSTAAY

SEQ ID NO: 108589 - DNA, 1286 bp, Arabidopsis thaliana
  misc_feature (1)..(1286): Ceres Seq. ID no. 13667873
  misc_feature: MA Experiment ID: 108434 Result: Down-regulated in Transcription
  misc_feature: MA Experiment 108434 PARAMETER Experiment Name: At_Root_Tips_cDNA_P Parameter: Tissue Value: Root Tips
  misc_feature: MA Experiment ID: 108462 Result: Up-regulated in Transcription
  misc_feature: MA Experiment 108462 PARAMETER Experiment Name: At_Germinating_Seeds_cDNA_P Parameter: Age (day) Value: 2 vs. 0
  misc_feature: MA Experiment 108462 PARAMETER Experiment Name: At_Germinating_Seeds_cDNA_P Parameter: Tissue Value: Germinating Seeds
  misc_feature: MA Experiment ID: 108463 Result: Up-regulated in Transcription
  misc_feature: MA Experiment 108463 PARAMETER Experiment Name: At_Germinating_Seeds_cDNA_P Parameter: Age (day) Value: 3 vs. 0
  misc_feature: MA Experiment 108463 PARAMETER Experiment Name: At_Germinating_Seeds_cDNA_P Parameter: Tissue Value: Germinating Seeds
  misc_feature: MA Experiment ID: 108464 Result: Up-regulated in Transcription
  misc_feature: MA Experiment 108464 PARAMETER Experiment Name: At_Germinating_Seeds_cDNA_P Parameter: Age (day) Value: 4 vs. 0
  misc_feature: MA Experiment 108464 PARAMETER Experiment Name: At_Germinating_Seeds_cDNA_P Parameter: Tissue Value: Germinating Seeds
  misc_feature: MA Experiment ID: 108469 Result: Up-regulated in Transcription
  misc_feature: MA Experiment ID: 108473 Result: Down-regulated in Transcription
  misc_feature: MA Experiment 108473 PARAMETER Experiment Name: At_Drought_Flowers_cDNA_P Parameter: Timepoint (hr) Value: 7 d
  misc_feature: MA Experiment 108473 PARAMETER Experiment Name: At_Drought_Flowers_cDNA_P Parameter: Tissue Value: Flower
  misc_feature: MA Experiment 108473 PARAMETER Experiment Name: At_Drought_Flowers_cDNA_P Parameter: Treatment Value: Drought vs. No Drought
  misc_feature: MA Experiment ID: 108489 Result: Down-regulated in Transcription
  misc_feature: MA Experiment ID: 108572 Result: Down-regulated in Transcription
  misc_feature: MA Experiment 108572 PARAMETER Experiment Name: At_Drought_cDNA_P Parameter: Timepoint (hr) Value: 1
  misc_feature: MA Experiment 108572 PARAMETER Experiment Name: At_Drought_cDNA_P Parameter: Tissue Value: Aerial
  misc_feature: MA Experiment 108572 PARAMETER Experiment Name: At_Drought_cDNA_P Parameter: Treatment Value: Drought vs. No Drought
  misc_feature: MA Experiment ID: 108573 Result: Down-regulated in Transcription
  misc_feature: MA Experiment 108573 PARAMETER Experiment Name: At_Drought_cDNA_P Parameter: Timepoint (hr) Value: 6
  misc_feature: MA Experiment 108573 PARAMETER Experiment Name: At_Drought_cDNA_P Parameter: Tissue Value: Aerial
  misc_feature: MA Experiment 108573 PARAMETER Experiment Name: At_Drought_cDNA_P Parameter: Treatment Value: Drought vs. No Drought
  misc_feature: MA Experiment ID: 108574 Result: Up-regulated in Transcription
  misc_feature: MA Experiment 108574 PARAMETER Experiment Name: At_Wounding__cDNA_P Parameter: Timepoint (hr) Value: 1
  misc_feature: MA Experiment 108574 PARAMETER Experiment Name: At_Wounding__cDNA_P Parameter: Tissue Value: Aerial
  misc_feature: MA Experiment 108574 PARAMETER Experiment Name: At_Wounding__cDNA_P Parameter: Treatment Value: Wounding vs. No Wounding
  misc_feature: MA Experiment ID: 108579 Result: Up-regulated in Transcription
  misc_feature: MA Experiment 108579 PARAMETER Experiment Name: At_4deg_Cold_cDNA_P Parameter: Temperature (deg C) Value: 4 vs. 22
  misc_feature: MA Experiment 108579 PARAMETER Experiment Name: At_4deg_Cold_cDNA_P Parameter: Timepoint (hr) Value: 6
  misc_feature: MA Experiment 108579 PARAMETER Experiment Name: At_4deg_Cold_cDNA_P Parameter: Tissue Value: Aerial
  misc_feature: MA Experiment ID: 108585 Result: Up-regulated in Transcription
  misc_feature: MA Experiment 108585 PARAMETER Experiment Name: At_5mM_NaNP_cDNA_P Parameter: Timepoint (hr) Value: 6
  misc_feature: MA Experiment 108585 PARAMETER Experiment Name: At_5mM_NaNP_cDNA_P Parameter: Tissue Value: Aerial
  misc_feature: MA Experiment 108585 PARAMETER Experiment Name: At_5mM_NaNP_cDNA_P Parameter: Treatment Value: null
  misc_feature: MA Experiment ID: 108594 Result: Down-regulated in Transcription
  misc_feature: MA Experiment 108594 PARAMETER Experiment Name: At_Ler-rhl_Root_cDNA_P Parameter: Plant Line Value: null
  misc_feature: MA Experiment ID: 108595 Result: Up-regulated in Transcription
  misc_feature: MA Experiment 108595 PARAMETER Experiment Name: At_Ler-pi_Ovule_cDNA_P Parameter: Plant Line Value: null
  misc_feature: MA Experiment ID: 108608 Result: Down-regulated in Transcription
  misc_feature: MA Experiment 108608 PARAMETER Experiment Name: At_100uM_ABA_cDNA_P Parameter: Timepoint (hr) Value: 1
  misc_feature: MA Experiment 108608 PARAMETER Experiment Name: At_100uM_ABA_cDNA_P Parameter: Tissue Value: Aerial
  misc_feature: MA Experiment 108608 PARAMETER Experiment Name: At_100uM_ABA_cDNA_P Parameter: Treatment Value: 100uM ABA vs. No Treatment
  misc_feature: MA Experiment ID: 108667 Result: Up-regulated in Transcription
  misc_feature: MA Experiment 108667 PARAMETER Experiment Name: At_2mM_SA_cDNA_P Parameter: Plant Line Value: WS
  misc_feature: MA Experiment 108667 PARAMETER Experiment Name: At_2mM_SA_cDNA_P Parameter: Timepoint (hr) Value: 1
  misc_feature: MA Experiment 108667 PARAMETER Experiment Name: At_2mM_SA_cDNA_P Parameter: Treatment Value: 2mM SA vs. No Treatment
  misc_feature: MA Experiment ID: 108668 Result: Up-regulated in Transcription
  misc_feature: MA Experiment 108668 PARAMETER Experiment Name: At_2mM_SA_cDNA_P Parameter: Plant Line Value: WS
  misc_feature: MA Experiment 108668 PARAMETER Experiment Name: At_2mM_SA_cDNA_P Parameter: Timepoint (hr) Value: 6
  misc_feature: MA Experiment 108668 PARAMETER Experiment Name: At_2mM_SA_cDNA_P Parameter: Treatment Value: 2mM SA vs. No Treatment
  misc_feature: MA Experiment ID: 20000089 Result: Up-regulated in Transcription
  misc_feature: MA Experiment ID: 20000166 Result: Down-regulated in Transcription
  misc_feature: MA Experiment 20000166 PARAMETER Experiment Name: At_100uM_ABA_P Parameter: Age (day) Value: 14
  misc_feature: MA Experiment 20000166 PARAMETER Experiment Name: At_100uM_ABA_P Parameter: Organism Value: A. thaliana
  misc_feature: MA Experiment 20000166 PARAMETER Experiment Name: At_100uM_ABA_P Parameter: Plant Line Value: WS
  misc_feature: MA Experiment 20000166 PARAMETER Experiment Name: At_100uM_ABA_P Parameter: Timepoint (hr) Value: 1
  misc_feature: MA Experiment 20000166 PARAMETER Experiment Name: At_100uM_ABA_P Parameter: Tissue Value: Aerial
  misc_feature: MA Experiment 20000166 PARAMETER Experiment Name: At_100uM_ABA_P Parameter: Treatment Value: 100uM ABA vs. No Treatment
  misc_feature: MA Experiment ID: 20000182 Result: Up-regulated in Transcription
  misc_feature: MA Experiment 20000182 PARAMETER Experiment Name: At_2mM_SA_P Parameter: Age (day) Value: 14
  misc_feature: MA Experiment 20000182 PARAMETER Experiment Name: At_2mM_SA_P Parameter: Organism Value: A. thaliana
  misc_feature: MA Experiment 20000182 PARAMETER Experiment Name: At_2mM_SA_P Parameter: Plant Line Value: WS
  misc_feature: MA Experiment 20000182 PARAMETER Experiment Name: At_2mM_SA_P Parameter: Timepoint (hr) Value: 6
  misc_feature: MA Experiment 20000182 PARAMETER Experiment Name: At_2mM_SA_P Parameter: Tissue Value: Aerial
  misc_feature: MA Experiment 20000182 PARAMETER Experiment Name: At_2mM_SA_P Parameter: Treatment Value: 2mM SA vs. No Treatment
  misc_feature: MA Experiment ID: 20000213 Result: Up-regulated in Transcription
  misc_feature: MA Experiment 20000213 PARAMETER Experiment Name: At_4deg_Cold_P Parameter: Timepoint (hr) Value: 2
  misc_feature: MA Experiment ID: 20000234 Result: Down-regulated in Transcription
  misc_feature: MA Experiment 20000234 PARAMETER Experiment Name: At_Siliques_P Parameter: Age (day) Value: 21
  misc_feature: MA Experiment 20000234 PARAMETER Experiment Name: At_Siliques_P Parameter: Organism Value: A. thaliana
  misc_feature: MA Experiment 20000234 PARAMETER Experiment Name: At_Siliques_P Parameter: Plant Line Value: WS
  misc_feature: MA Experiment 20000234 PARAMETER Experiment Name: At_Siliques_P Parameter: Tissue Value: Less Than 5mm Siliques vs. Whole Plant
  misc_feature: MA Experiment ID: 20000264 Result: Down-regulated in Transcription
  misc_feature: MA Experiment 20000264 PARAMETER Experiment Name: At_Open_Flower_P Parameter: Age (day) Value: 21
  misc_feature: MA Experiment 20000264 PARAMETER Experiment Name: At_Open_Flower_P Parameter: Plant Line Value: WS
  misc_feature: MA Experiment 20000264 PARAMETER Experiment Name: At_Open_Flower_P Parameter: Tissue Value: Open Flower vs. Whole Plant
  misc_feature: MA Experiment ID: 20000265 Result: Down-regulated in Transcription
  misc_feature: MA Experiment 20000265 PARAMETER Experiment Name: At_Open_Flower_P Parameter: Age (day) Value: 21
  misc_feature: MA Experiment 20000265 PARAMETER Experiment Name: At_Open_Flower_P Parameter: Plant Line Value: WS
  misc_feature: MA Experiment 20000265 PARAMETER Experiment Name: At_Open_Flower_P Parameter: Tissue Value: Closed Flower vs. Whole Plant
  misc_feature: MA Experiment ID: 20000286 Result: Down-regulated in Transcription
  misc_feature: MA Experiment 20000286 PARAMETER Experiment Name: At_Open_Flower_P Parameter: Age (day) Value: 21
  misc_feature: MA Experiment 20000286 PARAMETER Experiment Name: At_Open_Flower_P Parameter: Plant Line Value: WS
  misc_feature: MA Experiment 20000286 PARAMETER Experiment Name: At_Open_Flower_P Parameter: Tissue Value: Half Open vs. Whole Plant
  misc_feature: MA Experiment ID: 20000437 Result: Down-regulated in Transcription
  misc_feature: MA Experiment 20000437 PARAMETER Experiment Name: At_Drought_P Parameter: Age (day) Value: 8
  misc_feature: MA Experiment 20000437 PARAMETER Experiment Name: At_Drought_P Parameter: Organism Value: A. thaliana
  misc_feature: MA Experiment 20000437 PARAMETER Experiment Name: At_Drought_P Parameter: Plant Line Value: WS
  misc_feature: MA Experiment 20000437 PARAMETER Experiment Name: At_Drought_P Parameter: Timepoint (hr) Value: 24
  misc_feature: MA Experiment 20000437 PARAMETER Experiment Name: At_Drought_P Parameter: Tissue Value: Whole Plant
  misc_feature: MA Experiment 20000437 PARAMETER Experiment Name: At_Drought_P Parameter: Treatment Value: Drought vs. No Drought
  misc_feature: MA Experiment ID: 20000438 Result: Down-regulated in Transcription
  misc_feature: MA Experiment 20000438 PARAMETER Experiment Name: At_Shoots__P Parameter: Age (day) Value: 14
  misc_feature: MA Experiment 20000438 PARAMETER Experiment Name: At_Shoots__P Parameter: Tissue Value: Shoots vs. Whole Plant
  misc_feature: MA Experiment ID: 20000456 Result: Up-regulated in Transcription
  misc_feature: MA Experiment 20000456 PARAMETER Experiment Name: At_100uM_BA_P Parameter: Age (day) Value: 14
  misc_feature: MA Experiment 20000456 PARAMETER Experiment Name: At_100uM_BA_P Parameter: Organism Value: A. thaliana
  misc_feature: MA Experiment 20000456 PARAMETER Experiment Name: At_100uM_BA_P Parameter: Plant Line Value: WS
  misc_feature: MA Experiment 20000456 PARAMETER Experiment Name: At_100uM_BA_P Parameter: Timepoint (hr) Value: 6
  misc_feature: MA Experiment 20000456 PARAMETER Experiment Name: At_100uM_BA_P Parameter: Tissue Value: Aerial
  misc_feature: MA Experiment 20000456 PARAMETER Experiment Name: At_100uM_BA_P Parameter: Treatment Value: 100uM BA vs. No Treatment
  misc_feature: MA Experiment ID: 20000495 Result: Down-regulated in Transcription
  misc_feature: MA Experiment 20000495 PARAMETER Experiment Name: At_Guard_Cells_P Parameter: Harvest Date Value: 8/2/2002
  misc_feature: MA Experiment 20000495 PARAMETER Experiment Name: At_Guard_Cells_P Parameter: Organism Value: A. thaliana
  misc_feature: MA Experiment 20000495 PARAMETER Experiment Name: At_Guard_Cells_P Parameter: Tissue Value: Guard Cells vs. Leaves
  misc_feature: MA Experiment ID: 20000527 Result: Down-regulated in Transcription
  misc_feature: MA Experiment 20000527 PARAMETER Experiment Name: At_10percent_PEG_P Parameter: Age (day) Value: 20
  misc_feature: MA Experiment 20000527 PARAMETER Experiment Name: At_10percent_PEG_P Parameter: Organism Value: A. thaliana
  misc_feature: MA Experiment 20000527 PARAMETER Experiment Name: At_10percent_PEG_P Parameter: Plant Line Value: WS
  misc_feature: MA Experiment 20000527 PARAMETER Experiment Name: At_10percent_PEG_P Parameter: Timepoint (day) Value: 20
  misc_feature: MA Experiment 20000527 PARAMETER Experiment Name: At_10percent_PEG_P Parameter: Tissue Value: Whole Plant
  misc_feature: MA Experiment 20000527 PARAMETER Experiment Name: At_10percent_PEG_P Parameter: Treatment Value: 10percent PEG vs. No Treatment
  misc_feature: MA Experiment ID: 20000576 Result: Down-regulated in Transcription
  misc_feature: MA Experiment 20000576 PARAMETER Experiment Name: At_100uM_ABA_Mutants__P Parameter: Organism Value: A. thaliana
  misc_feature: MA Experiment 20000576 PARAMETER Experiment Name: At_100uM_ABA_Mutants__P Parameter: Plant Line Value: CS23
  misc_feature: MA Experiment 20000576 PARAMETER Experiment Name: At_100uM_ABA_Mutants__P Parameter: Timepoint (hr) Value: 6
  misc_feature: MA Experiment 20000576 PARAMETER Experiment Name: At_100uM_ABA_Mutants__P Parameter: Tissue Value: Whole Plant
  misc_feature: MA Experiment 20000576 PARAMETER Experiment Name: At_100uM_ABA_Mutants__P Parameter: Treatment Value: 1uM ABA vs. No Treatment
  misc_feature: MA Experiment ID: 20000709 Result: Up-regulated in Transcription
  misc_feature: MA Experiment 20000709 PARAMETER Experiment Name: At_15mM_NH4NO3_L-to-H_P Parameter: Age (hr) Value: 14
  misc_feature: MA Experiment 20000709 PARAMETER Experiment Name: At_15mM_NH4NO3_L-to-H_P Parameter: Organism Value: A. thaliana
  misc_feature: MA Experiment 20000709 PARAMETER Experiment Name: At_15mM_NH4NO3_L-to-H_P Parameter: Plant Line Value: WS
  misc_feature: MA Experiment 20000709 PARAMETER Experiment Name: At_15mM_NH4NO3_L-to-H_P Parameter: Timepoint (hr) Value: 4
  misc_feature: MA Experiment 20000709 PARAMETER Experiment Name: At_15mM_NH4NO3_L-to-H_P Parameter: Tissue Value: Aerial
  misc_feature: MA Experiment 20000709 PARAMETER Experiment Name: At_15mM_NH4NO3_L-to-H_P Parameter: Treatment Value: 15mM NH4NO3 vs. 30mM Mannitol
  misc_feature: MA Experiment ID: 20000794 Result: Down-regulated in Transcription
  misc_feature: MA Experiment 20000794 PARAMETER Experiment Name: At_Petals_P Parameter: Age (day) Value: 23-25 days
  misc_feature: MA Experiment 20000794 PARAMETER Experiment Name: At_Petals_P Parameter: Plant Line Value: WS
  misc_feature: MA Experiment 20000794 PARAMETER Experiment Name: At_Petals_P Parameter: Tissue Value: Petals vs. Whole plant
  misc_feature: MA Experiment ID: 20001451 Result: Down-regulated in Transcription
  misc_feature: MA Experiment 20001451 PARAMETER Experiment Name: At_Far-red-induction_P Parameter: Age (day) Value: 7
  misc_feature: MA Experiment 20001451 PARAMETER Experiment Name: At_Far-red-induction_P Parameter: Light Value: Far-red vs. White
  misc_feature: MA Experiment 20001451 PARAMETER Experiment Name: At_Far-red-induction_P Parameter: Organism Value: A. thaliana
  misc_feature: MA Experiment 20001451 PARAMETER Experiment Name: At_Far-red-induction_P Parameter: Plant Line Value: Columbia
  misc_feature: MA Experiment 20001451 PARAMETER Experiment Name: At_Far-red-induction_P Parameter: Timepoint (hr) Value: 24
  misc_feature: MA Experiment 20001451 PARAMETER Experiment Name: At_Far-red-induction_P Parameter: Tissue Value: Whole Plant
  misc_feature: MA Experiment ID: 20001554 Result: Down-regulated in Transcription
  misc_feature: MA Experiment 20001554 PARAMETER Experiment Name: At_Drought_Soil_Dry_P Parameter: Age (day) Value: 21
  misc_feature: MA Experiment 20001554 PARAMETER Experiment Name: At_Drought_Soil_Dry_P Parameter: Organism Value: A. thaliana
  misc_feature: MA Experiment 20001554 PARAMETER Experiment Name: At_Drought_Soil_Dry_P Parameter: Plant Line Value: WS
  misc_feature: MA Experiment 20001554 PARAMETER Experiment Name: At_Drought_Soil_Dry_P Parameter: Post Timepoint (hr) Value: None
  misc_feature: MA Experiment 20001554 PARAMETER Experiment Name: At_Drought_Soil_Dry_P Parameter: Post-Treatment Value: None
  misc_feature: MA Experiment 20001554 PARAMETER Experiment Name: At_Drought_Soil_Dry_P Parameter: Timepoint (day) Value: 7
  misc_feature: MA Experiment 20001554 PARAMETER Experiment Name: At_Drought_Soil_Dry_P Parameter: Treatment Value: Drought vs. No Drought
  misc_feature: MA Experiment ID: 20001557 Result: Up-regulated in Transcription
  misc_feature: MA Experiment 20001557 PARAMETER Experiment Name: At_Drought_Soil_Dry_P Parameter: Age (day) Value: 27
  misc_feature: MA Experiment 20001557 PARAMETER Experiment Name: At_Drought_Soil_Dry_P Parameter: Organism Value: A. thaliana
  misc_feature: MA Experiment 20001557 PARAMETER Experiment Name: At_Drought_Soil_Dry_P Parameter: Plant Line Value: WS
  misc_feature: MA Experiment 20001557 PARAMETER Experiment Name: At_Drought_Soil_Dry_P Parameter: Post Timepoint (hr) Value: 3
  misc_feature: MA Experiment 20001557 PARAMETER Experiment Name: At_Drought_Soil_Dry_P Parameter: Post-Treatment Value: Re-Water vs. No Drought
  misc_feature: MA Experiment 20001557 PARAMETER Experiment Name: At_Drought_Soil_Dry_P Parameter: Timepoint (day) Value: 13
  misc_feature: MA Experiment 20001557 PARAMETER Experiment Name: At_Drought_Soil_Dry_P Parameter: Treatment Value: Drought vs. No Drought
  misc_feature: MA Experiment ID: 20001904 Result: Down-regulated in Transcription
  misc_feature: MA Experiment 20001904 PARAMETER Experiment Name: At_Drought_Reproduction_P Parameter: Age (day) Value: 37
  misc_feature: MA Experiment 20001904 PARAMETER Experiment Name: At_Drought_Reproduction_P Parameter: Organism Value: A. thaliana
  misc_feature: MA Experiment 20001904 PARAMETER Experiment Name: At_Drought_Reproduction_P Parameter: Plant Line Value: WS
  misc_feature: MA Experiment 20001904 PARAMETER Experiment Name: At_Drought_Reproduction_P Parameter: Timepoint (day) Value: 7
  misc_feature: MA Experiment 20001904 PARAMETER Experiment Name: At_Drought_Reproduction_P Parameter: Tissue Value: Rosettes
  misc_feature: MA Experiment 20001904 PARAMETER Experiment Name: At_Drought_Reproduction_P Parameter: Treatment Value: Drought vs. No Drought
  misc_feature: MA Experiment ID: 20001905 Result: Down-regulated in Transcription
  misc_feature: MA Experiment 20001905 PARAMETER Experiment Name: At_Drought_Reproduction_P Parameter: Age (day) Value: 40
  misc_feature: MA Experiment 20001905 PARAMETER Experiment Name: At_Drought_Reproduction_P Parameter: Organism Value: A. thaliana
  misc_feature: MA Experiment 20001905 PARAMETER Experiment Name: At_Drought_Reproduction_P Parameter: Plant Line Value: WS
  misc_feature: MA Experiment 20001905 PARAMETER Experiment Name: At_Drought_Reproduction_P Parameter: Timepoint (day) Value: 10
  misc_feature: MA Experiment 20001905 PARAMETER Experiment Name: At_Drought_Reproduction_P Parameter: Tissue Value: Rosettes
  misc_feature: MA Experiment 20001905 PARAMETER Experiment Name: At_Drought_Reproduction_P Parameter: Treatment Value: Drought vs. No Drought
ccacgcgtccggaaaatcttcaaagtgtttgcagagaaatctaaattcatcaacagttttttacaaaagaaatggaaaacggagaagcaaaacagagtgtacctcttctcactccctataagatgggaagattcaatctttcccatagggttgttctagcaccattgacgagacagagatcgtacggaaacgttcctcacgctgccatatattactctcagagaacgactccaggaggttttctcatcactgaagccactggagtttcagatacagctcaaggatatcaagatactcctgggatatggactaaagagcatgtggaggcatggaagccaatcgttgatgctgtacatgccaaaggtggtatcttcttctgtcagatctggcatgttggccgcgtttctaatagcgggtttcagccaaatggaaaagctcctatctcttgttcggataagccattgatgcctcaaattcgctctaatggcatcgatgaagctctctttacccctccaagacggcttggtatcgaagaaatccccggcattgtcaatgattttaggcttgctgcaagaaatgctatggaagctggttttgatggagttgagattcatggagctaatggctatctgattgaccagttcatgaaggatacggtgaatgatagaactgatgaatacggtggatcattgcaaaaccgttgcaaatttcctctagaaatagtcgatgcagttgctaaggagatcggaccagaccgtgttggaatcaggctctctccatttgctgactacatggaatctggagacactaatccaggagcattagggctttatatggcggaatctttgaacaaatacggaatcctctactgtcatgtgattgaagcgagaatgaaaacaatgggagaagtacatgcttgtcctcacacactaatgccgatgaggaaagcgtttaaggggacttttatctccgcaggaggtttcacgagggaagatgggaatgaggctgtgtcaaagggaagaactgatttggtggcttatggtcgatggtttctagccaacccggacctgccaaagaggttccaagtggatgcaccgctgaataagtacgatagaccaacgttttacacttctgatccagtcgtcggttacaccgattaccctttcctcgaatcaacagcttaaaattgttatcaataatgtaatgtagtgtgtttcccttatataagatgtaataagtttctggcttttcatttatactttttaagtttaagtcataaaaccttc

SEQ ID NO: 108590 - protein, 370 aa, Arabidopsis thaliana
  peptide (1)..(370): Ceres Seq. ID no. 13667874
  misc_feature (11)..(344): Pfam Name: NADH:flavin oxidoreductase / NADH oxidase family Pfam Description: NADH:flavin oxidoreductase / NADH oxidase family
  misc_feature (1)..(370): Homolog of NCBI NO: 2765083 NR Description: 12-oxophytodienoate reductase [Arabidopsis
  misc_feature (1)..(370): Homolog of NCBI NO: 15223138 NR Description: 12-oxophytodienoate reductase (OPR1) [Arabidopsis
  misc_feature (1)..(370): Homolog of NCBI NO: 21593388 NR Description: 12-oxophytodienoate reductase (OPR1) [Arabidopsis
  misc_feature (1)..(370): Homolog of NCBI NO: 15223140 NR Description: 12-oxophytodienoate reductase (OPR2) [Arabidopsis
  misc_feature (1)..(370): Homolog of NCBI NO: 26450549 NR Description: putative 12-oxophytodienoate reductase OPR2
  misc_feature (1)..(369): Homolog of NCBI NO: 7449901 NR Description: probable 12-oxophytodienoate reductase (EC
  misc_feature (1)..(368): Homolog of NCBI NO: 4894182 NR Description: 12-oxophytodienoate reductase [Lycopersicon
  misc_feature (1)..(368): Homolog of NCBI NO: 14277800 NR Description: Chain A, Crystal Structure Of 12-Oxophytodienoate
  misc_feature (8)..(367): Homolog of NCBI NO: 7449902 NR Description: probable 12-oxophytodienoate reductase (EC
  misc_feature (9)..(366): Homolog of NCBI NO: 13516922 NR Description: 12-oxophytodienoic acid 10, 11-reductase [Pisum
MENGEAKQSVPLLTPYKMGRFNLSHRVVLAPLTRQRSYGNVPHAAIYYSQRTTPGGFLITEATGVSDTAQGYQDTPGIWTKEHVEAWKPIVDAVHAKGGIFFCQIWHVGRVSNSGFQPNGKAPISCSDKPLMPQIRSNGIDEALFTPPRRLGIEEIPGIVNDFRLAARNAMEAGFDGVEIHGANGYLIDQFMKDTVNDRTDEYGGSLQNRCKFPLEIVDAVAKEIGPDRVGIRLSPFADYMESGDTNPGALGLYMAESLNKYGILYCHVIEARMKTMGEVHACPHTLMPMRKAFKGTFISAGGFTREDGNEAVSKGRTDLVAYGRWFLANPDLPKRFQVDAPLNKYDRPTFYTSDPVVGYTDYPFLESTA

SEQ ID NO: 108591 - protein, 353 aa, Arabidopsis thaliana
  peptide (1)..(353): Ceres Seq. ID no. 13667875
  misc_feature (1)..(327): Pfam Name: NADH:flavin oxidoreductase / NADH oxidase family Pfam Description: NADH:flavin oxidoreductase / NADH oxidase family
  misc_feature (1)..(353): Homolog of NCBI NO: 2765083 NR Description: 12-oxophytodienoate reductase [Arabidopsis
  misc_feature (1)..(353): Homolog of NCBI NO: 15223138 NR Description: 12-oxophytodienoate reductase (OPR1) [Arabidopsis
  misc_feature (1)..(353): Homolog of NCBI NO: 21593388 NR Description: 12-oxophytodienoate reductase (OPR1) [Arabidopsis
  misc_feature (1)..(353): Homolog of NCBI NO: 15223140 NR Description: 12-oxophytodienoate reductase (OPR2) [Arabidopsis
  misc_feature (1)..(353): Homolog of NCBI NO: 26450549 NR Description: putative 12-oxophytodienoate reductase OPR2
  misc_feature (1)..(352): Homolog of NCBI NO: 7449901 NR Description: probable 12-oxophytodienoate reductase (EC
  misc_feature (1)..(351): Homolog of NCBI NO: 4894182 NR Description: 12-oxophytodienoate reductase [Lycopersicon
  misc_feature (1)..(351): Homolog of NCBI NO: 14277800 NR Description: Chain A, Crystal Structure Of 12-Oxophytodienoate
  misc_feature (1)..(350): Homolog of NCBI NO: 7449902 NR Description: probable 12-oxophytodienoate reductase (EC
  misc_feature (1)..(349): Homolog of NCBI NO: 13516922 NR Description: 12-oxophytodienoic acid 10, 11-reductase [Pisum
MGRFNLSHRVVLAPLTRQRSYGNVPHAAIYYSQRTTPGGFLITEATGVSDTAQGYQDTPGIWTKEHVEAWKPIVDAVHAKGGIFFCQIWHVGRVSNSGFQPNGKAPISCSDKPLMPQIRSNGIDEALFTPPRRLGIEEIPGIVNDFRLAARNAMEAGFDGVEIHGANGYLIDQFMKDTVNDRTDEYGGSLQNRCKFPLEIVDAVAKEIGPDRVGIRLSPFADYMESGDTNPGALGLYMAESLNKYGILYCHVIEARMKTMGEVHACPHTLMPMRKAFKGTFISAGGFTREDGNEAVSKGRTDLVAYGRWFLANPDLPKRFQVDAPLNKYDRPTFYTSDPVVGYTDYPFLESTA

SEQ ID NO: 108592 - protein, 239 aa, Arabidopsis thaliana; identical to SEQ ID NO: 24534
  peptide (1)..(239): Ceres Seq. ID no. 13667876
  misc_feature (1)..(213): Pfam Name: NADH:flavin oxidoreductase / NADH oxidase family Pfam Description: NADH:flavin oxidoreductase / NADH oxidase family
  misc_feature (1)..(239): Homolog of NCBI NO: 2765083 NR Description: 12-oxophytodienoate reductase [Arabidopsis
  misc_feature (1)..(239): Homolog of NCBI NO: 15223138 NR Description: 12-oxophytodienoate reductase (OPR1) [Arabidopsis
  misc_feature (1)..(239): Homolog of NCBI NO: 21593388 NR Description: 12-oxophytodienoate reductase (OPR1) [Arabidopsis
  misc_feature (1)..(239): Homolog of NCBI NO: 15223140 NR Description: 12-oxophytodienoate reductase (OPR2) [Arabidopsis
  misc_feature (1)..(239): Homolog of NCBI NO: 26450549 NR Description: putative 12-oxophytodienoate reductase OPR2
  misc_feature (1)..(238): Homolog of NCBI NO: 7449901 NR Description: probable 12-oxophytodienoate reductase (EC
  misc_feature (1)..(237): Homolog of NCBI NO: 4894182 NR Description: 12-oxophytodienoate reductase [Lycopersicon
  misc_feature (1)..(237): Homolog of NCBI NO: 14277800 NR Description: Chain A, Crystal Structure Of 12-Oxophytodienoate
  misc_feature (1)..(236): Homolog of NCBI NO: 7449902 NR Description: probable 12-oxophytodienoate reductase (EC
  misc_feature (1)..(235): Homolog of NCBI NO: 13516922 NR Description: 12-oxophytodienoic acid 10, 11-reductase [Pisum

SEQ ID NO: 108593 - DNA, 2183 bp, Arabidopsis thaliana
  misc_feature (1)..(2183): Ceres Seq. ID no. 13667877
  misc_feature: MA Experiment ID: 20000171 Result: Down-regulated in Transcription
  misc_feature: MA Experiment 20000171 PARAMETER Experiment Name: At_42deg_Heat_P Parameter: Age (day) Value: 14
  misc_feature: MA Experiment 20000171 PARAMETER Experiment Name: At_42deg_Heat_P Parameter: Organism Value: A. thaliana
  misc_feature: MA Experiment 20000171 PARAMETER Experiment Name: At_42deg_Heat_P Parameter: Plant Line Value: WS
  misc_feature: MA Experiment 20000171 PARAMETER Experiment Name: At_42deg_Heat_P Parameter: Temperature (deg C) Value: 42 vs. 22
  misc_feature: MA Experiment 20000171 PARAMETER Experiment Name: At_42deg_Heat_P Parameter: Timepoint (hr) Value: 1
  misc_feature: MA Experiment 20000171 PARAMETER Experiment Name: At_42deg_Heat_P Parameter: Tissue Value: Aerial
  misc_feature: MA Experiment ID: 20000184 Result: Up-regulated in Transcription
  misc_feature: MA Experiment 20000184 PARAMETER Experiment Name: At_Shoots__P Parameter: Age (day) Value: 7
  misc_feature: MA Experiment 20000184 PARAMETER Experiment Name: At_Shoots__P Parameter: Tissue Value: Shoots vs. Whole Plant
  misc_feature: MA Experiment ID: 20000185 Result: Down-regulated in Transcription
  misc_feature: MA Experiment 20000185 PARAMETER Experiment Name: At_Roots__P Parameter: Age (day) Value: 7 vs. 21
  misc_feature: MA Experiment 20000185 PARAMETER Experiment Name: At_Roots__P Parameter: Organism Value: A. thaliana
  misc_feature: MA Experiment 20000185 PARAMETER Experiment Name: At_Roots__P Parameter: Tissue Value: Roots vs. Whole Plant
  misc_feature: MA Experiment ID: 20000437 Result: Down-regulated in Transcription
  misc_feature: MA Experiment 20000437 PARAMETER Experiment Name: At_Drought_P Parameter: Age (day) Value: 8
  misc_feature: MA Experiment 20000437 PARAMETER Experiment Name: At_Drought_P Parameter: Organism Value: A. thaliana
  misc_feature: MA Experiment 20000437 PARAMETER Experiment Name: At_Drought_P Parameter: Plant Line Value: WS
  misc_feature: MA Experiment 20000437 PARAMETER Experiment Name: At_Drought_P Parameter: Timepoint (hr) Value: 24
  misc_feature: MA Experiment 20000437 PARAMETER Experiment Name: At_Drought_P Parameter: Tissue Value: Whole Plant
  misc_feature: MA Experiment 20000437 PARAMETER Experiment Name: At_Drought_P Parameter: Treatment Value: Drought vs. No Drought
  misc_feature: MA Experiment ID: 20001905 Result: Down-regulated in Transcription
  misc_feature: MA Experiment 20001905 PARAMETER Experiment Name: At_Drought_Reproduction_P Parameter: Age (day) Value: 40
  misc_feature: MA Experiment 20001905 PARAMETER Experiment Name: At_Drought_Reproduction_P Parameter: Organism Value: A. thaliana
  misc_feature: MA Experiment 20001905 PARAMETER Experiment Name: At_Drought_Reproduction_P Parameter: Plant Line Value: WS
  misc_feature: MA Experiment 20001905 PARAMETER Experiment Name: At_Drought_Reproduction_P Parameter: Timepoint (day) Value: 10
  misc_feature: MA Experiment 20001905 PARAMETER Experiment Name: At_Drought_Reproduction_P Parameter: Tissue Value: Rosettes
  misc_feature: MA Experiment 20001905 PARAMETER Experiment Name: At_Drought_Reproduction_P Parameter: Treatment Value: Drought vs. No Drought
agtaatttaggagaagtcacatgttccttcttcttcttccttcatcatccccaaacacacacaaactaaaaaaaaggcaaaaccctagatccaagatcagacctaatctaatcgaaactcatagctgaaaaatgaagagagatcatcaccaattccaaggtcgattgtccaaccacgggacttcttcttcttcatcatcaatctctaaagataagatgatgatggtgaaaaaagaagaagacggtggaggtaacatggacgacgagcttctcgctgttttaggttacaaagttaggtcatcggagatggcggaggttgctttgaaactcgaacaattagagacgatgatgagtaatgttcaagaagatggtttatctcatctcgcgacggatactgttcattataatccgtcggagctttattcttggcttgataatatgctctctgagcttaatcctcctcctcttccggcgagttctaacggtttagatccggttcttccttcgccggagatttgtggttttccggcttcggattatgaccttaaagtcattcccggaaacgcgatttatcagtttccggcgattgattcttcgtcttcgtcgaataatcagaacaagcgtttgaaatcatgctcgagtcctgattctatggttacatcgacttcgacgggtacgcagattggtggagtcataggaacgacggtgacgacaaccaccacgacaacgacggcggcggctgagtcaactcgttctgttatcctggttgactcgcaagagaacggtgttcgtttagtccacgcgcttatggcttgtgcagaagcaatccagcagaacaatttgactctagcggaagctcttgtgaagcaaatcggatgcttagctgtgtctcaagccggagctatgagaaaagtggctacttacttcgccgaagctttagctcggcggatctaccgtctctctccgccgcagaatcagatcgatcattgtctctccgatactcttcagatgcacttttacgagacttgtccttatcttaaattcgctcacttcacggcgaaccaagcgattctcgaagcttttgaaggtaagaagagagtacacgtcattgatttctcgatgaaccaaggtcttcaatggcctgcgcttatgcaagctcttgcgcttcgagaaggaggtcctccaactttccggttaaccggaattggtccaccggcgccggataattctgatcatcttcatgaagttggttgtaaattagctcagcttgcggaggcgattcacgtagaattcgaataccgtggattcgttgctaacagcttagccgatctcgatgcttcgatgcttgagcttagaccgagcgatacggaagctgttgcggtgaactctgtttttgagctacataagctcttaggtcgtcccggtgggatagagaaagttctcggcgttgtgaaacagattaaaccggtgattttcacggtggttgagcaagaatcgaaccataacggaccggttttcttagaccggtttactgaatcgttacattattattcgactctgtttgattcgttggaaggagttccgaatagtcaagacaaagtcatgtctgaagtttacttagggaaacagatttgtaatctggtggcttgtgaaggtcctgacagagtcgagagacacgaaacgttgagtcaatggggaaaccggtttggttcgtccggtttagcgccggcacatcttgggtctaacgcgtttaagcaagcgagtatgcttttgtctgtgtttaatagtggccaaggttatcgtgtggaggagagtaatggatgtttgatgttgggttggcacactcgcccactcattaccacctccgcttggaaactctcgacggcggcgcactgagtttgactcgaagcatacgacggtggtggagtcgagtcgagtgaatttgagattgagatcagtggaccggtgatgacatatgttcggaccaagacctaaaccgaactgaatcgaaccgttttgccttttgtttattttatttattttcgttcacttgtttaaaattcttatatatatcgttttggtaggtcattttataatttatgcctttttgggatcaatttttaataggctgagtttgtatttattaataaatatcttatgaattttaaaataaaattatgtttt

SEQ ID NO: 108594 - protein, 587 aa, Arabidopsis thaliana; identical to SEQ ID NO: 47148
  peptide (1)..(587): Ceres Seq. ID no. 13667878
  misc_feature (195)..(490): Pfam Name: GRAS family transcription factor Pfam Description: GRAS family transcription factor
  misc_feature (1)..(587): Homolog of NCBI NO: 2339978 NR Description: RGA1 protein [Arabidopsis thaliana]
  misc_feature (1)..(587): Homolog of NCBI NO: 15226311 NR Description: gibberellin response modulator (RGA1)
  misc_feature (1)..(587): Homolog of NCBI NO: 2569940 NR Description: GRS protein [Arabidopsis thaliana]
  misc_feature (1)..(587): Homolog of NCBI NO: 15529230 NR Description: At2g01570/F2I9.19 [Arabidopsis thaliana]
  misc_feature (134)..(584): Homolog of NCBI NO: 15223951 NR Description: gibberellin response modulator (GAI/RGA2)
  misc_feature (1)..(110): Homolog of NCBI NO: 15223951 NR Description: gibberellin response modulator (GAI/RGA2)
  misc_feature (134)..(584): Homolog of NCBI NO: 2569938 NR Description: GAI [Arabidopsis thaliana]
  misc_feature (26)..(110): Homolog of NCBI NO: 2569938 NR Description: GAI [Arabidopsis thaliana]
  misc_feature (1)..(583): Homolog of NCBI NO: 20334379 NR Description: GAI-like protein 1 [Vitis vinifera]
  misc_feature (134)..(584): Homolog of NCBI NO: 2339980 NR Description: RGA2 protein [Arabidopsis thaliana]

SEQ ID NO: 108595 - protein, 559 aa, Arabidopsis thaliana; identical to SEQ ID NO: 47149
  peptide (1)..(559): Ceres Seq. ID no. 13667879
  misc_feature (167)..(462): Pfam Name: GRAS family transcription factor Pfam Description: GRAS family transcription factor
  misc_feature (1)..(559): Homolog of NCBI NO: 2339978 NR Description: RGA1 protein [Arabidopsis thaliana]
  misc_feature (1)..(559): Homolog of NCBI NO: 15226311 NR Description: gibberellin response modulator (RGA1)
  misc_feature (1)..(559): Homolog of NCBI NO: 2569940 NR Description: GRS protein [Arabidopsis thaliana]
  misc_feature (1)..(559): Homolog of NCBI NO: 15529230 NR Description: At2g01570/F2I9.19 [Arabidopsis thaliana]
  misc_feature (106)..(556): Homolog of NCBI NO: 15223951 NR Description: gibberellin response modulator (GAI/RGA2)
  misc_feature (1)..(82): Homolog of NCBI NO: 15223951 NR Description: gibberellin response modulator (GAI/RGA2)
  misc_feature (106)..(556): Homolog of NCBI NO: 2569938 NR Description: GAI [Arabidopsis thaliana]
  misc_feature (1)..(82): Homolog of NCBI NO: 2569938 NR Description: GAI [Arabidopsis thaliana]
  misc_feature (1)..(555): Homolog of NCBI NO: 20334379 NR Description: GAI-like protein 1 [Vitis vinifera]
  misc_feature (106)..(556): Homolog of NCBI NO: 2339980 NR Description: RGA2 protein [Arabidopsis thaliana]

SEQ ID NO: 108596 - protein, 558 aa, Arabidopsis thaliana; identical to SEQ ID NO: 47150
  peptide (1)..(558): Ceres Seq. ID no. 13667880
  misc_feature (166)..(461): Pfam Name: GRAS family transcription factor Pfam Description: GRAS family transcription factor
  misc_feature (1)..(558): Homolog of NCBI NO: 2339978 NR Description: RGA1 protein [Arabidopsis thaliana]
  misc_feature (1)..(558): Homolog of NCBI NO: 15226311 NR Description: gibberellin response modulator (RGA1)
  misc_feature (1)..(558): Homolog of NCBI NO: 2569940 NR Description: GRS protein [Arabidopsis thaliana]
  misc_feature (1)..(558): Homolog of NCBI NO: 15529230 NR Description: At2g01570/F2I9.19 [Arabidopsis thaliana]
  misc_feature (105)..(555): Homolog of NCBI NO: 15223951 NR Description: gibberellin response modulator (GAI/RGA2)
  misc_feature (1)..(81): Homolog of NCBI NO: 15223951 NR Description: gibberellin response modulator (GAI/RGA2)
  misc_feature (105)..(555): Homolog of NCBI NO: 2569938 NR Description: GAI [Arabidopsis thaliana]
  misc_feature (1)..(81): Homolog of NCBI NO: 2569938 NR Description: GAI [Arabidopsis thaliana]
  misc_feature (1)..(554): Homolog of NCBI NO: 20334379 NR Description: GAI-like protein 1 [Vitis vinifera]
  misc_feature (105)..(555): Homolog of NCBI NO: 2339980 NR Description: RGA2 protein [Arabidopsis thaliana]

SEQ ID NO: 108597 - DNA, 1388 bp, Arabidopsis thaliana
  misc_feature (1)..(1388): Ceres Seq. ID no. 13667888
  misc_feature: MA Experiment ID: 108461 Result: Up-regulated in Transcription
  misc_feature: MA Experiment 108461 PARAMETER Experiment Name: At_Germinating_Seeds_cDNA_P Parameter: Age (day) Value: 1 vs. 0
  misc_feature: MA Experiment 108461 PARAMETER Experiment Name: At_Germinating_Seeds_cDNA_P Parameter: Tissue Value: Germinating Seeds
  misc_feature: MA Experiment ID: 108462 Result: Up-regulated in Transcription
  misc_feature: MA Experiment 108462 PARAMETER Experiment Name: At_Germinating_Seeds_cDNA_P Parameter: Age (day) Value: 2 vs. 0
  misc_feature: MA Experiment 108462 PARAMETER Experiment Name: At_Germinating_Seeds_cDNA_P Parameter: Tissue Value: Germinating Seeds
  misc_feature: MA Experiment ID: 108577 Result: Down-regulated in Transcription
  misc_feature: MA Experiment 108577 PARAMETER Experiment Name: At_42deg_Heat_cDNA_P Parameter: Temperature (deg C) Value: 42 vs. 22
  misc_feature: MA Experiment 108577 PARAMETER Experiment Name: At_42deg_Heat_cDNA_P Parameter: Timepoint (hr) Value: 6
  misc_feature: MA Experiment 108577 PARAMETER Experiment Name: At_42deg_Heat_cDNA_P Parameter: Tissue Value: Aerial
  misc_feature: MA Experiment ID: 108585 Result: Up-regulated in Transcription
  misc_feature: MA Experiment 108585 PARAMETER Experiment Name: At_5mM_NaNP_cDNA_P Parameter: Timepoint (hr) Value: 6
  misc_feature: MA Experiment 108585 PARAMETER Experiment Name: At_5mM_NaNP_cDNA_P Parameter: Tissue Value: Aerial
  misc_feature: MA Experiment 108585 PARAMETER Experiment Name: At_5mM_NaNP_cDNA_P Parameter: Treatment Value: null
  misc_feature: MA Experiment ID: 20000087 Result: Up-regulated in Transcription
  misc_feature: MA Experiment 20000087 PARAMETER Experiment Name: At_100uM_ABA_Mutants_cDNA_P Parameter: Plant Line Value: WS
  misc_feature: MA Experiment 20000087 PARAMETER Experiment Name: At_100uM_ABA_Mutants_cDNA_P Parameter: Timepoint (hr) Value: 6
  misc_feature: MA Experiment 20000087 PARAMETER Experiment Name: At_100uM_ABA_Mutants_cDNA_P Parameter: Tissue Value: Aerial
  misc_feature: MA Experiment 20000087 PARAMETER Experiment Name: At_100uM_ABA_Mutants_cDNA_P Parameter: Treatment Value: 100uM ABA vs. No Treatment
  misc_feature: MA Experiment ID: 20000093 Result: Down-regulated in Transcription
  misc_feature: MA Experiment 20000093 PARAMETER Experiment Name: At_42deg_Heat_cDNA_P Parameter: Temperature (deg C) Value: 42 vs. 22
  misc_feature: MA Experiment 20000093 PARAMETER Experiment Name: At_42deg_Heat_cDNA_P Parameter: Timepoint (hr) Value: 0.5
  misc_feature: MA Experiment 20000093 PARAMETER Experiment Name: At_42deg_Heat_cDNA_P Parameter: Tissue Value: Aerial
  misc_feature: MA Experiment ID: 20000111 Result: Down-regulated in Transcription
  misc_feature: MA Experiment 20000111 PARAMETER Experiment Name: At_42deg_Heat_cDNA_P Parameter: Temperature (deg C) Value: 42 vs. 22
  misc_feature: MA Experiment 20000111 PARAMETER Experiment Name: At_42deg_Heat_cDNA_P Parameter: Timepoint (hr) Value: 6
  misc_feature: MA Experiment 20000111 PARAMETER Experiment Name: At_42deg_Heat_cDNA_P Parameter: Tissue Value: Aerial
  misc_feature: MA Experiment ID: 20000112 Result: Down-regulated in Transcription
  misc_feature: MA Experiment 20000112 PARAMETER Experiment Name: At_42deg_Heat_cDNA_P Parameter: Temperature (deg C) Value: 42 vs. 22
  misc_feature: MA Experiment 20000112 PARAMETER Experiment Name: At_42deg_Heat_cDNA_P Parameter: Timepoint (hr) Value: 2
  misc_feature: MA Experiment 20000112 PARAMETER Experiment Name: At_42deg_Heat_cDNA_P Parameter: Tissue Value: Aerial
  misc_feature: MA Experiment ID: 20000113 Result: Down-regulated in Transcription
  misc_feature: MA Experiment 20000113 PARAMETER Experiment Name: At_42deg_Heat_cDNA_P Parameter: Temperature (deg C) Value: 42 vs. 22
  misc_feature: MA Experiment 20000113 PARAMETER Experiment Name: At_42deg_Heat_cDNA_P Parameter: Timepoint (hr) Value: 8
  misc_feature: MA Experiment 20000113 PARAMETER Experiment Name: At_42deg_Heat_cDNA_P Parameter: Tissue Value: Aerial
  misc_feature: MA Experiment ID: 20000144 Result: Down-regulated in Transcription
  misc_feature: MA Experiment 20000144 PARAMETER Experiment Name: At_42deg_Heat_cDNA_P Parameter: Temperature (deg C) Value: 42 vs. 22
  misc_feature: MA Experiment 20000144 PARAMETER Experiment Name: At_42deg_Heat_cDNA_P Parameter: Timepoint (hr) Value: 1
  misc_feature: MA Experiment 20000144 PARAMETER Experiment Name: At_42deg_Heat_cDNA_P Parameter: Tissue Value: Aerial
  misc_feature: MA Experiment ID: 20000171 Result: Down-regulated in Transcription
  misc_feature: MA Experiment 20000171 PARAMETER Experiment Name: At_42deg_Heat_P Parameter: Age (day) Value: 14
  misc_feature: MA Experiment 20000171 PARAMETER Experiment Name: At_42deg_Heat_P Parameter: Organism Value: A. thaliana
  misc_feature: MA Experiment 20000171 PARAMETER Experiment Name: At_42deg_Heat_P Parameter: Plant Line Value: WS
  misc_feature: MA Experiment 20000171 PARAMETER Experiment Name: At_42deg_Heat_P Parameter: Temperature (deg C) Value: 42 vs. 22
  misc_feature: MA Experiment 20000171 PARAMETER Experiment Name: At_42deg_Heat_P Parameter: Timepoint (hr) Value: 1
  misc_feature: MA Experiment 20000171 PARAMETER Experiment Name: At_42deg_Heat_P Parameter: Tissue Value: Aerial
  misc_feature: MA Experiment ID: 20000173 Result: Down-regulated in Transcription
  misc_feature: MA Experiment 20000173 PARAMETER Experiment Name: At_42deg_Heat_P Parameter: Age (day) Value: 14
  misc_feature: MA Experiment 20000173 PARAMETER Experiment Name: At_42deg_Heat_P Parameter: Organism Value: A. thaliana
  misc_feature: MA Experiment 20000173 PARAMETER Experiment Name: At_42deg_Heat_P Parameter: Plant Line Value: WS
  misc_feature: MA Experiment 20000173 PARAMETER Experiment Name: At_42deg_Heat_P Parameter: Temperature (deg C) Value: 42 vs. 22
  misc_feature: MA Experiment 20000173 PARAMETER Experiment Name: At_42deg_Heat_P Parameter: Timepoint (hr) Value: 6
  misc_feature: MA Experiment 20000173 PARAMETER Experiment Name: At_42deg_Heat_P Parameter: Tissue Value: Aerial
  misc_feature: MA Experiment ID: 20000179 Result: Up-regulated in Transcription
  misc_feature: MA Experiment 20000179 PARAMETER Experiment Name: At_Germinating_Seeds_P Parameter: Age (hr) Value: 6 vs. 0
  misc_feature: MA Experiment 20000179 PARAMETER Experiment Name: At_Germinating_Seeds_P Parameter: Tissue Value: Germinating Seeds
  misc_feature: MA Experiment ID: 20000180 Result: Up-regulated in Transcription
  misc_feature: MA Experiment 20000180 PARAMETER Experiment Name: At_Germinating_Seeds_P Parameter: Age (hr) Value: 24 vs. 0
  misc_feature: MA Experiment 20000180 PARAMETER Experiment Name: At_Germinating_Seeds_P Parameter: Tissue Value: Germinating Seeds
  misc_feature: MA Experiment ID: 20001557 Result: Up-regulated in Transcription
  misc_feature: MA Experiment 20001557 PARAMETER Experiment Name: At_Drought_Soil_Dry_P Parameter: Age (day) Value: 27
  misc_feature: MA Experiment 20001557 PARAMETER Experiment Name: At_Drought_Soil_Dry_P Parameter: Organism Value: A. thaliana
  misc_feature: MA Experiment 20001557 PARAMETER Experiment Name: At_Drought_Soil_Dry_P Parameter: Plant Line Value: WS
  misc_feature: MA Experiment 20001557 PARAMETER Experiment Name: At_Drought_Soil_Dry_P Parameter: Post Timepoint (hr) Value: 3
  misc_feature: MA Experiment 20001557 PARAMETER Experiment Name: At_Drought_Soil_Dry_P Parameter: Post-Treatment Value: Re-Water vs. No Drought
  misc_feature: MA Experiment 20001557 PARAMETER Experiment Name: At_Drought_Soil_Dry_P Parameter: Timepoint (day) Value: 13
  misc_feature: MA Experiment 20001557 PARAMETER Experiment Name: At_Drought_Soil_Dry_P Parameter: Treatment Value: Drought vs. No Drought
cacgcgtccgagcatttgtctctgaaatcccagatccgaaaaccaacaatggcgtcagagaacaacggatccagatccgattccgaatccatcaccgctcccaaagctgattccaccgtcgttgaaccgaggaagatagctctgatcaccggaatcaccggccaggacggatcatacctgacggagttccttctcggaaaaggctacgaagttcatggtctgatccgtcgatcatcgaatttcaacacccagcgaatcaaccatatctacatcgatccacacaatgtcaacaaagctctgatgaaactccactacgccgatctcaccgacgcttcctctctccgtcgttggatcgatgtgatcaaacctgacgaagtttataacctagctgctcaatctcacgtcgctgtctccttcgagatccctgattacacagccgatgtagtcgcaaccggtgctctccgtctccttgaagccgtcagatctcacaccatcgacagtggccgtaccgtcaagtattaccaagccggatcttcggagatgtttggatcaactcctcctccacaatcggagacgacgccgtttcaccccagatctccttacgcagcttccaaatgcgctgctcattggtacacagtgaattacagagaggcgtacggtctcttcgcttgtaacggaatcttgttcaatcacgagtcacctcgccgtggtgagaatttcgtgacgaggaagatcacaagagcattgggaaggatcaaggttggtttgcagacgaagctattccttgggaatttgcaagcgtcaagagattggggatttgcaggagattatgtggaagcaatgtggttgatgttgcagcaagagaagccagatgattacgttgtggcaacagaggaaggacacacagtggaagagtttcttgatgtgtcatttgggtatttgggactcaattggaaagattatgttgagattgaccagaggtactttaggcctgctgaagtagataaccttcaaggagatgcaagcaaggcaaaggaagtgttggggtggaaaccacaagtagggtttgagaagcttgtgaagatgatggttgatgaagatcttgagcttgctaagagggagaaagtgcttgttgatgctggatacatggatgctaagcagcaaccttgatttgatcaattatacaaagatggagtttcttacatttatctgcttttatagagttttaaatttcgtttttttttctttctctttttgttgctttggtggttgtttgttgtctttttatgttttagtttctttgttgctttttaagttatctaaattgtttccctccaatgagttgaggatgaaagcgcagtgaattttgaatgaaggagcaaagaatc

SEQ ID NO: 108598 - protein, 389 aa, Arabidopsis thaliana
  peptide (1)..(389): Ceres Seq. ID no. 13667889
  misc_feature (47)..(371): Pfam Name: NAD dependent epimerase/dehydratase family Pfam Description: NAD dependent epimerase/dehydratase family
  misc_feature (17)..(389): Homolog of NCBI NO: 1764100 NR Description: GDP-D-mannose-4,6-dehydratase [Arabidopsis
  misc_feature (17)..(389): Homolog of NCBI NO: 28373938 NR Description: Chain A, Crystal Structure Of The Gdp-Mannose 4,6-
  misc_feature (17)..(389): Homolog of NCBI NO: 21536808 NR Description: GDP-D-mannose-4,6-dehydratase MUR1 [Arabidopsis
  misc_feature (17)..(389): Homolog of NCBI NO: 15230418 NR Description: GDP-D-mannose-4,6-dehydratase (MUR1) [Arabidopsis
  misc_feature (37)..(389): Homolog of NCBI NO: 15239334 NR Description: GDP-D-mannose 4,6-dehydratase, putative
  misc_feature (23)..(389): Homolog of NCBI NO: 7939611 NR Description: root cap-specific protein [Zea mays]
  misc_feature (44)..(368): Homolog of NCBI NO: 22298176 NR Description: GDP-mannose 4,6-dehydratase [Thermosynechococcus
  misc_feature (45)..(369): Homolog of NCBI NO: 4097914 NR Description: putative GDP-D-mannose dehydratase [Anabaena sp.
  misc_feature (45)..(368): Homolog of NCBI NO: 16329177 NR Description: GDP-D-mannose dehydratase [Synechocystis sp. PCC
  misc_feature (44)..(369): Homolog of NCBI NO: 23128163 NR Description: hypothetical protein [Nostoc punctiforme]
HASEHLSLKSQIRKPTMASENNGSRSDSESITAPKADSTVVEPRKIALITGITGQDGSYLTEFLLGKGYEVHGLIRRSSNFNTQRINHIYIDPHNVNKALMKLHYADLTDASSLRRWIDVIKPDEVYNLAAQSHVAVSFEIPDYTADVVATGALRLLEAVRSHTIDSGRTVKYYQAGSSEMFGSTPPPQSETTPFHPRSPYAASKCAAHWYTVNYREAYGLFACNGILFNHESPRRGENFVTRKITRALGRIKVGLQTKLFLGNLQASRDWGFAGDYVEAMWLMLQQEKPDDYVVATEEGHTVEEFLDVSFGYLGLNWKDYVEIDQRYFRPAEVDNLQGDASKAKEVLGWKPQVGFEKLVKMMVDEDLELAKREKVLVDAGYMDAKQQP

SEQ ID NO: 108599 - protein, 373 aa, Arabidopsis thaliana
  peptide (1)..(373): Ceres Seq. ID no. 13667890
  misc_feature (31)..(355): Pfam Name: NAD dependent epimerase/dehydratase family Pfam Description: NAD dependent epimerase/dehydratase family
  misc_feature (1)..(373): Homolog of NCBI NO: 1764100 NR Description: GDP-D-mannose-4,6-dehydratase [Arabidopsis
  misc_feature (1)..(373): Homolog of NCBI NO: 28373938 NR Description: Chain A, Crystal Structure Of The Gdp-Mannose 4,6-
  misc_feature (1)..(373): Homolog of NCBI NO: 21536808 NR Description: GDP-D-mannose-4,6-dehydratase MUR1 [Arabidopsis
  misc_feature (1)..(373): Homolog of NCBI NO: 15230418 NR Description: GDP-D-mannose-4,6-dehydratase (MUR1) [Arabidopsis
  misc_feature (21)..(373): Homolog of NCBI NO: 15239334 NR Description: GDP-D-mannose 4,6-dehydratase, putative
  misc_feature (7)..(373): Homolog of NCBI NO: 7939611 NR Description: root cap-specific protein [Zea mays]
  misc_feature (28)..(352): Homolog of NCBI NO: 22298176 NR Description: GDP-mannose 4,6-dehydratase [Thermosynechococcus
  misc_feature (29)..(353): Homolog of NCBI NO: 4097914 NR Description: putative GDP-D-mannose dehydratase [Anabaena sp.
  misc_feature (29)..(352): Homolog of NCBI NO: 16329177 NR Description: GDP-D-mannose dehydratase [Synechocystis sp. PCC
  misc_feature (28)..(353): Homolog of NCBI NO: 23128163 NR Description: hypothetical protein [Nostoc punctiforme]
MASENNGSRSDSESITAPKADSTVVEPRKIALITGITGQDGSYLTEFLLGKGYEVHGLIRRSSNFNTQRINHIYIDPHNVNKALMKLHYADLTDASSLRRWIDVIKPDEVYNLAAQSHVAVSFEIPDYTADVVATGALRLLEAVRSHTIDSGRTVKYYQAGSSEMFGSTPPPQSETTPFHPRSPYAASKCAAHWYTVNYREAYGLFACNGILFNHESPRRGENFVTRKITRALGRIKVGLQTKLFLGNLQASRDWGFAGDYVEAMWLMLQQEKPDDYVVATEEGHTVEEFLDVSFGYLGLNWKDYVEIDQRYFRPAEVDNLQGDASKAKEVLGWKPQVGFEKLVKMMVDEDLELAKREKVLVDAGYMDAKQQP

SEQ ID NO: 108600 - protein, 289 aa, Arabidopsis thaliana; identical to SEQ ID NO: 28616
  peptide (1)..(289): Ceres Seq. ID no. 13667891
  misc_feature (1)..(271): Pfam Name: NAD dependent epimerase/dehydratase family Pfam Description: NAD dependent epimerase/dehydratase family
  misc_feature (1)..(289): Homolog of NCBI NO: 1764100 NR Description: GDP-D-mannose-4,6-dehydratase [Arabidopsis
  misc_feature (1)..(289): Homolog of NCBI NO: 28373938 NR Description: Chain A, Crystal Structure Of The Gdp-Mannose 4,6-
  misc_feature (1)..(289): Homolog of NCBI NO: 21536808 NR Description: GDP-D-mannose-4,6-dehydratase MUR1 [Arabidopsis
  misc_feature (1)..(289): Homolog of NCBI NO: 15230418 NR Description: GDP-D-mannose-4,6-dehydratase (MUR1) [Arabidopsis
  misc_feature (1)..(289): Homolog of NCBI NO: 15239334 NR Description: GDP-D-mannose 4,6-dehydratase, putative
  misc_feature (1)..(289): Homolog of NCBI NO: 7939611 NR Description: root cap-specific protein [Zea mays]
  misc_feature (1)..(268): Homolog of NCBI NO: 22298176 NR Description: GDP-mannose 4,6-dehydratase [Thermosynechococcus
  misc_feature (1)..(269): Homolog of NCBI NO: 4097914 NR Description: putative GDP-D-mannose dehydratase [Anabaena sp.
  misc_feature (1)..(268): Homolog of NCBI NO: 16329177 NR Description: GDP-D-mannose dehydratase [Synechocystis sp. PCC
  misc_feature (1)..(269): Homolog of NCBI NO: 23128163 NR Description: hypothetical protein [Nostoc punctiforme]

SEQ ID NO: 108601 - DNA, 1538 bp, Arabidopsis thaliana
  misc_feature (1)..(1538): Ceres Seq. ID no. 13667894
  misc_feature: MA Experiment ID: 20000173 Result: Down-regulated in Transcription
  misc_feature: MA Experiment 20000173 PARAMETER Experiment Name: At_42deg_Heat_P Parameter: Age (day) Value: 14
  misc_feature: MA Experiment 20000173 PARAMETER Experiment Name: At_42deg_Heat_P Parameter: Organism Value: A. thaliana
  misc_feature: MA Experiment 20000173 PARAMETER Experiment Name: At_42deg_Heat_P Parameter: Plant Line Value: WS
  misc_feature: MA Experiment 20000173 PARAMETER Experiment Name: At_42deg_Heat_P Parameter: Temperature (deg C) Value: 42 vs. 22
  misc_feature: MA Experiment 20000173 PARAMETER Experiment Name: At_42deg_Heat_P Parameter: Timepoint (hr) Value: 6
  misc_feature: MA Experiment 20000173 PARAMETER Experiment Name: At_42deg_Heat_P Parameter: Tissue Value: Aerial
  misc_feature: MA Experiment ID: 20000179 Result: Down-regulated in Transcription
  misc_feature: MA Experiment 20000179 PARAMETER Experiment Name: At_Germinating_Seeds_P Parameter: Age (hr) Value: 6 vs. 0
  misc_feature: MA Experiment 20000179 PARAMETER Experiment Name: At_Germinating_Seeds_P Parameter: Tissue Value: Germinating Seeds
  misc_feature: MA Experiment ID: 20000184 Result: Down-regulated in Transcription
  misc_feature: MA Experiment 20000184 PARAMETER Experiment Name: At_Shoots__P Parameter: Age (day) Value: 7
  misc_feature: MA Experiment 20000184 PARAMETER Experiment Name: At_Shoots__P Parameter: Tissue Value: Shoots vs. Whole Plant
  misc_feature: MA Experiment ID: 20000213 Result: Down-regulated in Transcription
  misc_feature: MA Experiment 20000213 PARAMETER Experiment Name: At_4deg_Cold_P Parameter: Timepoint (hr) Value: 2
  misc_feature: MA Experiment ID: 20000234 Result: Down-regulated in Transcription
  misc_feature: MA Experiment 20000234 PARAMETER Experiment Name: At_Siliques_P Parameter: Age (day) Value: 21
  misc_feature: MA Experiment 20000234 PARAMETER Experiment Name: At_Siliques_P Parameter: Organism Value: A. thaliana
  misc_feature: MA Experiment 20000234 PARAMETER Experiment Name: At_Siliques_P Parameter: Plant Line Value: WS
  misc_feature: MA Experiment 20000234 PARAMETER Experiment Name: At_Siliques_P Parameter: Tissue Value: Less Than 5mm Siliques vs. Whole Plant
  misc_feature: MA Experiment ID: 20000235 Result: Down-regulated in Transcription
  misc_feature: MA Experiment 20000235 PARAMETER Experiment Name: At_Siliques_P Parameter: Age (day) Value: 21
  misc_feature: MA Experiment 20000235 PARAMETER Experiment Name: At_Siliques_P Parameter: Organism Value: A. thaliana
  misc_feature: MA Experiment 20000235 PARAMETER Experiment Name: At_Siliques_P Parameter: Plant Line Value: WS
  misc_feature: MA Experiment 20000235 PARAMETER Experiment Name: At_Siliques_P Parameter: Tissue Value: 5-10mm Siliques vs. Whole Plant
  misc_feature: MA Experiment ID: 20000264 Result: Down-regulated in Transcription
  misc_feature: MA Experiment 20000264 PARAMETER Experiment Name: At_Open_Flower_P Parameter: Age (day) Value: 21
  misc_feature: MA Experiment 20000264 PARAMETER Experiment Name: At_Open_Flower_P Parameter: Plant Line Value: WS
  misc_feature: MA Experiment 20000264 PARAMETER Experiment Name: At_Open_Flower_P Parameter: Tissue Value: Open Flower vs. Whole Plant
  misc_feature: MA Experiment ID: 20000265 Result: Down-regulated in Transcription
  misc_feature: MA Experiment 20000265 PARAMETER Experiment Name: At_Open_Flower_P Parameter: Age (day) Value: 21
  misc_feature: MA Experiment 20000265 PARAMETER Experiment Name: At_Open_Flower_P Parameter: Plant Line Value: WS
  misc_feature: MA Experiment 20000265 PARAMETER Experiment Name: At_Open_Flower_P Parameter: Tissue Value: Closed Flower vs. Whole Plant
  misc_feature: MA Experiment ID: 20000286 Result: Down-regulated in Transcription
  misc_feature: MA Experiment 20000286 PARAMETER Experiment Name: At_Open_Flower_P Parameter: Age (day) Value: 21
  misc_feature: MA Experiment 20000286 PARAMETER Experiment Name: At_Open_Flower_P Parameter: Plant Line Value: WS
  misc_feature: MA Experiment 20000286 PARAMETER Experiment Name: At_Open_Flower_P Parameter: Tissue Value: Half Open vs. Whole Plant
  misc_feature: MA Experiment ID: 20000794 Result: Down-regulated in Transcription
  misc_feature: MA Experiment 20000794 PARAMETER Experiment Name: At_Petals_P Parameter: Age (day) Value: 23-25 days
  misc_feature: MA Experiment 20000794 PARAMETER Experiment Name: At_Petals_P Parameter: Plant Line Value: WS
  misc_feature: MA Experiment 20000794 PARAMETER Experiment Name: At_Petals_P Parameter: Tissue Value: Petals vs. Whole plant
  misc_feature: MA Experiment ID: 20001247 Result: Up-regulated in Transcription
  misc_feature: MA Experiment 20001247 PARAMETER Experiment Name: At_Far-red-induction_P Parameter: Age (day) Value: 7
  misc_feature: MA Experiment 20001247 PARAMETER Experiment Name: At_Far-red-induction_P Parameter: Light Value: Far-red vs. White
  misc_feature: MA Experiment 20001247 PARAMETER Experiment Name: At_Far-red-induction_P Parameter: Organism Value: A. thaliana
  misc_feature: MA Experiment 20001247 PARAMETER Experiment Name: At_Far-red-induction_P Parameter: Plant Line Value: Columbia
  misc_feature: MA Experiment 20001247 PARAMETER Experiment Name: At_Far-red-induction_P Parameter: Timepoint (hr) Value: 1
  misc_feature: MA Experiment 20001247 PARAMETER Experiment Name: At_Far-red-induction_P Parameter: Tissue Value: Whole Plant
  misc_feature: MA Experiment ID: 20001248 Result: Up-regulated in Transcription
  misc_feature: MA Experiment 20001248 PARAMETER Experiment Name: At_Far-red-induction_P Parameter: Age (day) Value: 7
  misc_feature: MA Experiment 20001248 PARAMETER Experiment Name: At_Far-red-induction_P Parameter: Light Value: Far-red vs. White
  misc_feature: MA Experiment 20001248 PARAMETER Experiment Name: At_Far-red-induction_P Parameter: Organism Value: A. thaliana
  misc_feature: MA Experiment 20001248 PARAMETER Experiment Name: At_Far-red-induction_P Parameter: Plant Line Value: Columbia
  misc_feature: MA Experiment 20001248 PARAMETER Experiment Name: At_Far-red-induction_P Parameter: Timepoint (hr) Value: 4
  misc_feature: MA Experiment 20001248 PARAMETER Experiment Name: At_Far-red-induction_P Parameter: Tissue Value: Whole Plant
  misc_feature: MA Experiment ID: 20001450 Result: Up-regulated in Transcription
  misc_feature: MA Experiment 20001450 PARAMETER Experiment Name: At_Far-red-induction_P Parameter: Age (day) Value: 7
  misc_feature: MA Experiment 20001450 PARAMETER Experiment Name: At_Far-red-induction_P Parameter: Light Value: Far-red vs. White
  misc_feature: MA Experiment 20001450 PARAMETER Experiment Name: At_Far-red-induction_P Parameter: Organism Value: A. thaliana
  misc_feature: MA Experiment 20001450 PARAMETER Experiment Name: At_Far-red-induction_P Parameter: Plant Line Value: Columbia
  misc_feature: MA Experiment 20001450 PARAMETER Experiment Name: At_Far-red-induction_P Parameter: Timepoint (hr) Value: 8
  misc_feature: MA Experiment 20001450 PARAMETER Experiment Name: At_Far-red-induction_P Parameter: Tissue Value: Whole Plant
  misc_feature: MA Experiment ID: 20001451 Result: Up-regulated in Transcription
  misc_feature: MA Experiment 20001451 PARAMETER Experiment Name: At_Far-red-induction_P Parameter: Age (day) Value: 7
  misc_feature: MA Experiment 20001451 PARAMETER Experiment Name: At_Far-red-induction_P Parameter: Light Value: Far-red vs. White
  misc_feature: MA Experiment 20001451 PARAMETER Experiment Name: At_Far-red-induction_P Parameter: Organism Value: A. thaliana
  misc_feature: MA Experiment 20001451 PARAMETER Experiment Name: At_Far-red-induction_P Parameter: Plant Line Value: Columbia
  misc_feature: MA Experiment 20001451 PARAMETER Experiment Name: At_Far-red-induction_P Parameter: Timepoint (hr) Value: 24
  misc_feature: MA Experiment 20001451 PARAMETER Experiment Name: At_Far-red-induction_P Parameter: Tissue Value: Whole Plant
  misc_feature: MA Experiment ID: 20001558 Result: Down-regulated in Transcription
  misc_feature: MA Experiment 20001558 PARAMETER Experiment Name: At_Drought_Soil_Dry_P Parameter: Age (day) Value: 27
  misc_feature: MA Experiment 20001558 PARAMETER Experiment Name: At_Drought_Soil_Dry_P Parameter: Organism Value: A. thaliana
  misc_feature: MA Experiment 20001558 PARAMETER Experiment Name: At_Drought_Soil_Dry_P Parameter: Plant Line Value: WS
  misc_feature: MA Experiment 20001558 PARAMETER Experiment Name: At_Drought_Soil_Dry_P Parameter: Post Timepoint (hr) Value: 6
  misc_feature: MA Experiment 20001558 PARAMETER Experiment Name: At_Drought_Soil_Dry_P Parameter: Post-Treatment Value: Re-Water vs. No Drought
  misc_feature: MA Experiment 20001558 PARAMETER Experiment Name: At_Drought_Soil_Dry_P Parameter: Timepoint (day) Value: 13
  misc_feature: MA Experiment 20001558 PARAMETER Experiment Name: At_Drought_Soil_Dry_P Parameter: Treatment Value: Drought vs. No Drought
  misc_feature: MA Experiment ID: 20001560 Result: Down-regulated in Transcription
  misc_feature: MA Experiment 20001560 PARAMETER Experiment Name: At_Drought_Soil_Dry_P Parameter: Age (day) Value: 28
  misc_feature: MA Experiment 20001560 PARAMETER Experiment Name: At_Drought_Soil_Dry_P Parameter: Organism Value: A. thaliana
  misc_feature: MA Experiment 20001560 PARAMETER Experiment Name: At_Drought_Soil_Dry_P Parameter: Plant Line Value: WS
  misc_feature: MA Experiment 20001560 PARAMETER Experiment Name: At_Drought_Soil_Dry_P Parameter: Post Timepoint (hr) Value: None
  misc_feature: MA Experiment 20001560 PARAMETER Experiment Name: At_Drought_Soil_Dry_P Parameter: Post-Treatment Value: None
  misc_feature: MA Experiment 20001560 PARAMETER Experiment Name: At_Drought_Soil_Dry_P Parameter: Timepoint (day) Value: 14
  misc_feature: MA Experiment 20001560 PARAMETER Experiment Name: At_Drought_Soil_Dry_P Parameter: Treatment Value: Drought vs. No Drought
  misc_feature: MA Experiment ID: 20001757 Result: Up-regulated in Transcription
  misc_feature: MA Experiment 20001757 PARAMETER Experiment Name: At_50mM_NH4NO3_L-to-H_P Parameter: Timepoint (hr) Value: 6
  misc_feature: MA Experiment 20001757 PARAMETER Experiment Name: At_50mM_NH4NO3_L-to-H_P Parameter: Tissue Value: Leaf
  misc_feature: MA Experiment 20001757 PARAMETER Experiment Name: At_50mM_NH4NO3_L-to-H_P Parameter: Treatment Value: 50mM NH4NO3 vs 100mM Mannitol
  misc_feature: MA Experiment ID: 20001904 Result: Down-regulated in Transcription
  misc_feature: MA Experiment 20001904 PARAMETER Experiment Name: At_Drought_Reproduction_P Parameter: Age (day) Value: 37
  misc_feature: MA Experiment 20001904 PARAMETER Experiment Name: At_Drought_Reproduction_P Parameter: Organism Value: A. thaliana
  misc_feature: MA Experiment 20001904 PARAMETER Experiment Name: At_Drought_Reproduction_P Parameter: Plant Line Value: WS
  misc_feature: MA Experiment 20001904 PARAMETER Experiment Name: At_Drought_Reproduction_P Parameter: Timepoint (day) Value: 7
  misc_feature: MA Experiment 20001904 PARAMETER Experiment Name: At_Drought_Reproduction_P Parameter: Tissue Value: Rosettes
  misc_feature: MA Experiment 20001904 PARAMETER Experiment Name: At_Drought_Reproduction_P Parameter: Treatment Value: Drought vs. No Drought
  misc_feature: MA Experiment ID: 20001905 Result: Down-regulated in Transcription
  misc_feature: MA Experiment 20001905 PARAMETER Experiment Name: At_Drought_Reproduction_P Parameter: Age (day) Value: 40
  misc_feature: MA Experiment 20001905 PARAMETER Experiment Name: At_Drought_Reproduction_P Parameter: Organism Value: A. thaliana
  misc_feature: MA Experiment 20001905 PARAMETER Experiment Name: At_Drought_Reproduction_P Parameter: Plant Line Value: WS
  misc_feature: MA Experiment 20001905 PARAMETER Experiment Name: At_Drought_Reproduction_P Parameter: Timepoint (day) Value: 10
  misc_feature: MA Experiment 20001905 PARAMETER Experiment Name: At_Drought_Reproduction_P Parameter: Tissue Value: Rosettes
  misc_feature: MA Experiment 20001905 PARAMETER Experiment Name: At_Drought_Reproduction_P Parameter: Treatment Value: Drought vs. No Drought
tcgacccacgctccggcgttctgatcaaaactccagtgaaagttcaaagtacacagagagaaacaaaaaaagaagaagaagaagttgaagaagaagaagccatgaatgctttagcagcaacaaacagaaacttcaagttagctgctaggcttcttggtctggattctaagctcgagaaaagtcttctcatccccttccgagaaatcaaggtggaatgtaccataccgaaagacgatggtacactagcatcattcgttgggttcagagttcaacacgacaatgcaagaggtcccatgaaaggtggaatcagatatcatcctgaggttgatccggatgaagtgaacgcattggctcagctcatgacatggaaaacagcagtggctaagattccttacggaggagctaaaggagggattggttgtgatcctagcaagctcagtatctccgagctcgagcggttgactcgagttttcactcagaagattcatgatctcattgggattcatactgatgttccagctccagatatgggcactggtcctcagacaatggcttggattcttgatgaatactctaagtttcatggatactcgcctgcagttgtgactggaaaacccattgatcttggtggatcgctagggagagacgcggctactggaagaggagtgatgtttggtaccgaagctttgcttaacgagcacggaaagaccatatcagggcagcgttttgtcatccagggatttggtaatgtgggttcttgggcggcaaagctgataagtgaaaagggtgggaagattgttgccgtgagtgacattaccggagcaatcaagaacaaggatggtatcgatatcccggccttgctcaagcatactaaagaacacagaggtgtcaaagggtttgatggtgcagatccgatcgatccaaactccatactggttgaggattgtgatatcctcgtccctgcagcacttggtggtgtcatcaacagggagaatgcgaatgagattaaagcaaagttcatcatagaagcagctaatcatccaactgatccggacgcggatgagatcctaagtaagaaaggtgtggttattctcccggacatatatgcaaactctggaggagtcactgtaagttacttcgaatgggttcagaacattcaaggctttatgtgggaggaagagaaggtgaacgatgagctaaagacttacatgactcgctctttcaaggacttgaaagagatgtgcaaaactcactcttgcgatctccggatgggagctttcacactcggtgttaatcgtgtggctcaagctaccattctcagaggctggggagcttaaagattatctaatctcttatgcaatctctttagcagctcctgaataagaattgagccaaactttaatctactttttgttttatcctcctactttggcttagaggtcatcctgagttaacagatatgtgtttacaagtactagaagacgcttctgtatgtaataaaaccttggactctaatagttaatgagcttttttactct

SEQ ID NO: 108602 - protein, 444 aa, Arabidopsis thaliana
  peptide (1)..(444): Ceres Seq. ID no. 13667895
  misc_feature (209)..(441): Pfam Name: Glutamate/Leucine/Phenylalanine/Valine dehydrogenase Pfam Description: Glutamate/Leucine/Phenylalanine/Valine
  misc_feature (34)..(444): Homolog of NCBI NO: 15238762 NR Description: glutamate dehydrogenase (EC 1.4.1.-) 1 [Arabidopsis thaliana] >gi|12229807|sp|Q43314|DHE1_ARATH
  misc_feature (34)..(444): Homolog of NCBI NO: 15228667 NR Description: glutamate dehydrogenase -related [Arabidopsis >gi|12229816|sp|Q9S7A0|DHE3_ARATH Probable glutamate
  misc_feature (34)..(444): Homolog of NCBI NO: 21314959 NR Description: NADH-glutamate dehydrogenase [Lycopersicon
  misc_feature (34)..(444): Homolog of NCBI NO: 20873461 NR Description: glutamate dehydrogenase [Nicotiana tabacum]
  misc_feature (34)..(444): Homolog of NCBI NO: 12643806 NR Description: Glutamate dehydrogenase B (GDH B)
  misc_feature (34)..(444): Homolog of NCBI NO: 12229803 NR Description: Glutamate dehydrogenase (GDH) (Legdh1)
  misc_feature (34)..(444): Homolog of NCBI NO: 7431768 NR Description: glutamate dehydrogenase (EC 1.4.1.-) B - tobacco >gi|4688955|emb|CAA69601.2| NADH glutamate dehydrogenase
  misc_feature (34)..(444): Homolog of NCBI NO: 28269441 NR Description: glutamate dehydrogenase [Oryza sativa (japonica
  misc_feature (34)..(444): Homolog of NCBI NO: 7431775 NR Description: glutamate dehydrogenase (EC 1.4.1.2) - maize
  misc_feature (34)..(444): Homolog of NCBI NO: 4150965 NR Description: glutamate dehydrogenase [Asparagus officinalis]
DPRSGVLIKTPVKVQSTQRETKKEEEEVEEEEAMNALAATNRNFKLAARLLGLDSKLEKSLLIPFREIKVECTIPKDDGTLASFVGFRVQHDNARGPMKGGIRYHPEVDPDEVNALAQLMTWKTAVAKIPYGGAKGGIGCDPSKLSISELERLTRVFTQKIHDLIGIHTDVPAPDMGTGPQTMAWILDEYSKFHGYSPAVVTGKPIDLGGSLGRDAATGRGVMFGTEALLNEHGKTISGQRFVIQGFGNVGSWAAKLISEKGGKIVAVSDITGAIKNKDGIDIPALLKHTKEHRGVKGFDGADPIDPNSILVEDCDILVPAALGGVINRENANEIKAKFIIEAANHPTDPDADEILSKKGVVILPDIYANSGGVTVSYFEWVQNIQGFMWEEEKVNDELKTYMTRSFKDLKEMCKTHSCDLRMGAFTLGVNRVAQATILRGWGA

SEQ ID NO: 108603 - protein, 411 aa, Arabidopsis thaliana; identical to SEQ ID NO: 49352
  peptide (1)..(411): Ceres Seq. ID no. 13667896
  misc_feature (176)..(408): Pfam Name: Glutamate/Leucine/Phenylalanine/Valine dehydrogenase Pfam Description: Glutamate/Leucine/Phenylalanine/Valine
  misc_feature (1)..(411): Homolog of NCBI NO: 15238762 NR Description: glutamate dehydrogenase (EC 1.4.1.-) 1 [Arabidopsis thaliana] >gi|12229807|sp|Q43314|DHE1_ARATH
  misc_feature (1)..(411): Homolog of NCBI NO: 15228667 NR Description: glutamate dehydrogenase -related [Arabidopsis >gi|12229816|sp|Q9S7A0|DHE3_ARATH Probable glutamate
  misc_feature (1)..(411): Homolog of NCBI NO: 21314959 NR Description: NADH-glutamate dehydrogenase [Lycopersicon
  misc_feature (1)..(411): Homolog of NCBI NO: 20873461 NR Description: glutamate dehydrogenase [Nicotiana tabacum]
  misc_feature (1)..(411): Homolog of NCBI NO: 12643806 NR Description: Glutamate dehydrogenase B (GDH B)
  misc_feature (1)..(411): Homolog of NCBI NO: 12229803 NR Description: Glutamate dehydrogenase (GDH) (Legdh1)
  misc_feature (1)..(411): Homolog of NCBI NO: 7431768 NR Description: glutamate dehydrogenase (EC 1.4.1.-) B - tobacco >gi|4688955|emb|CAA69601.2| NADH glutamate dehydrogenase
  misc_feature (1)..(411): Homolog of NCBI NO: 28269441 NR Description: glutamate dehydrogenase [Oryza sativa (japonica
  misc_feature (1)..(411): Homolog of NCBI NO: 7431775 NR Description: glutamate dehydrogenase (EC 1.4.1.2) - maize
  misc_feature (1)..(411): Homolog of NCBI NO: 4150965 NR Description: glutamate dehydrogenase [Asparagus officinalis]

SEQ ID NO: 108604 - protein, 347 aa, Arabidopsis thaliana; identical to SEQ ID NO: 49353
  peptide (1)..(347): Ceres Seq. ID no. 13667897
  misc_feature (112)..(344): Pfam Name: Glutamate/Leucine/Phenylalanine/Valine dehydrogenase Pfam Description: Glutamate/Leucine/Phenylalanine/Valine
  misc_feature (1)..(347): Homolog of NCBI NO: 15238762 NR Description: glutamate dehydrogenase (EC 1.4.1.-) 1 [Arabidopsis thaliana] >gi|12229807|sp|Q43314|DHE1_ARATH
  misc_feature (1)..(347): Homolog of NCBI NO: 15228667 NR Description: glutamate dehydrogenase -related [Arabidopsis >gi|12229816|sp|Q9S7A0|DHE3_ARATH Probable glutamate
  misc_feature (1)..(347): Homolog of NCBI NO: 21314959 NR Description: NADH-glutamate dehydrogenase [Lycopersicon
  misc_feature (1)..(347): Homolog of NCBI NO: 20873461 NR Description: glutamate dehydrogenase [Nicotiana tabacum]
  misc_feature (1)..(347): Homolog of NCBI NO: 12643806 NR Description: Glutamate dehydrogenase B (GDH B)
  misc_feature (1)..(347): Homolog of NCBI NO: 12229803 NR Description: Glutamate dehydrogenase (GDH) (Legdh1)
  misc_feature (1)..(347): Homolog of NCBI NO: 7431768 NR Description: glutamate dehydrogenase (EC 1.4.1.-) B - tobacco >gi|4688955|emb|CAA69601.2| NADH glutamate dehydrogenase
  misc_feature (1)..(347): Homolog of NCBI NO: 28269441 NR Description: glutamate dehydrogenase [Oryza sativa (japonica
  misc_feature (1)..(347): Homolog of NCBI NO: 7431775 NR Description: glutamate dehydrogenase (EC 1.4.1.2) - maize
  misc_feature (1)..(347): Homolog of NCBI NO: 4150965 NR Description: glutamate dehydrogenase [Asparagus officinalis]

SEQ ID NO: 108605 - DNA, 1415 bp, Arabidopsis thaliana
  misc_feature (1)..(1415): Ceres Seq. ID no. 13667905
  misc_feature: MA Experiment ID: 20000184 Result: Up-regulated in Transcription
  misc_feature: MA Experiment 20000184 PARAMETER Experiment Name: At_Shoots__P Parameter: Age (day) Value: 7
  misc_feature: MA Experiment 20000184 PARAMETER Experiment Name: At_Shoots__P Parameter: Tissue Value: Shoots vs. Whole Plant
  misc_feature: MA Experiment ID: 20000265 Result: Up-regulated in Transcription
  misc_feature: MA Experiment 20000265 PARAMETER Experiment Name: At_Open_Flower_P Parameter: Age (day) Value: 21
  misc_feature: MA Experiment 20000265 PARAMETER Experiment Name: At_Open_Flower_P Parameter: Plant Line Value: WS
  misc_feature: MA Experiment 20000265 PARAMETER Experiment Name: At_Open_Flower_P Parameter: Tissue Value: Closed Flower vs. Whole Plant
  misc_feature: MA Experiment ID: 20000438 Result: Up-regulated in Transcription
  misc_feature: MA Experiment 20000438 PARAMETER Experiment Name: At_Shoots__P Parameter: Age (day) Value: 14
  misc_feature: MA Experiment 20000438 PARAMETER Experiment Name: At_Shoots__P Parameter: Tissue Value: Shoots vs. Whole Plant
  misc_feature: MA Experiment ID: 20001247 Result: Up-regulated in Transcription
  misc_feature: MA Experiment 20001247 PARAMETER Experiment Name: At_Far-red-induction_P Parameter: Age (day) Value: 7
  misc_feature: MA Experiment 20001247 PARAMETER Experiment Name: At_Far-red-induction_P Parameter: Light Value: Far-red vs. White
  misc_feature: MA Experiment 20001247 PARAMETER Experiment Name: At_Far-red-induction_P Parameter: Organism Value: A. thaliana
  misc_feature: MA Experiment 20001247 PARAMETER Experiment Name: At_Far-red-induction_P Parameter: Plant Line Value: Columbia
  misc_feature: MA Experiment 20001247 PARAMETER Experiment Name: At_Far-red-induction_P Parameter: Timepoint (hr) Value: 1
  misc_feature: MA Experiment 20001247 PARAMETER Experiment Name: At_Far-red-induction_P Parameter: Tissue Value: Whole Plant
  misc_feature: MA Experiment ID: 20001450 Result: Up-regulated in Transcription
  misc_feature: MA Experiment 20001450 PARAMETER Experiment Name: At_Far-red-induction_P Parameter: Age (day) Value: 7
  misc_feature: MA Experiment 20001450 PARAMETER Experiment Name: At_Far-red-induction_P Parameter: Light Value: Far-red vs. White
  misc_feature: MA Experiment 20001450 PARAMETER Experiment Name: At_Far-red-induction_P Parameter: Organism Value: A. thaliana
  misc_feature: MA Experiment 20001450 PARAMETER Experiment Name: At_Far-red-induction_P Parameter: Plant Line Value: Columbia
  misc_feature: MA Experiment 20001450 PARAMETER Experiment Name: At_Far-red-induction_P Parameter: Timepoint (hr) Value: 8
  misc_feature: MA Experiment 20001450 PARAMETER Experiment Name: At_Far-red-induction_P Parameter: Tissue Value: Whole Plant
gaattccgtgatatattgtgagaagattgcagaagcgtgtccaacttggttccctctctctctgaaattactcaatcatggggatttgcttgagtgctcaggtcaaagctgagagctcaggagcgagtacgaagtatgacgccaaagatataggaagtcttgggagcaaggcttcgtctgtgtctgtaagaccaagccctcgaactgagggtgagatcttacagtctccaaatctcaagagttttagctttgctgagcttaaatcagcaaccaggaattttagaccagacagtgtgcttggtgaaggtggattcggttgtgttttcaaaggatggattgatgagaagtctctcactgcctcaagaccaggcacgggtttggttattgccgtcaaaaagcttaaccaagatggttggcaaggtcaccaggagtggctggctgaagtgaattaccttggtcagttttctcaccgtcaccttgtgaagctgattggttattgcctagaggatgagcaccgtcttcttgtttacgagttcatgcctcggggtagcttggagaatcatcttttcaggagaggtttgtacttccaaccgttatcttggaaacttcggttgaaagttgctcttggtgctgcaaagggacttgcttttcttcacagttccgagacaagagtgatataccgagatttcaagacttctaatatccttcttgactcggagtacaacgcaaagctttctgattttgggttggctaaggatgggccaataggtgataaaagtcatgtctctacacgagtcatgggtacacacggatatgcagctcctgaataccttgcaaccggtcatctaacaacaaagagtgatgtctatagcttcggggttgtccttctggagctgttgtctggtcgtcgagcagtggacaagaaccgcccatctggagagaggaaccttgtggagtgggctaaaccatacctcgtaaacaaaagaaagatattccgagtcattgataatcgtcttcaggaccagtactctatggaagaagcatgtaaagtggctactctgtctctgagatgtctcaccacagagattaagctgagaccaaacatgagcgaggttgtttcgcacctcgaacacattcagtctttaaatgctgctataggaggaaatatggataaaacagatagaagaatgcgtaggagaagtgacagtgttgtcagcaaaaaagtgaatgcaggttttgctcgacagactgctgttggcagtacagttgttgcttatcctcgcccatcagcctcgccactgtatgtttgaatagggttaaacacgtcctgggtctgtgttcagtgttcttggtaaaacatttgcaggacatgaagttcctatatcatgtcctgagaatggaatctggaggaattc

SEQ ID NO: 108606 - protein, 410 aa, Arabidopsis thaliana; identical to SEQ ID NO: 49420
  peptide (1)..(410): Ceres Seq. ID no. 13667906
  misc_feature (68)..(350): Pfam Name: Protein kinase domain Pfam Description: Protein kinase domain
  misc_feature (1)..(255): Homolog of NCBI NO: 8778537 NR Description: F22G5.5 [Arabidopsis thaliana]
  misc_feature (255)..(408): Homolog of NCBI NO: 8778537 NR Description: F22G5.5 [Arabidopsis thaliana]
  misc_feature (1)..(410): Homolog of NCBI NO: 15222437 NR Description: protein kinase (APK1a) [Arabidopsis thaliana]
  misc_feature (1)..(410): Homolog of NCBI NO: 15227001 NR Description: protein kinase (APK1b) [Arabidopsis thaliana]
  misc_feature (1)..(386): Homolog of NCBI NO: 14719339 NR Description: putative protein kinase [Oryza sativa]
  misc_feature (13)..(393): Homolog of NCBI NO: 34897424 NR Description: putative protein kinase [Oryza sativa (japonica group)] >gi|27545044|gb|AAO18450.1| putative protein kinase
  misc_feature (1)..(354): Homolog of NCBI NO: 15241749 NR Description: protein kinase, putative [Arabidopsis thaliana]
  misc_feature (1)..(354): Homolog of NCBI NO: 166809 NR Description: protein kinase
  misc_feature (1)..(354): Homolog of NCBI NO: 34906046 NR Description: putative serine/threonine-specific protein kinase
  misc_feature (1)..(354): Homolog of NCBI NO: 15225520 NR Description: protein kinase, putative [Arabidopsis thaliana]

SEQ ID NO: 108607 - protein, 257 aa, Arabidopsis thaliana; identical to SEQ ID NO: 49421
  peptide (1)..(257): Ceres Seq. ID no. 13667907
  misc_feature (1)..(197): Pfam Name: Protein kinase domain Pfam Description: Protein kinase domain
  misc_feature (1)..(102): Homolog of NCBI NO: 8778537 NR Description: F22G5.5 [Arabidopsis thaliana]
  misc_feature (102)..(255): Homolog of NCBI NO: 8778537 NR Description: F22G5.5 [Arabidopsis thaliana]
  misc_feature (1)..(257): Homolog of NCBI NO: 15222437 NR Description: protein kinase (APK1a) [Arabidopsis thaliana]
  misc_feature (1)..(257): Homolog of NCBI NO: 15227001 NR Description: protein kinase (APK1b) [Arabidopsis thaliana]
  misc_feature (1)..(233): Homolog of NCBI NO: 14719339 NR Description: putative protein kinase [Oryza sativa]
  misc_feature (1)..(240): Homolog of NCBI NO: 34897424 NR Description: putative protein kinase [Oryza sativa (japonica group)] >gi|27545044|gb|AAO18450.1| putative protein kinase
  misc_feature (1)..(201): Homolog of NCBI NO: 15241749 NR Description: protein kinase, putative [Arabidopsis thaliana]
  misc_feature (1)..(201): Homolog of NCBI NO: 166809 NR Description: protein kinase
  misc_feature (1)..(201): Homolog of NCBI NO: 34906046 NR Description: putative serine/threonine-specific protein kinase
  misc_feature (1)..(201): Homolog of NCBI NO: 15225520 NR Description: protein kinase, putative [Arabidopsis thaliana]

SEQ ID NO: 108608 - DNA, 1187 bp, Arabidopsis thaliana
  misc_feature (1)..(1187): Ceres Seq. ID no. 13667908
  misc_feature: MA Experiment ID: 108434 Result: Down-regulated in Transcription
  misc_feature: MA Experiment 108434 PARAMETER Experiment Name: At_Root_Tips_cDNA_P Parameter: Tissue Value: Root Tips
  misc_feature: MA Experiment ID: 108462 Result: Up-regulated in Transcription
  misc_feature: MA Experiment 108462 PARAMETER Experiment Name: At_Germinating_Seeds_cDNA_P Parameter: Age (day) Value: 2 vs. 0
  misc_feature: MA Experiment 108462 PARAMETER Experiment Name: At_Germinating_Seeds_cDNA_P Parameter: Tissue Value: Germinating Seeds
  misc_feature: MA Experiment ID: 108463 Result: Up-regulated in Transcription
  misc_feature: MA Experiment 108463 PARAMETER Experiment Name: At_Germinating_Seeds_cDNA_P Parameter: Age (day) Value: 3 vs. 0
  misc_feature: MA Experiment 108463 PARAMETER Experiment Name: At_Germinating_Seeds_cDNA_P Parameter: Tissue Value: Germinating Seeds
  misc_feature: MA Experiment ID: 108464 Result: Up-regulated in Transcription
  misc_feature: MA Experiment 108464 PARAMETER Experiment Name: At_Germinating_Seeds_cDNA_P Parameter: Age (day) Value: 4 vs. 0
  misc_feature: MA Experiment 108464 PARAMETER Experiment Name: At_Germinating_Seeds_cDNA_P Parameter: Tissue Value: Germinating Seeds
  misc_feature: MA Experiment ID: 108573 Result: Up-regulated in Transcription
  misc_feature: MA Experiment 108573 PARAMETER Experiment Name: At_Drought_cDNA_P Parameter: Timepoint (hr) Value: 6
  misc_feature: MA Experiment 108573 PARAMETER Experiment Name: At_Drought_cDNA_P Parameter: Tissue Value: Aerial
  misc_feature: MA Experiment 108573 PARAMETER Experiment Name: At_Drought_cDNA_P Parameter: Treatment Value: Drought vs. No Drought
  misc_feature: MA Experiment ID: 20000090 Result: Down-regulated in Transcription
  misc_feature: MA Experiment ID: 20000111 Result: Down-regulated in Transcription
  misc_feature: MA Experiment 20000111 PARAMETER Experiment Name: At_42deg_Heat_cDNA_P Parameter: Temperature (deg C) Value: 42 vs. 22
  misc_feature: MA Experiment 20000111 PARAMETER Experiment Name: At_42deg_Heat_cDNA_P Parameter: Timepoint (hr) Value: 6
  misc_feature: MA Experiment 20000111 PARAMETER Experiment Name: At_42deg_Heat_cDNA_P Parameter: Tissue Value: Aerial
  misc_feature: MA Experiment ID: 20000171 Result: Down-regulated in Transcription
  misc_feature: MA Experiment 20000171 PARAMETER Experiment Name: At_42deg_Heat_P Parameter: Age (day) Value: 14
  misc_feature: MA Experiment 20000171 PARAMETER Experiment Name: At_42deg_Heat_P Parameter: Organism Value: A. thaliana
  misc_feature: MA Experiment 20000171 PARAMETER Experiment Name: At_42deg_Heat_P Parameter: Plant Line Value: WS
  misc_feature: MA Experiment 20000171 PARAMETER Experiment Name: At_42deg_Heat_P Parameter: Temperature (deg C) Value: 42 vs. 22
  misc_feature: MA Experiment 20000171 PARAMETER Experiment Name: At_42deg_Heat_P Parameter: Timepoint (hr) Value: 1
  misc_feature: MA Experiment 20000171 PARAMETER Experiment Name: At_42deg_Heat_P Parameter: Tissue Value: Aerial
  misc_feature: MA Experiment ID: 20000173 Result: Down-regulated in Transcription
  misc_feature: MA Experiment 20000173 PARAMETER Experiment Name: At_42deg_Heat_P Parameter: Age (day) Value: 14
  misc_feature: MA Experiment 20000173 PARAMETER Experiment Name: At_42deg_Heat_P Parameter: Organism Value: A. thaliana
  misc_feature: MA Experiment 20000173 PARAMETER Experiment Name: At_42deg_Heat_P Parameter: Plant Line Value: WS
  misc_feature: MA Experiment 20000173 PARAMETER Experiment Name: At_42deg_Heat_P Parameter: Temperature (deg C) Value: 42 vs. 22
  misc_feature: MA Experiment 20000173 PARAMETER Experiment Name: At_42deg_Heat_P Parameter: Timepoint (hr) Value: 6
  misc_feature: MA Experiment 20000173 PARAMETER Experiment Name: At_42deg_Heat_P Parameter: Tissue Value: Aerial
  misc_feature: MA Experiment ID: 20000185 Result: Down-regulated in Transcription
  misc_feature: MA Experiment 20000185 PARAMETER Experiment Name: At_Roots__P Parameter: Age (day) Value: 7 vs. 21
  misc_feature: MA Experiment 20000185 PARAMETER Experiment Name: At_Roots__P Parameter: Organism Value: A. thaliana
  misc_feature: MA Experiment 20000185 PARAMETER Experiment Name: At_Roots__P Parameter: Tissue Value: Roots vs. Whole Plant
  misc_feature: MA Experiment ID: 20000235 Result: Down-regulated in Transcription
  misc_feature: MA Experiment 20000235 PARAMETER Experiment Name: At_Siliques_P Parameter: Age (day) Value: 21
  misc_feature: MA Experiment 20000235 PARAMETER Experiment Name: At_Siliques_P Parameter: Organism Value: A. thaliana
  misc_feature: MA Experiment 20000235 PARAMETER Experiment Name: At_Siliques_P Parameter: Plant Line Value: WS
  misc_feature: MA Experiment 20000235 PARAMETER Experiment Name: At_Siliques_P Parameter: Tissue Value: 5-10mm Siliques vs. Whole Plant
  misc_feature: MA Experiment ID: 20000265 Result: Down-regulated in Transcription
  misc_feature: MA Experiment 20000265 PARAMETER Experiment Name: At_Open_Flower_P Parameter: Age (day) Value: 21
  misc_feature: MA Experiment 20000265 PARAMETER Experiment Name: At_Open_Flower_P Parameter: Plant Line Value: WS
  misc_feature: MA Experiment 20000265 PARAMETER Experiment Name: At_Open_Flower_P Parameter: Tissue Value: Closed Flower vs. Whole Plant
  misc_feature: MA Experiment ID: 20000268 Result: Down-regulated in Transcription
  misc_feature: MA Experiment 20000268 PARAMETER Experiment Name: At_100mM_NaCl__P Parameter: Age (day) Value: 14
  misc_feature: MA Experiment 20000268 PARAMETER Experiment Name: At_100mM_NaCl__P Parameter: Organism Value: A. thaliana
  misc_feature: MA Experiment 20000268 PARAMETER Experiment Name: At_100mM_NaCl__P Parameter: Plant Line Value: WS
  misc_feature: MA Experiment 20000268 PARAMETER Experiment Name: At_100mM_NaCl__P Parameter: Timepoint (hr) Value: 6
  misc_feature: MA Experiment 20000268 PARAMETER Experiment Name: At_100mM_NaCl__P Parameter: Tissue Value: Whole Plant
  misc_feature: MA Experiment 20000268 PARAMETER Experiment Name: At_100mM_NaCl__P Parameter: Treatment Value: 100mM NaCl vs. No Treatment
  misc_feature: MA Experiment ID: 20000286 Result: Down-regulated in Transcription
  misc_feature: MA Experiment 20000286 PARAMETER Experiment Name: At_Open_Flower_P Parameter: Age (day) Value: 21
  misc_feature: MA Experiment 20000286 PARAMETER Experiment Name: At_Open_Flower_P Parameter: Plant Line Value: WS
  misc_feature: MA Experiment 20000286 PARAMETER Experiment Name: At_Open_Flower_P Parameter: Tissue Value: Half Open vs. Whole Plant
  misc_feature: MA Experiment ID: 20000439 Result: Down-regulated in Transcription
  misc_feature: MA Experiment 20000439 PARAMETER Experiment Name: At_Roots__P Parameter: Age (day) Value: 14 vs. 21
  misc_feature: MA Experiment 20000439 PARAMETER Experiment Name: At_Roots__P Parameter: Organism Value: A. thaliana
  misc_feature: MA Experiment 20000439 PARAMETER Experiment Name: At_Roots__P Parameter: Tissue Value: Roots vs. Whole Plant
  misc_feature: MA Experiment ID: 20000441 Result: Up-regulated in Transcription
  misc_feature: MA Experiment 20000441 PARAMETER Experiment Name: At_1uM_BR-BRZ__P Parameter: Tissue Value: Shoot Apices
  misc_feature: MA Experiment 20000441 PARAMETER Experiment Name: At_1uM_BR-BRZ__P Parameter: Treatment Value: 1uM BR vs. No Treatment
  misc_feature: MA Experiment ID: 20000443 Result: Up-regulated in Transcription
  misc_feature: MA Experiment 20000443 PARAMETER Experiment Name: At_1uM_BR-BRZ__P Parameter: Tissue Value: Shoot Apices
  misc_feature: MA Experiment 20000443 PARAMETER Experiment Name: At_1uM_BR-BRZ__P Parameter: Treatment Value: 1uM BRZ vs. No Treatment
  misc_feature: MA Experiment ID: 20000495 Result: Down-regulated in Transcription
  misc_feature: MA Experiment 20000495 PARAMETER Experiment Name: At_Guard_Cells_P Parameter: Harvest Date Value: 8/2/2002
  misc_feature: MA Experiment 20000495 PARAMETER Experiment Name: At_Guard_Cells_P Parameter: Organism Value: A. thaliana
  misc_feature: MA Experiment 20000495 PARAMETER Experiment Name: At_Guard_Cells_P Parameter: Tissue Value: Guard Cells vs. Leaves
  misc_feature: MA Experiment ID: 20000496 Result: Down-regulated in Transcription
  misc_feature: MA Experiment 20000496 PARAMETER Experiment Name: At_Guard_Cells_P Parameter: Harvest Date Value: 7/19/2002
  misc_feature: MA Experiment 20000496 PARAMETER Experiment Name: At_Guard_Cells_P Parameter: Organism Value: Canola
  misc_feature: MA Experiment 20000496 PARAMETER Experiment Name: At_Guard_Cells_P Parameter: Tissue Value: Guard Cells vs. Leaves
  misc_feature: MA Experiment ID: 20000709 Result: Up-regulated in Transcription
  misc_feature: MA Experiment 20000709 PARAMETER Experiment Name: At_15mM_NH4NO3_L-to-H_P Parameter: Age (hr) Value: 14
  misc_feature: MA Experiment 20000709 PARAMETER Experiment Name: At_15mM_NH4NO3_L-to-H_P Parameter: Organism Value: A. thaliana
  misc_feature: MA Experiment 20000709 PARAMETER Experiment Name: At_15mM_NH4NO3_L-to-H_P Parameter: Plant Line Value: WS
  misc_feature: MA Experiment 20000709 PARAMETER Experiment Name: At_15mM_NH4NO3_L-to-H_P Parameter: Timepoint (hr) Value: 4
  misc_feature: MA Experiment 20000709 PARAMETER Experiment Name: At_15mM_NH4NO3_L-to-H_P Parameter: Tissue Value: Aerial
  misc_feature: MA Experiment 20000709 PARAMETER Experiment Name: At_15mM_NH4NO3_L-to-H_P Parameter: Treatment Value: 15mM NH4NO3 vs. 30mM Mannitol
  misc_feature: MA Experiment ID: 20001247 Result: Up-regulated in Transcription
  misc_feature: MA Experiment 20001247 PARAMETER Experiment Name: At_Far-red-induction_P Parameter: Age (day) Value: 7
  misc_feature: MA Experiment 20001247 PARAMETER Experiment Name: At_Far-red-induction_P Parameter: Light Value: Far-red vs. White
  misc_feature: MA Experiment 20001247 PARAMETER Experiment Name: At_Far-red-induction_P Parameter: Organism Value: A. thaliana
  misc_feature: MA Experiment 20001247 PARAMETER Experiment Name: At_Far-red-induction_P Parameter: Plant Line Value: Columbia
  misc_feature: MA Experiment 20001247 PARAMETER Experiment Name: At_Far-red-induction_P Parameter: Timepoint (hr) Value: 1
  misc_feature: MA Experiment 20001247 PARAMETER Experiment Name: At_Far-red-induction_P Parameter: Tissue Value: Whole Plant
  misc_feature: MA Experiment ID: 20001450 Result: Up-regulated in Transcription
  misc_feature: MA Experiment 20001450 PARAMETER Experiment Name: At_Far-red-induction_P Parameter: Age (day) Value: 7
  misc_feature: MA Experiment 20001450 PARAMETER Experiment Name: At_Far-red-induction_P Parameter: Light Value: Far-red vs. White
  misc_feature: MA Experiment 20001450 PARAMETER Experiment Name: At_Far-red-induction_P Parameter: Organism Value: A. thaliana
  misc_feature: MA Experiment 20001450 PARAMETER Experiment Name: At_Far-red-induction_P Parameter: Plant Line Value: Columbia
  misc_feature: MA Experiment 20001450 PARAMETER Experiment Name: At_Far-red-induction_P Parameter: Timepoint (hr) Value: 8
  misc_feature: MA Experiment 20001450 PARAMETER Experiment Name: At_Far-red-induction_P Parameter: Tissue Value: Whole Plant
  misc_feature: MA Experiment ID: 20001451 Result: Up-regulated in Transcription
  misc_feature: MA Experiment 20001451 PARAMETER Experiment Name: At_Far-red-induction_P Parameter: Age (day) Value: 7
  misc_feature: MA Experiment 20001451 PARAMETER Experiment Name: At_Far-red-induction_P Parameter: Light Value: Far-red vs. White
  misc_feature: MA Experiment 20001451 PARAMETER Experiment Name: At_Far-red-induction_P Parameter: Organism Value: A. thaliana
  misc_feature: MA Experiment 20001451 PARAMETER Experiment Name: At_Far-red-induction_P Parameter: Plant Line Value: Columbia
  misc_feature: MA Experiment 20001451 PARAMETER Experiment Name: At_Far-red-induction_P Parameter: Timepoint (hr) Value: 24
  misc_feature: MA Experiment 20001451 PARAMETER Experiment Name: At_Far-red-induction_P Parameter: Tissue Value: Whole Plant
  misc_feature: MA Experiment ID: 20001558 Result: Up-regulated in Transcription
  misc_feature: MA Experiment 20001558 PARAMETER Experiment Name: At_Drought_Soil_Dry_P Parameter: Age (day) Value: 27
  misc_feature: MA Experiment 20001558 PARAMETER Experiment Name: At_Drought_Soil_Dry_P Parameter: Organism Value: A. thaliana
  misc_feature: MA Experiment 20001558 PARAMETER Experiment Name: At_Drought_Soil_Dry_P Parameter: Plant Line Value: WS
  misc_feature: MA Experiment 20001558 PARAMETER Experiment Name: At_Drought_Soil_Dry_P Parameter: Post Timepoint (hr) Value: 6
  misc_feature: MA Experiment 20001558 PARAMETER Experiment Name: At_Drought_Soil_Dry_P Parameter: Post-Treatment Value: Re-Water vs. No Drought
  misc_feature: MA Experiment 20001558 PARAMETER Experiment Name: At_Drought_Soil_Dry_P Parameter: Timepoint (day) Value: 13
  misc_feature: MA Experiment 20001558 PARAMETER Experiment Name: At_Drought_Soil_Dry_P Parameter: Treatment Value: Drought vs. No Drought
  misc_feature: MA Experiment ID: 20001911 Result: Up-regulated in Transcription
  misc_feature: MA Experiment 20001911 PARAMETER Experiment Name: At_Drought_Reproduction_P Parameter: Age (day) Value: 40
  misc_feature: MA Experiment 20001911 PARAMETER Experiment Name: At_Drought_Reproduction_P Parameter: Organism Value: A. thaliana
  misc_feature: MA Experiment 20001911 PARAMETER Experiment Name: At_Drought_Reproduction_P Parameter: Plant Line Value: WS
  misc_feature: MA Experiment 20001911 PARAMETER Experiment Name: At_Drought_Reproduction_P Parameter: Timepoint (day) Value: 10
  misc_feature: MA Experiment 20001911 PARAMETER Experiment Name: At_Drought_Reproduction_P Parameter: Tissue Value: Flowers
  misc_feature: MA Experiment 20001911 PARAMETER Experiment Name: At_Drought_Reproduction_P Parameter: Treatment Value: Drought vs. No Drought
tcttcttcattagcctttcgtctccttcttctcttctctatctctctttagcttctctacgcaagcttattatctctttctcttaaagctttttctatatacaaacagaagcgtttgatactgtaaaaaagatttagaaatggagactctgagtcgtttattggttttcatgtctctgttttccggtttagtttctggatttgctctgcaaaatcttccaatcacatcttttgaagaaagttacactcaactttttggtgacaagaacttatttgttcatcaagatggcaaatctgtccggttaacgctcgatgaaagaaccggttccggttttgtttcaaatgattattacttgcatggattcttcagtgcttcaattaaattaccttctgattatacagctggagttgttgttgccttttatatgtctaatggagatatgtatgagaagaatcatgatgagatagattttgagtttcttggtaacattagagaaaaagaatggagagttcagacaaacatttacggtaatggaagtactcattcaggaagagaagagagatataatctctggtttgatcctactgaagattttcatcaatacagtatcctctggtctgattctcacatcatattctttgtagacaatgttcctattagagaggtcaaacgtactgcggaaatgggtggtcactttccatcaaagccgatgtctctctacacaacaatatgggacggttctaaatgggcaactaacggtggaaagtacggtgtaaactacaaatatgcgccttacattgcgcggttctcggatctagtcctgcacggctgccccgtggaccctatcgagcagtttccgaggtgcgatgaaggcgcggctgaggatatgcgtgcggcgcaagagattactccttcacaaaggagtaaaatggatgttttcagacggagactcatgacatattcatattgctatgatcgggctaggtacaatgttgctttatcggagtgtgtggtgaatcccgctgaggctcaaaggcttagggtttatgatccggtcagatttggcggcattccgaggcgccaccgcaatggaaagcaccggagcaagagaagccgggttgatggaaccgagtcgatatgataacatatataggcaaaatagtatgggtgagatttggccggaattc

SEQ ID NO: 108609 - protein, 333 aa, Arabidopsis thaliana; identical to SEQ ID NO: 30673
  peptide (1)..(333): Ceres Seq. ID no. 13667909
  misc_feature (31)..(216): Pfam Name: Glycosyl hydrolases family 16 Pfam Description: Glycosyl hydrolases family 16
  misc_feature (1)..(333): Homolog of NCBI NO: 15226364 NR Description: xyloglucan endotransglycosylase (EXGT-A3)
  misc_feature (1)..(333): Homolog of NCBI NO: 5533313 NR Description: endoxyloglucan transferase [Arabidopsis thaliana]
  misc_feature (1)..(333): Homolog of NCBI NO: 21553969 NR Description: putative xyloglucan-specific glucanase
  misc_feature (1)..(333): Homolog of NCBI NO: 15223878 NR Description: xyloglucan endotransglycosylase (XTR2)
  misc_feature (17)..(332): Homolog of NCBI NO: 6681351 NR Description: ETAG-A3 [Lycopersicon esculentum]
  misc_feature (24)..(333): Homolog of NCBI NO: 13560781 NR Description: endoxyloglucan transferase [Daucus carota]
  misc_feature (17)..(324): Homolog of NCBI NO: 2129774 NR Description: xyloglucan endo-1,4-beta-D-glucanase (EC 3.2.1.-) - Arabidopsis thaliana (fragment) >gi|1244754|gb|AAB18365.1|
  misc_feature (17)..(324): Homolog of NCBI NO: 15222593 NR Description: xyloglucan endotransglycosylase (XTR4), putative
  misc_feature (17)..(324): Homolog of NCBI NO: 21618261 NR Description: endoxyloglucan transferase, putative [Arabidopsis
  misc_feature (25)..(332): Homolog of NCBI NO: 32470643 NR Description: putative xyloglucan endotransglycosylase-related

SEQ ID NO: 108610 - protein, 323 aa, Arabidopsis thaliana; identical to SEQ ID NO: 30674
  peptide (1)..(323): Ceres Seq. ID no. 13667910
  misc_feature (21)..(206): Pfam Name: Glycosyl hydrolases family 16 Pfam Description: Glycosyl hydrolases family 16
  misc_feature (1)..(323): Homolog of NCBI NO: 15226364 NR Description: xyloglucan endotransglycosylase (EXGT-A3)
  misc_feature (1)..(323): Homolog of NCBI NO: 5533313 NR Description: endoxyloglucan transferase [Arabidopsis thaliana]
  misc_feature (1)..(323): Homolog of NCBI NO: 21553969 NR Description: putative xyloglucan-specific glucanase
  misc_feature (1)..(323): Homolog of NCBI NO: 15223878 NR Description: xyloglucan endotransglycosylase (XTR2)
  misc_feature (7)..(322): Homolog of NCBI NO: 6681351 NR Description: ETAG-A3 [Lycopersicon esculentum]
  misc_feature (14)..(323): Homolog of NCBI NO: 13560781 NR Description: endoxyloglucan transferase [Daucus carota]
  misc_feature (7)..(314): Homolog of NCBI NO: 2129774 NR Description: xyloglucan endo-1,4-beta-D-glucanase (EC 3.2.1.-) - Arabidopsis thaliana (fragment) >gi|1244754|gb|AAB18365.1|
  misc_feature (7)..(314): Homolog of NCBI NO: 15222593 NR Description: xyloglucan endotransglycosylase (XTR4), putative
  misc_feature (7)..(314): Homolog of NCBI NO: 21618261 NR Description: endoxyloglucan transferase, putative [Arabidopsis
  misc_feature (15)..(322): Homolog of NCBI NO: 32470643 NR Description: putative xyloglucan endotransglycosylase-related

SEQ ID NO: 108611 - protein, 238 aa, Arabidopsis thaliana; identical to SEQ ID NO: 30675
  peptide (1)..(238): Ceres Seq. ID no. 13667911
  misc_feature (1)..(121): Pfam Name: Glycosyl hydrolases family 16 Pfam Description: Glycosyl hydrolases family 16
  misc_feature (1)..(238): Homolog of NCBI NO: 15226364 NR Description: xyloglucan endotransglycosylase (EXGT-A3)
  misc_feature (1)..(238): Homolog of NCBI NO: 5533313 NR Description: endoxyloglucan transferase [Arabidopsis thaliana]
  misc_feature (1)..(238): Homolog of NCBI NO: 21553969 NR Description: putative xyloglucan-specific glucanase
  misc_feature (1)..(238): Homolog of NCBI NO: 15223878 NR Description: xyloglucan endotransglycosylase (XTR2)
  misc_feature (1)..(237): Homolog of NCBI NO: 6681351 NR Description: ETAG-A3 [Lycopersicon esculentum]
  misc_feature (1)..(238): Homolog of NCBI NO: 13560781 NR Description: endoxyloglucan transferase [Daucus carota]
  misc_feature (1)..(229): Homolog of NCBI NO: 2129774 NR Description: xyloglucan endo-1,4-beta-D-glucanase (EC 3.2.1.-) - Arabidopsis thaliana (fragment) >gi|1244754|gb|AAB18365.1|
  misc_feature (1)..(229): Homolog of NCBI NO: 15222593 NR Description: xyloglucan endotransglycosylase (XTR4), putative
  misc_feature (1)..(229): Homolog of NCBI NO: 21618261 NR Description: endoxyloglucan transferase, putative [Arabidopsis
  misc_feature (1)..(237): Homolog of NCBI NO: 32470643 NR Description: putative xyloglucan endotransglycosylase-related

SEQ ID NO: 108612 - DNA, 1362 bp, Arabidopsis thaliana
  misc_feature (1)..(1362): Ceres Seq. ID no. 13667920
  misc_feature: MA Experiment ID: 20000451 Result: Down-regulated in Transcription
  misc_feature: MA Experiment 20000451 PARAMETER Experiment Name: At_CS6879_Shoots-Roots_P Parameter: Age (day) Value: 14
  misc_feature: MA Experiment 20000451 PARAMETER Experiment Name: At_CS6879_Shoots-Roots_P Parameter: Organism Value: A. thaliana
  misc_feature: MA Experiment 20000451 PARAMETER Experiment Name: At_CS6879_Shoots-Roots_P Parameter: Plant Line Value: CS6879 vs. WS
  misc_feature: MA Experiment 20000451 PARAMETER Experiment Name: At_CS6879_Shoots-Roots_P Parameter: Tissue Value: Roots
  misc_feature: MA Experiment ID: 20001905 Result: Down-regulated in Transcription
  misc_feature: MA Experiment 20001905 PARAMETER Experiment Name: At_Drought_Reproduction_P Parameter: Age (day) Value: 40
  misc_feature: MA Experiment 20001905 PARAMETER Experiment Name: At_Drought_Reproduction_P Parameter: Organism Value: A. thaliana
  misc_feature: MA Experiment 20001905 PARAMETER Experiment Name: At_Drought_Reproduction_P Parameter: Plant Line Value: WS
  misc_feature: MA Experiment 20001905 PARAMETER Experiment Name: At_Drought_Reproduction_P Parameter: Timepoint (day) Value: 10
  misc_feature: MA Experiment 20001905 PARAMETER Experiment Name: At_Drought_Reproduction_P Parameter: Tissue Value: Rosettes
  misc_feature: MA Experiment 20001905 PARAMETER Experiment Name: At_Drought_Reproduction_P Parameter: Treatment Value: Drought vs. No Drought
  misc_feature: Pfam Name: ADH_zinc_N Pfam Description: Zinc-binding dehydrogenase
gcacgaggagagaactactctctctatctctctttctctctatctctctctatctctctcatttcttcctgcgtcaatggcgactcaaggtcaggttatcacttgcaaagctgcggtggcttacgagccgaacaagcctctggtcatcgaagatgtgcaagtggctccacctcaagctggtgaggttcggatcaagatcctctacactgctctttgtcacaccgacgcttacacttggagcggcaaggatcctgaaggtctctttccttgtattctaggtcatgaggctgctgggattgttgagagtgttggtgaaggagtaactgaagttcaagctggagatcatgttatcccttgttatcaagctgagtgtcgtgaatgcaagttttgcaaatctgggaagactaacctttgtggcaaggtgagatctgctactggtgttgggattatgatgaatgaccgtaagtcgaggttctcggttaatgggaaacccatttatcacttcatgggtacttccacgtttagtcagtatactgttgttcatgatgttagcgtcgccaaaattgatcctactgctcctttggataaagtttgccttcttggatgtggtgttcccactggccttggagcagtttggaatactgcaaaagtagaaccagggtcaaatgttgccattttcggtcttggcactgttggacttgctgttgccgagggtgcgaaaacagctggtgcttcaaggatcattggcattgacatcgatagcaagaagtatgaaactgcaaagaagtttggtgttaacgaatttgtgaacccaaaggatcacgacaagccaattcaggaagtgattgtcgatctcactgatggcggtgttgactacagctttgagtgcatcgggaatgtctccgtgatgagagctgcattggagtgctgtcacaagggatggggaacttcggtcatagttggtgttgcagcatcaggacaagagatatcaactcgtccgttccaactcgtgactggccgtgtgtggaaaggaacagcttttggtggtttcaagagtcgaacccaagtgccttggcttgttgaaaagtacatgaacaaggagataaaagtggatgaatacataacacacaacttgagcttgggagaaatcaataaggctttcgatctattgcacgaaggtacttgccttcgttgtgtcctcgataccagcaaatgactataagggacctctctgctttaatctatgtgttcttgtgactttcgtcttttatcggtattgacatttcctaagagcaacagactactctactcgtgtgtgtctcgtttctatcttatgcttcaataaaatatcaattaagaccg

SEQ ID NO: 108613 - protein, 404 aa, Arabidopsis thaliana
  peptide (1)..(404): Ceres Seq. ID no. 13667921
  misc_feature: Pfam Name: ADH_zinc_N Pfam Description: Zinc-binding dehydrogenase
  misc_feature (26)..(404): Homolog of NCBI NO: 2129562 NR Description: alcohol dehydrogenase (EC 1.1.1.1) class III -
  misc_feature (26)..(404): Homolog of NCBI NO: 15240054 NR Description: alcohol dehydrogenase class III
  misc_feature (26)..(404): Homolog of NCBI NO: 1498024 NR Description: glutathione-dependent formaldehyde dehydrogenase
  misc_feature (27)..(404): Homolog of NCBI NO: 3023271 NR Description: ALCOHOL DEHYDROGENASE CLASS III
  misc_feature (28)..(400): Homolog of NCBI NO: 6225010 NR Description: ALCOHOL DEHYDROGENASE CLASS III
  misc_feature (27)..(400): Homolog of NCBI NO: 3121727 NR Description: ALCOHOL DEHYDROGENASE CLASS III
  misc_feature (26)..(400): Homolog of NCBI NO: 5902742 NR Description: ALCOHOL DEHYDROGENASE CLASS III FORMALDEHYDE DEHYDROGENASE) (FDH) (FALDH) >gi|2117436|pir||JC4967
  misc_feature (26)..(400): Homolog of NCBI NO: 18858257 NR Description: alcohol dehydrogenase 5 [Danio rerio]
  misc_feature (26)..(400): Homolog of NCBI NO: 25283011 NR Description: alcohol dehydrogenase (EC 1.1.1.1) 3 - zebra fish
  misc_feature (27)..(400): Homolog of NCBI NO: 5902740 NR Description: ALCOHOL DEHYDROGENASE CLASS III H CHAIN
HEERTTLSISLSLYLSLSLSFLPASMATQGQVITCKAAVAYEPNKPLVIEDVQVAPPQAGEVRIKILYTALCHTDAYTWSGKDPEGLFPCILGHEAAGIVESVGEGVTEVQAGDHVIPCYQAECRECKFCKSGKTNLCGKVRSATGVGIMMNDRKSRFSVNGKPIYHFMGTSTFSQYTVVHDVSVAKIDPTAPLDKVCLLGCGVPTGLGAVWNTAKVEPGSNVAIFGLGTVGLAVAEGAKTAGASRIIGIDIDSKKYETAKKFGVNEFVNPKDHDKPIQEVIVDLTDGGVDYSFECIGNVSVMRAALECCHKGWGTSVIVGVAASGQEISTRPFQLVTGRVWKGTAFGGFKSRTQVPWLVEKYMNKEIKVDEYITHNLSLGEINKAFDLLHEGTCLRCVLDTSK

SEQ ID NO: 108614 - protein, 379 aa, Arabidopsis thaliana
  peptide (1)..(379): Ceres Seq. ID no. 13667922
  misc_feature: Pfam Name: ADH_zinc_N Pfam Description: Zinc-binding dehydrogenase
  misc_feature (1)..(379): Homolog of NCBI NO: 2129562 NR Description: alcohol dehydrogenase (EC 1.1.1.1) class III -
  misc_feature (1)..(379): Homolog of NCBI NO: 15240054 NR Description: alcohol dehydrogenase class III
  misc_feature (1)..(379): Homolog of NCBI NO: 1498024 NR Description: glutathione-dependent formaldehyde dehydrogenase
  misc_feature (2)..(379): Homolog of NCBI NO: 3023271 NR Description: ALCOHOL DEHYDROGENASE CLASS III
  misc_feature (3)..(375): Homolog of NCBI NO: 6225010 NR Description: ALCOHOL DEHYDROGENASE CLASS III
  misc_feature (2)..(375): Homolog of NCBI NO: 3121727 NR Description: ALCOHOL DEHYDROGENASE CLASS III
  misc_feature (1)..(375): Homolog of NCBI NO: 5902742 NR Description: ALCOHOL DEHYDROGENASE CLASS III FORMALDEHYDE DEHYDROGENASE) (FDH) (FALDH) >gi|2117436|pir||JC4967
  misc_feature (1)..(375): Homolog of NCBI NO: 18858257 NR Description: alcohol dehydrogenase 5 [Danio rerio]
  misc_feature (1)..(375): Homolog of NCBI NO: 25283011 NR Description: alcohol dehydrogenase (EC 1.1.1.1) 3 - zebra fish
  misc_feature (2)..(375): Homolog of NCBI NO: 5902740 NR Description: ALCOHOL DEHYDROGENASE CLASS III H CHAIN
MATQGQVITCKAAVAYEPNKPLVIEDVQVAPPQAGEVRIKILYTALCHTDAYTWSGKDPEGLFPCILGHEAAGIVESVGEGVTEVQAGDHVIPCYQAECRECKFCKSGKTNLCGKVRSATGVGIMMNDRKSRFSVNGKPIYHFMGTSTFSQYTVVHDVSVAKIDPTAPLDKVCLLGCGVPTGLGAVWNTAKVEPGSNVAIFGLGTVGLAVAEGAKTAGASRIIGIDIDSKKYETAKKFGVNEFVNPKDHDKPIQEVIVDLTDGGVDYSFECIGNVSVMRAALECCHKGWGTSVIVGVAASGQEISTRPFQLVTGRVWKGTAFGGFKSRTQVPWLVEKYMNKEIKVDEYITHNLSLGEINKAFDLLHEGTCLRCVLDTSK

SEQ ID NO: 108615 - protein, 255 aa, Arabidopsis thaliana
  peptide (1)..(255): Ceres Seq. ID no. 13667923
  misc_feature: Pfam Name: ADH_zinc_N Pfam Description: Zinc-binding dehydrogenase
  misc_feature (1)..(255): Homolog of NCBI NO: 2129562 NR Description: alcohol dehydrogenase (EC 1.1.1.1) class III -
  misc_feature (1)..(255): Homolog of NCBI NO: 15240054 NR Description: alcohol dehydrogenase class III
  misc_feature (1)..(255): Homolog of NCBI NO: 1498024 NR Description: glutathione-dependent formaldehyde dehydrogenase
  misc_feature (1)..(255): Homolog of NCBI NO: 3023271 NR Description: ALCOHOL DEHYDROGENASE CLASS III
  misc_feature (1)..(251): Homolog of NCBI NO: 6225010 NR Description: ALCOHOL DEHYDROGENASE CLASS III
  misc_feature (1)..(251): Homolog of NCBI NO: 3121727 NR Description: ALCOHOL DEHYDROGENASE CLASS III
  misc_feature (1)..(251): Homolog of NCBI NO: 5902742 NR Description: ALCOHOL DEHYDROGENASE CLASS III FORMALDEHYDE DEHYDROGENASE) (FDH) (FALDH) >gi|2117436|pir||JC4967
  misc_feature (1)..(251): Homolog of NCBI NO: 18858257 NR Description: alcohol dehydrogenase 5 [Danio rerio]
  misc_feature (1)..(251): Homolog of NCBI NO: 25283011 NR Description: alcohol dehydrogenase (EC 1.1.1.1) 3 - zebra fish
  misc_feature (1)..(251): Homolog of NCBI NO: 5902740 NR Description: ALCOHOL DEHYDROGENASE CLASS III H CHAIN
MMNDRKSRFSVNGKPIYHFMGTSTFSQYTVVHDVSVAKIDPTAPLDKVCLLGCGVPTGLGAVWNTAKVEPGSNVAIFGLGTVGLAVAEGAKTAGASRIIGIDIDSKKYETAKKFGVNEFVNPKDHDKPIQEVIVDLTDGGVDYSFECIGNVSVMRAALECCHKGWGTSVIVGVAASGQEISTRPFQLVTGRVWKGTAFGGFKSRTQVPWLVEKYMNKEIKVDEYITHNLSLGEINKAFDLLHEGTCLRCVLDTSK

SEQ ID NO: 108616 - DNA, 846 bp, Arabidopsis thaliana
  misc_feature (1)..(846): Ceres Seq. ID no. 13667931
  misc_feature: MA Experiment ID: 108561 Result: Down-regulated in Transcription
  misc_feature: MA Experiment 108561 PARAMETER Experiment Name: At_100uM_ABA_cDNA_P Parameter: Timepoint (hr) Value: 6
  misc_feature: MA Experiment 108561 PARAMETER Experiment Name: At_100uM_ABA_cDNA_P Parameter: Tissue Value: Aerial
  misc_feature: MA Experiment 108561 PARAMETER Experiment Name: At_100uM_ABA_cDNA_P Parameter: Treatment Value: 100uM ABA vs. No Treatment
  misc_feature: MA Experiment ID: 108572 Result: Down-regulated in Transcription
  misc_feature: MA Experiment 108572 PARAMETER Experiment Name: At_Drought_cDNA_P Parameter: Timepoint (hr) Value: 1
  misc_feature: MA Experiment 108572 PARAMETER Experiment Name: At_Drought_cDNA_P Parameter: Tissue Value: Aerial
  misc_feature: MA Experiment 108572 PARAMETER Experiment Name: At_Drought_cDNA_P Parameter: Treatment Value: Drought vs. No Drought
  misc_feature: MA Experiment ID: 108573 Result: Down-regulated in Transcription
  misc_feature: MA Experiment 108573 PARAMETER Experiment Name: At_Drought_cDNA_P Parameter: Timepoint (hr) Value: 6
  misc_feature: MA Experiment 108573 PARAMETER Experiment Name: At_Drought_cDNA_P Parameter: Tissue Value: Aerial
  misc_feature: MA Experiment 108573 PARAMETER Experiment Name: At_Drought_cDNA_P Parameter: Treatment Value: Drought vs. No Drought
  misc_feature: MA Experiment ID: 108577 Result: Down-regulated in Transcription
  misc_feature: MA Experiment 108577 PARAMETER Experiment Name: At_42deg_Heat_cDNA_P Parameter: Temperature (deg C) Value: 42 vs. 22
  misc_feature: MA Experiment 108577 PARAMETER Experiment Name: At_42deg_Heat_cDNA_P Parameter: Timepoint (hr) Value: 6
  misc_feature: MA Experiment 108577 PARAMETER Experiment Name: At_42deg_Heat_cDNA_P Parameter: Tissue Value: Aerial
  misc_feature: MA Experiment ID: 108595 Result: Down-regulated in Transcription
  misc_feature: MA Experiment 108595 PARAMETER Experiment Name: At_Ler-pi_Ovule_cDNA_P Parameter: Plant Line Value: null
  misc_feature: MA Experiment ID: 20000173 Result: Down-regulated in Transcription
  misc_feature: MA Experiment 20000173 PARAMETER Experiment Name: At_42deg_Heat_P Parameter: Age (day) Value: 14
  misc_feature: MA Experiment 20000173 PARAMETER Experiment Name: At_42deg_Heat_P Parameter: Organism Value: A. thaliana
  misc_feature: MA Experiment 20000173 PARAMETER Experiment Name: At_42deg_Heat_P Parameter: Plant Line Value: WS
  misc_feature: MA Experiment 20000173 PARAMETER Experiment Name: At_42deg_Heat_P Parameter: Temperature (deg C) Value: 42 vs. 22
  misc_feature: MA Experiment 20000173 PARAMETER Experiment Name: At_42deg_Heat_P Parameter: Timepoint (hr) Value: 6
  misc_feature: MA Experiment 20000173 PARAMETER Experiment Name: At_42deg_Heat_P Parameter: Tissue Value: Aerial
  misc_feature: MA Experiment ID: 20000179 Result: Down-regulated in Transcription
  misc_feature: MA Experiment 20000179 PARAMETER Experiment Name: At_Germinating_Seeds_P Parameter: Age (hr) Value: 6 vs. 0
  misc_feature: MA Experiment 20000179 PARAMETER Experiment Name: At_Germinating_Seeds_P Parameter: Tissue Value: Germinating Seeds
  misc_feature: MA Experiment ID: 20000185 Result: Down-regulated in Transcription
  misc_feature: MA Experiment 20000185 PARAMETER Experiment Name: At_Roots__P Parameter: Age (day) Value: 7 vs. 21
  misc_feature: MA Experiment 20000185 PARAMETER Experiment Name: At_Roots__P Parameter: Organism Value: A. thaliana
  misc_feature: MA Experiment 20000185 PARAMETER Experiment Name: At_Roots__P Parameter: Tissue Value: Roots vs. Whole Plant
  misc_feature: MA Experiment ID: 20000264 Result: Down-regulated in Transcription
  misc_feature: MA Experiment 20000264 PARAMETER Experiment Name: At_Open_Flower_P Parameter: Age (day) Value: 21
  misc_feature: MA Experiment 20000264 PARAMETER Experiment Name: At_Open_Flower_P Parameter: Plant Line Value: WS
  misc_feature: MA Experiment 20000264 PARAMETER Experiment Name: At_Open_Flower_P Parameter: Tissue Value: Open Flower vs. Whole Plant
  misc_feature: MA Experiment ID: 20000268 Result: Down-regulated in Transcription
  misc_feature: MA Experiment 20000268 PARAMETER Experiment Name: At_100mM_NaCl__P Parameter: Age (day) Value: 14
  misc_feature: MA Experiment 20000268 PARAMETER Experiment Name: At_100mM_NaCl__P Parameter: Organism Value: A. thaliana
  misc_feature: MA Experiment 20000268 PARAMETER Experiment Name: At_100mM_NaCl__P Parameter: Plant Line Value: WS
  misc_feature: MA Experiment 20000268 PARAMETER Experiment Name: At_100mM_NaCl__P Parameter: Timepoint (hr) Value: 6
  misc_feature: MA Experiment 20000268 PARAMETER Experiment Name: At_100mM_NaCl__P Parameter: Tissue Value: Whole Plant
  misc_feature: MA Experiment 20000268 PARAMETER Experiment Name: At_100mM_NaCl__P Parameter: Treatment Value: 100mM NaCl vs. No Treatment
  misc_feature: MA Experiment ID: 20000286 Result: Down-regulated in Transcription
  misc_feature: MA Experiment 20000286 PARAMETER Experiment Name: At_Open_Flower_P Parameter: Age (day) Value: 21
  misc_feature: MA Experiment 20000286 PARAMETER Experiment Name: At_Open_Flower_P Parameter: Plant Line Value: WS
  misc_feature: MA Experiment 20000286 PARAMETER Experiment Name: At_Open_Flower_P Parameter: Tissue Value: Half Open vs. Whole Plant
  misc_feature: MA Experiment ID: 20000436 Result: Down-regulated in Transcription
  misc_feature: MA Experiment 20000436 PARAMETER Experiment Name: At_Drought_P Parameter: Age (day) Value: 7
  misc_feature: MA Experiment 20000436 PARAMETER Experiment Name: At_Drought_P Parameter: Organism Value: A. thaliana
  misc_feature: MA Experiment 20000436 PARAMETER Experiment Name: At_Drought_P Parameter: Plant Line Value: WS
  misc_feature: MA Experiment 20000436 PARAMETER Experiment Name: At_Drought_P Parameter: Timepoint (hr) Value: 12
  misc_feature: MA Experiment 20000436 PARAMETER Experiment Name: At_Drought_P Parameter: Tissue Value: Whole Plant
  misc_feature: MA Experiment 20000436 PARAMETER Experiment Name: At_Drought_P Parameter: Treatment Value: Drought vs. No Drought
  misc_feature: MA Experiment ID: 20000437 Result: Down-regulated in Transcription
  misc_feature: MA Experiment 20000437 PARAMETER Experiment Name: At_Drought_P Parameter: Age (day) Value: 8
  misc_feature: MA Experiment 20000437 PARAMETER Experiment Name: At_Drought_P Parameter: Organism Value: A. thaliana
  misc_feature: MA Experiment 20000437 PARAMETER Experiment Name: At_Drought_P Parameter: Plant Line Value: WS
  misc_feature: MA Experiment 20000437 PARAMETER Experiment Name: At_Drought_P Parameter: Timepoint (hr) Value: 24
  misc_feature: MA Experiment 20000437 PARAMETER Experiment Name: At_Drought_P Parameter: Tissue Value: Whole Plant
  misc_feature: MA Experiment 20000437 PARAMETER Experiment Name: At_Drought_P Parameter: Treatment Value: Drought vs. No Drought
  misc_feature: MA Experiment ID: 20000439 Result: Down-regulated in Transcription
  misc_feature: MA Experiment 20000439 PARAMETER Experiment Name: At_Roots__P Parameter: Age (day) Value: 14 vs. 21
  misc_feature: MA Experiment 20000439 PARAMETER Experiment Name: At_Roots__P Parameter: Organism Value: A. thaliana
  misc_feature: MA Experiment 20000439 PARAMETER Experiment Name: At_Roots__P Parameter: Tissue Value: Roots vs. Whole Plant
  misc_feature: MA Experiment ID: 20000794 Result: Down-regulated in Transcription
  misc_feature: MA Experiment 20000794 PARAMETER Experiment Name: At_Petals_P Parameter: Age (day) Value: 23-25 days
  misc_feature: MA Experiment 20000794 PARAMETER Experiment Name: At_Petals_P Parameter: Plant Line Value: WS
  misc_feature: MA Experiment 20000794 PARAMETER Experiment Name: At_Petals_P Parameter: Tissue Value: Petals vs. Whole plant
  misc_feature: MA Experiment ID: 20001554 Result: Down-regulated in Transcription
  misc_feature: MA Experiment 20001554 PARAMETER Experiment Name: At_Drought_Soil_Dry_P Parameter: Age (day) Value: 21
  misc_feature: MA Experiment 20001554 PARAMETER Experiment Name: At_Drought_Soil_Dry_P Parameter: Organism Value: A. thaliana
  misc_feature: MA Experiment 20001554 PARAMETER Experiment Name: At_Drought_Soil_Dry_P Parameter: Plant Line Value: WS
  misc_feature: MA Experiment 20001554 PARAMETER Experiment Name: At_Drought_Soil_Dry_P Parameter: Post Timepoint (hr) Value: None
  misc_feature: MA Experiment 20001554 PARAMETER Experiment Name: At_Drought_Soil_Dry_P Parameter: Post-Treatment Value: None
  misc_feature: MA Experiment 20001554 PARAMETER Experiment Name: At_Drought_Soil_Dry_P Parameter: Timepoint (day) Value: 7
  misc_feature: MA Experiment 20001554 PARAMETER Experiment Name: At_Drought_Soil_Dry_P Parameter: Treatment Value: Drought vs. No Drought
  misc_feature: MA Experiment ID: 20001555 Result: Down-regulated in Transcription
  misc_feature: MA Experiment 20001555 PARAMETER Experiment Name: At_Drought_Soil_Dry_P Parameter: Age (day) Value: 24
  misc_feature: MA Experiment 20001555 PARAMETER Experiment Name: At_Drought_Soil_Dry_P Parameter: Organism Value: A. thaliana
  misc_feature: MA Experiment 20001555 PARAMETER Experiment Name: At_Drought_Soil_Dry_P Parameter: Plant Line Value: WS
  misc_feature: MA Experiment 20001555 PARAMETER Experiment Name: At_Drought_Soil_Dry_P Parameter: Post Timepoint (hr) Value: None
  misc_feature: MA Experiment 20001555 PARAMETER Experiment Name: At_Drought_Soil_Dry_P Parameter: Post-Treatment Value: None
  misc_feature: MA Experiment 20001555 PARAMETER Experiment Name: At_Drought_Soil_Dry_P Parameter: Timepoint (day) Value: 10
  misc_feature: MA Experiment 20001555 PARAMETER Experiment Name: At_Drought_Soil_Dry_P Parameter: Treatment Value: Drought vs. No Drought
  misc_feature: MA Experiment ID: 20001556 Result: Down-regulated in Transcription
  misc_feature: MA Experiment 20001556 PARAMETER Experiment Name: At_Drought_Soil_Dry_P Parameter: Age (day) Value: 26
  misc_feature: MA Experiment 20001556 PARAMETER Experiment Name: At_Drought_Soil_Dry_P Parameter: Organism Value: A. thaliana
  misc_feature: MA Experiment 20001556 PARAMETER Experiment Name: At_Drought_Soil_Dry_P Parameter: Plant Line Value: WS
  misc_feature: MA Experiment 20001556 PARAMETER Experiment Name: At_Drought_Soil_Dry_P Parameter: Post Timepoint (hr) Value: None
  misc_feature: MA Experiment 20001556 PARAMETER Experiment Name: At_Drought_Soil_Dry_P Parameter: Post-Treatment Value: None
  misc_feature: MA Experiment 20001556 PARAMETER Experiment Name: At_Drought_Soil_Dry_P Parameter: Timepoint (day) Value: 12
  misc_feature: MA Experiment 20001556 PARAMETER Experiment Name: At_Drought_Soil_Dry_P Parameter: Treatment Value: Drought vs. No Drought
  misc_feature: MA Experiment ID: 20001557 Result: Up-regulated in Transcription
  misc_feature: MA Experiment 20001557 PARAMETER Experiment Name: At_Drought_Soil_Dry_P Parameter: Age (day) Value: 27
  misc_feature: MA Experiment 20001557 PARAMETER Experiment Name: At_Drought_Soil_Dry_P Parameter: Organism Value: A. thaliana
  misc_feature: MA Experiment 20001557 PARAMETER Experiment Name: At_Drought_Soil_Dry_P Parameter: Plant Line Value: WS
  misc_feature: MA Experiment 20001557 PARAMETER Experiment Name: At_Drought_Soil_Dry_P Parameter: Post Timepoint (hr) Value: 3
  misc_feature: MA Experiment 20001557 PARAMETER Experiment Name: At_Drought_Soil_Dry_P Parameter: Post-Treatment Value: Re-Water vs. No Drought
  misc_feature: MA Experiment 20001557 PARAMETER Experiment Name: At_Drought_Soil_Dry_P Parameter: Timepoint (day) Value: 13
  misc_feature: MA Experiment 20001557 PARAMETER Experiment Name: At_Drought_Soil_Dry_P Parameter: Treatment Value: Drought vs. No Drought
  misc_feature: MA Experiment ID: 20001756 Result: Up-regulated in Transcription
  misc_feature: MA Experiment 20001756 PARAMETER Experiment Name: At_50mM_NH4NO3_L-to-H_P Parameter: Timepoint (hr) Value: 4
  misc_feature: MA Experiment 20001756 PARAMETER Experiment Name: At_50mM_NH4NO3_L-to-H_P Parameter: Tissue Value: Leaf
  misc_feature: MA Experiment 20001756 PARAMETER Experiment Name: At_50mM_NH4NO3_L-to-H_P Parameter: Treatment Value: 50mM NH4NO3 vs 100mM Mannitol
  misc_feature: MA Experiment ID: 20001757 Result: Up-regulated in Transcription
  misc_feature: MA Experiment 20001757 PARAMETER Experiment Name: At_50mM_NH4NO3_L-to-H_P Parameter: Timepoint (hr) Value: 6
  misc_feature: MA Experiment 20001757 PARAMETER Experiment Name: At_50mM_NH4NO3_L-to-H_P Parameter: Tissue Value: Leaf
  misc_feature: MA Experiment 20001757 PARAMETER Experiment Name: At_50mM_NH4NO3_L-to-H_P Parameter: Treatment Value: 50mM NH4NO3 vs 100mM Mannitol
  misc_feature: MA Experiment ID: 20001904 Result: Down-regulated in Transcription
  misc_feature: MA Experiment 20001904 PARAMETER Experiment Name: At_Drought_Reproduction_P Parameter: Age (day) Value: 37
  misc_feature: MA Experiment 20001904 PARAMETER Experiment Name: At_Drought_Reproduction_P Parameter: Organism Value: A. thaliana
  misc_feature: MA Experiment 20001904 PARAMETER Experiment Name: At_Drought_Reproduction_P Parameter: Plant Line Value: WS
  misc_feature: MA Experiment 20001904 PARAMETER Experiment Name: At_Drought_Reproduction_P Parameter: Timepoint (day) Value: 7
  misc_feature: MA Experiment 20001904 PARAMETER Experiment Name: At_Drought_Reproduction_P Parameter: Tissue Value: Rosettes
  misc_feature: MA Experiment 20001904 PARAMETER Experiment Name: At_Drought_Reproduction_P Parameter: Treatment Value: Drought vs. No Drought
  misc_feature: MA Experiment ID: 20001906 Result: Down-regulated in Transcription
  misc_feature: MA Experiment 20001906 PARAMETER Experiment Name: At_Drought_Reproduction_P Parameter: Age (day) Value: 35
  misc_feature: MA Experiment 20001906 PARAMETER Experiment Name: At_Drought_Reproduction_P Parameter: Organism Value: A. thaliana
  misc_feature: MA Experiment 20001906 PARAMETER Experiment Name: At_Drought_Reproduction_P Parameter: Plant Line Value: WS
  misc_feature: MA Experiment 20001906 PARAMETER Experiment Name: At_Drought_Reproduction_P Parameter: Timepoint (day) Value: 5
  misc_feature: MA Experiment 20001906 PARAMETER Experiment Name: At_Drought_Reproduction_P Parameter: Tissue Value: Siliques
  misc_feature: MA Experiment 20001906 PARAMETER Experiment Name: At_Drought_Reproduction_P Parameter: Treatment Value: Drought vs. No Drought
cgccagtgtgagtaatttaggtactatcttcctcttaaaccaaccattcaaaatgttgcgtactatcttcctcttatctcttctctttggtctatccaatgcctctgttcaagatttctgtgtcgcaaacctgaaacgcgctgaaacccctgcgggttacccttgcattcgtcccattcatgtcaaagctacagactttgtcttctctggcttaggcactcctggaaacactacaaacatcatcaacgccgctgtcacacccgctttcgcagctcagttcccgggtctgaacggtctagccctctctacagctagacttgacttagctcctaaaggtgtgatcccaatgcacactcaccctggtgcctctgaggttctctttgtccttactggctccattaccgctgggtttgtctcctcggcaaacgctgtctacgtgcagacactcaaaccaggacaggtcatggttttcccacagggcttgcttcatttccagatcaacgcgggaaaatcctctgcttcagccgttgtcactttcaacagcgctaatcggggtctgcagattctcgacttcgcactctttgctaacagtcttcccactgaactcgtcgtgggtactactttccttgacgccactacagtcaagaagctaaagggtgttcttggaggaactggctaaaaaaagacttaggactactccttgactaaaacaccaaaacctgtttcttcatctttttttctctttaagtgattcttgtcttctctgttttgtgtgccttgtaattcttcaaaacctgtccaaattgttacattgtatgtgagttttttcctaaattactcacactg

SEQ ID NO: 108617 - protein, 225 aa, Arabidopsis thaliana
  peptide (1)..(225): Ceres Seq. ID no. 13667932
  misc_feature (69)..(215): Pfam Name: Cupin Pfam Description: Cupin
  misc_feature (18)..(225): Homolog of NCBI NO: 1592672 NR Description: germin1 [Arabidopsis thaliana]
  misc_feature (18)..(225): Homolog of NCBI NO: 15218535 NR Description: germin-like protein (AtGER1) [Arabidopsis
  misc_feature (18)..(225): Homolog of NCBI NO: 17473703 NR Description: germin-like protein [Arabidopsis thaliana]
  misc_feature (22)..(225): Homolog of NCBI NO: 1934726 NR Description: germin-like protein [Arabidopsis thaliana]
  misc_feature (18)..(225): Homolog of NCBI NO: 1169941 NR Description: Germin-like protein 1 precursor
  misc_feature (17)..(225): Homolog of NCBI NO: 13277342 NR Description: Germin-like protein [Pisum sativum]
  misc_feature (22)..(224): Homolog of NCBI NO: 18201940 NR Description: Auxin-binding protein ABP20 precursor
  misc_feature (23)..(224): Homolog of NCBI NO: 18203684 NR Description: Auxin-binding protein ABP19a precursor
  misc_feature (23)..(224): Homolog of NCBI NO: 18201941 NR Description: Auxin-binding protein ABP19b precursor
  misc_feature (18)..(224): Homolog of NCBI NO: 15242028 NR Description: germin-like protein (AtGER3) [Arabidopsis
ASVSNLGTIFLLNQPFKMLRTIFLLSLLFGLSNASVQDFCVANLKRAETPAGYPCIRPIHVKATDFVFSGLGTPGNTTNIINAAVTPAFAAQFPGLNGLALSTARLDLAPKGVIPMHTHPGASEVLFVLTGSITAGFVSSANAVYVQTLKPGQVMVFPQGLLHFQINAGKSSASAVVTFNSANRGLQILDFALFANSLPTELVVGTTFLDATTVKKLKGVLGGTG

SEQ ID NO: 108618 - protein, 208 aa, Arabidopsis thaliana
  peptide (1)..(208): Ceres Seq. ID no. 13667933
  misc_feature (52)..(198): Pfam Name: Cupin Pfam Description: Cupin
  misc_feature (1)..(208): Homolog of NCBI NO: 1592672 NR Description: germin1 [Arabidopsis thaliana]
  misc_feature (1)..(208): Homolog of NCBI NO: 15218535 NR Description: germin-like protein (AtGER1) [Arabidopsis
  misc_feature (1)..(208): Homolog of NCBI NO: 17473703 NR Description: germin-like protein [Arabidopsis thaliana]
  misc_feature (5)..(208): Homolog of NCBI NO: 1934726 NR Description: germin-like protein [Arabidopsis thaliana]
  misc_feature (1)..(208): Homolog of NCBI NO: 1169941 NR Description: Germin-like protein 1 precursor
  misc_feature (1)..(208): Homolog of NCBI NO: 13277342 NR Description: Germin-like protein [Pisum sativum]
  misc_feature (5)..(207): Homolog of NCBI NO: 18201940 NR Description: Auxin-binding protein ABP20 precursor
  misc_feature (6)..(207): Homolog of NCBI NO: 18203684 NR Description: Auxin-binding protein ABP19a precursor
  misc_feature (6)..(207): Homolog of NCBI NO: 18201941 NR Description: Auxin-binding protein ABP19b precursor
  misc_feature (1)..(207): Homolog of NCBI NO: 15242028 NR Description: germin-like protein (AtGER3) [Arabidopsis
MLRTIFLLSLLFGLSNASVQDFCVANLKRAETPAGYPCIRPIHVKATDFVFSGLGTPGNTTNIINAAVTPAFAAQFPGLNGLALSTARLDLAPKGVIPMHTHPGASEVLFVLTGSITAGFVSSANAVYVQTLKPGQVMVFPQGLLHFQINAGKSSASAVVTFNSANRGLQILDFALFANSLPTELVVGTTFLDATTVKKLKGVLGGTG

SEQ ID NO: 108619 - DNA, 712 bp, Arabidopsis thaliana
  misc_feature (1)..(712): Ceres Seq. ID no. 13667941
  misc_feature: MA Experiment ID: 108462 Result: Down-regulated in Transcription
  misc_feature: MA Experiment 108462 PARAMETER Experiment Name: At_Germinating_Seeds_cDNA_P Parameter: Age (day) Value: 2 vs. 0
  misc_feature: MA Experiment 108462 PARAMETER Experiment Name: At_Germinating_Seeds_cDNA_P Parameter: Tissue Value: Germinating Seeds
  misc_feature: MA Experiment ID: 108463 Result: Down-regulated in Transcription
  misc_feature: MA Experiment 108463 PARAMETER Experiment Name: At_Germinating_Seeds_cDNA_P Parameter: Age (day) Value: 3 vs. 0
  misc_feature: MA Experiment 108463 PARAMETER Experiment Name: At_Germinating_Seeds_cDNA_P Parameter: Tissue Value: Germinating Seeds
  misc_feature: MA Experiment ID: 108464 Result: Down-regulated in Transcription
  misc_feature: MA Experiment 108464 PARAMETER Experiment Name: At_Germinating_Seeds_cDNA_P Parameter: Age (day) Value: 4 vs. 0
  misc_feature: MA Experiment 108464 PARAMETER Experiment Name: At_Germinating_Seeds_cDNA_P Parameter: Tissue Value: Germinating Seeds
  misc_feature: MA Experiment ID: 108605 Result: Down-regulated in Transcription
  misc_feature: MA Experiment 108605 PARAMETER Experiment Name: At_100uM_ABA_cDNA_P Parameter: Timepoint (hr) Value: 6
  misc_feature: MA Experiment 108605 PARAMETER Experiment Name: At_100uM_ABA_cDNA_P Parameter: Tissue Value: Aerial
  misc_feature: MA Experiment 108605 PARAMETER Experiment Name: At_100uM_ABA_cDNA_P Parameter: Treatment Value: 100uM ABA vs. No Treatment
  misc_feature: MA Experiment ID: 108607 Result: Down-regulated in Transcription
  misc_feature: MA Experiment 108607 PARAMETER Experiment Name: At_100uM_ABA_cDNA_P Parameter: Timepoint (hr) Value: 4
  misc_feature: MA Experiment 108607 PARAMETER Experiment Name: At_100uM_ABA_cDNA_P Parameter: Tissue Value: Aerial
  misc_feature: MA Experiment 108607 PARAMETER Experiment Name: At_100uM_ABA_cDNA_P Parameter: Treatment Value: 100uM ABA vs. No Treatment
  misc_feature: MA Experiment ID: 108609 Result: Down-regulated in Transcription
  misc_feature: MA Experiment 108609 PARAMETER Experiment Name: At_100uM_ABA_cDNA_P Parameter: Timepoint (hr) Value: 24
  misc_feature: MA Experiment 108609 PARAMETER Experiment Name: At_100uM_ABA_cDNA_P Parameter: Tissue Value: Aerial
  misc_feature: MA Experiment 108609 PARAMETER Experiment Name: At_100uM_ABA_cDNA_P Parameter: Treatment Value: 100uM ABA vs. No Treatment
  misc_feature: MA Experiment ID: 20000069 Result: Up-regulated in Transcription
  misc_feature: MA Experiment 20000069 PARAMETER Experiment Name: At_100uM_ABA_Mutants_cDNA_P Parameter: Plant Line Value: CS23
  misc_feature: MA Experiment 20000069 PARAMETER Experiment Name: At_100uM_ABA_Mutants_cDNA_P Parameter: Timepoint (hr) Value: 6
  misc_feature: MA Experiment 20000069 PARAMETER Experiment Name: At_100uM_ABA_Mutants_cDNA_P Parameter: Tissue Value: Aerial
  misc_feature: MA Experiment 20000069 PARAMETER Experiment Name: At_100uM_ABA_Mutants_cDNA_P Parameter: Treatment Value: 100uM ABA vs. No Treatment
  misc_feature: MA Experiment ID: 20000070 Result: Up-regulated in Transcription
  misc_feature: MA Experiment 20000070 PARAMETER Experiment Name: At_100uM_ABA_Mutants_cDNA_P Parameter: Plant Line Value: CS24
  misc_feature: MA Experiment 20000070 PARAMETER Experiment Name: At_100uM_ABA_Mutants_cDNA_P Parameter: Timepoint (hr) Value: 6
  misc_feature: MA Experiment 20000070 PARAMETER Experiment Name: At_100uM_ABA_Mutants_cDNA_P Parameter: Tissue Value: Aerial
  misc_feature: MA Experiment 20000070 PARAMETER Experiment Name: At_100uM_ABA_Mutants_cDNA_P Parameter: Treatment Value: 100uM ABA vs. No Treatment
  misc_feature: MA Experiment ID: 20000072 Result: Up-regulated in Transcription
  misc_feature: MA Experiment 20000072 PARAMETER Experiment Name: At_100uM_ABA_Mutants_cDNA_P Parameter: Plant Line Value: CS8105
  misc_feature: MA Experiment 20000072 PARAMETER Experiment Name: At_100uM_ABA_Mutants_cDNA_P Parameter: Timepoint (hr) Value: 6
  misc_feature: MA Experiment 20000072 PARAMETER Experiment Name: At_100uM_ABA_Mutants_cDNA_P Parameter: Tissue Value: Aerial
  misc_feature: MA Experiment 20000072 PARAMETER Experiment Name: At_100uM_ABA_Mutants_cDNA_P Parameter: Treatment Value: 100uM ABA vs. No Treatment
  misc_feature: MA Experiment ID: 20000086 Result: Up-regulated in Transcription
  misc_feature: MA Experiment 20000086 PARAMETER Experiment Name: At_100uM_ABA_Mutants_cDNA_P Parameter: Plant Line Value: CS22
  misc_feature: MA Experiment 20000086 PARAMETER Experiment Name: At_100uM_ABA_Mutants_cDNA_P Parameter: Timepoint (hr) Value: 6
  misc_feature: MA Experiment 20000086 PARAMETER Experiment Name: At_100uM_ABA_Mutants_cDNA_P Parameter: Tissue Value: Aerial
  misc_feature: MA Experiment 20000086 PARAMETER Experiment Name: At_100uM_ABA_Mutants_cDNA_P Parameter: Treatment Value: 100uM ABA vs. No Treatment
  misc_feature: MA Experiment ID: 20000087 Result: Up-regulated in Transcription
  misc_feature: MA Experiment 20000087 PARAMETER Experiment Name: At_100uM_ABA_Mutants_cDNA_P Parameter: Plant Line Value: WS
  misc_feature: MA Experiment 20000087 PARAMETER Experiment Name: At_100uM_ABA_Mutants_cDNA_P Parameter: Timepoint (hr) Value: 6
  misc_feature: MA Experiment 20000087 PARAMETER Experiment Name: At_100uM_ABA_Mutants_cDNA_P Parameter: Tissue Value: Aerial
  misc_feature: MA Experiment 20000087 PARAMETER Experiment Name: At_100uM_ABA_Mutants_cDNA_P Parameter: Treatment Value: 100uM ABA vs. No Treatment
  misc_feature: MA Experiment ID: 20000088 Result: Up-regulated in Transcription
  misc_feature: MA Experiment 20000088 PARAMETER Experiment Name: At_100uM_ABA_Mutants_cDNA_P Parameter: Plant Line Value: Landsberg
  misc_feature: MA Experiment 20000088 PARAMETER Experiment Name: At_100uM_ABA_Mutants_cDNA_P Parameter: Timepoint (hr) Value: 6
  misc_feature: MA Experiment 20000088 PARAMETER Experiment Name: At_100uM_ABA_Mutants_cDNA_P Parameter: Tissue Value: Aerial
  misc_feature: MA Experiment 20000088 PARAMETER Experiment Name: At_100uM_ABA_Mutants_cDNA_P Parameter: Treatment Value: 100uM ABA vs. No Treatment
  misc_feature: MA Experiment ID: 20000089 Result: Up-regulated in Transcription
  misc_feature: MA Experiment ID: 20000090 Result: Up-regulated in Transcription
  misc_feature: MA Experiment ID: 20000111 Result: Down-regulated in Transcription
  misc_feature: MA Experiment 20000111 PARAMETER Experiment Name: At_42deg_Heat_cDNA_P Parameter: Temperature (deg C) Value: 42 vs. 22
  misc_feature: MA Experiment 20000111 PARAMETER Experiment Name: At_42deg_Heat_cDNA_P Parameter: Timepoint (hr) Value: 6
  misc_feature: MA Experiment 20000111 PARAMETER Experiment Name: At_42deg_Heat_cDNA_P Parameter: Tissue Value: Aerial
  misc_feature: MA Experiment ID: 20000112 Result: Down-regulated in Transcription
  misc_feature: MA Experiment 20000112 PARAMETER Experiment Name: At_42deg_Heat_cDNA_P Parameter: Temperature (deg C) Value: 42 vs. 22
  misc_feature: MA Experiment 20000112 PARAMETER Experiment Name: At_42deg_Heat_cDNA_P Parameter: Timepoint (hr) Value: 2
  misc_feature: MA Experiment 20000112 PARAMETER Experiment Name: At_42deg_Heat_cDNA_P Parameter: Tissue Value: Aerial
  misc_feature: MA Experiment ID: 20000117 Result: Up-regulated in Transcription
  misc_feature: MA Experiment 20000117 PARAMETER Experiment Name: At_100uM_ABA_Mutants_cDNA_P Parameter: Plant Line Value: Columbia
  misc_feature: MA Experiment 20000117 PARAMETER Experiment Name: At_100uM_ABA_Mutants_cDNA_P Parameter: Timepoint (hr) Value: 6
  misc_feature: MA Experiment 20000117 PARAMETER Experiment Name: At_100uM_ABA_Mutants_cDNA_P Parameter: Tissue Value: Aerial
  misc_feature: MA Experiment 20000117 PARAMETER Experiment Name: At_100uM_ABA_Mutants_cDNA_P Parameter: Treatment Value: 100uM ABA vs. No Treatment
  misc_feature: MA Experiment ID: 20000173 Result: Down-regulated in Transcription
  misc_feature: MA Experiment 20000173 PARAMETER Experiment Name: At_42deg_Heat_P Parameter: Age (day) Value: 14
  misc_feature: MA Experiment 20000173 PARAMETER Experiment Name: At_42deg_Heat_P Parameter: Organism Value: A. thaliana
  misc_feature: MA Experiment 20000173 PARAMETER Experiment Name: At_42deg_Heat_P Parameter: Plant Line Value: WS
  misc_feature: MA Experiment 20000173 PARAMETER Experiment Name: At_42deg_Heat_P Parameter: Temperature (deg C) Value: 42 vs. 22
  misc_feature: MA Experiment 20000173 PARAMETER Experiment Name: At_42deg_Heat_P Parameter: Timepoint (hr) Value: 6
  misc_feature: MA Experiment 20000173 PARAMETER Experiment Name: At_42deg_Heat_P Parameter: Tissue Value: Aerial
  misc_feature: MA Experiment ID: 20000213 Result: Up-regulated in Transcription
  misc_feature: MA Experiment 20000213 PARAMETER Experiment Name: At_4deg_Cold_P Parameter: Timepoint (hr) Value: 2
  misc_feature: MA Experiment ID: 20000453 Result: Down-regulated in Transcription
  misc_feature: MA Experiment 20000453 PARAMETER Experiment Name: At_100uM_ABA_P Parameter: Age (day) Value: 15
  misc_feature: MA Experiment 20000453 PARAMETER Experiment Name: At_100uM_ABA_P Parameter: Organism Value: A. thaliana
  misc_feature: MA Experiment 20000453 PARAMETER Experiment Name: At_100uM_ABA_P Parameter: Plant Line Value: WS
  misc_feature: MA Experiment 20000453 PARAMETER Experiment Name: At_100uM_ABA_P Parameter: Timepoint (hr) Value: 24
  misc_feature: MA Experiment 20000453 PARAMETER Experiment Name: At_100uM_ABA_P Parameter: Tissue Value: Aerial
  misc_feature: MA Experiment 20000453 PARAMETER Experiment Name: At_100uM_ABA_P Parameter: Treatment Value: 100uM ABA vs. No Treatment
  misc_feature: MA Experiment ID: 20001247 Result: Down-regulated in Transcription
  misc_feature: MA Experiment 20001247 PARAMETER Experiment Name: At_Far-red-induction_P Parameter: Age (day) Value: 7
  misc_feature: MA Experiment 20001247 PARAMETER Experiment Name: At_Far-red-induction_P Parameter: Light Value: Far-red vs. White
  misc_feature: MA Experiment 20001247 PARAMETER Experiment Name: At_Far-red-induction_P Parameter: Organism Value: A. thaliana
  misc_feature: MA Experiment 20001247 PARAMETER Experiment Name: At_Far-red-induction_P Parameter: Plant Line Value: Columbia
  misc_feature: MA Experiment 20001247 PARAMETER Experiment Name: At_Far-red-induction_P Parameter: Timepoint (hr) Value: 1
  misc_feature: MA Experiment 20001247 PARAMETER Experiment Name: At_Far-red-induction_P Parameter: Tissue Value: Whole Plant
  misc_feature: MA Experiment ID: 20001248 Result: Up-regulated in Transcription
  misc_feature: MA Experiment 20001248 PARAMETER Experiment Name: At_Far-red-induction_P Parameter: Age (day) Value: 7
  misc_feature: MA Experiment 20001248 PARAMETER Experiment Name: At_Far-red-induction_P Parameter: Light Value: Far-red vs. White
  misc_feature: MA Experiment 20001248 PARAMETER Experiment Name: At_Far-red-induction_P Parameter: Organism Value: A. thaliana
  misc_feature: MA Experiment 20001248 PARAMETER Experiment Name: At_Far-red-induction_P Parameter: Plant Line Value: Columbia
  misc_feature: MA Experiment 20001248 PARAMETER Experiment Name: At_Far-red-induction_P Parameter: Timepoint (hr) Value: 4
  misc_feature: MA Experiment 20001248 PARAMETER Experiment Name: At_Far-red-induction_P Parameter: Tissue Value: Whole Plant
  misc_feature: MA Experiment ID: 20001557 Result: Up-regulated in Transcription
  misc_feature: MA Experiment 20001557 PARAMETER Experiment Name: At_Drought_Soil_Dry_P Parameter: Age (day) Value: 27
  misc_feature: MA Experiment 20001557 PARAMETER Experiment Name: At_Drought_Soil_Dry_P Parameter: Organism Value: A. thaliana
  misc_feature: MA Experiment 20001557 PARAMETER Experiment Name: At_Drought_Soil_Dry_P Parameter: Plant Line Value: WS
  misc_feature: MA Experiment 20001557 PARAMETER Experiment Name: At_Drought_Soil_Dry_P Parameter: Post Timepoint (hr) Value: 3
  misc_feature: MA Experiment 20001557 PARAMETER Experiment Name: At_Drought_Soil_Dry_P Parameter: Post-Treatment Value: Re-Water vs. No Drought
  misc_feature: MA Experiment 20001557 PARAMETER Experiment Name: At_Drought_Soil_Dry_P Parameter: Timepoint (day) Value: 13
  misc_feature: MA Experiment 20001557 PARAMETER Experiment Name: At_Drought_Soil_Dry_P Parameter: Treatment Value: Drought vs. No Drought
ccatcgtactcctcttcttttccccaaaaaaaaatgtctgaagttgagtaccggtgctttgtcggcggccttgcctgggccaccaatgatgaagatcttcaaaggacgttctcacagttcggcgacgttatcgattctaagatcattaacgaccgcgagagtggaagatcaaggggattcggattcgtcaccttcaaggacgagaaagccatgagggatgcgattgaagagatgaacggtaaagagctcgatggacgtgtcatcaccgtgaacgaggctcagtcgagaggtagcggcggtggcggaggaggccgtggtggaagcggtggtggttaccgcagcggaggcggtggtggatactcaggaggcggtggcggcggatactcaggaggaggcggtggtggttacgagagacgtagcggaggttacggatctggtggaggcggtggtggccgaggatacggtggtggtggacgccgtgagggaggtggctacggaggcggtgatggtggaagttacggaggcggtggtggcggctggtaatcaaagatagagttgtttgcgtgactgctgctctgcatttttggtttagatttggttttgtgtcaccacttctggtttgttatcgttcgtttgtttacttttttgatgaaacagtttcgtttaagtcttctttgtctggaacgaaatgttaattcgcgtgttgtttact

SEQ ID NO: 108620 - protein, 180 aa, Arabidopsis thaliana
  peptide (1)..(180): Ceres Seq. ID no. 13667942
  misc_feature (19)..(90): Pfam Name: RNA recognition motif. (a.k.a. RRM, RBD, or RNP domain) Pfam Description: RNA recognition motif. (a.k.a. RRM, RBD, or RNP
  misc_feature (12)..(180): Homolog of NCBI NO: 15235002 NR Description: glycine-rich RNA-binding protein 8 (GRP8) (CCR1)
  misc_feature (14)..(180): Homolog of NCBI NO: 15226605 NR Description: glycine-rich RNA-binding protein (AtGRP7)
  misc_feature (12)..(180): Homolog of NCBI NO: 544416 NR Description: Glycine-rich RNA-binding protein 10
  misc_feature (14)..(180): Homolog of NCBI NO: 1346181 NR Description: Glycine-rich RNA-binding protein GRP2A
  misc_feature (14)..(180): Homolog of NCBI NO: 21553354 NR Description: glycine-rich RNA binding protein 7 [Arabidopsis
  misc_feature (14)..(180): Homolog of NCBI NO: 1346180 NR Description: Glycine-rich RNA-binding protein GRP1A
  misc_feature (12)..(135): Homolog of NCBI NO: 30692254 NR Description: glycine-rich RNA-binding protein 8 (GRP8) (CCR1)
  misc_feature (12)..(172): Homolog of NCBI NO: 544426 NR Description: Glycine-rich RNA-binding protein
  misc_feature (13)..(179): Homolog of NCBI NO: 34851124 NR Description: putative glycine-rich RNA-binding protein [Prunus
  misc_feature (14)..(180): Homolog of NCBI NO: 30681492 NR Description: glycine-rich RNA-binding protein (AtGRP7)
PSYSSSFPQKKMSEVEYRCFVGGLAWATNDEDLQRTFSQFGDVIDSKIINDRESGRSRGFGFVTFKDEKAMRDAIEEMNGKELDGRVITVNEAQSRGSGGGGGGRGGSGGGYRSGGGGGYSGGGGGGYSGGGGGGYERRSGGYGSGGGGGGRGYGGGGRREGGGYGGGDGGSYGGGGGGW

SEQ ID NO: 108621 - protein, 169 aa, Arabidopsis thaliana; identical to SEQ ID NO: 22059
  peptide (1)..(169): Ceres Seq. ID no. 13667943
  misc_feature (8)..(79): Pfam Name: RNA recognition motif. (a.k.a. RRM, RBD, or RNP domain) Pfam Description: RNA recognition motif. (a.k.a. RRM, RBD, or RNP
  misc_feature (1)..(169): Homolog of NCBI NO: 15235002 NR Description: glycine-rich RNA-binding protein 8 (GRP8) (CCR1)
  misc_feature (3)..(169): Homolog of NCBI NO: 15226605 NR Description: glycine-rich RNA-binding protein (AtGRP7)
  misc_feature (1)..(169): Homolog of NCBI NO: 544416 NR Description: Glycine-rich RNA-binding protein 10
  misc_feature (3)..(169): Homolog of NCBI NO: 1346181 NR Description: Glycine-rich RNA-binding protein GRP2A
  misc_feature (3)..(169): Homolog of NCBI NO: 21553354 NR Description: glycine-rich RNA binding protein 7 [Arabidopsis
  misc_feature (3)..(169): Homolog of NCBI NO: 1346180 NR Description: Glycine-rich RNA-binding protein GRP1A
  misc_feature (1)..(124): Homolog of NCBI NO: 30692254 NR Description: glycine-rich RNA-binding protein 8 (GRP8) (CCR1)
  misc_feature (1)..(161): Homolog of NCBI NO: 544426 NR Description: Glycine-rich RNA-binding protein
  misc_feature (2)..(168): Homolog of NCBI NO: 34851124 NR Description: putative glycine-rich RNA-binding protein [Prunus
  misc_feature (3)..(169): Homolog of NCBI NO: 30681492 NR Description: glycine-rich RNA-binding protein (AtGRP7)

SEQ ID NO: 108622 - protein, 110 aa, Arabidopsis thaliana; identical to SEQ ID NO: 22060
  peptide (1)..(110): Ceres Seq. ID no. 13667944
  misc_feature (30)..(109): Pfam Name: Herpesvirus large structural phosphoprotein UL32 Pfam Description: Herpesvirus large structural phosphoprotein UL32
  misc_feature (1)..(110): Homolog of NCBI NO: 15235002 NR Description: glycine-rich RNA-binding protein 8 (GRP8) (CCR1)
  misc_feature (1)..(110): Homolog of NCBI NO: 15226605 NR Description: glycine-rich RNA-binding protein (AtGRP7)
  misc_feature (1)..(110): Homolog of NCBI NO: 544416 NR Description: Glycine-rich RNA-binding protein 10
  misc_feature (1)..(110): Homolog of NCBI NO: 1346181 NR Description: Glycine-rich RNA-binding protein GRP2A
  misc_feature (1)..(110): Homolog of NCBI NO: 21553354 NR Description: glycine-rich RNA binding protein 7 [Arabidopsis
  misc_feature (1)..(110): Homolog of NCBI NO: 1346180 NR Description: Glycine-rich RNA-binding protein GRP1A
  misc_feature (1)..(65): Homolog of NCBI NO: 30692254 NR Description: glycine-rich RNA-binding protein 8 (GRP8) (CCR1)
  misc_feature (1)..(102): Homolog of NCBI NO: 544426 NR Description: Glycine-rich RNA-binding protein
  misc_feature (1)..(109): Homolog of NCBI NO: 34851124 NR Description: putative glycine-rich RNA-binding protein [Prunus
  misc_feature (1)..(110): Homolog of NCBI NO: 30681492 NR Description: glycine-rich RNA-binding protein (AtGRP7)

SEQ ID NO: 108623 - DNA, 747 bp, Arabidopsis thaliana
  misc_feature (1)..(747): Ceres Seq. ID no. 13667945
  misc_feature: MA Experiment ID: 20000213 Result: Up-regulated in Transcription
  misc_feature: MA Experiment 20000213 PARAMETER Experiment Name: At_4deg_Cold_P Parameter: Timepoint (hr) Value: 2
  misc_feature: MA Experiment ID: 20000437 Result: Up-regulated in Transcription
  misc_feature: MA Experiment 20000437 PARAMETER Experiment Name: At_Drought_P Parameter: Age (day) Value: 8
  misc_feature: MA Experiment 20000437 PARAMETER Experiment Name: At_Drought_P Parameter: Organism Value: A. thaliana
  misc_feature: MA Experiment 20000437 PARAMETER Experiment Name: At_Drought_P Parameter: Plant Line Value: WS
  misc_feature: MA Experiment 20000437 PARAMETER Experiment Name: At_Drought_P Parameter: Timepoint (hr) Value: 24
  misc_feature: MA Experiment 20000437 PARAMETER Experiment Name: At_Drought_P Parameter: Tissue Value: Whole Plant
  misc_feature: MA Experiment 20000437 PARAMETER Experiment Name: At_Drought_P Parameter: Treatment Value: Drought vs. No Drought
  misc_feature: MA Experiment ID: 20000438 Result: Down-regulated in Transcription
  misc_feature: MA Experiment 20000438 PARAMETER Experiment Name: At_Shoots__P Parameter: Age (day) Value: 14
  misc_feature: MA Experiment 20000438 PARAMETER Experiment Name: At_Shoots__P Parameter: Tissue Value: Shoots vs. Whole Plant
  misc_feature: MA Experiment ID: 20001451 Result: Up-regulated in Transcription
  misc_feature: MA Experiment 20001451 PARAMETER Experiment Name: At_Far-red-induction_P Parameter: Age (day) Value: 7
  misc_feature: MA Experiment 20001451 PARAMETER Experiment Name: At_Far-red-induction_P Parameter: Light Value: Far-red vs. White
  misc_feature: MA Experiment 20001451 PARAMETER Experiment Name: At_Far-red-induction_P Parameter: Organism Value: A. thaliana
  misc_feature: MA Experiment 20001451 PARAMETER Experiment Name: At_Far-red-induction_P Parameter: Plant Line Value: Columbia
  misc_feature: MA Experiment 20001451 PARAMETER Experiment Name: At_Far-red-induction_P Parameter: Timepoint (hr) Value: 24
  misc_feature: MA Experiment 20001451 PARAMETER Experiment Name: At_Far-red-induction_P Parameter: Tissue Value: Whole Plant
  misc_feature: MA Experiment ID: 20001557 Result: Up-regulated in Transcription
  misc_feature: MA Experiment 20001557 PARAMETER Experiment Name: At_Drought_Soil_Dry_P Parameter: Age (day) Value: 27
  misc_feature: MA Experiment 20001557 PARAMETER Experiment Name: At_Drought_Soil_Dry_P Parameter: Organism Value: A. thaliana
  misc_feature: MA Experiment 20001557 PARAMETER Experiment Name: At_Drought_Soil_Dry_P Parameter: Plant Line Value: WS
  misc_feature: MA Experiment 20001557 PARAMETER Experiment Name: At_Drought_Soil_Dry_P Parameter: Post Timepoint (hr) Value: 3
  misc_feature: MA Experiment 20001557 PARAMETER Experiment Name: At_Drought_Soil_Dry_P Parameter: Post-Treatment Value: Re-Water vs. No Drought
  misc_feature: MA Experiment 20001557 PARAMETER Experiment Name: At_Drought_Soil_Dry_P Parameter: Timepoint (day) Value: 13
  misc_feature: MA Experiment 20001557 PARAMETER Experiment Name: At_Drought_Soil_Dry_P Parameter: Treatment Value: Drought vs. No Drought
atcaccgcgctaatcccttagatcttcttttcaaatttcaatggcgtccggtgatgttgagtatcggtgcttcgttggaggtctagcatgggccactgatgacagagctcttgagactgccttcgctcaatacggcgacgttattgattccaagatcattaacgatcgtgagactggaagatcaaggggattcggattcgtcaccttcaaggatgagaaagccatgaaggatgcgattgagggaatgaacggacaagatctcgatggccgtagcatcactgttaacgaggctcagtcacgaggaagcggtggcggcggaggccaccgtggaggtggtggcggtggataccgcagcggcggtggtggaggttactccggtggaggtggtagctacggaggtggcggcggtagacgcgagggtggaggaggatacagcggcggcggcggcggttactcctcaagaggtggtggtggcggaagctacggtggtggaagacgtgagggaggaggaggatacggtggtggtgaaggaggaggttacggaggaagcggtggtggtggaggatggtaattcctttaattaggtttgggattaccaatgaatgttctctctctcgcttgttatgcttctacttggttttgtgtgttctctattttgttctggttctgctttagatttgatgtaacagttcgtgattaggtattttggtatctggaaacgtaatgttaagtcacaagtcattctct

SEQ ID NO: 108624 - protein, 176 aa, Arabidopsis thaliana; identical to SEQ ID NO: 76877
  peptide (1)..(176): Ceres Seq. ID no. 13667946
  misc_feature (10)..(81): Pfam Name: RNA recognition motif. (a.k.a. RRM, RBD, or RNP domain) Pfam Description: RNA recognition motif. (a.k.a. RRM, RBD, or RNP
  misc_feature (1)..(176): Homolog of NCBI NO: 15226605 NR Description: glycine-rich RNA-binding protein (AtGRP7)
  misc_feature (1)..(176): Homolog of NCBI NO: 21553354 NR Description: glycine-rich RNA binding protein 7 [Arabidopsis
  misc_feature (1)..(176): Homolog of NCBI NO: 30681492 NR Description: glycine-rich RNA-binding protein (AtGRP7)
  misc_feature (1)..(176): Homolog of NCBI NO: 1346181 NR Description: Glycine-rich RNA-binding protein GRP2A
  misc_feature (1)..(176): Homolog of NCBI NO: 1346180 NR Description: Glycine-rich RNA-binding protein GRP1A
  misc_feature (5)..(176): Homolog of NCBI NO: 15235002 NR Description: glycine-rich RNA-binding protein 8 (GRP8) (CCR1)
  misc_feature (1)..(176): Homolog of NCBI NO: 34851124 NR Description: putative glycine-rich RNA-binding protein [Prunus
  misc_feature (5)..(176): Homolog of NCBI NO: 544416 NR Description: Glycine-rich RNA-binding protein 10
  misc_feature (1)..(176): Homolog of NCBI NO: 544423 NR Description: Glycine-rich RNA-binding protein 2
  misc_feature (1)..(176): Homolog of NCBI NO: 10799202 NR Description: glycine-rich RNA-binding protein [Sorghum bicolor]

SEQ ID NO: 108625 - protein, 115 aa, Arabidopsis thaliana; identical to SEQ ID NO: 76878
  peptide (1)..(115): Ceres Seq. ID no. 13667947
  misc_feature (27)..(113): Pfam Name: Herpesvirus large structural phosphoprotein UL32 Pfam Description: Herpesvirus large structural phosphoprotein UL32
  misc_feature (1)..(115): Homolog of NCBI NO: 15226605 NR Description: glycine-rich RNA-binding protein (AtGRP7)
  misc_feature (1)..(115): Homolog of NCBI NO: 21553354 NR Description: glycine-rich RNA binding protein 7 [Arabidopsis
  misc_feature (1)..(115): Homolog of NCBI NO: 30681492 NR Description: glycine-rich RNA-binding protein (AtGRP7)
  misc_feature (1)..(115): Homolog of NCBI NO: 1346181 NR Description: Glycine-rich RNA-binding protein GRP2A
  misc_feature (1)..(115): Homolog of NCBI NO: 1346180 NR Description: Glycine-rich RNA-binding protein GRP1A
  misc_feature (1)..(115): Homolog of NCBI NO: 15235002 NR Description: glycine-rich RNA-binding protein 8 (GRP8) (CCR1)
  misc_feature (1)..(115): Homolog of NCBI NO: 34851124 NR Description: putative glycine-rich RNA-binding protein [Prunus
  misc_feature (1)..(115): Homolog of NCBI NO: 544416 NR Description: Glycine-rich RNA-binding protein 10
  misc_feature (1)..(115): Homolog of NCBI NO: 544423 NR Description: Glycine-rich RNA-binding protein 2
  misc_feature (1)..(115): Homolog of NCBI NO: 10799202 NR Description: glycine-rich RNA-binding protein [Sorghum bicolor]

SEQ ID NO: 108626 - protein, 108 aa, Arabidopsis thaliana; identical to SEQ ID NO: 76879
  peptide (1)..(108): Ceres Seq. ID no. 13667948
  misc_feature (20)..(106): Pfam Name: Herpesvirus large structural phosphoprotein UL32 Pfam Description: Herpesvirus large structural phosphoprotein UL32
  misc_feature (1)..(108): Homolog of NCBI NO: 15226605 NR Description: glycine-rich RNA-binding protein (AtGRP7)
  misc_feature (1)..(108): Homolog of NCBI NO: 21553354 NR Description: glycine-rich RNA binding protein 7 [Arabidopsis
  misc_feature (1)..(108): Homolog of NCBI NO: 30681492 NR Description: glycine-rich RNA-binding protein (AtGRP7)
  misc_feature (1)..(108): Homolog of NCBI NO: 1346181 NR Description: Glycine-rich RNA-binding protein GRP2A
  misc_feature (1)..(108): Homolog of NCBI NO: 1346180 NR Description: Glycine-rich RNA-binding protein GRP1A
  misc_feature (1)..(108): Homolog of NCBI NO: 15235002 NR Description: glycine-rich RNA-binding protein 8 (GRP8) (CCR1)
  misc_feature (1)..(108): Homolog of NCBI NO: 34851124 NR Description: putative glycine-rich RNA-binding protein [Prunus
  misc_feature (1)..(108): Homolog of NCBI NO: 544416 NR Description: Glycine-rich RNA-binding protein 10
  misc_feature (1)..(108): Homolog of NCBI NO: 544423 NR Description: Glycine-rich RNA-binding protein 2
  misc_feature (1)..(108): Homolog of NCBI NO: 10799202 NR Description: glycine-rich RNA-binding protein [Sorghum bicolor]

SEQ ID NO: 108627 - DNA, 823 bp, Arabidopsis thaliana
  misc_feature (1)..(823): Ceres Seq. ID no. 13667949
  misc_feature: MA Experiment ID: 20000495 Result: Down-regulated in Transcription
  misc_feature: MA Experiment 20000495 PARAMETER Experiment Name: At_Guard_Cells_P Parameter: Harvest Date Value: 8/2/2002
  misc_feature: MA Experiment 20000495 PARAMETER Experiment Name: At_Guard_Cells_P Parameter: Organism Value: A. thaliana
  misc_feature: MA Experiment 20000495 PARAMETER Experiment Name: At_Guard_Cells_P Parameter: Tissue Value: Guard Cells vs. Leaves
  misc_feature: MA Experiment ID: 20001451 Result: Down-regulated in Transcription
  misc_feature: MA Experiment 20001451 PARAMETER Experiment Name: At_Far-red-induction_P Parameter: Age (day) Value: 7
  misc_feature: MA Experiment 20001451 PARAMETER Experiment Name: At_Far-red-induction_P Parameter: Light Value: Far-red vs. White
  misc_feature: MA Experiment 20001451 PARAMETER Experiment Name: At_Far-red-induction_P Parameter: Organism Value: A. thaliana
  misc_feature: MA Experiment 20001451 PARAMETER Experiment Name: At_Far-red-induction_P Parameter: Plant Line Value: Columbia
  misc_feature: MA Experiment 20001451 PARAMETER Experiment Name: At_Far-red-induction_P Parameter: Timepoint (hr) Value: 24
  misc_feature: MA Experiment 20001451 PARAMETER Experiment Name: At_Far-red-induction_P Parameter: Tissue Value: Whole Plant
  misc_feature: Pfam Name: UQ_con Pfam Description: Ubiquitin-conjugating enzyme
ctcgtgcattgtagagtgagattctaaagagagagagagagagagatatggctagtggaatcgctcgtggtcgtttagctgaagagaggaaatcgtggaggaagaatcatcctcatggttttgtggcaaagccggagacggggcaggatggaactgtgaatctaatggtgtggcattgcactatacctggtaaagctgggactgattgggaaggtggattctttccattaacgatgcacttcagtgaggattatccgagcaaacctccgaaatgtaaatttccacaagggtttttccaccctaatgtctatccatctggaactgtctgtctctctatccttaacgaggattatggatggagaccagccatcaccgtgaagcagattcttgttggtattcaggatttacttgacacaccgaatcccgctgaccctgcacagacagatggttatcatctcttctgtcaggatccagttgagtacaagaaaagggtgaagctgcagtccaagcagtatcctgctcttgtctaaaacctcaaaaaagagaacgcaccaaaactgatgacaagctctgaatattttctcgtcttgtgtcattatgtttagatgtcattgggtgattgaaaactcctcattttggcaccttaagacactggaatctatttattttcgaaaaaaaactcttctttctctatttaactgttaatattcttggtactgattcagttggtgttgcttctatataatacataattatgttctctggtcgttcatgagtgttgtccaaattctactaagtgaaatatgaagtcttcattccatag

SEQ ID NO: 108628 - protein, 160 aa, Arabidopsis thaliana; identical to SEQ ID NO: 35742
  peptide (1)..(160): Ceres Seq. ID no. 13667950
  misc_feature: Pfam Name: UQ_con Pfam Description: Ubiquitin-conjugating enzyme
  misc_feature (1)..(160): Homolog of NCBI NO: 15230881 NR Description: ubiquitin-conjugating enzyme, putative
  misc_feature (1)..(160): Homolog of NCBI NO: 25446690 NR Description: Putative ubiquitin-conjugating enzyme [Oryza
  misc_feature (1)..(160): Homolog of NCBI NO: 20975734 NR Description: putative ubiquitin-conjugating enzyme [Populus
  misc_feature (1)..(160): Homolog of NCBI NO: 37536440 NR Description: putative ubiquitin-conjugating enzyme [Oryza
  misc_feature (35)..(160): Homolog of NCBI NO: 11272348 NR Description: ubiquitin-conjugating enzyme [imported] - Prunus
  misc_feature (1)..(158): Homolog of NCBI NO: 38345867 NR Description: OSJNBa0064M23.9 [Oryza sativa (japonica
  misc_feature (3)..(157): Homolog of NCBI NO: 7621708 NR Description: putative E2 enzyme Ubc9 [Dictyostelium discoideum]
  misc_feature (3)..(159): Homolog of NCBI NO: 30584109 NR Description: Homo sapiens ubiquitin-conjugating enzyme E2I
  misc_feature (3)..(156): Homolog of NCBI NO: 2194010 NR Description: Chain A, Human Ubiquitin-Conjugating Enzyme Ubc9
  misc_feature (3)..(156): Homolog of NCBI NO: 3212324 NR Description: Human Ubc9

SEQ ID NO: 108629 - protein, 121 aa, Arabidopsis thaliana; identical to SEQ ID NO: 35743
  peptide (1)..(121): Ceres Seq. ID no. 13667951
  misc_feature: Pfam Name: UQ_con Pfam Description: Ubiquitin-conjugating enzyme
  misc_feature (1)..(121): Homolog of NCBI NO: 15230881 NR Description: ubiquitin-conjugating enzyme, putative
  misc_feature (1)..(121): Homolog of NCBI NO: 25446690 NR Description: Putative ubiquitin-conjugating enzyme [Oryza
  misc_feature (1)..(121): Homolog of NCBI NO: 20975734 NR Description: putative ubiquitin-conjugating enzyme [Populus
  misc_feature (1)..(121): Homolog of NCBI NO: 37536440 NR Description: putative ubiquitin-conjugating enzyme [Oryza
  misc_feature (1)..(121): Homolog of NCBI NO: 11272348 NR Description: ubiquitin-conjugating enzyme [imported] - Prunus
  misc_feature (1)..(119): Homolog of NCBI NO: 38345867 NR Description: OSJNBa0064M23.9 [Oryza sativa (japonica
  misc_feature (1)..(118): Homolog of NCBI NO: 7621708 NR Description: putative E2 enzyme Ubc9 [Dictyostelium discoideum]
  misc_feature (1)..(120): Homolog of NCBI NO: 30584109 NR Description: Homo sapiens ubiquitin-conjugating enzyme E2I
  misc_feature (1)..(117): Homolog of NCBI NO: 2194010 NR Description: Chain A, Human Ubiquitin-Conjugating Enzyme Ubc9
  misc_feature (1)..(117): Homolog of NCBI NO: 3212324 NR Description: Human Ubc9

SEQ ID NO: 108630 - protein, 98 aa, Arabidopsis thaliana; identical to SEQ ID NO: 35744
  peptide (1)..(98): Ceres Seq. ID no. 13667952
  misc_feature: Pfam Name: UQ_con Pfam Description: Ubiquitin-conjugating enzyme
  misc_feature (1)..(98): Homolog of NCBI NO: 15230881 NR Description: ubiquitin-conjugating enzyme, putative
  misc_feature (1)..(98): Homolog of NCBI NO: 25446690 NR Description: Putative ubiquitin-conjugating enzyme [Oryza
  misc_feature (1)..(98): Homolog of NCBI NO: 20975734 NR Description: putative ubiquitin-conjugating enzyme [Populus
  misc_feature (1)..(98): Homolog of NCBI NO: 37536440 NR Description: putative ubiquitin-conjugating enzyme [Oryza
  misc_feature (1)..(98): Homolog of NCBI NO: 11272348 NR Description: ubiquitin-conjugating enzyme [imported] - Prunus
  misc_feature (1)..(96): Homolog of NCBI NO: 38345867 NR Description: OSJNBa0064M23.9 [Oryza sativa (japonica
  misc_feature (1)..(95): Homolog of NCBI NO: 7621708 NR Description: putative E2 enzyme Ubc9 [Dictyostelium discoideum]
  misc_feature (1)..(97): Homolog of NCBI NO: 30584109 NR Description: Homo sapiens ubiquitin-conjugating enzyme E2I
  misc_feature (1)..(94): Homolog of NCBI NO: 2194010 NR Description: Chain A, Human Ubiquitin-Conjugating Enzyme Ubc9
  misc_feature (1)..(94): Homolog of NCBI NO: 4507785 NR Description: ubiquitin-conjugating enzyme E2I (UBC9 homolog,

SEQ ID NO: 108631 - DNA, 1948 bp, Arabidopsis thaliana
  misc_feature (1)..(1948): Ceres Seq. ID no. 13667957
  misc_feature: MA Experiment ID: 108461 Result: Up-regulated in Transcription
  misc_feature: MA Experiment 108461 PARAMETER Experiment Name: At_Germinating_Seeds_cDNA_P Parameter: Age (day) Value: 1 vs. 0
  misc_feature: MA Experiment 108461 PARAMETER Experiment Name: At_Germinating_Seeds_cDNA_P Parameter: Tissue Value: Germinating Seeds
  misc_feature: MA Experiment ID: 108462 Result: Up-regulated in Transcription
  misc_feature: MA Experiment 108462 PARAMETER Experiment Name: At_Germinating_Seeds_cDNA_P Parameter: Age (day) Value: 2 vs. 0
  misc_feature: MA Experiment 108462 PARAMETER Experiment Name: At_Germinating_Seeds_cDNA_P Parameter: Tissue Value: Germinating Seeds
  misc_feature: MA Experiment ID: 108463 Result: Up-regulated in Transcription
  misc_feature: MA Experiment 108463 PARAMETER Experiment Name: At_Germinating_Seeds_cDNA_P Parameter: Age (day) Value: 3 vs. 0
  misc_feature: MA Experiment 108463 PARAMETER Experiment Name: At_Germinating_Seeds_cDNA_P Parameter: Tissue Value: Germinating Seeds
  misc_feature: MA Experiment ID: 108464 Result: Up-regulated in Transcription
  misc_feature: MA Experiment 108464 PARAMETER Experiment Name: At_Germinating_Seeds_cDNA_P Parameter: Age (day) Value: 4 vs. 0
  misc_feature: MA Experiment 108464 PARAMETER Experiment Name: At_Germinating_Seeds_cDNA_P Parameter: Tissue Value: Germinating Seeds
  misc_feature: MA Experiment ID: 108561 Result: Down-regulated in Transcription
  misc_feature: MA Experiment 108561 PARAMETER Experiment Name: At_100uM_ABA_cDNA_P Parameter: Timepoint (hr) Value: 6
  misc_feature: MA Experiment 108561 PARAMETER Experiment Name: At_100uM_ABA_cDNA_P Parameter: Tissue Value: Aerial
  misc_feature: MA Experiment 108561 PARAMETER Experiment Name: At_100uM_ABA_cDNA_P Parameter: Treatment Value: 100uM ABA vs. No Treatment
  misc_feature: MA Experiment ID: 108569 Result: Up-regulated in Transcription
  misc_feature: MA Experiment 108569 PARAMETER Experiment Name: At_0.001%_MeJA__cDNA_P Parameter: Timepoint (hr) Value: 6
  misc_feature: MA Experiment 108569 PARAMETER Experiment Name: At_0.001%_MeJA__cDNA_P Parameter: Tissue Value: Aerial
  misc_feature: MA Experiment 108569 PARAMETER Experiment Name: At_0.001%_MeJA__cDNA_P Parameter: Treatment Value: 0.001% MeJA vs. No Treatment
  misc_feature: MA Experiment ID: 108594 Result: Up-regulated in Transcription
  misc_feature: MA Experiment 108594 PARAMETER Experiment Name: At_Ler-rhl_Root_cDNA_P Parameter: Plant Line Value: null
  misc_feature: MA Experiment ID: 108595 Result: Up-regulated in Transcription
  misc_feature: MA Experiment 108595 PARAMETER Experiment Name: At_Ler-pi_Ovule_cDNA_P Parameter: Plant Line Value: null
  misc_feature: MA Experiment ID: 108607 Result: Down-regulated in Transcription
  misc_feature: MA Experiment 108607 PARAMETER Experiment Name: At_100uM_ABA_cDNA_P Parameter: Timepoint (hr) Value: 4
  misc_feature: MA Experiment 108607 PARAMETER Experiment Name: At_100uM_ABA_cDNA_P Parameter: Tissue Value: Aerial
  misc_feature: MA Experiment 108607 PARAMETER Experiment Name: At_100uM_ABA_cDNA_P Parameter: Treatment Value: 100uM ABA vs. No Treatment
  misc_feature: MA Experiment ID: 20000069 Result: Down-regulated in Transcription
  misc_feature: MA Experiment 20000069 PARAMETER Experiment Name: At_100uM_ABA_Mutants_cDNA_P Parameter: Plant Line Value: CS23
  misc_feature: MA Experiment 20000069 PARAMETER Experiment Name: At_100uM_ABA_Mutants_cDNA_P Parameter: Timepoint (hr) Value: 6
  misc_feature: MA Experiment 20000069 PARAMETER Experiment Name: At_100uM_ABA_Mutants_cDNA_P Parameter: Tissue Value: Aerial
  misc_feature: MA Experiment 20000069 PARAMETER Experiment Name: At_100uM_ABA_Mutants_cDNA_P Parameter: Treatment Value: 100uM ABA vs. No Treatment
  misc_feature: MA Experiment ID: 20000070 Result: Down-regulated in Transcription
  misc_feature: MA Experiment 20000070 PARAMETER Experiment Name: At_100uM_ABA_Mutants_cDNA_P Parameter: Plant Line Value: CS24
  misc_feature: MA Experiment 20000070 PARAMETER Experiment Name: At_100uM_ABA_Mutants_cDNA_P Parameter: Timepoint (hr) Value: 6
  misc_feature: MA Experiment 20000070 PARAMETER Experiment Name: At_100uM_ABA_Mutants_cDNA_P Parameter: Tissue Value: Aerial
  misc_feature: MA Experiment 20000070 PARAMETER Experiment Name: At_100uM_ABA_Mutants_cDNA_P Parameter: Treatment Value: 100uM ABA vs. No Treatment
  misc_feature: MA Experiment ID: 20000071 Result: Down-regulated in Transcription
  misc_feature: MA Experiment 20000071 PARAMETER Experiment Name: At_100uM_ABA_Mutants_cDNA_P Parameter: Plant Line Value: CS8104
  misc_feature: MA Experiment 20000071 PARAMETER Experiment Name: At_100uM_ABA_Mutants_cDNA_P Parameter: Timepoint (hr) Value: 6
  misc_feature: MA Experiment 20000071 PARAMETER Experiment Name: At_100uM_ABA_Mutants_cDNA_P Parameter: Tissue Value: Aerial
  misc_feature: MA Experiment 20000071 PARAMETER Experiment Name: At_100uM_ABA_Mutants_cDNA_P Parameter: Treatment Value: 100uM ABA vs. No Treatment
  misc_feature: MA Experiment ID: 20000072 Result: Down-regulated in Transcription
  misc_feature: MA Experiment 20000072 PARAMETER Experiment Name: At_100uM_ABA_Mutants_cDNA_P Parameter: Plant Line Value: CS8105
  misc_feature: MA Experiment 20000072 PARAMETER Experiment Name: At_100uM_ABA_Mutants_cDNA_P Parameter: Timepoint (hr) Value: 6
  misc_feature: MA Experiment 20000072 PARAMETER Experiment Name: At_100uM_ABA_Mutants_cDNA_P Parameter: Tissue Value: Aerial
  misc_feature: MA Experiment 20000072 PARAMETER Experiment Name: At_100uM_ABA_Mutants_cDNA_P Parameter: Treatment Value: 100uM ABA vs. No Treatment
  misc_feature: MA Experiment ID: 20000087 Result: Down-regulated in Transcription
  misc_feature: MA Experiment 20000087 PARAMETER Experiment Name: At_100uM_ABA_Mutants_cDNA_P Parameter: Plant Line Value: WS
  misc_feature: MA Experiment 20000087 PARAMETER Experiment Name: At_100uM_ABA_Mutants_cDNA_P Parameter: Timepoint (hr) Value: 6
  misc_feature: MA Experiment 20000087 PARAMETER Experiment Name: At_100uM_ABA_Mutants_cDNA_P Parameter: Tissue Value: Aerial
  misc_feature: MA Experiment 20000087 PARAMETER Experiment Name: At_100uM_ABA_Mutants_cDNA_P Parameter: Treatment Value: 100uM ABA vs. No Treatment
  misc_feature: MA Experiment ID: 20000111 Result: Down-regulated in Transcription
  misc_feature: MA Experiment 20000111 PARAMETER Experiment Name: At_42deg_Heat_cDNA_P Parameter: Temperature (deg C) Value: 42 vs. 22
  misc_feature: MA Experiment 20000111 PARAMETER Experiment Name: At_42deg_Heat_cDNA_P Parameter: Timepoint (hr) Value: 6
  misc_feature: MA Experiment 20000111 PARAMETER Experiment Name: At_42deg_Heat_cDNA_P Parameter: Tissue Value: Aerial
  misc_feature: MA Experiment ID: 20000112 Result: Down-regulated in Transcription
  misc_feature: MA Experiment 20000112 PARAMETER Experiment Name: At_42deg_Heat_cDNA_P Parameter: Temperature (deg C) Value: 42 vs. 22
  misc_feature: MA Experiment 20000112 PARAMETER Experiment Name: At_42deg_Heat_cDNA_P Parameter: Timepoint (hr) Value: 2
  misc_feature: MA Experiment 20000112 PARAMETER Experiment Name: At_42deg_Heat_cDNA_P Parameter: Tissue Value: Aerial
  misc_feature: MA Experiment ID: 20000113 Result: Down-regulated in Transcription
  misc_feature: MA Experiment 20000113 PARAMETER Experiment Name: At_42deg_Heat_cDNA_P Parameter: Temperature (deg C) Value: 42 vs. 22
  misc_feature: MA Experiment 20000113 PARAMETER Experiment Name: At_42deg_Heat_cDNA_P Parameter: Timepoint (hr) Value: 8
  misc_feature: MA Experiment 20000113 PARAMETER Experiment Name: At_42deg_Heat_cDNA_P Parameter: Tissue Value: Aerial
  misc_feature: MA Experiment ID: 20000117 Result: Down-regulated in Transcription
  misc_feature: MA Experiment 20000117 PARAMETER Experiment Name: At_100uM_ABA_Mutants_cDNA_P Parameter: Plant Line Value: Columbia
  misc_feature: MA Experiment 20000117 PARAMETER Experiment Name: At_100uM_ABA_Mutants_cDNA_P Parameter: Timepoint (hr) Value: 6
  misc_feature: MA Experiment 20000117 PARAMETER Experiment Name: At_100uM_ABA_Mutants_cDNA_P Parameter: Tissue Value: Aerial
  misc_feature: MA Experiment 20000117 PARAMETER Experiment Name: At_100uM_ABA_Mutants_cDNA_P Parameter: Treatment Value: 100uM ABA vs. No Treatment
  misc_feature: MA Experiment ID: 20000144 Result: Down-regulated in Transcription
  misc_feature: MA Experiment 20000144 PARAMETER Experiment Name: At_42deg_Heat_cDNA_P Parameter: Temperature (deg C) Value: 42 vs. 22
  misc_feature: MA Experiment 20000144 PARAMETER Experiment Name: At_42deg_Heat_cDNA_P Parameter: Timepoint (hr) Value: 1
  misc_feature: MA Experiment 20000144 PARAMETER Experiment Name: At_42deg_Heat_cDNA_P Parameter: Tissue Value: Aerial
  misc_feature: MA Experiment ID: 20000169 Result: Down-regulated in Transcription
  misc_feature: MA Experiment 20000169 PARAMETER Experiment Name: At_100uM_ABA_P Parameter: Age (day) Value: 14
  misc_feature: MA Experiment 20000169 PARAMETER Experiment Name: At_100uM_ABA_P Parameter: Organism Value: A. thaliana
  misc_feature: MA Experiment 20000169 PARAMETER Experiment Name: At_100uM_ABA_P Parameter: Plant Line Value: WS
  misc_feature: MA Experiment 20000169 PARAMETER Experiment Name: At_100uM_ABA_P Parameter: Timepoint (hr) Value: 6
  misc_feature: MA Experiment 20000169 PARAMETER Experiment Name: At_100uM_ABA_P Parameter: Tissue Value: Aerial
  misc_feature: MA Experiment 20000169 PARAMETER Experiment Name: At_100uM_ABA_P Parameter: Treatment Value: 100uM ABA vs. No Treatment
  misc_feature: MA Experiment ID: 20000171 Result: Down-regulated in Transcription
  misc_feature: MA Experiment 20000171 PARAMETER Experiment Name: At_42deg_Heat_P Parameter: Age (day) Value: 14
  misc_feature: MA Experiment 20000171 PARAMETER Experiment Name: At_42deg_Heat_P Parameter: Organism Value: A. thaliana
  misc_feature: MA Experiment 20000171 PARAMETER Experiment Name: At_42deg_Heat_P Parameter: Plant Line Value: WS
  misc_feature: MA Experiment 20000171 PARAMETER Experiment Name: At_42deg_Heat_P Parameter: Temperature (deg C) Value: 42 vs. 22
  misc_feature: MA Experiment 20000171 PARAMETER Experiment Name: At_42deg_Heat_P Parameter: Timepoint (hr) Value: 1
  misc_feature: MA Experiment 20000171 PARAMETER Experiment Name: At_42deg_Heat_P Parameter: Tissue Value: Aerial
  misc_feature: MA Experiment ID: 20000179 Result: Up-regulated in Transcription
  misc_feature: MA Experiment 20000179 PARAMETER Experiment Name: At_Germinating_Seeds_P Parameter: Age (hr) Value: 6 vs. 0
  misc_feature: MA Experiment 20000179 PARAMETER Experiment Name: At_Germinating_Seeds_P Parameter: Tissue Value: Germinating Seeds
  misc_feature: MA Experiment ID: 20000180 Result: Up-regulated in Transcription
  misc_feature: MA Experiment 20000180 PARAMETER Experiment Name: At_Germinating_Seeds_P Parameter: Age (hr) Value: 24 vs. 0
  misc_feature: MA Experiment 20000180 PARAMETER Experiment Name: At_Germinating_Seeds_P Parameter: Tissue Value: Germinating Seeds
  misc_feature: MA Experiment ID: 20000227 Result: Up-regulated in Transcription
  misc_feature: MA Experiment 20000227 PARAMETER Experiment Name: At_Root-Tips-vs-Tops_P Parameter: Tissue Value: Root Tips vs. Root Tops
  misc_feature: MA Experiment ID: 20000437 Result: Down-regulated in Transcription
  misc_feature: MA Experiment 20000437 PARAMETER Experiment Name: At_Drought_P Parameter: Age (day) Value: 8
  misc_feature: MA Experiment 20000437 PARAMETER Experiment Name: At_Drought_P Parameter: Organism Value: A. thaliana
  misc_feature: MA Experiment 20000437 PARAMETER Experiment Name: At_Drought_P Parameter: Plant Line Value: WS
  misc_feature: MA Experiment 20000437 PARAMETER Experiment Name: At_Drought_P Parameter: Timepoint (hr) Value: 24
  misc_feature: MA Experiment 20000437 PARAMETER Experiment Name: At_Drought_P Parameter: Tissue Value: Whole Plant
  misc_feature: MA Experiment 20000437 PARAMETER Experiment Name: At_Drought_P Parameter: Treatment Value: Drought vs. No Drought
  misc_feature: MA Experiment ID: 20000439 Result: Down-regulated in Transcription
  misc_feature: MA Experiment 20000439 PARAMETER Experiment Name: At_Roots__P Parameter: Age (day) Value: 14 vs. 21
  misc_feature: MA Experiment 20000439 PARAMETER Experiment Name: At_Roots__P Parameter: Organism Value: A. thaliana
  misc_feature: MA Experiment 20000439 PARAMETER Experiment Name: At_Roots__P Parameter: Tissue Value: Roots vs. Whole Plant
  misc_feature: MA Experiment ID: 20001555 Result: Down-regulated in Transcription
  misc_feature: MA Experiment 20001555 PARAMETER Experiment Name: At_Drought_Soil_Dry_P Parameter: Age (day) Value: 24
  misc_feature: MA Experiment 20001555 PARAMETER Experiment Name: At_Drought_Soil_Dry_P Parameter: Organism Value: A. thaliana
  misc_feature: MA Experiment 20001555 PARAMETER Experiment Name: At_Drought_Soil_Dry_P Parameter: Plant Line Value: WS
  misc_feature: MA Experiment 20001555 PARAMETER Experiment Name: At_Drought_Soil_Dry_P Parameter: Post Timepoint (hr) Value: None
  misc_feature: MA Experiment 20001555 PARAMETER Experiment Name: At_Drought_Soil_Dry_P Parameter: Post-Treatment Value: None
  misc_feature: MA Experiment 20001555 PARAMETER Experiment Name: At_Drought_Soil_Dry_P Parameter: Timepoint (day) Value: 10
  misc_feature: MA Experiment 20001555 PARAMETER Experiment Name: At_Drought_Soil_Dry_P Parameter: Treatment Value: Drought vs. No Drought
  misc_feature: MA Experiment ID: 20001559 Result: Down-regulated in Transcription
  misc_feature: MA Experiment 20001559 PARAMETER Experiment Name: At_Drought_Soil_Dry_P Parameter: Age (day) Value: 28
  misc_feature: MA Experiment 20001559 PARAMETER Experiment Name: At_Drought_Soil_Dry_P Parameter: Organism Value: A. thaliana
  misc_feature: MA Experiment 20001559 PARAMETER Experiment Name: At_Drought_Soil_Dry_P Parameter: Plant Line Value: WS
  misc_feature: MA Experiment 20001559 PARAMETER Experiment Name: At_Drought_Soil_Dry_P Parameter: Post Timepoint (hr) Value: 29
  misc_feature: MA Experiment 20001559 PARAMETER Experiment Name: At_Drought_Soil_Dry_P Parameter: Post-Treatment Value: Re-Water vs. No Drought
  misc_feature: MA Experiment 20001559 PARAMETER Experiment Name: At_Drought_Soil_Dry_P Parameter: Timepoint (day) Value: 14
  misc_feature: MA Experiment 20001559 PARAMETER Experiment Name: At_Drought_Soil_Dry_P Parameter: Treatment Value: Drought vs. No Drought
  misc_feature: MA Experiment ID: 20001757 Result: Up-regulated in Transcription
  misc_feature: MA Experiment 20001757 PARAMETER Experiment Name: At_50mM_NH4NO3_L-to-H_P Parameter: Timepoint (hr) Value: 6
  misc_feature: MA Experiment 20001757 PARAMETER Experiment Name: At_50mM_NH4NO3_L-to-H_P Parameter: Tissue Value: Leaf
  misc_feature: MA Experiment 20001757 PARAMETER Experiment Name: At_50mM_NH4NO3_L-to-H_P Parameter: Treatment Value: 50mM NH4NO3 vs 100mM Mannitol
  misc_feature: MA Experiment ID: 20001904 Result: Down-regulated in Transcription
  misc_feature: MA Experiment 20001904 PARAMETER Experiment Name: At_Drought_Reproduction_P Parameter: Age (day) Value: 37
  misc_feature: MA Experiment 20001904 PARAMETER Experiment Name: At_Drought_Reproduction_P Parameter: Organism Value: A. thaliana
  misc_feature: MA Experiment 20001904 PARAMETER Experiment Name: At_Drought_Reproduction_P Parameter: Plant Line Value: WS
  misc_feature: MA Experiment 20001904 PARAMETER Experiment Name: At_Drought_Reproduction_P Parameter: Timepoint (day) Value: 7
  misc_feature: MA Experiment 20001904 PARAMETER Experiment Name: At_Drought_Reproduction_P Parameter: Tissue Value: Rosettes
  misc_feature: MA Experiment 20001904 PARAMETER Experiment Name: At_Drought_Reproduction_P Parameter: Treatment Value: Drought vs. No Drought
  misc_feature: MA Experiment ID: 20001905 Result: Down-regulated in Transcription
  misc_feature: MA Experiment 20001905 PARAMETER Experiment Name: At_Drought_Reproduction_P Parameter: Age (day) Value: 40
  misc_feature: MA Experiment 20001905 PARAMETER Experiment Name: At_Drought_Reproduction_P Parameter: Organism Value: A. thaliana
  misc_feature: MA Experiment 20001905 PARAMETER Experiment Name: At_Drought_Reproduction_P Parameter: Plant Line Value: WS
  misc_feature: MA Experiment 20001905 PARAMETER Experiment Name: At_Drought_Reproduction_P Parameter: Timepoint (day) Value: 10
  misc_feature: MA Experiment 20001905 PARAMETER Experiment Name: At_Drought_Reproduction_P Parameter: Tissue Value: Rosettes
  misc_feature: MA Experiment 20001905 PARAMETER Experiment Name: At_Drought_Reproduction_P Parameter: Treatment Value: Drought vs. No Drought
  misc_feature: MA Experiment ID: 20001906 Result: Down-regulated in Transcription
  misc_feature: MA Experiment 20001906 PARAMETER Experiment Name: At_Drought_Reproduction_P Parameter: Age (day) Value: 35
  misc_feature: MA Experiment 20001906 PARAMETER Experiment Name: At_Drought_Reproduction_P Parameter: Organism Value: A. thaliana
  misc_feature: MA Experiment 20001906 PARAMETER Experiment Name: At_Drought_Reproduction_P Parameter: Plant Line Value: WS
  misc_feature: MA Experiment 20001906 PARAMETER Experiment Name: At_Drought_Reproduction_P Parameter: Timepoint (day) Value: 5
  misc_feature: MA Experiment 20001906 PARAMETER Experiment Name: At_Drought_Reproduction_P Parameter: Tissue Value: Siliques
  misc_feature: MA Experiment 20001906 PARAMETER Experiment Name: At_Drought_Reproduction_P Parameter: Treatment Value: Drought vs. No Drought
  misc_feature: MA Experiment ID: 20001908 Result: Down-regulated in Transcription
  misc_feature: MA Experiment 20001908 PARAMETER Experiment Name: At_Drought_Reproduction_P Parameter: Age (day) Value: 40
  misc_feature: MA Experiment 20001908 PARAMETER Experiment Name: At_Drought_Reproduction_P Parameter: Organism Value: A. thaliana
  misc_feature: MA Experiment 20001908 PARAMETER Experiment Name: At_Drought_Reproduction_P Parameter: Plant Line Value: WS
  misc_feature: MA Experiment 20001908 PARAMETER Experiment Name: At_Drought_Reproduction_P Parameter: Timepoint (day) Value: 10
  misc_feature: MA Experiment 20001908 PARAMETER Experiment Name: At_Drought_Reproduction_P Parameter: Tissue Value: Siliques
  misc_feature: MA Experiment 20001908 PARAMETER Experiment Name: At_Drought_Reproduction_P Parameter: Treatment Value: Drought vs. No Drought
gccacgagaataatcccaaaaaccagaaaaaaaggagctttgcttttgtaggaattaatggattcagtgaactccttcaaaggatatggaaaagtagacgaagctcaagatttagcattgaagaaaaagacaagaaaacgtctacttctactatccatctccgtcgtagttctcatcgccgtaataatcgccgccgtagtcgccaccgtcgttcacaagaacaaaaacgagtcaacaccgagtccacctcccgagttaacaccatccacttcactcaaagccatttgcagtgtaactcgtttccctgaatcttgcatttcaagtatctcaaagcttccatcttccaacacaacagatccagagactctattcaagctctcattgaaagtaatcatcgatgagcttgattcgatttccgatttaccggagaagctatcgaaagagactgaagacgaaagaatcaaatctgcgttaagggtttgtggagatctgatcgaagatgctttagatcgactcaacgacactgtttccgccattgatgacgaagaaaagaagaaaactttgtcatcttccaaaatcgaagatctcaaaacttggctaagcgcaacggtaacagatcacgagacgtgtttcgattcgttagatgagttgaaacagaacaaaacagagtatgcgaactcgacgattactcagaatctgaaatcggcaatgagtagatcaacggagttcacaagtaacagtcttgcaatagtatcgaagattctttctgcgttaagcgatttggggattccgatacacaggagaagaagactgatgagtcatcatcatcagcaaagtgtggattttgagaaatgggcacgacggaggttgttgcaaacggcaggtttaaagcctgatgtgacggtggcgggtgatggaaccggtgatgtgttgactgtgaatgaagcggtggctaaggtgccgaagaagagtttgaagatgtttgtgatttatgtgaagagtggaacttatgttgagaatgttgtgatggataagagtaaatggaacgttatgatttacggtgacggcaaagggaagaccattatttccggcagcaagaacttcgtcgacgggactcctacttacgaaacggcgacgtttgctatacaaggcaaaggatttataatgaaggatattggaatcataaacaccgcgggagcagcaaaacaccaagctgtggcattccgatcaggctctgatttctcagtctattaccaatgctcattcgatggttttcaagacactctttaccctcactccaaccgccaattctaccgtgactgcgacgttactgggacaatcgacttcattttcggaagtgctgcggtcgttttccaaggctgcaaaatcatgcctcgccagcctctttctaaccaattcaacaccataaccgctcagggcaaaaaagatccgaaccaaagctcggggatgtcgattcaacgatgcactatctccgcaaacggcaatgtgattgctcccacgtatcttggccggccgtggaaggagttttccacgacggttattatggagacggtgattggagcagtggttcgaccgtccgggtggatgtcatgggtttctggagttgatccaccagcaagtattgtctacggagagtataagaatacgggcccgggttcagatgtaacgcagagagttaaatgggctggatataaaccggttatgtcggacgccgaggctgcgaagtttacagtggctacgcttttacacggagctgattggataccggcaacaggagtgatcaatcagctatcttaatatagtgacaatacaattggattcgtagcttgtttttgaaaacatccggttgtgatctactttatatttgtttgacacttatgcatgatctgtaattttttccaacatagttgtattttgtgtatcccct

SEQ ID NO: 108632 - protein, 586 aa, Arabidopsis thaliana; identical to SEQ ID NO: 37485
  peptide (1)..(586): Ceres Seq. ID no. 13667958
  misc_feature (280)..(574): Pfam Name: Pectinesterase Pfam Description: Pectinesterase
  misc_feature (1)..(586): Homolog of NCBI NO: 15220958 NR Description: pectinesterase family [Arabidopsis thaliana] Pectinesterase 1 precursor (Pectin methylesterase 1) (PE 1)
  misc_feature (1)..(586): Homolog of NCBI NO: 21593683 NR Description: pectinesterase, putative [Arabidopsis thaliana]
  misc_feature (1)..(581): Homolog of NCBI NO: 6093739 NR Description: Pectinesterase 3 precursor (Pectin methylesterase
  misc_feature (46)..(577): Homolog of NCBI NO: 15231826 NR Description: pectinesterase family [Arabidopsis thaliana]
  misc_feature (15)..(581): Homolog of NCBI NO: 15238377 NR Description: pectinesterase family [Arabidopsis thaliana]
  misc_feature (15)..(581): Homolog of NCBI NO: 28393771 NR Description: unknown protein [Arabidopsis thaliana]
  misc_feature (24)..(586): Homolog of NCBI NO: 15241079 NR Description: pectinesterase family [Arabidopsis thaliana]
  misc_feature (22)..(581): Homolog of NCBI NO: 15230019 NR Description: pectinesterase family [Arabidopsis thaliana]
  misc_feature (22)..(581): Homolog of NCBI NO: 26451784 NR Description: putative pectinesterase [Arabidopsis thaliana]
  misc_feature (14)..(581): Homolog of NCBI NO: 15238729 NR Description: pectinesterase family [Arabidopsis thaliana] pectinesterase [Arabidopsis thaliana] putative pectinesterase [Arabidopsis thaliana]

SEQ ID NO: 108633 - protein, 369 aa, Arabidopsis thaliana; identical to SEQ ID NO: 37486
  peptide (1)..(369): Ceres Seq. ID no. 13667959
  misc_feature (63)..(357): Pfam Name: Pectinesterase Pfam Description: Pectinesterase
  misc_feature (1)..(369): Homolog of NCBI NO: 15220958 NR Description: pectinesterase family [Arabidopsis thaliana] Pectinesterase 1 precursor (Pectin methylesterase 1) (PE 1)
  misc_feature (1)..(369): Homolog of NCBI NO: 21593683 NR Description: pectinesterase, putative [Arabidopsis thaliana]
  misc_feature (1)..(364): Homolog of NCBI NO: 6093739 NR Description: Pectinesterase 3 precursor (Pectin methylesterase
  misc_feature (1)..(360): Homolog of NCBI NO: 15231826 NR Description: pectinesterase family [Arabidopsis thaliana]
  misc_feature (1)..(364): Homolog of NCBI NO: 15238377 NR Description: pectinesterase family [Arabidopsis thaliana]
  misc_feature (1)..(364): Homolog of NCBI NO: 28393771 NR Description: unknown protein [Arabidopsis thaliana]
  misc_feature (1)..(369): Homolog of NCBI NO: 15241079 NR Description: pectinesterase family [Arabidopsis thaliana]
  misc_feature (1)..(364): Homolog of NCBI NO: 15230019 NR Description: pectinesterase family [Arabidopsis thaliana]
  misc_feature (1)..(364): Homolog of NCBI NO: 26451784 NR Description: putative pectinesterase [Arabidopsis thaliana]
  misc_feature (1)..(364): Homolog of NCBI NO: 15238729 NR Description: pectinesterase family [Arabidopsis thaliana] pectinesterase [Arabidopsis thaliana] putative pectinesterase [Arabidopsis thaliana]

SEQ ID NO: 108634 - protein, 334 aa, Arabidopsis thaliana; identical to SEQ ID NO: 37487
  peptide (1)..(334): Ceres Seq. ID no. 13667960
  misc_feature (28)..(322): Pfam Name: Pectinesterase Pfam Description: Pectinesterase
  misc_feature (1)..(334): Homolog of NCBI NO: 15220958 NR Description: pectinesterase family [Arabidopsis thaliana] Pectinesterase 1 precursor (Pectin methylesterase 1) (PE 1)
  misc_feature (1)..(334): Homolog of NCBI NO: 21593683 NR Description: pectinesterase, putative [Arabidopsis thaliana]
  misc_feature (1)..(329): Homolog of NCBI NO: 6093739 NR Description: Pectinesterase 3 precursor (Pectin methylesterase
  misc_feature (1)..(325): Homolog of NCBI NO: 15231826 NR Description: pectinesterase family [Arabidopsis thaliana]
  misc_feature (1)..(329): Homolog of NCBI NO: 15238377 NR Description: pectinesterase family [Arabidopsis thaliana]
  misc_feature (1)..(329): Homolog of NCBI NO: 28393771 NR Description: unknown protein [Arabidopsis thaliana]
  misc_feature (1)..(334): Homolog of NCBI NO: 15241079 NR Description: pectinesterase family [Arabidopsis thaliana]
  misc_feature (1)..(329): Homolog of NCBI NO: 15230019 NR Description: pectinesterase family [Arabidopsis thaliana]
  misc_feature (1)..(329): Homolog of NCBI NO: 26451784 NR Description: putative pectinesterase [Arabidopsis thaliana]
  misc_feature (1)..(329): Homolog of NCBI NO: 15238729 NR Description: pectinesterase family [Arabidopsis thaliana] pectinesterase [Arabidopsis thaliana] putative pectinesterase [Arabidopsis thaliana]

SEQ ID NO: 108635 - DNA, 1847 bp, Arabidopsis thaliana
  misc_feature (1)..(1847): Ceres Seq. ID no. 13667977
  misc_feature: MA Experiment ID: 20000182 Result: Up-regulated in Transcription
  misc_feature: MA Experiment 20000182 PARAMETER Experiment Name: At_2mM_SA_P Parameter: Age (day) Value: 14
  misc_feature: MA Experiment 20000182 PARAMETER Experiment Name: At_2mM_SA_P Parameter: Organism Value: A. thaliana
  misc_feature: MA Experiment 20000182 PARAMETER Experiment Name: At_2mM_SA_P Parameter: Plant Line Value: WS
  misc_feature: MA Experiment 20000182 PARAMETER Experiment Name: At_2mM_SA_P Parameter: Timepoint (hr) Value: 6
  misc_feature: MA Experiment 20000182 PARAMETER Experiment Name: At_2mM_SA_P Parameter: Tissue Value: Aerial
  misc_feature: MA Experiment 20000182 PARAMETER Experiment Name: At_2mM_SA_P Parameter: Treatment Value: 2mM SA vs. No Treatment
  misc_feature: MA Experiment ID: 20000288 Result: Up-regulated in Transcription
  misc_feature: MA Experiment 20000288 PARAMETER Experiment Name: At_Drought_P Parameter: Age (day) Value: 7
  misc_feature: MA Experiment 20000288 PARAMETER Experiment Name: At_Drought_P Parameter: Organism Value: A. thaliana
  misc_feature: MA Experiment 20000288 PARAMETER Experiment Name: At_Drought_P Parameter: Plant Line Value: WS
  misc_feature: MA Experiment 20000288 PARAMETER Experiment Name: At_Drought_P Parameter: Timepoint (hr) Value: 1
  misc_feature: MA Experiment 20000288 PARAMETER Experiment Name: At_Drought_P Parameter: Tissue Value: Whole Plant
  misc_feature: MA Experiment 20000288 PARAMETER Experiment Name: At_Drought_P Parameter: Treatment Value: Drought vs. No Drought
  misc_feature: MA Experiment ID: 20000438 Result: Down-regulated in Transcription
  misc_feature: MA Experiment 20000438 PARAMETER Experiment Name: At_Shoots__P Parameter: Age (day) Value: 14
  misc_feature: MA Experiment 20000438 PARAMETER Experiment Name: At_Shoots__P Parameter: Tissue Value: Shoots vs. Whole Plant
  misc_feature: MA Experiment ID: 20000460 Result: Up-regulated in Transcription
  misc_feature: MA Experiment 20000460 PARAMETER Experiment Name: At_10percent_PEG_P Parameter: Age (day) Value: 12
  misc_feature: MA Experiment 20000460 PARAMETER Experiment Name: At_10percent_PEG_P Parameter: Organism Value: A. thaliana
  misc_feature: MA Experiment 20000460 PARAMETER Experiment Name: At_10percent_PEG_P Parameter: Plant Line Value: WS
  misc_feature: MA Experiment 20000460 PARAMETER Experiment Name: At_10percent_PEG_P Parameter: Timepoint (day) Value: 12
  misc_feature: MA Experiment 20000460 PARAMETER Experiment Name: At_10percent_PEG_P Parameter: Tissue Value: Whole Plant
  misc_feature: MA Experiment 20000460 PARAMETER Experiment Name: At_10percent_PEG_P Parameter: Treatment Value: 10percent PEG vs. No Treatment
  misc_feature: MA Experiment ID: 20000527 Result: Up-regulated in Transcription
  misc_feature: MA Experiment 20000527 PARAMETER Experiment Name: At_10percent_PEG_P Parameter: Age (day) Value: 20
  misc_feature: MA Experiment 20000527 PARAMETER Experiment Name: At_10percent_PEG_P Parameter: Organism Value: A. thaliana
  misc_feature: MA Experiment 20000527 PARAMETER Experiment Name: At_10percent_PEG_P Parameter: Plant Line Value: WS
  misc_feature: MA Experiment 20000527 PARAMETER Experiment Name: At_10percent_PEG_P Parameter: Timepoint (day) Value: 20
  misc_feature: MA Experiment 20000527 PARAMETER Experiment Name: At_10percent_PEG_P Parameter: Tissue Value: Whole Plant
  misc_feature: MA Experiment 20000527 PARAMETER Experiment Name: At_10percent_PEG_P Parameter: Treatment Value: 10percent PEG vs. No Treatment
  misc_feature: MA Experiment ID: 20000573 Result: Down-regulated in Transcription
  misc_feature: MA Experiment 20000573 PARAMETER Experiment Name: At_100uM_ABA_Mutants__P Parameter: Organism Value: A. thaliana
  misc_feature: MA Experiment 20000573 PARAMETER Experiment Name: At_100uM_ABA_Mutants__P Parameter: Plant Line Value: CS22 vs. Ler wt
  misc_feature: MA Experiment 20000573 PARAMETER Experiment Name: At_100uM_ABA_Mutants__P Parameter: Timepoint (hr) Value: N/A
  misc_feature: MA Experiment 20000573 PARAMETER Experiment Name: At_100uM_ABA_Mutants__P Parameter: Tissue Value: Whole Plant
  misc_feature: MA Experiment 20000573 PARAMETER Experiment Name: At_100uM_ABA_Mutants__P Parameter: Treatment Value: None
  misc_feature: MA Experiment ID: 20000574 Result: Down-regulated in Transcription
  misc_feature: MA Experiment 20000574 PARAMETER Experiment Name: At_100uM_ABA_Mutants__P Parameter: Organism Value: A. thaliana
  misc_feature: MA Experiment 20000574 PARAMETER Experiment Name: At_100uM_ABA_Mutants__P Parameter: Plant Line Value: CS23 vs. Ler wt
  misc_feature: MA Experiment 20000574 PARAMETER Experiment Name: At_100uM_ABA_Mutants__P Parameter: Timepoint (hr) Value: N/A
  misc_feature: MA Experiment 20000574 PARAMETER Experiment Name: At_100uM_ABA_Mutants__P Parameter: Tissue Value: Whole Plant
  misc_feature: MA Experiment 20000574 PARAMETER Experiment Name: At_100uM_ABA_Mutants__P Parameter: Treatment Value: None
  misc_feature: MA Experiment ID: 20001557 Result: Up-regulated in Transcription
  misc_feature: MA Experiment 20001557 PARAMETER Experiment Name: At_Drought_Soil_Dry_P Parameter: Age (day) Value: 27
  misc_feature: MA Experiment 20001557 PARAMETER Experiment Name: At_Drought_Soil_Dry_P Parameter: Organism Value: A. thaliana
  misc_feature: MA Experiment 20001557 PARAMETER Experiment Name: At_Drought_Soil_Dry_P Parameter: Plant Line Value: WS
  misc_feature: MA Experiment 20001557 PARAMETER Experiment Name: At_Drought_Soil_Dry_P Parameter: Post Timepoint (hr) Value: 3
  misc_feature: MA Experiment 20001557 PARAMETER Experiment Name: At_Drought_Soil_Dry_P Parameter: Post-Treatment Value: Re-Water vs. No Drought
  misc_feature: MA Experiment 20001557 PARAMETER Experiment Name: At_Drought_Soil_Dry_P Parameter: Timepoint (day) Value: 13
  misc_feature: MA Experiment 20001557 PARAMETER Experiment Name: At_Drought_Soil_Dry_P Parameter: Treatment Value: Drought vs. No Drought
  misc_feature: MA Experiment ID: 20001905 Result: Up-regulated in Transcription
  misc_feature: MA Experiment 20001905 PARAMETER Experiment Name: At_Drought_Reproduction_P Parameter: Age (day) Value: 40
  misc_feature: MA Experiment 20001905 PARAMETER Experiment Name: At_Drought_Reproduction_P Parameter: Organism Value: A. thaliana
  misc_feature: MA Experiment 20001905 PARAMETER Experiment Name: At_Drought_Reproduction_P Parameter: Plant Line Value: WS
  misc_feature: MA Experiment 20001905 PARAMETER Experiment Name: At_Drought_Reproduction_P Parameter: Timepoint (day) Value: 10
  misc_feature: MA Experiment 20001905 PARAMETER Experiment Name: At_Drought_Reproduction_P Parameter: Tissue Value: Rosettes
  misc_feature: MA Experiment 20001905 PARAMETER Experiment Name: At_Drought_Reproduction_P Parameter: Treatment Value: Drought vs. No Drought
agtaatttagcttcattctctctctctctctctcacaattactgatcggttctgaaatttgtagctatgcaggcaacggctttatcatctgggttcaatcctctaacgaaacgtaaagatcacagatttcccaggtcatgctctcagagaaattctctgtctttgattcaatgcgatataaaagagagatctttcggagagtctatgacgatcacgaatcgtggattgagttttaagacgaatgtgtttgagcaagctcgttctgtgactggagactgttcttatgatgaaacttcagcaaaagcacgttctcatgttgttgcagaagataagattggtgtcttgcttttgaatttaggtggtcctgaaactcttaacgatgttcaacctttcttgtataatctctttgctgatccggatattataaggcttcctagaccatttcagtttcttcaagggactatagctaagtttatatctgttgttcgtgctccgaaatctaaagaagggtatgctgctattggtggtggctctcctttgcgtaaaataactgatgagcaagcggatgctattaagatgtctttgcaagcgaagaacattgctgctaatgtctatgttggtatgcggtattggtatccgttcactgaggaggctgttcagcagataaagaaggacaaaattactagacttgttgtactgccattgtatcctcagtattctatctctacaacgggttcaagcatacgcgttctccaagatttattcaggaaagatccgtacctagctggagtgccggtagctattataaagtcctggtaccaaaggcgaggctatgtcaattctatggctgacctcattgagaaggagcttcaaactttctctgatcctaaggaggttatgatattcttcagtgcccatggtgttccggtcagctacgtagagaatgctggagatccgtaccagaagcagatggaagagtgtattgacttgataatggaagagctaaaagccagaggggttcttaacgaccataaattggcataccagagtcgtgttggccctgttcaatggctgaagccatacaccgatgaggttcttgtcgaccttggtaagagtggtgttaagagtctactagccgttccagtcagtttcgtgagtgagcacattgagacacttgaggagatagacatggagtatagggaattagctcttgagtcaggggtagagaactggggacgggtacccgcgctaggtctcacaccatccttcatcaccgacttagctgatgcagtgatagaatcacttccttcagcagaagcaatgtcaaacccaaatgcagtggttgactcagaagatagcgagtcgtcagatgctttcagttacattgtcaagatgttcttcggttcgattctggctttcgtcctacttctctccccaaagatgttccatgcgttccggaacctatagaatctcgttggttttgtgttaagtcttttcttggagaaatgtcttggttaaattcaatatatatagtccaatctattgaagtactagtacaccagctctaataagctgatgtgggtaagtagttcaatagattggactatgtatattaaatttgactaagagataaactagagaatgggataaagatgagaacggtattagaaagttctttgaggaaatttagatgtattttaaattgaagatgcatttagctataaacatagtggctacgttcctcttagagatgaggagagaattatattctattattatttggtttcttttcttcgtttttgtatggtttcaatacttaattgtcaaaagtatcctataattttgtt

SEQ ID NO: 108636 - protein, 466 aa, Arabidopsis thaliana
  peptide (1)..(466): Ceres Seq. ID no. 13667978
  misc_feature (89)..(413): Pfam Name: Ferrochelatase Pfam Description: Ferrochelatase
  misc_feature (1)..(466): Homolog of NCBI NO: 30690097 NR Description: ferrochelatase-I [Arabidopsis thaliana]
  misc_feature (65)..(465): Homolog of NCBI NO: 7437214 NR Description: probable ferrochelatase (EC 4.99.1.1) - barley
  misc_feature (65)..(465): Homolog of NCBI NO: 1170242 NR Description: Ferrochelatase II, chloroplast precursor ferro- lyase) (Heme synthetase) >gi|7437215|pir||T05736 probable
  misc_feature (63)..(465): Homolog of NCBI NO: 1170239 NR Description: Ferrochelatase II, chloroplast precursor
  misc_feature (84)..(423): Homolog of NCBI NO: 3913808 NR Description: Ferrochelatase II, chloroplast precursor ferro- lyase) (Heme synthetase) >gi|2429618|dbj|BAA22284.1|
  misc_feature (76)..(423): Homolog of NCBI NO: 12082085 NR Description: ferrochelatase [Cucumis sativus]
  misc_feature (84)..(423): Homolog of NCBI NO: 7437212 NR Description: probable ferrochelatase (EC 4.99.1.1) - potato
  misc_feature (83)..(423): Homolog of NCBI NO: 15147828 NR Description: ferrochelatase [Nicotiana tabacum]
  misc_feature (76)..(423): Homolog of NCBI NO: 15227742 NR Description: ferrochelatase precusor -related [Arabidopsis >gi|3913871|sp|O04921|HMZ2_ARATH Ferrochelatase II, chloroplast
  misc_feature (76)..(423): Homolog of NCBI NO: 2623990 NR Description: ferrochelatase [Arabidopsis thaliana]
MQATALSSGFNPLTKRKDHRFPRSCSQRNSLSLIQCDIKERSFGESMTITNRGLSFKTNVFEQARSVTGDCSYDETSAKARSHVVAEDKIGVLLLNLGGPETLNDVQPFLYNLFADPDIIRLPRPFQFLQGTIAKFISVVRAPKSKEGYAAIGGGSPLRKITDEQADAIKMSLQAKNIAANVYVGMRYWYPFTEEAVQQIKKDKITRLVVLPLYPQYSISTTGSSIRVLQDLFRKDPYLAGVPVAIIKSWYQRRGYVNSMADLIEKELQTFSDPKEVMIFFSAHGVPVSYVENAGDPYQKQMEECIDLIMEELKARGVLNDHKLAYQSRVGPVQWLKPYTDEVLVDLGKSGVKSLLAVPVSFVSEHIETLEEIDMEYRELALESGVENWGRVPALGLTPSFITDLADAVIESLPSAEAMSNPNAVVDSEDSESSDAFSYIVKMFFGSILAFVLLLSPKMFHAFRNL

SEQ ID NO: 108637 - protein, 420 aa, Arabidopsis thaliana
  peptide (1)..(420): Ceres Seq. ID no. 13667979
  misc_feature (43)..(367): Pfam Name: Ferrochelatase Pfam Description: Ferrochelatase
  misc_feature (1)..(420): Homolog of NCBI NO: 30690097 NR Description: ferrochelatase-I [Arabidopsis thaliana]
  misc_feature (19)..(419): Homolog of NCBI NO: 7437214 NR Description: probable ferrochelatase (EC 4.99.1.1) - barley
  misc_feature (19)..(419): Homolog of NCBI NO: 1170242 NR Description: Ferrochelatase II, chloroplast precursor ferro- lyase) (Heme synthetase) >gi|7437215|pir||T05736 probable
  misc_feature (17)..(419): Homolog of NCBI NO: 1170239 NR Description: Ferrochelatase II, chloroplast precursor
  misc_feature (38)..(377): Homolog of NCBI NO: 3913808 NR Description: Ferrochelatase II, chloroplast precursor ferro- lyase) (Heme synthetase) >gi|2429618|dbj|BAA22284.1|
  misc_feature (30)..(377): Homolog of NCBI NO: 12082085 NR Description: ferrochelatase [Cucumis sativus]
  misc_feature (38)..(377): Homolog of NCBI NO: 7437212 NR Description: probable ferrochelatase (EC 4.99.1.1) - potato
  misc_feature (37)..(377): Homolog of NCBI NO: 15147828 NR Description: ferrochelatase [Nicotiana tabacum]
  misc_feature (30)..(377): Homolog of NCBI NO: 15227742 NR Description: ferrochelatase precusor -related [Arabidopsis >gi|3913871|sp|O04921|HMZ2_ARATH Ferrochelatase II, chloroplast
  misc_feature (30)..(377): Homolog of NCBI NO: 2623990 NR Description: ferrochelatase [Arabidopsis thaliana]
MTITNRGLSFKTNVFEQARSVTGDCSYDETSAKARSHVVAEDKIGVLLLNLGGPETLNDVQPFLYNLFADPDIIRLPRPFQFLQGTIAKFISVVRAPKSKEGYAAIGGGSPLRKITDEQADAIKMSLQAKNIAANVYVGMRYWYPFTEEAVQQIKKDKITRLVVLPLYPQYSISTTGSSIRVLQDLFRKDPYLAGVPVAIIKSWYQRRGYVNSMADLIEKELQTFSDPKEVMIFFSAHGVPVSYVENAGDPYQKQMEECIDLIMEELKARGVLNDHKLAYQSRVGPVQWLKPYTDEVLVDLGKSGVKSLLAVPVSFVSEHIETLEEIDMEYRELALESGVENWGRVPALGLTPSFITDLADAVIESLPSAEAMSNPNAVVDSEDSESSDAFSYIVKMFFGSILAFVLLLSPKMFHAFRNL

SEQ ID NO: 108638 - protein, 296 aa, Arabidopsis thaliana
  peptide (1)..(296): Ceres Seq. ID no. 13667980
  misc_feature (1)..(243): Pfam Name: Ferrochelatase Pfam Description: Ferrochelatase
  misc_feature (1)..(296): Homolog of NCBI NO: 30690097 NR Description: ferrochelatase-I [Arabidopsis thaliana]
  misc_feature (1)..(295): Homolog of NCBI NO: 7437214 NR Description: probable ferrochelatase (EC 4.99.1.1) - barley
  misc_feature (1)..(295): Homolog of NCBI NO: 1170242 NR Description: Ferrochelatase II, chloroplast precursor ferro- lyase) (Heme synthetase) >gi|7437215|pir||T05736 probable
  misc_feature (1)..(295): Homolog of NCBI NO: 1170239 NR Description: Ferrochelatase II, chloroplast precursor
  misc_feature (1)..(253): Homolog of NCBI NO: 3913808 NR Description: Ferrochelatase II, chloroplast precursor ferro- lyase) (Heme synthetase) >gi|2429618|dbj|BAA22284.1|
  misc_feature (1)..(253): Homolog of NCBI NO: 12082085 NR Description: ferrochelatase [Cucumis sativus]
  misc_feature (1)..(253): Homolog of NCBI NO: 7437212 NR Description: probable ferrochelatase (EC 4.99.1.1) - potato
  misc_feature (1)..(253): Homolog of NCBI NO: 15147828 NR Description: ferrochelatase [Nicotiana tabacum]
  misc_feature (1)..(253): Homolog of NCBI NO: 15227742 NR Description: ferrochelatase precusor -related [Arabidopsis >gi|3913871|sp|O04921|HMZ2_ARATH Ferrochelatase II, chloroplast
  misc_feature (1)..(253): Homolog of NCBI NO: 2623990 NR Description: ferrochelatase [Arabidopsis thaliana]
MSLQAKNIAANVYVGMRYWYPFTEEAVQQIKKDKITRLVVLPLYPQYSISTTGSSIRVLQDLFRKDPYLAGVPVAIIKSWYQRRGYVNSMADLIEKELQTFSDPKEVMIFFSAHGVPVSYVENAGDPYQKQMEECIDLIMEELKARGVLNDHKLAYQSRVGPVQWLKPYTDEVLVDLGKSGVKSLLAVPVSFVSEHIETLEEIDMEYRELALESGVENWGRVPALGLTPSFITDLADAVIESLPSAEAMSNPNAVVDSEDSESSDAFSYIVKMFFGSILAFVLLLSPKMFHAFRNL

SEQ ID NO: 108639 - DNA, 1535 bp, Arabidopsis thaliana
  misc_feature (1)..(1535): Ceres Seq. ID no. 13667985
  misc_feature: MA Experiment ID: 108434 Result: Down-regulated in Transcription
  misc_feature: MA Experiment 108434 PARAMETER Experiment Name: At_Root_Tips_cDNA_P Parameter: Tissue Value: Root Tips
  misc_feature: MA Experiment ID: 108576 Result: Down-regulated in Transcription
  misc_feature: MA Experiment 108576 PARAMETER Experiment Name: At_42deg_Heat_cDNA_P Parameter: Temperature (deg C) Value: 42 vs. 22
  misc_feature: MA Experiment 108576 PARAMETER Experiment Name: At_42deg_Heat_cDNA_P Parameter: Timepoint (hr) Value: 1
  misc_feature: MA Experiment 108576 PARAMETER Experiment Name: At_42deg_Heat_cDNA_P Parameter: Tissue Value: Aerial
  misc_feature: MA Experiment ID: 108577 Result: Down-regulated in Transcription
  misc_feature: MA Experiment 108577 PARAMETER Experiment Name: At_42deg_Heat_cDNA_P Parameter: Temperature (deg C) Value: 42 vs. 22
  misc_feature: MA Experiment 108577 PARAMETER Experiment Name: At_42deg_Heat_cDNA_P Parameter: Timepoint (hr) Value: 6
  misc_feature: MA Experiment 108577 PARAMETER Experiment Name: At_42deg_Heat_cDNA_P Parameter: Tissue Value: Aerial
  misc_feature: MA Experiment ID: 108579 Result: Up-regulated in Transcription
  misc_feature: MA Experiment 108579 PARAMETER Experiment Name: At_4deg_Cold_cDNA_P Parameter: Temperature (deg C) Value: 4 vs. 22
  misc_feature: MA Experiment 108579 PARAMETER Experiment Name: At_4deg_Cold_cDNA_P Parameter: Timepoint (hr) Value: 6
  misc_feature: MA Experiment 108579 PARAMETER Experiment Name: At_4deg_Cold_cDNA_P Parameter: Tissue Value: Aerial
  misc_feature: MA Experiment ID: 108595 Result: Down-regulated in Transcription
  misc_feature: MA Experiment 108595 PARAMETER Experiment Name: At_Ler-pi_Ovule_cDNA_P Parameter: Plant Line Value: null
  misc_feature: MA Experiment ID: 108607 Result: Down-regulated in Transcription
  misc_feature: MA Experiment 108607 PARAMETER Experiment Name: At_100uM_ABA_cDNA_P Parameter: Timepoint (hr) Value: 4
  misc_feature: MA Experiment 108607 PARAMETER Experiment Name: At_100uM_ABA_cDNA_P Parameter: Tissue Value: Aerial
  misc_feature: MA Experiment 108607 PARAMETER Experiment Name: At_100uM_ABA_cDNA_P Parameter: Treatment Value: 100uM ABA vs. No Treatment
  misc_feature: MA Experiment ID: 108667 Result: Down-regulated in Transcription
  misc_feature: MA Experiment 108667 PARAMETER Experiment Name: At_2mM_SA_cDNA_P Parameter: Plant Line Value: WS
  misc_feature: MA Experiment 108667 PARAMETER Experiment Name: At_2mM_SA_cDNA_P Parameter: Timepoint (hr) Value: 1
  misc_feature: MA Experiment 108667 PARAMETER Experiment Name: At_2mM_SA_cDNA_P Parameter: Treatment Value: 2mM SA vs. No Treatment
  misc_feature: MA Experiment ID: 108668 Result: Down-regulated in Transcription
  misc_feature: MA Experiment 108668 PARAMETER Experiment Name: At_2mM_SA_cDNA_P Parameter: Plant Line Value: WS
  misc_feature: MA Experiment 108668 PARAMETER Experiment Name: At_2mM_SA_cDNA_P Parameter: Timepoint (hr) Value: 6
  misc_feature: MA Experiment 108668 PARAMETER Experiment Name: At_2mM_SA_cDNA_P Parameter: Treatment Value: 2mM SA vs. No Treatment
  misc_feature: MA Experiment ID: 20000093 Result: Down-regulated in Transcription
  misc_feature: MA Experiment 20000093 PARAMETER Experiment Name: At_42deg_Heat_cDNA_P Parameter: Temperature (deg C) Value: 42 vs. 22
  misc_feature: MA Experiment 20000093 PARAMETER Experiment Name: At_42deg_Heat_cDNA_P Parameter: Timepoint (hr) Value: 0.5
  misc_feature: MA Experiment 20000093 PARAMETER Experiment Name: At_42deg_Heat_cDNA_P Parameter: Tissue Value: Aerial
  misc_feature: MA Experiment ID: 20000112 Result: Down-regulated in Transcription
  misc_feature: MA Experiment 20000112 PARAMETER Experiment Name: At_42deg_Heat_cDNA_P Parameter: Temperature (deg C) Value: 42 vs. 22
  misc_feature: MA Experiment 20000112 PARAMETER Experiment Name: At_42deg_Heat_cDNA_P Parameter: Timepoint (hr) Value: 2
  misc_feature: MA Experiment 20000112 PARAMETER Experiment Name: At_42deg_Heat_cDNA_P Parameter: Tissue Value: Aerial
  misc_feature: MA Experiment ID: 20000113 Result: Down-regulated in Transcription
  misc_feature: MA Experiment 20000113 PARAMETER Experiment Name: At_42deg_Heat_cDNA_P Parameter: Temperature (deg C) Value: 42 vs. 22
  misc_feature: MA Experiment 20000113 PARAMETER Experiment Name: At_42deg_Heat_cDNA_P Parameter: Timepoint (hr) Value: 8
  misc_feature: MA Experiment 20000113 PARAMETER Experiment Name: At_42deg_Heat_cDNA_P Parameter: Tissue Value: Aerial
  misc_feature: MA Experiment ID: 20000144 Result: Down-regulated in Transcription
  misc_feature: MA Experiment 20000144 PARAMETER Experiment Name: At_42deg_Heat_cDNA_P Parameter: Temperature (deg C) Value: 42 vs. 22
  misc_feature: MA Experiment 20000144 PARAMETER Experiment Name: At_42deg_Heat_cDNA_P Parameter: Timepoint (hr) Value: 1
  misc_feature: MA Experiment 20000144 PARAMETER Experiment Name: At_42deg_Heat_cDNA_P Parameter: Tissue Value: Aerial
  misc_feature: MA Experiment ID: 20000224 Result: Up-regulated in Transcription
ccgggattccgggaaaataataatacgacttttgaaatctctcactaatatttcccaagaaaacctgatgaattaaaagttcatattttcttggtgttgattggtattagatgactatttcttagtattagtcaattctctgtttccatcttatatggatagtctagacacagagcaaagatccttctttggagaaaaagaagatgagagacgagagaggatcgtttcttcacgtattggtcgtagatagatcttaatcgataaccatctaggccttgatctaaccattcaatataaactttatttccttcttcttttcgatctcaattgttccgaccaaacaagatgaagagatcacgtggaagctccgattctttatccggtttcttaccaattcgccattctacaacagacaaacaaataagcccaagaccaacaactaccggctttctctattccggcgccggagactactcccagatgtttgacgcattagaagacgacggaagtctagaggacctcggcggcgttggacacgcgtcttctacggcggcggagaaaaaacggcggttgggtgtagagcaagtgaaagcgttagagaagaatttcgagattgataacaagttagagccagagaggaaagtgaagctggctcaagagcttgggttgcagccacgccaagtcgcgatctggtttcaaaaccgccgtgctcggtggaagacaaagcagcttgaacgtgattacggcgttcttaagtcaaactttgatgcactcaaacgcaaccgcgactcgcttcaacgcgataacgattcactccttggacagattaaagagctgaaagcaaaacttaacgtggaaggggttaaaggtatagaagagaacggcgctttaaaagcagtggaagcaaatcaatcggtgatggctaataatgaagtcttagagctaagccaccgttctccatcgccaccaccgcatattcctacggacgctccgacatcggagctcgcattcgaaatgtttagcatttttccacgcacggaaaacttcagagacgatcctgccgatagcagcgactcaagcgcggttttgaacgaagagtatagtcccaatacggttgaagcagctggcgcagtggcggccacgactgtagaaatgtcgacgatgggttgttttagccaattcgtgaaaatggaagagcatgaagatctgtttagtggagaggaagcttgcaagttgtttgcggacaatgagcaatggtattgctccgatcagtggaattcgtaaaatgtgggggcagaattaaaagcatagaaaagctgaagggggtatgtggaaatattactgaagtcatattgggtcggaaaatgcattactcaaaatattggggtttttcttgagaaaatggaatatgacgcgagagggtagtaaaaacgagcgtgtggcgttccatgcacgtgtggccgtaatcttttcaaggttgaatgagagaggacaaaaaagtctgaaatcatcgggaataaaaaaaatatgtgacg

SEQ ID NO: 108640 - protein, 312 aa, Arabidopsis thaliana; identical to SEQ ID NO: 40748
  peptide (1)..(312): Ceres Seq. ID no. 13667986
  misc_feature (72)..(126): Pfam Name: Homeobox domain Pfam Description: Homeobox domain
  misc_feature (1)..(312): Homolog of NCBI NO: 15238405 NR Description: homeobox-leucine zipper protein ATHB-5 (HD-Zip
  misc_feature (1)..(311): Homolog of NCBI NO: 18399966 NR Description: homeobox-leucine zipper protein ATHB-6 (HD-Zip
  misc_feature (1)..(311): Homolog of NCBI NO: 25386231 NR Description: homeodomain transcription factor (ATHB-6)
  misc_feature (70)..(311): Homolog of NCBI NO: 15148916 NR Description: homeodomain leucine zipper protein HDZ1
  misc_feature (1)..(310): Homolog of NCBI NO: 15236109 NR Description: homeodomain-leucine zipper protein ATHB-16 (HD-Zip
  misc_feature (1)..(311): Homolog of NCBI NO: 8133126 NR Description: hb-6-like protein [Brassica rapa subsp.
  misc_feature (1)..(310): Homolog of NCBI NO: 7446295 NR Description: homeotic protein T5J17.230 - Arabidopsis thaliana
  misc_feature (1)..(296): Homolog of NCBI NO: 5305602 NR Description: homeobox protein ATHB6 [Arabidopsis thaliana]
  misc_feature (1)..(310): Homolog of NCBI NO: 15450982 NR Description: homeodomain-like protein [Arabidopsis thaliana]

SEQ ID NO: 108641 - protein, 267 aa, Arabidopsis thaliana; identical to SEQ ID NO: 40749
  peptide (1)..(267): Ceres Seq. ID no. 13667987
  misc_feature (27)..(81): Pfam Name: Homeobox domain Pfam Description: Homeobox domain
  misc_feature (1)..(267): Homolog of NCBI NO: 15238405 NR Description: homeobox-leucine zipper protein ATHB-5 (HD-Zip
  misc_feature (1)..(266): Homolog of NCBI NO: 18399966 NR Description: homeobox-leucine zipper protein ATHB-6 (HD-Zip
  misc_feature (1)..(266): Homolog of NCBI NO: 25386231 NR Description: homeodomain transcription factor (ATHB-6)
  misc_feature (25)..(266): Homolog of NCBI NO: 15148916 NR Description: homeodomain leucine zipper protein HDZ1
  misc_feature (1)..(265): Homolog of NCBI NO: 15236109 NR Description: homeodomain-leucine zipper protein ATHB-16 (HD-Zip
  misc_feature (1)..(266): Homolog of NCBI NO: 8133126 NR Description: hb-6-like protein [Brassica rapa subsp.
  misc_feature (1)..(265): Homolog of NCBI NO: 7446295 NR Description: homeotic protein T5J17.230 - Arabidopsis thaliana
  misc_feature (1)..(251): Homolog of NCBI NO: 5305602 NR Description: homeobox protein ATHB6 [Arabidopsis thaliana]
  misc_feature (1)..(265): Homolog of NCBI NO: 15450982 NR Description: homeodomain-like protein [Arabidopsis thaliana]

SEQ ID NO: 108642 - DNA, 2209 bp, Arabidopsis thaliana
  misc_feature (1)..(2209): Ceres Seq. ID no. 13667992
  misc_feature: MA Experiment ID: 108434 Result: Up-regulated in Transcription
  misc_feature: MA Experiment 108434 PARAMETER Experiment Name: At_Root_Tips_cDNA_P Parameter: Tissue Value: Root Tips
  misc_feature: MA Experiment ID: 108462 Result: Down-regulated in Transcription
  misc_feature: MA Experiment 108462 PARAMETER Experiment Name: At_Germinating_Seeds_cDNA_P Parameter: Age (day) Value: 2 vs. 0
  misc_feature: MA Experiment 108462 PARAMETER Experiment Name: At_Germinating_Seeds_cDNA_P Parameter: Tissue Value: Germinating Seeds
  misc_feature: MA Experiment ID: 108463 Result: Down-regulated in Transcription
  misc_feature: MA Experiment 108463 PARAMETER Experiment Name: At_Germinating_Seeds_cDNA_P Parameter: Age (day) Value: 3 vs. 0
  misc_feature: MA Experiment 108463 PARAMETER Experiment Name: At_Germinating_Seeds_cDNA_P Parameter: Tissue Value: Germinating Seeds
  misc_feature: MA Experiment ID: 108464 Result: Down-regulated in Transcription
  misc_feature: MA Experiment 108464 PARAMETER Experiment Name: At_Germinating_Seeds_cDNA_P Parameter: Age (day) Value: 4 vs. 0
  misc_feature: MA Experiment 108464 PARAMETER Experiment Name: At_Germinating_Seeds_cDNA_P Parameter: Tissue Value: Germinating Seeds
  misc_feature: MA Experiment ID: 108501 Result: Up-regulated in Transcription
  misc_feature: MA Experiment 108501 PARAMETER Experiment Name: At_ap2_floral_buds_cDNA_P Parameter: Plant Line Value: ap2 (Ler.)
  misc_feature: MA Experiment 108501 PARAMETER Experiment Name: At_ap2_floral_buds_cDNA_P Parameter: Tissue Value: Closed Flower
  misc_feature: MA Experiment ID: 108573 Result: Up-regulated in Transcription
  misc_feature: MA Experiment 108573 PARAMETER Experiment Name: At_Drought_cDNA_P Parameter: Timepoint (hr) Value: 6
  misc_feature: MA Experiment 108573 PARAMETER Experiment Name: At_Drought_cDNA_P Parameter: Tissue Value: Aerial
  misc_feature: MA Experiment 108573 PARAMETER Experiment Name: At_Drought_cDNA_P Parameter: Treatment Value: Drought vs. No Drought
  misc_feature: MA Experiment ID: 108576 Result: Up-regulated in Transcription
  misc_feature: MA Experiment 108576 PARAMETER Experiment Name: At_42deg_Heat_cDNA_P Parameter: Temperature (deg C) Value: 42 vs. 22
  misc_feature: MA Experiment 108576 PARAMETER Experiment Name: At_42deg_Heat_cDNA_P Parameter: Timepoint (hr) Value: 1
  misc_feature: MA Experiment 108576 PARAMETER Experiment Name: At_42deg_Heat_cDNA_P Parameter: Tissue Value: Aerial
  misc_feature: MA Experiment ID: 108577 Result: Up-regulated in Transcription
  misc_feature: MA Experiment 108577 PARAMETER Experiment Name: At_42deg_Heat_cDNA_P Parameter: Temperature (deg C) Value: 42 vs. 22
  misc_feature: MA Experiment 108577 PARAMETER Experiment Name: At_42deg_Heat_cDNA_P Parameter: Timepoint (hr) Value: 6
  misc_feature: MA Experiment 108577 PARAMETER Experiment Name: At_42deg_Heat_cDNA_P Parameter: Tissue Value: Aerial
  misc_feature: MA Experiment ID: 108585 Result: Up-regulated in Transcription
  misc_feature: MA Experiment 108585 PARAMETER Experiment Name: At_5mM_NaNP_cDNA_P Parameter: Timepoint (hr) Value: 6
  misc_feature: MA Experiment 108585 PARAMETER Experiment Name: At_5mM_NaNP_cDNA_P Parameter: Tissue Value: Aerial
  misc_feature: MA Experiment 108585 PARAMETER Experiment Name: At_5mM_NaNP_cDNA_P Parameter: Treatment Value: null
  misc_feature: MA Experiment ID: 108595 Result: Down-regulated in Transcription
  misc_feature: MA Experiment 108595 PARAMETER Experiment Name: At_Ler-pi_Ovule_cDNA_P Parameter: Plant Line Value: null
  misc_feature: MA Experiment ID: 20000069 Result: Down-regulated in Transcription
  misc_feature: MA Experiment 20000069 PARAMETER Experiment Name: At_100uM_ABA_Mutants_cDNA_P Parameter: Plant Line Value: CS23
  misc_feature: MA Experiment 20000069 PARAMETER Experiment Name: At_100uM_ABA_Mutants_cDNA_P Parameter: Timepoint (hr) Value: 6
  misc_feature: MA Experiment 20000069 PARAMETER Experiment Name: At_100uM_ABA_Mutants_cDNA_P Parameter: Tissue Value: Aerial
  misc_feature: MA Experiment 20000069 PARAMETER Experiment Name: At_100uM_ABA_Mutants_cDNA_P Parameter: Treatment Value: 100uM ABA vs. No Treatment
  misc_feature: MA Experiment ID: 20000087 Result: Down-regulated in Transcription
  misc_feature: MA Experiment 20000087 PARAMETER Experiment Name: At_100uM_ABA_Mutants_cDNA_P Parameter: Plant Line Value: WS
  misc_feature: MA Experiment 20000087 PARAMETER Experiment Name: At_100uM_ABA_Mutants_cDNA_P Parameter: Timepoint (hr) Value: 6
  misc_feature: MA Experiment 20000087 PARAMETER Experiment Name: At_100uM_ABA_Mutants_cDNA_P Parameter: Tissue Value: Aerial
  misc_feature: MA Experiment 20000087 PARAMETER Experiment Name: At_100uM_ABA_Mutants_cDNA_P Parameter: Treatment Value: 100uM ABA vs. No Treatment
  misc_feature: MA Experiment ID: 20000111 Result: Up-regulated in Transcription
  misc_feature: MA Experiment 20000111 PARAMETER Experiment Name: At_42deg_Heat_cDNA_P Parameter: Temperature (deg C) Value: 42 vs. 22
  misc_feature: MA Experiment 20000111 PARAMETER Experiment Name: At_42deg_Heat_cDNA_P Parameter: Timepoint (hr) Value: 6
  misc_feature: MA Experiment 20000111 PARAMETER Experiment Name: At_42deg_Heat_cDNA_P Parameter: Tissue Value: Aerial
  misc_feature: MA Experiment ID: 20000112 Result: Up-regulated in Transcription
  misc_feature: MA Experiment 20000112 PARAMETER Experiment Name: At_42deg_Heat_cDNA_P Parameter: Temperature (deg C) Value: 42 vs. 22
  misc_feature: MA Experiment 20000112 PARAMETER Experiment Name: At_42deg_Heat_cDNA_P Parameter: Timepoint (hr) Value: 2
  misc_feature: MA Experiment 20000112 PARAMETER Experiment Name: At_42deg_Heat_cDNA_P Parameter: Tissue Value: Aerial
  misc_feature: MA Experiment ID: 20000113 Result: Up-regulated in Transcription
  misc_feature: MA Experiment 20000113 PARAMETER Experiment Name: At_42deg_Heat_cDNA_P Parameter: Temperature (deg C) Value: 42 vs. 22
  misc_feature: MA Experiment 20000113 PARAMETER Experiment Name: At_42deg_Heat_cDNA_P Parameter: Timepoint (hr) Value: 8
  misc_feature: MA Experiment 20000113 PARAMETER Experiment Name: At_42deg_Heat_cDNA_P Parameter: Tissue Value: Aerial
  misc_feature: MA Experiment ID: 20000144 Result: Up-regulated in Transcription
  misc_feature: MA Experiment 20000144 PARAMETER Experiment Name: At_42deg_Heat_cDNA_P Parameter: Temperature (deg C) Value: 42 vs. 22
  misc_feature: MA Experiment 20000144 PARAMETER Experiment Name: At_42deg_Heat_cDNA_P Parameter: Timepoint (hr) Value: 1
  misc_feature: MA Experiment 20000144 PARAMETER Experiment Name: At_42deg_Heat_cDNA_P Parameter: Tissue Value: Aerial
  misc_feature: MA Experiment ID: 20000314 Result: Down-regulated in Transcription
  misc_feature: MA Experiment 20000314 PARAMETER Experiment Name: At_14day_Shoots-Roots_Sub_P Parameter: Age (day) Value: 14
  misc_feature: MA Experiment 20000314 PARAMETER Experiment Name: At_14day_Shoots-Roots_Sub_P Parameter: Organism Value: A. thaliana
  misc_feature: MA Experiment 20000314 PARAMETER Experiment Name: At_14day_Shoots-Roots_Sub_P Parameter: Plant Line Value: WS
  misc_feature: MA Experiment 20000314 PARAMETER Experiment Name: At_14day_Shoots-Roots_Sub_P Parameter: Tissue Value: Roots vs. Whole Plant
  misc_feature: MA Experiment ID: 20000327 Result: Up-regulated in Transcription
  misc_feature: MA Experiment 20000327 PARAMETER Experiment Name: At_42deg_Heat_Sub_P Parameter: Age (day) Value: 14
  misc_feature: MA Experiment 20000327 PARAMETER Experiment Name: At_42deg_Heat_Sub_P Parameter: Organism Value: A. thaliana
  misc_feature: MA Experiment 20000327 PARAMETER Experiment Name: At_42deg_Heat_Sub_P Parameter: Plant Line Value: WS
  misc_feature: MA Experiment 20000327 PARAMETER Experiment Name: At_42deg_Heat_Sub_P Parameter: Temperature (deg C) Value: 42 vs. 22
  misc_feature: MA Experiment 20000327 PARAMETER Experiment Name: At_42deg_Heat_Sub_P Parameter: Timepoint (hr) Value: 1
  misc_feature: MA Experiment 20000327 PARAMETER Experiment Name: At_42deg_Heat_Sub_P Parameter: Tissue Value: Aerial
  misc_feature: MA Experiment ID: 20000328 Result: Up-regulated in Transcription
  misc_feature: MA Experiment 20000328 PARAMETER Experiment Name: At_42deg_Heat_Sub_P Parameter: Age (day) Value: 14
  misc_feature: MA Experiment 20000328 PARAMETER Experiment Name: At_42deg_Heat_Sub_P Parameter: Organism Value: A. thaliana
  misc_feature: MA Experiment 20000328 PARAMETER Experiment Name: At_42deg_Heat_Sub_P Parameter: Plant Line Value: WS
  misc_feature: MA Experiment 20000328 PARAMETER Experiment Name: At_42deg_Heat_Sub_P Parameter: Temperature (deg C) Value: 42 vs. 22
  misc_feature: MA Experiment 20000328 PARAMETER Experiment Name: At_42deg_Heat_Sub_P Parameter: Timepoint (hr) Value: 6
  misc_feature: MA Experiment 20000328 PARAMETER Experiment Name: At_42deg_Heat_Sub_P Parameter: Tissue Value: Aerial
  misc_feature: MA Experiment ID: 20000355 Result: Down-regulated in Transcription
  misc_feature: MA Experiment 20000355 PARAMETER Experiment Name: At_Siliques_Sub_P Parameter: Age (day) Value: 21
  misc_feature: MA Experiment 20000355 PARAMETER Experiment Name: At_Siliques_Sub_P Parameter: Organism Value: A. thaliana
  misc_feature: MA Experiment 20000355 PARAMETER Experiment Name: At_Siliques_Sub_P Parameter: Plant Line Value: WS
  misc_feature: MA Experiment 20000355 PARAMETER Experiment Name: At_Siliques_Sub_P Parameter: Tissue Value: Less Than 5mm Siliques vs. Whole Plant
  misc_feature: MA Experiment ID: 20001807 Result: Up-regulated in Transcription
  misc_feature: MA Experiment 20001807 PARAMETER Experiment Name: At_50mM_NH4NO3_L-to-H_Sub_P Parameter: Timepoint (hr) Value: 6
  misc_feature: MA Experiment 20001807 PARAMETER Experiment Name: At_50mM_NH4NO3_L-to-H_Sub_P Parameter: Tissue Value: Leaf
  misc_feature: MA Experiment 20001807 PARAMETER Experiment Name: At_50mM_NH4NO3_L-to-H_Sub_P Parameter: Treatment Value: 50mM NH4NO3 vs 100mM Mannitol
  misc_feature: Pfam Name: HSP70 Pfam Description: Hsp70 protein
tcttcttcgttctctagttttttcctcagtctctgttcttagatcccttgtagtttccaaatcttccgataaaaatgtcgggtaaaggagaaggaccagctatcggtatcgatcttggtaccacttactcttgcgtcggagtatggcaacacgaccgtgttgagatcattgctaatgatcaaggaaacagaaccacgccatcttacgttgctttcaccgactccgagaggttgatcggtgacgcagctaagaatcaggtcgccatgaaccccgttaacaccgttttcgacgctaagaggttgatcggtcgtcgtttctctgacagctctgttcagagtgacatgaaattgtggccattcaagattcaagccggacctgccgataagccaatgatctacgtcgaatacaagggtgaagagaaagagttcgcagctgaggagatttcttccatggttcttattaagatgcgtgagattgctgaggcttaccttggtgtcacaatcaagaacgccgttgttaccgttccagcttacttcaacgactctcagcgtcaggctacaaaggatgctggtgtcatcgctggtttgaacgttatgcgaatcatcaacgagcctacagccgccgctattgcctacggtcttgacaaaaaggctaccacagttggagagaagaatgttcttatcttcgatcttggtggtggcacttttgatgtctctcttcttaccattgaagagggtatctttgaggtgaaggcaactgctggtgacacccatcttggtggggaagattttgacaacagaatggttaaccactttgtccaagagttcaagaggaagagtaagaaggatatcaccggtaacccaagagctcttaggaggttgagaacttcctgtgagagagcgaagaggactctttcttccactgctcagaccaccatcgagattgactctctatacgagggtatcgacttctactccaccatcacccgtgctagatttgaggagctcaacatggatctcttcaggaagtgtatggagccagttgagaagtgtcttcgtgatgctaagatggacaagagcactgttcatgatgttgtccttgttggtggttctacccgtatccctaaggttcagcaattgctccaggacttcttcaacggcaaagagctttgcaagtctattaaccctgatgaggctgttgcctacggtgctgctgtccagggagctattctcagcggtgaaggaaacgagaaggttcaagatcttctattgctcgatgtcactcctctctcccttggtttggaaactgccggtggtgtcatgaccactttgatcccaaggaacacaaccatcccaaccaagaaggaacaagtcttctccacctactcagacaaccaacccggtgtgttgatccaggtgtacgaaggagagagagccagaaccaaggacaacaaccttcttggtaaatttgagctctccggaattcctccagctcctcgtggtgtcccccagatcacagtctgctttgacattgatgccaatggtatcctcaatgtctctgctgaggacaagaccaccggacagaagaacaagatcaccatcaccaatgacaagggtcgtctctccaaggatgagattgagaagatggttcaagaggctgagaagtacaagtccgaagacgaggagcacaagaagaaggttgaagccaagaacgctctcgagaactacgcttacaacatgaggaacaccatccaagacgagaagattggtgagaagctcccggctgcagacaagaagaagatcgaggattctattgagcaggcgattcaatggctcgagggtaaccagttggctgaggctgatgagttcgaagacaagatgaaggaattggagagcatctgcaacccaatcattgccaagatgtaccaaggagctggtggtgaagccggtggtccaggtgcctctggtatggacgatgatgctccccctgcttcaggcggtgctggacctaagatcgaggaggtcgactaatttgttggacattgacctctctctttctcctatctctatctcttttacttgcttttttttgatctgttaagactttttatgttgggcttttttaaagaagcccattttgtggtgttttttggttagtactattttgaacaatggttggttctataccagtttagctacgatgacgccgg

SEQ ID NO: 108643 - protein, 651 aa, Arabidopsis thaliana
  peptide (1)..(651): Ceres Seq. ID no. 13667993
  misc_feature: Pfam Name: HSP70 Pfam Description: Hsp70 protein
  misc_feature (6)..(626): Homolog of NCBI NO: 21263753 NR Description: Heat shock cognate 71 kDa protein (Hsc70.1)
  misc_feature (8)..(651): Homolog of NCBI NO: 14423732 NR Description: Heat shock 70 kDa protein
  misc_feature (1)..(635): Homolog of NCBI NO: 6016151 NR Description: Luminal binding protein 3 precursor (BiP3)
  misc_feature (3)..(635): Homolog of NCBI NO: 1037176 NR Description: immunoglobulin heavy chain binding protein
  misc_feature (1)..(626): Homolog of NCBI NO: 481576 NR Description: dnaK-type molecular chaperone GRP78/BiP - cinnamomi >gi|429118|emb|CAA53369.1| glucose regulated protein
  misc_feature (3)..(635): Homolog of NCBI NO: 29539338 NR Description: Heat shock 70 kDa protein [Cyanidioschyzon
  misc_feature (1)..(635): Homolog of NCBI NO: 23480384 NR Description: heat shock protein [Plasmodium yoelii yoelii]
  misc_feature (124)..(646): Homolog of NCBI NO: 4164594 NR Description: heat shock protein 70 [Paracoccidioides
  misc_feature (1)..(636): Homolog of NCBI NO: 19114157 NR Description: 78 kd glucose regulated protein homolog hsp70 family [Schizosaccharomyces pombe]
MSGKGEGPAIGIDLGTTYSCVGVWQHDRVEIIANDQGNRTTPSYVAFTDSERLIGDAAKNQVAMNPVNTVFDAKRLIGRRFSDSSVQSDMKLWPFKIQAGPADKPMIYVEYKGEEKEFAAEEISSMVLIKMREIAEAYLGVTIKNAVVTVPAYFNDSQRQATKDAGVIAGLNVMRIINEPTAAAIAYGLDKKATTVGEKNVLIFDLGGGTFDVSLLTIEEGIFEVKATAGDTHLGGEDFDNRMVNHFVQEFKRKSKKDITGNPRALRRLRTSCERAKRTLSSTAQTTIEIDSLYEGIDFYSTITRARFEELNMDLFRKCMEPVEKCLRDAKMDKSTVHDVVLVGGSTRIPKVQQLLQDFFNGKELCKSINPDEAVAYGAAVQGAILSGEGNEKVQDLLLLDVTPLSLGLETAGGVMTTLIPRNTTIPTKKEQVFSTYSDNQPGVLIQVYEGERARTKDNNLLGKFELSGIPPAPRGVPQITVCFDIDANGILNVSAEDKTTGQKNKITITNDKGRLSKDEIEKMVQEAEKYKSEDEEHKKKVEAKNALENYAYNMRNTIQDEKIGEKLPAADKKKIEDSIEQAIQWLEGNQLAEADEFEDKMKELESICNPIIAKMYQGAGGEAGGPGASGMDDDAPPASGGAGPKIEEVD

SEQ ID NO: 108644 - protein, 588 aa, Arabidopsis thaliana
  peptide (1)..(588): Ceres Seq. ID no. 13667994
  misc_feature: Pfam Name: HSP70 Pfam Description: Hsp70 protein
  misc_feature (1)..(563): Homolog of NCBI NO: 21263753 NR Description: Heat shock cognate 71 kDa protein (Hsc70.1)
  misc_feature (1)..(588): Homolog of NCBI NO: 14423732 NR Description: Heat shock 70 kDa protein
  misc_feature (1)..(572): Homolog of NCBI NO: 6016151 NR Description: Luminal binding protein 3 precursor (BiP3)
  misc_feature (1)..(572): Homolog of NCBI NO: 1037176 NR Description: immunoglobulin heavy chain binding protein
  misc_feature (1)..(563): Homolog of NCBI NO: 481576 NR Description: dnaK-type molecular chaperone GRP78/BiP - cinnamomi >gi|429118|emb|CAA53369.1| glucose regulated protein
  misc_feature (1)..(572): Homolog of NCBI NO: 29539338 NR Description: Heat shock 70 kDa protein [Cyanidioschyzon
  misc_feature (1)..(572): Homolog of NCBI NO: 23480384 NR Description: heat shock protein [Plasmodium yoelii yoelii]
  misc_feature (61)..(583): Homolog of NCBI NO: 4164594 NR Description: heat shock protein 70 [Paracoccidioides
  misc_feature (1)..(573): Homolog of NCBI NO: 19114157 NR Description: 78 kd glucose regulated protein homolog hsp70 family [Schizosaccharomyces pombe]
MNPVNTVFDAKRLIGRRFSDSSVQSDMKLWPFKIQAGPADKPMIYVEYKGEEKEFAAEEISSMVLIKMREIAEAYLGVTIKNAVVTVPAYFNDSQRQATKDAGVIAGLNVMRIINEPTAAAIAYGLDKKATTVGEKNVLIFDLGGGTFDVSLLTIEEGIFEVKATAGDTHLGGEDFDNRMVNHFVQEFKRKSKKDITGNPRALRRLRTSCERAKRTLSSTAQTTIEIDSLYEGIDFYSTITRARFEELNMDLFRKCMEPVEKCLRDAKMDKSTVHDVVLVGGSTRIPKVQQLLQDFFNGKELCKSINPDEAVAYGAAVQGAILSGEGNEKVQDLLLLDVTPLSLGLETAGGVMTTLIPRNTTIPTKKEQVFSTYSDNQPGVLIQVYEGERARTKDNNLLGKFELSGIPPAPRGVPQITVCFDIDANGILNVSAEDKTTGQKNKITITNDKGRLSKDEIEKMVQEAEKYKSEDEEHKKKVEAKNALENYAYNMRNTIQDEKIGEKLPAADKKKIEDSIEQAIQWLEGNQLAEADEFEDKMKELESICNPIIAKMYQGAGGEAGGPGASGMDDDAPPASGGAGPKIEEVD

SEQ ID NO: 108645 - protein, 562 aa, Arabidopsis thaliana
  peptide (1)..(562): Ceres Seq. ID no. 13667995
  misc_feature: Pfam Name: HSP70 Pfam Description: Hsp70 protein
  misc_feature (1)..(537): Homolog of NCBI NO: 21263753 NR Description: Heat shock cognate 71 kDa protein (Hsc70.1)
  misc_feature (1)..(562): Homolog of NCBI NO: 14423732 NR Description: Heat shock 70 kDa protein
  misc_feature (1)..(546): Homolog of NCBI NO: 6016151 NR Description: Luminal binding protein 3 precursor (BiP3)
  misc_feature (1)..(546): Homolog of NCBI NO: 1037176 NR Description: immunoglobulin heavy chain binding protein
  misc_feature (1)..(537): Homolog of NCBI NO: 481576 NR Description: dnaK-type molecular chaperone GRP78/BiP - cinnamomi >gi|429118|emb|CAA53369.1| glucose regulated protein
  misc_feature (1)..(546): Homolog of NCBI NO: 29539338 NR Description: Heat shock 70 kDa protein [Cyanidioschyzon
  misc_feature (1)..(546): Homolog of NCBI NO: 23480384 NR Description: heat shock protein [Plasmodium yoelii yoelii]
  misc_feature (35)..(557): Homolog of NCBI NO: 4164594 NR Description: heat shock protein 70 [Paracoccidioides
  misc_feature (1)..(547): Homolog of NCBI NO: 19114157 NR Description: 78 kd glucose regulated protein homolog hsp70 family [Schizosaccharomyces pombe]
MKLWPFKIQAGPADKPMIYVEYKGEEKEFAAEEISSMVLIKMREIAEAYLGVTIKNAVVTVPAYFNDSQRQATKDAGVIAGLNVMRIINEPTAAAIAYGLDKKATTVGEKNVLIFDLGGGTFDVSLLTIEEGIFEVKATAGDTHLGGEDFDNRMVNHFVQEFKRKSKKDITGNPRALRRLRTSCERAKRTLSSTAQTTIEIDSLYEGIDFYSTITRARFEELNMDLFRKCMEPVEKCLRDAKMDKSTVHDVVLVGGSTRIPKVQQLLQDFFNGKELCKSINPDEAVAYGAAVQGAILSGEGNEKVQDLLLLDVTPLSLGLETAGGVMTTLIPRNTTIPTKKEQVFSTYSDNQPGVLIQVYEGERARTKDNNLLGKFELSGIPPAPRGVPQITVCFDIDANGILNVSAEDKTTGQKNKITITNDKGRLSKDEIEKMVQEAEKYKSEDEEHKKKVEAKNALENYAYNMRNTIQDEKIGEKLPAADKKKIEDSIEQAIQWLEGNQLAEADEFEDKMKELESICNPIIAKMYQGAGGEAGGPGASGMDDDAPPASGGAGPKIEEVD

SEQ ID NO: 108646 - DNA, 528 bp, Arabidopsis thaliana
  misc_feature (1)..(528): Ceres Seq. ID no. 13667996
  misc_feature: MA Experiment ID: 108434 Result: Down-regulated in Transcription
  misc_feature: MA Experiment 108434 PARAMETER Experiment Name: At_Root_Tips_cDNA_P Parameter: Tissue Value: Root Tips
  misc_feature: MA Experiment ID: 108462 Result: Up-regulated in Transcription
  misc_feature: MA Experiment 108462 PARAMETER Experiment Name: At_Germinating_Seeds_cDNA_P Parameter: Age (day) Value: 2 vs. 0
  misc_feature: MA Experiment 108462 PARAMETER Experiment Name: At_Germinating_Seeds_cDNA_P Parameter: Tissue Value: Germinating Seeds
  misc_feature: MA Experiment ID: 108464 Result: Up-regulated in Transcription
  misc_feature: MA Experiment 108464 PARAMETER Experiment Name: At_Germinating_Seeds_cDNA_P Parameter: Age (day) Value: 4 vs. 0
  misc_feature: MA Experiment 108464 PARAMETER Experiment Name: At_Germinating_Seeds_cDNA_P Parameter: Tissue Value: Germinating Seeds
  misc_feature: MA Experiment ID: 108469 Result: Up-regulated in Transcription
  misc_feature: MA Experiment ID: 108473 Result: Up-regulated in Transcription
  misc_feature: MA Experiment 108473 PARAMETER Experiment Name: At_Drought_Flowers_cDNA_P Parameter: Timepoint (hr) Value: 7 d
  misc_feature: MA Experiment 108473 PARAMETER Experiment Name: At_Drought_Flowers_cDNA_P Parameter: Tissue Value: Flower
  misc_feature: MA Experiment 108473 PARAMETER Experiment Name: At_Drought_Flowers_cDNA_P Parameter: Treatment Value: Drought vs. No Drought
  misc_feature: MA Experiment ID: 108488 Result: Down-regulated in Transcription
  misc_feature: MA Experiment ID: 108501 Result: Down-regulated in Transcription
  misc_feature: MA Experiment 108501 PARAMETER Experiment Name: At_ap2_floral_buds_cDNA_P Parameter: Plant Line Value: ap2 (Ler.)
  misc_feature: MA Experiment 108501 PARAMETER Experiment Name: At_ap2_floral_buds_cDNA_P Parameter: Tissue Value: Closed Flower
  misc_feature: MA Experiment ID: 108572 Result: Up-regulated in Transcription
  misc_feature: MA Experiment 108572 PARAMETER Experiment Name: At_Drought_cDNA_P Parameter: Timepoint (hr) Value: 1
  misc_feature: MA Experiment 108572 PARAMETER Experiment Name: At_Drought_cDNA_P Parameter: Tissue Value: Aerial
  misc_feature: MA Experiment 108572 PARAMETER Experiment Name: At_Drought_cDNA_P Parameter: Treatment Value: Drought vs. No Drought
  misc_feature: MA Experiment ID: 108585 Result: Up-regulated in Transcription
  misc_feature: MA Experiment 108585 PARAMETER Experiment Name: At_5mM_NaNP_cDNA_P Parameter: Timepoint (hr) Value: 6
  misc_feature: MA Experiment 108585 PARAMETER Experiment Name: At_5mM_NaNP_cDNA_P Parameter: Tissue Value: Aerial
  misc_feature: MA Experiment 108585 PARAMETER Experiment Name: At_5mM_NaNP_cDNA_P Parameter: Treatment Value: null
  misc_feature: MA Experiment ID: 108595 Result: Up-regulated in Transcription
  misc_feature: MA Experiment 108595 PARAMETER Experiment Name: At_Ler-pi_Ovule_cDNA_P Parameter: Plant Line Value: null
  misc_feature: MA Experiment ID: 108605 Result: Up-regulated in Transcription
  misc_feature: MA Experiment 108605 PARAMETER Experiment Name: At_100uM_ABA_cDNA_P Parameter: Timepoint (hr) Value: 6
  misc_feature: MA Experiment 108605 PARAMETER Experiment Name: At_100uM_ABA_cDNA_P Parameter: Tissue Value: Aerial
  misc_feature: MA Experiment 108605 PARAMETER Experiment Name: At_100uM_ABA_cDNA_P Parameter: Treatment Value: 100uM ABA vs. No Treatment
  misc_feature: MA Experiment ID: 108607 Result: Up-regulated in Transcription
  misc_feature: MA Experiment 108607 PARAMETER Experiment Name: At_100uM_ABA_cDNA_P Parameter: Timepoint (hr) Value: 4
  misc_feature: MA Experiment 108607 PARAMETER Experiment Name: At_100uM_ABA_cDNA_P Parameter: Tissue Value: Aerial
  misc_feature: MA Experiment 108607 PARAMETER Experiment Name: At_100uM_ABA_cDNA_P Parameter: Treatment Value: 100uM ABA vs. No Treatment
  misc_feature: MA Experiment ID: 108608 Result: Up-regulated in Transcription
  misc_feature: MA Experiment 108608 PARAMETER Experiment Name: At_100uM_ABA_cDNA_P Parameter: Timepoint (hr) Value: 1
  misc_feature: MA Experiment 108608 PARAMETER Experiment Name: At_100uM_ABA_cDNA_P Parameter: Tissue Value: Aerial
  misc_feature: MA Experiment 108608 PARAMETER Experiment Name: At_100uM_ABA_cDNA_P Parameter: Treatment Value: 100uM ABA vs. No Treatment
  misc_feature: MA Experiment ID: 108668 Result: Up-regulated in Transcription
  misc_feature: MA Experiment 108668 PARAMETER Experiment Name: At_2mM_SA_cDNA_P Parameter: Plant Line Value: WS
  misc_feature: MA Experiment 108668 PARAMETER Experiment Name: At_2mM_SA_cDNA_P Parameter: Timepoint (hr) Value: 6
  misc_feature: MA Experiment 108668 PARAMETER Experiment Name: At_2mM_SA_cDNA_P Parameter: Treatment Value: 2mM SA vs. No Treatment
  misc_feature: MA Experiment ID: 20000069 Result: Up-regulated in Transcription
  misc_feature: MA Experiment 20000069 PARAMETER Experiment Name: At_100uM_ABA_Mutants_cDNA_P Parameter: Plant Line Value: CS23
  misc_feature: MA Experiment 20000069 PARAMETER Experiment Name: At_100uM_ABA_Mutants_cDNA_P Parameter: Timepoint (hr) Value: 6
  misc_feature: MA Experiment 20000069 PARAMETER Experiment Name: At_100uM_ABA_Mutants_cDNA_P Parameter: Tissue Value: Aerial
  misc_feature: MA Experiment 20000069 PARAMETER Experiment Name: At_100uM_ABA_Mutants_cDNA_P Parameter: Treatment Value: 100uM ABA vs. No Treatment
  misc_feature: MA Experiment ID: 20000070 Result: Up-regulated in Transcription
  misc_feature: MA Experiment 20000070 PARAMETER Experiment Name: At_100uM_ABA_Mutants_cDNA_P Parameter: Plant Line Value: CS24
  misc_feature: MA Experiment 20000070 PARAMETER Experiment Name: At_100uM_ABA_Mutants_cDNA_P Parameter: Timepoint (hr) Value: 6
  misc_feature: MA Experiment 20000070 PARAMETER Experiment Name: At_100uM_ABA_Mutants_cDNA_P Parameter: Tissue Value: Aerial
  misc_feature: MA Experiment 20000070 PARAMETER Experiment Name: At_100uM_ABA_Mutants_cDNA_P Parameter: Treatment Value: 100uM ABA vs. No Treatment
  misc_feature: MA Experiment ID: 20000071 Result: Up-regulated in Transcription
  misc_feature: MA Experiment 20000071 PARAMETER Experiment Name: At_100uM_ABA_Mutants_cDNA_P Parameter: Plant Line Value: CS8104
  misc_feature: MA Experiment 20000071 PARAMETER Experiment Name: At_100uM_ABA_Mutants_cDNA_P Parameter: Timepoint (hr) Value: 6
  misc_feature: MA Experiment 20000071 PARAMETER Experiment Name: At_100uM_ABA_Mutants_cDNA_P Parameter: Tissue Value: Aerial
  misc_feature: MA Experiment 20000071 PARAMETER Experiment Name: At_100uM_ABA_Mutants_cDNA_P Parameter: Treatment Value: 100uM ABA vs. No Treatment
  misc_feature: MA Experiment ID: 20000087 Result: Up-regulated in Transcription
  misc_feature: MA Experiment 20000087 PARAMETER Experiment Name: At_100uM_ABA_Mutants_cDNA_P Parameter: Plant Line Value: WS
  misc_feature: MA Experiment 20000087 PARAMETER Experiment Name: At_100uM_ABA_Mutants_cDNA_P Parameter: Timepoint (hr) Value: 6
  misc_feature: MA Experiment 20000087 PARAMETER Experiment Name: At_100uM_ABA_Mutants_cDNA_P Parameter: Tissue Value: Aerial
  misc_feature: MA Experiment 20000087 PARAMETER Experiment Name: At_100uM_ABA_Mutants_cDNA_P Parameter: Treatment Value: 100uM ABA vs. No Treatment
  misc_feature: MA Experiment ID: 20000089 Result: Up-regulated in Transcription
  misc_feature: MA Experiment ID: 20000090 Result: Up-regulated in Transcription
  misc_feature: MA Experiment ID: 20000112 Result: Up-regulated in Transcription
  misc_feature: MA Experiment 20000112 PARAMETER Experiment Name: At_42deg_Heat_cDNA_P Parameter: Temperature (deg C) Value: 42 vs. 22
  misc_feature: MA Experiment 20000112 PARAMETER Experiment Name: At_42deg_Heat_cDNA_P Parameter: Timepoint (hr) Value: 2
  misc_feature: MA Experiment 20000112 PARAMETER Experiment Name: At_42deg_Heat_cDNA_P Parameter: Tissue Value: Aerial
  misc_feature: MA Experiment ID: 20000117 Result: Up-regulated in Transcription
  misc_feature: MA Experiment 20000117 PARAMETER Experiment Name: At_100uM_ABA_Mutants_cDNA_P Parameter: Plant Line Value: Columbia
  misc_feature: MA Experiment 20000117 PARAMETER Experiment Name: At_100uM_ABA_Mutants_cDNA_P Parameter: Timepoint (hr) Value: 6
  misc_feature: MA Experiment 20000117 PARAMETER Experiment Name: At_100uM_ABA_Mutants_cDNA_P Parameter: Tissue Value: Aerial
  misc_feature: MA Experiment 20000117 PARAMETER Experiment Name: At_100uM_ABA_Mutants_cDNA_P Parameter: Treatment Value: 100uM ABA vs. No Treatment
  misc_feature: MA Experiment ID: 20000166 Result: Up-regulated in Transcription
  misc_feature: MA Experiment 20000166 PARAMETER Experiment Name: At_100uM_ABA_P Parameter: Age (day) Value: 14
  misc_feature: MA Experiment 20000166 PARAMETER Experiment Name: At_100uM_ABA_P Parameter: Organism Value: A. thaliana
  misc_feature: MA Experiment 20000166 PARAMETER Experiment Name: At_100uM_ABA_P Parameter: Plant Line Value: WS
  misc_feature: MA Experiment 20000166 PARAMETER Experiment Name: At_100uM_ABA_P Parameter: Timepoint (hr) Value: 1
  misc_feature: MA Experiment 20000166 PARAMETER Experiment Name: At_100uM_ABA_P Parameter: Tissue Value: Aerial
  misc_feature: MA Experiment 20000166 PARAMETER Experiment Name: At_100uM_ABA_P Parameter: Treatment Value: 100uM ABA vs. No Treatment
  misc_feature: MA Experiment ID: 20000169 Result: Up-regulated in Transcription
  misc_feature: MA Experiment 20000169 PARAMETER Experiment Name: At_100uM_ABA_P Parameter: Age (day) Value: 14
  misc_feature: MA Experiment 20000169 PARAMETER Experiment Name: At_100uM_ABA_P Parameter: Organism Value: A. thaliana
  misc_feature: MA Experiment 20000169 PARAMETER Experiment Name: At_100uM_ABA_P Parameter: Plant Line Value: WS
  misc_feature: MA Experiment 20000169 PARAMETER Experiment Name: At_100uM_ABA_P Parameter: Timepoint (hr) Value: 6
  misc_feature: MA Experiment 20000169 PARAMETER Experiment Name: At_100uM_ABA_P Parameter: Tissue Value: Aerial
  misc_feature: MA Experiment 20000169 PARAMETER Experiment Name: At_100uM_ABA_P Parameter: Treatment Value: 100uM ABA vs. No Treatment
  misc_feature: MA Experiment ID: 20000179 Result: Down-regulated in Transcription
  misc_feature: MA Experiment 20000179 PARAMETER Experiment Name: At_Germinating_Seeds_P Parameter: Age (hr) Value: 6 vs. 0
  misc_feature: MA Experiment 20000179 PARAMETER Experiment Name: At_Germinating_Seeds_P Parameter: Tissue Value: Germinating Seeds
  misc_feature: MA Experiment ID: 20000182 Result: Up-regulated in Transcription
  misc_feature: MA Experiment 20000182 PARAMETER Experiment Name: At_2mM_SA_P Parameter: Age (day) Value: 14
  misc_feature: MA Experiment 20000182 PARAMETER Experiment Name: At_2mM_SA_P Parameter: Organism Value: A. thaliana
  misc_feature: MA Experiment 20000182 PARAMETER Experiment Name: At_2mM_SA_P Parameter: Plant Line Value: WS
  misc_feature: MA Experiment 20000182 PARAMETER Experiment Name: At_2mM_SA_P Parameter: Timepoint (hr) Value: 6
  misc_feature: MA Experiment 20000182 PARAMETER Experiment Name: At_2mM_SA_P Parameter: Tissue Value: Aerial
  misc_feature: MA Experiment 20000182 PARAMETER Experiment Name: At_2mM_SA_P Parameter: Treatment Value: 2mM SA vs. No Treatment
  misc_feature: MA Experiment ID: 20000184 Result: Down-regulated in Transcription
  misc_feature: MA Experiment 20000184 PARAMETER Experiment Name: At_Shoots__P Parameter: Age (day) Value: 7
  misc_feature: MA Experiment 20000184 PARAMETER Experiment Name: At_Shoots__P Parameter: Tissue Value: Shoots vs. Whole Plant
  misc_feature: MA Experiment ID: 20000185 Result: Up-regulated in Transcription
  misc_feature: MA Experiment 20000185 PARAMETER Experiment Name: At_Roots__P Parameter: Age (day) Value: 7 vs. 21
  misc_feature: MA Experiment 20000185 PARAMETER Experiment Name: At_Roots__P Parameter: Organism Value: A. thaliana
  misc_feature: MA Experiment 20000185 PARAMETER Experiment Name: At_Roots__P Parameter: Tissue Value: Roots vs. Whole Plant
  misc_feature: MA Experiment ID: 20000224 Result: Up-regulated in Transcription
  misc_feature: MA Experiment ID: 20000227 Result: Down-regulated in Transcription
  misc_feature: MA Experiment 20000227 PARAMETER Experiment Name: At_Root-Tips-vs-Tops_P Parameter: Tissue Value: Root Tips vs. Root Tops
  misc_feature: MA Experiment ID: 20000234 Result: Down-regulated in Transcription
  misc_feature: MA Experiment 20000234 PARAMETER Experiment Name: At_Siliques_P Parameter: Age (day) Value: 21
  misc_feature: MA Experiment 20000234 PARAMETER Experiment Name: At_Siliques_P Parameter: Organism Value: A. thaliana
  misc_feature: MA Experiment 20000234 PARAMETER Experiment Name: At_Siliques_P Parameter: Plant Line Value: WS
  misc_feature: MA Experiment 20000234 PARAMETER Experiment Name: At_Siliques_P Parameter: Tissue Value: Less Than 5mm Siliques vs. Whole Plant
  misc_feature: MA Experiment ID: 20000235 Result: Down-regulated in Transcription
  misc_feature: MA Experiment 20000235 PARAMETER Experiment Name: At_Siliques_P Parameter: Age (day) Value: 21
  misc_feature: MA Experiment 20000235 PARAMETER Experiment Name: At_Siliques_P Parameter: Organism Value: A. thaliana
  misc_feature: MA Experiment 20000235 PARAMETER Experiment Name: At_Siliques_P Parameter: Plant Line Value: WS
  misc_feature: MA Experiment 20000235 PARAMETER Experiment Name: At_Siliques_P Parameter: Tissue Value: 5-10mm Siliques vs. Whole Plant
  misc_feature: MA Experiment ID: 20000264 Result: Down-regulated in Transcription
  misc_feature: MA Experiment 20000264 PARAMETER Experiment Name: At_Open_Flower_P Parameter: Age (day) Value: 21
  misc_feature: MA Experiment 20000264 PARAMETER Experiment Name: At_Open_Flower_P Parameter: Plant Line Value: WS
  misc_feature: MA Experiment 20000264 PARAMETER Experiment Name: At_Open_Flower_P Parameter: Tissue Value: Open Flower vs. Whole Plant
  misc_feature: MA Experiment ID: 20000286 Result: Down-regulated in Transcription
  misc_feature: MA Experiment 20000286 PARAMETER Experiment Name: At_Open_Flower_P Parameter: Age (day) Value: 21
  misc_feature: MA Experiment 20000286 PARAMETER Experiment Name: At_Open_Flower_P Parameter: Plant Line Value: WS
  misc_feature: MA Experiment 20000286 PARAMETER Experiment Name: At_Open_Flower_P Parameter: Tissue Value: Half Open vs. Whole Plant
  misc_feature: MA Experiment ID: 20000438 Result: Down-regulated in Transcription
  misc_feature: MA Experiment 20000438 PARAMETER Experiment Name: At_Shoots__P Parameter: Age (day) Value: 14
  misc_feature: MA Experiment 20000438 PARAMETER Experiment Name: At_Shoots__P Parameter: Tissue Value: Shoots vs. Whole Plant
  misc_feature: MA Experiment ID: 20000439 Result: Up-regulated in Transcription
  misc_feature: MA Experiment 20000439 PARAMETER Experiment Name: At_Roots__P Parameter: Age (day) Value: 14 vs. 21
  misc_feature: MA Experiment 20000439 PARAMETER Experiment Name: At_Roots__P Parameter: Organism Value: A. thaliana
  misc_feature: MA Experiment 20000439 PARAMETER Experiment Name: At_Roots__P Parameter: Tissue Value: Roots vs. Whole Plant
  misc_feature: MA Experiment ID: 20000453 Result: Up-regulated in Transcription
  misc_feature: MA Experiment 20000453 PARAMETER Experiment Name: At_100uM_ABA_P Parameter: Age (day) Value: 15
  misc_feature: MA Experiment 20000453 PARAMETER Experiment Name: At_100uM_ABA_P Parameter: Organism Value: A. thaliana
  misc_feature: MA Experiment 20000453 PARAMETER Experiment Name: At_100uM_ABA_P Parameter: Plant Line Value: WS
  misc_feature: MA Experiment 20000453 PARAMETER Experiment Name: At_100uM_ABA_P Parameter: Timepoint (hr) Value: 24
  misc_feature: MA Experiment 20000453 PARAMETER Experiment Name: At_100uM_ABA_P Parameter: Tissue Value: Aerial
  misc_feature: MA Experiment 20000453 PARAMETER Experiment Name: At_100uM_ABA_P Parameter: Treatment Value: 100uM ABA vs. No Treatment
  misc_feature: MA Experiment ID: 20000527 Result: Down-regulated in Transcription
  misc_feature: MA Experiment 20000527 PARAMETER Experiment Name: At_10percent_PEG_P Parameter: Age (day) Value: 20
  misc_feature: MA Experiment 20000527 PARAMETER Experiment Name: At_10percent_PEG_P Parameter: Organism Value: A. thaliana
  misc_feature: MA Experiment 20000527 PARAMETER Experiment Name: At_10percent_PEG_P Parameter: Plant Line Value: WS
  misc_feature: MA Experiment 20000527 PARAMETER Experiment Name: At_10percent_PEG_P Parameter: Timepoint (day) Value: 20
  misc_feature: MA Experiment 20000527 PARAMETER Experiment Name: At_10percent_PEG_P Parameter: Tissue Value: Whole Plant
  misc_feature: MA Experiment 20000527 PARAMETER Experiment Name: At_10percent_PEG_P Parameter: Treatment Value: 10percent PEG vs. No Treatment
  misc_feature: MA Experiment ID: 20000573 Result: Up-regulated in Transcription
  misc_feature: MA Experiment 20000573 PARAMETER Experiment Name: At_100uM_ABA_Mutants__P Parameter: Organism Value: A. thaliana
  misc_feature: MA Experiment 20000573 PARAMETER Experiment Name: At_100uM_ABA_Mutants__P Parameter: Plant Line Value: CS22 vs. Ler wt
  misc_feature: MA Experiment 20000573 PARAMETER Experiment Name: At_100uM_ABA_Mutants__P Parameter: Timepoint (hr) Value: N/A
  misc_feature: MA Experiment 20000573 PARAMETER Experiment Name: At_100uM_ABA_Mutants__P Parameter: Tissue Value: Whole Plant
  misc_feature: MA Experiment 20000573 PARAMETER Experiment Name: At_100uM_ABA_Mutants__P Parameter: Treatment Value: None
  misc_feature: MA Experiment ID: 20001557 Result: Down-regulated in Transcription
  misc_feature: MA Experiment 20001557 PARAMETER Experiment Name: At_Drought_Soil_Dry_P Parameter: Age (day) Value: 27
  misc_feature: MA Experiment 20001557 PARAMETER Experiment Name: At_Drought_Soil_Dry_P Parameter: Organism Value: A. thaliana
  misc_feature: MA Experiment 20001557 PARAMETER Experiment Name: At_Drought_Soil_Dry_P Parameter: Plant Line Value: WS
  misc_feature: MA Experiment 20001557 PARAMETER Experiment Name: At_Drought_Soil_Dry_P Parameter: Post Timepoint (hr) Value: 3
  misc_feature: MA Experiment 20001557 PARAMETER Experiment Name: At_Drought_Soil_Dry_P Parameter: Post-Treatment Value: Re-Water vs. No Drought
  misc_feature: MA Experiment 20001557 PARAMETER Experiment Name: At_Drought_Soil_Dry_P Parameter: Timepoint (day) Value: 13
  misc_feature: MA Experiment 20001557 PARAMETER Experiment Name: At_Drought_Soil_Dry_P Parameter: Treatment Value: Drought vs. No Drought
  misc_feature: MA Experiment ID: 20001558 Result: Down-regulated in Transcription
  misc_feature: MA Experiment 20001558 PARAMETER Experiment Name: At_Drought_Soil_Dry_P Parameter: Age (day) Value: 27
  misc_feature: MA Experiment 20001558 PARAMETER Experiment Name: At_Drought_Soil_Dry_P Parameter: Organism Value: A. thaliana
  misc_feature: MA Experiment 20001558 PARAMETER Experiment Name: At_Drought_Soil_Dry_P Parameter: Plant Line Value: WS
  misc_feature: MA Experiment 20001558 PARAMETER Experiment Name: At_Drought_Soil_Dry_P Parameter: Post Timepoint (hr) Value: 6
  misc_feature: MA Experiment 20001558 PARAMETER Experiment Name: At_Drought_Soil_Dry_P Parameter: Post-Treatment Value: Re-Water vs. No Drought
  misc_feature: MA Experiment 20001558 PARAMETER Experiment Name: At_Drought_Soil_Dry_P Parameter: Timepoint (day) Value: 13
  misc_feature: MA Experiment 20001558 PARAMETER Experiment Name: At_Drought_Soil_Dry_P Parameter: Treatment Value: Drought vs. No Drought
  misc_feature: MA Experiment ID: 20001560 Result: Down-regulated in Transcription
  misc_feature: MA Experiment 20001560 PARAMETER Experiment Name: At_Drought_Soil_Dry_P Parameter: Age (day) Value: 28
  misc_feature: MA Experiment 20001560 PARAMETER Experiment Name: At_Drought_Soil_Dry_P Parameter: Organism Value: A. thaliana
  misc_feature: MA Experiment 20001560 PARAMETER Experiment Name: At_Drought_Soil_Dry_P Parameter: Plant Line Value: WS
  misc_feature: MA Experiment 20001560 PARAMETER Experiment Name: At_Drought_Soil_Dry_P Parameter: Post Timepoint (hr) Value: None
  misc_feature: MA Experiment 20001560 PARAMETER Experiment Name: At_Drought_Soil_Dry_P Parameter: Post-Treatment Value: None
  misc_feature: MA Experiment 20001560 PARAMETER Experiment Name: At_Drought_Soil_Dry_P Parameter: Timepoint (day) Value: 14
  misc_feature: MA Experiment 20001560 PARAMETER Experiment Name: At_Drought_Soil_Dry_P Parameter: Treatment Value: Drought vs. No Drought
  misc_feature: MA Experiment ID: 20001905 Result: Up-regulated in Transcription
  misc_feature: MA Experiment 20001905 PARAMETER Experiment Name: At_Drought_Reproduction_P Parameter: Age (day) Value: 40
  misc_feature: MA Experiment 20001905 PARAMETER Experiment Name: At_Drought_Reproduction_P Parameter: Organism Value: A. thaliana
  misc_feature: MA Experiment 20001905 PARAMETER Experiment Name: At_Drought_Reproduction_P Parameter: Plant Line Value: WS
  misc_feature: MA Experiment 20001905 PARAMETER Experiment Name: At_Drought_Reproduction_P Parameter: Timepoint (day) Value: 10
  misc_feature: MA Experiment 20001905 PARAMETER Experiment Name: At_Drought_Reproduction_P Parameter: Tissue Value: Rosettes
  misc_feature: MA Experiment 20001905 PARAMETER Experiment Name: At_Drought_Reproduction_P Parameter: Treatment Value: Drought vs. No Drought
  misc_feature: MA Experiment ID: 20001911 Result: Up-regulated in Transcription
  misc_feature: MA Experiment 20001911 PARAMETER Experiment Name: At_Drought_Reproduction_P Parameter: Age (day) Value: 40
  misc_feature: MA Experiment 20001911 PARAMETER Experiment Name: At_Drought_Reproduction_P Parameter: Organism Value: A. thaliana
  misc_feature: MA Experiment 20001911 PARAMETER Experiment Name: At_Drought_Reproduction_P Parameter: Plant Line Value: WS
  misc_feature: MA Experiment 20001911 PARAMETER Experiment Name: At_Drought_Reproduction_P Parameter: Timepoint (day) Value: 10
  misc_feature: MA Experiment 20001911 PARAMETER Experiment Name: At_Drought_Reproduction_P Parameter: Tissue Value: Flowers
  misc_feature: MA Experiment 20001911 PARAMETER Experiment Name: At_Drought_Reproduction_P Parameter: Treatment Value: Drought vs. No Drought
  misc_feature: Pfam Name: Thioredoxin Pfam Description: Thioredoxin
ggcacgagaaacaaaactcttaaaagcttaagaacaaataataaaaatggccggtgaaggagaagtgattgcttgccataccctcgaagtttggaacgagaaggtcaaagacgccaatgaatccaagaaactgattgtgatagacttcacagcatcatggtgtccaccttgccgtttcattgcaccagtgtttgcagagatggctaagaagttcactaatgttgtcttcttcaagatcgatgttgatgaattgcaagctgttgctcaggaattcaaagttgaggcaatgcctacttttgttttcatgaaagaaggcaacatcattgatcgtgttgtcggtgctgcgaaagatgagatcaatgagaagctgatgaagcatggtggtcttgtagcttctgcttgattgatttcagtttctaactctttgcatcataataaagtttttatctttcgtatgaaataaaagtgatgcattgctactgcacatttgtattataactatgttgatttttcgattactggtttgtt

SEQ ID NO: 108647 - protein, 118 aa, Arabidopsis thaliana; identical to SEQ ID NO: 26633
  peptide (1)..(118): Ceres Seq. ID no. 13667997
  misc_feature: Pfam Name: Thioredoxin Pfam Description: Thioredoxin
  misc_feature (1)..(118): Homolog of NCBI NO: 1388084 NR Description: thioredoxin h
  misc_feature (1)..(118): Homolog of NCBI NO: 15219537 NR Description: thioredoxin H-type 5 (TRX-H-5) [Arabidopsis
  misc_feature (29)..(111): Homolog of NCBI NO: 25405885 NR Description: protein F27F5.21 [imported] - Arabidopsis >gi|7767672|gb|AAF69169.1|AC007915_21 F27F5.21 [Arabidopsis
  misc_feature (1)..(29): Homolog of NCBI NO: 25405885 NR Description: protein F27F5.21 [imported] - Arabidopsis >gi|7767672|gb|AAF69169.1|AC007915_21 F27F5.21 [Arabidopsis
  misc_feature (1)..(118): Homolog of NCBI NO: 15239136 NR Description: thioredoxin H-type 3 (TRX-H-3) [Arabidopsis
  misc_feature (5)..(117): Homolog of NCBI NO: 11135277 NR Description: Thioredoxin H-type 1 (TRX-H-1) (Pollen coat
  misc_feature (5)..(117): Homolog of NCBI NO: 11494247 NR Description: thioredoxin-h-like protein 1 [Brassica oleracea
  misc_feature (5)..(117): Homolog of NCBI NO: 11135129 NR Description: Thioredoxin H-type (TRX-H) >gi|7430841|pir||T14379
  misc_feature (4)..(111): Homolog of NCBI NO: 15230385 NR Description: thioredoxin H-type 1 (TRX-H-1) [Arabidopsis
  misc_feature (2)..(118): Homolog of NCBI NO: 11135265 NR Description: Thioredoxin H-type 2 (TRX-H-2)

SEQ ID NO: 108648 - protein, 67 aa, Arabidopsis thaliana; identical to SEQ ID NO: 26634
  peptide (1)..(67): Ceres Seq. ID no. 13667998
  misc_feature: Pfam Name: Thioredoxin Pfam Description: Thioredoxin
  misc_feature (1)..(67): Homolog of NCBI NO: 1388084 NR Description: thioredoxin h
  misc_feature (1)..(67): Homolog of NCBI NO: 15219537 NR Description: thioredoxin H-type 5 (TRX-H-5) [Arabidopsis
  misc_feature (1)..(60): Homolog of NCBI NO: 25405885 NR Description: protein F27F5.21 [imported] - Arabidopsis >gi|7767672|gb|AAF69169.1|AC007915_21 F27F5.21 [Arabidopsis
  misc_feature (1)..(67): Homolog of NCBI NO: 15239136 NR Description: thioredoxin H-type 3 (TRX-H-3) [Arabidopsis
  misc_feature (1)..(66): Homolog of NCBI NO: 11135277 NR Description: Thioredoxin H-type 1 (TRX-H-1) (Pollen coat
  misc_feature (1)..(66): Homolog of NCBI NO: 11494247 NR Description: thioredoxin-h-like protein 1 [Brassica oleracea
  misc_feature (1)..(66): Homolog of NCBI NO: 11135129 NR Description: Thioredoxin H-type (TRX-H) >gi|7430841|pir||T14379
  misc_feature (1)..(60): Homolog of NCBI NO: 15230385 NR Description: thioredoxin H-type 1 (TRX-H-1) [Arabidopsis
  misc_feature (1)..(67): Homolog of NCBI NO: 11135265 NR Description: Thioredoxin H-type 2 (TRX-H-2)
  misc_feature (1)..(66): Homolog of NCBI NO: 21617968 NR Description: thioredoxin [Arabidopsis thaliana]

SEQ ID NO: 108649 - DNA, 1208 bp, Arabidopsis thaliana
  misc_feature (1)..(1208): Ceres Seq. ID no. 13668003
  misc_feature: MA Experiment ID: 108577 Result: Down-regulated in Transcription
  misc_feature: MA Experiment 108577 PARAMETER Experiment Name: At_42deg_Heat_cDNA_P Parameter: Temperature (deg C) Value: 42 vs. 22
  misc_feature: MA Experiment 108577 PARAMETER Experiment Name: At_42deg_Heat_cDNA_P Parameter: Timepoint (hr) Value: 6
  misc_feature: MA Experiment 108577 PARAMETER Experiment Name: At_42deg_Heat_cDNA_P Parameter: Tissue Value: Aerial
  misc_feature: MA Experiment ID: 108595 Result: Down-regulated in Transcription
  misc_feature: MA Experiment 108595 PARAMETER Experiment Name: At_Ler-pi_Ovule_cDNA_P Parameter: Plant Line Value: null
  misc_feature: MA Experiment ID: 20000111 Result: Down-regulated in Transcription
  misc_feature: MA Experiment 20000111 PARAMETER Experiment Name: At_42deg_Heat_cDNA_P Parameter: Temperature (deg C) Value: 42 vs. 22
  misc_feature: MA Experiment 20000111 PARAMETER Experiment Name: At_42deg_Heat_cDNA_P Parameter: Timepoint (hr) Value: 6
  misc_feature: MA Experiment 20000111 PARAMETER Experiment Name: At_42deg_Heat_cDNA_P Parameter: Tissue Value: Aerial
  misc_feature: MA Experiment ID: 20000113 Result: Down-regulated in Transcription
  misc_feature: MA Experiment 20000113 PARAMETER Experiment Name: At_42deg_Heat_cDNA_P Parameter: Temperature (deg C) Value: 42 vs. 22
  misc_feature: MA Experiment 20000113 PARAMETER Experiment Name: At_42deg_Heat_cDNA_P Parameter: Timepoint (hr) Value: 8
  misc_feature: MA Experiment 20000113 PARAMETER Experiment Name: At_42deg_Heat_cDNA_P Parameter: Tissue Value: Aerial
ggtacgagcttaatccgccgtctctcactttttcgccggcgtggttagatcgtacaaagctcagagagaatgttgggaatcttgaggcaaagagccatcgatggagcttcgactcttaggaggacgcgattcgcattggtttctgctaggagctatgcagctggtgcaaaagagatgacagtcagagatgctctaaattctgcaattgatgaggaaatgtctgctgatcctaaagtatttgtcatgggtgaagaggttggccaatatcaaggtgcctacaagatcactaaaggccttttggagaaatatggtcctgagagagtttacgatacccctattactgaggctggatttactggaattggagttggtgctgcctatgctggcttaaagcccgttgtagaatttatgacgtttaacttctctatgcaggcaattgatcatatcatcaattccgctgcaaagtcaaattacatgtctgctggacagataaatgtacccatcgtctttagaggacccaatggtgctgctgctggtgttggagctcaacattctcagtgctatgcagcgtggtatgcctcagttcctggtttgaaagtccttgctccgtattcagctgaagatgctcgtggtcttcttaaagctgccattagagaccctgaccctgttgtcttccttgaaaacgagttactatatggtgaatcattccctatttcagaagaagcccttgattcaagtttctgtcttcccataggcaaagccaagattgaacgagaaggaaaggacgtaacgatagtaactttctcgaagatggtcggtttcgccctcaaggcagctgagaagctcgcagaagagggaataagtgctgaggtaataaatcttcgatcaatccgtccgcttgaccgagccaccatcaatgcttcagtgaggaaaacgagtagattggtaacagttgaagaaggtttcccacaacatggagtctgtgcagaaatttgtgcgtcggttgtagaagagagcttttcgtacttggatgcaccggtcgagaggattgcaggagctgatgttccaatcccgtatacagctaacctagagagattggctcttcctcagatagaggacatcgttcgtgcatcaaagagagcttgttacagatcgaaataaaatcgtcaacatcaacacatttcttctttgatctttaaagggaaagg

SEQ ID NO: 108650 - protein, 363 aa, Arabidopsis thaliana
  peptide (1)..(363): Ceres Seq. ID no. 13668004
  misc_feature (229)..(351): Pfam Name: Transketolase, C-terminal domain Pfam Description: Transketolase, C-terminal domain
  misc_feature (1)..(363): Homolog of NCBI NO: 520478 NR Description: pyruvate dehydrogenase E1 beta subunit
  misc_feature (1)..(363): Homolog of NCBI NO: 15241286 NR Description: pyruvate dehydrogenase E1 component beta subunit,
  misc_feature (1)..(362): Homolog of NCBI NO: 38175533 NR Description: putative pyruvate dehydrogenase E1 beta subunit
  misc_feature (1)..(362): Homolog of NCBI NO: 3850999 NR Description: pyruvate dehydrogenase E1 beta subunit isoform 1
  misc_feature (1)..(362): Homolog of NCBI NO: 3851001 NR Description: pyruvate dehydrogenase E1 beta subunit isoform 2
  misc_feature (1)..(362): Homolog of NCBI NO: 3851003 NR Description: pyruvate dehydrogenase E1 beta subunit isoform 3
  misc_feature (1)..(362): Homolog of NCBI NO: 1709454 NR Description: Pyruvate dehydrogenase E1 component beta subunit,
  misc_feature (4)..(355): Homolog of NCBI NO: 21358145 NR Description: CG11876-PD [Drosophila melanogaster]
  misc_feature (4)..(355): Homolog of NCBI NO: 25012844 NR Description: RH05604p [Drosophila melanogaster]
  misc_feature (21)..(363): Homolog of NCBI NO: 28829918 NR Description: similar to Arabidopsis thaliana (Mouse-ear
MLGILRQRAIDGASTLRRTRFALVSARSYAAGAKEMTVRDALNSAIDEEMSADPKVFVMGEEVGQYQGAYKITKGLLEKYGPERVYDTPITEAGFTGIGVGAAYAGLKPVVEFMTFNFSMQAIDHIINSAAKSNYMSAGQINVPIVFRGPNGAAAGVGAQHSQCYAAWYASVPGLKVLAPYSAEDARGLLKAAIRDPDPVVFLENELLYGESFPISEEALDSSFCLPIGKAKIEREGKDVTIVTFSKMVGFALKAAEKLAEEGISAEVINLRSIRPLDRATINASVRKTSRLVTVEEGFPQHGVCAEICASVVEESFSYLDAPVERIAGADVPIPYTANLERLALPQIEDIVRASKRACYRSK

SEQ ID NO: 108651 - protein, 328 aa, Arabidopsis thaliana
  peptide (1)..(328): Ceres Seq. ID no. 13668005
  misc_feature (194)..(316): Pfam Name: Transketolase, C-terminal domain Pfam Description: Transketolase, C-terminal domain
  misc_feature (1)..(328): Homolog of NCBI NO: 520478 NR Description: pyruvate dehydrogenase E1 beta subunit
  misc_feature (1)..(328): Homolog of NCBI NO: 15241286 NR Description: pyruvate dehydrogenase E1 component beta subunit,
  misc_feature (1)..(327): Homolog of NCBI NO: 38175533 NR Description: putative pyruvate dehydrogenase E1 beta subunit
  misc_feature (1)..(327): Homolog of NCBI NO: 3850999 NR Description: pyruvate dehydrogenase E1 beta subunit isoform 1
  misc_feature (1)..(327): Homolog of NCBI NO: 3851001 NR Description: pyruvate dehydrogenase E1 beta subunit isoform 2
  misc_feature (1)..(327): Homolog of NCBI NO: 3851003 NR Description: pyruvate dehydrogenase E1 beta subunit isoform 3
  misc_feature (1)..(327): Homolog of NCBI NO: 1709454 NR Description: Pyruvate dehydrogenase E1 component beta subunit,
  misc_feature (1)..(320): Homolog of NCBI NO: 21358145 NR Description: CG11876-PD [Drosophila melanogaster]
  misc_feature (1)..(320): Homolog of NCBI NO: 25012844 NR Description: RH05604p [Drosophila melanogaster]
  misc_feature (1)..(328): Homolog of NCBI NO: 28829918 NR Description: similar to Arabidopsis thaliana (Mouse-ear
MTVRDALNSAIDEEMSADPKVFVMGEEVGQYQGAYKITKGLLEKYGPERVYDTPITEAGFTGIGVGAAYAGLKPVVEFMTFNFSMQAIDHIINSAAKSNYMSAGQINVPIVFRGPNGAAAGVGAQHSQCYAAWYASVPGLKVLAPYSAEDARGLLKAAIRDPDPVVFLENELLYGESFPISEEALDSSFCLPIGKAKIEREGKDVTIVTFSKMVGFALKAAEKLAEEGISAEVINLRSIRPLDRATINASVRKTSRLVTVEEGFPQHGVCAEICASVVEESFSYLDAPVERIAGADVPIPYTANLERLALPQIEDIVRASKRACYRSK

SEQ ID NO: 108652 - protein, 314 aa, Arabidopsis thaliana
  peptide (1)..(314): Ceres Seq. ID no. 13668006
  misc_feature (180)..(302): Pfam Name: Transketolase, C-terminal domain Pfam Description: Transketolase, C-terminal domain
  misc_feature (1)..(314): Homolog of NCBI NO: 520478 NR Description: pyruvate dehydrogenase E1 beta subunit
  misc_feature (1)..(314): Homolog of NCBI NO: 15241286 NR Description: pyruvate dehydrogenase E1 component beta subunit,
  misc_feature (1)..(313): Homolog of NCBI NO: 38175533 NR Description: putative pyruvate dehydrogenase E1 beta subunit
  misc_feature (1)..(313): Homolog of NCBI NO: 3850999 NR Description: pyruvate dehydrogenase E1 beta subunit isoform 1
  misc_feature (1)..(313): Homolog of NCBI NO: 3851001 NR Description: pyruvate dehydrogenase E1 beta subunit isoform 2
  misc_feature (1)..(313): Homolog of NCBI NO: 3851003 NR Description: pyruvate dehydrogenase E1 beta subunit isoform 3
  misc_feature (1)..(313): Homolog of NCBI NO: 1709454 NR Description: Pyruvate dehydrogenase E1 component beta subunit,
  misc_feature (1)..(306): Homolog of NCBI NO: 21358145 NR Description: CG11876-PD [Drosophila melanogaster]
  misc_feature (1)..(306): Homolog of NCBI NO: 25012844 NR Description: RH05604p [Drosophila melanogaster]
  misc_feature (1)..(314): Homolog of NCBI NO: 28829918 NR Description: similar to Arabidopsis thaliana (Mouse-ear
MSADPKVFVMGEEVGQYQGAYKITKGLLEKYGPERVYDTPITEAGFTGIGVGAAYAGLKPVVEFMTFNFSMQAIDHIINSAAKSNYMSAGQINVPIVFRGPNGAAAGVGAQHSQCYAAWYASVPGLKVLAPYSAEDARGLLKAAIRDPDPVVFLENELLYGESFPISEEALDSSFCLPIGKAKIEREGKDVTIVTFSKMVGFALKAAEKLAEEGISAEVINLRSIRPLDRATINASVRKTSRLVTVEEGFPQHGVCAEICASVVEESFSYLDAPVERIAGADVPIPYTANLERLALPQIEDIVRASKRACYRSK

SEQ ID NO: 108653 - DNA, 1050 bp, Arabidopsis thaliana
  misc_feature (1)..(1050): Ceres Seq. ID no. 13668011
  misc_feature: MA Experiment ID: 20000179 Result: Up-regulated in Transcription
  misc_feature: MA Experiment 20000179 PARAMETER Experiment Name: At_Germinating_Seeds_P Parameter: Age (hr) Value: 6 vs. 0
  misc_feature: MA Experiment 20000179 PARAMETER Experiment Name: At_Germinating_Seeds_P Parameter: Tissue Value: Germinating Seeds
  misc_feature: MA Experiment ID: 20000180 Result: Up-regulated in Transcription
  misc_feature: MA Experiment 20000180 PARAMETER Experiment Name: At_Germinating_Seeds_P Parameter: Age (hr) Value: 24 vs. 0
  misc_feature: MA Experiment 20000180 PARAMETER Experiment Name: At_Germinating_Seeds_P Parameter: Tissue Value: Germinating Seeds
  misc_feature: MA Experiment ID: 20000185 Result: Down-regulated in Transcription
  misc_feature: MA Experiment 20000185 PARAMETER Experiment Name: At_Roots__P Parameter: Age (day) Value: 7 vs. 21
  misc_feature: MA Experiment 20000185 PARAMETER Experiment Name: At_Roots__P Parameter: Organism Value: A. thaliana
  misc_feature: MA Experiment 20000185 PARAMETER Experiment Name: At_Roots__P Parameter: Tissue Value: Roots vs. Whole Plant
  misc_feature: MA Experiment ID: 20000227 Result: Down-regulated in Transcription
  misc_feature: MA Experiment 20000227 PARAMETER Experiment Name: At_Root-Tips-vs-Tops_P Parameter: Tissue Value: Root Tips vs. Root Tops
  misc_feature: MA Experiment ID: 20000264 Result: Down-regulated in Transcription
  misc_feature: MA Experiment 20000264 PARAMETER Experiment Name: At_Open_Flower_P Parameter: Age (day) Value: 21
  misc_feature: MA Experiment 20000264 PARAMETER Experiment Name: At_Open_Flower_P Parameter: Plant Line Value: WS
  misc_feature: MA Experiment 20000264 PARAMETER Experiment Name: At_Open_Flower_P Parameter: Tissue Value: Open Flower vs. Whole Plant
  misc_feature: MA Experiment ID: 20000269 Result: Down-regulated in Transcription
  misc_feature: MA Experiment 20000269 PARAMETER Experiment Name: At_1mM_KNO3_L-vs-H_Roots_P Parameter: Age (day) Value: 7,10,12
  misc_feature: MA Experiment 20000269 PARAMETER Experiment Name: At_1mM_KNO3_L-vs-H_Roots_P Parameter: Organism Value: A. thaliana
  misc_feature: MA Experiment 20000269 PARAMETER Experiment Name: At_1mM_KNO3_L-vs-H_Roots_P Parameter: Plant Line Value: WS
  misc_feature: MA Experiment 20000269 PARAMETER Experiment Name: At_1mM_KNO3_L-vs-H_Roots_P Parameter: Timepoint (day) Value: 7,10,12
  misc_feature: MA Experiment 20000269 PARAMETER Experiment Name: At_1mM_KNO3_L-vs-H_Roots_P Parameter: Tissue Value: Roots
  misc_feature: MA Experiment 20000269 PARAMETER Experiment Name: At_1mM_KNO3_L-vs-H_Roots_P Parameter: Treatment Value: 1mM KNO3 vs. 50mM KNO3
  misc_feature: MA Experiment ID: 20000286 Result: Down-regulated in Transcription
  misc_feature: MA Experiment 20000286 PARAMETER Experiment Name: At_Open_Flower_P Parameter: Age (day) Value: 21
  misc_feature: MA Experiment 20000286 PARAMETER Experiment Name: At_Open_Flower_P Parameter: Plant Line Value: WS
  misc_feature: MA Experiment 20000286 PARAMETER Experiment Name: At_Open_Flower_P Parameter: Tissue Value: Half Open vs. Whole Plant
  misc_feature: MA Experiment ID: 20000439 Result: Down-regulated in Transcription
  misc_feature: MA Experiment 20000439 PARAMETER Experiment Name: At_Roots__P Parameter: Age (day) Value: 14 vs. 21
  misc_feature: MA Experiment 20000439 PARAMETER Experiment Name: At_Roots__P Parameter: Organism Value: A. thaliana
  misc_feature: MA Experiment 20000439 PARAMETER Experiment Name: At_Roots__P Parameter: Tissue Value: Roots vs. Whole Plant
  misc_feature: MA Experiment ID: 20000441 Result: Up-regulated in Transcription
  misc_feature: MA Experiment 20000441 PARAMETER Experiment Name: At_1uM_BR-BRZ__P Parameter: Tissue Value: Shoot Apices
  misc_feature: MA Experiment 20000441 PARAMETER Experiment Name: At_1uM_BR-BRZ__P Parameter: Treatment Value: 1uM BR vs. No Treatment
  misc_feature: MA Experiment ID: 20000578 Result: Down-regulated in Transcription
  misc_feature: MA Experiment 20000578 PARAMETER Experiment Name: At_CS3726__P Parameter: Organism Value: A. thaliana
  misc_feature: MA Experiment 20000578 PARAMETER Experiment Name: At_CS3726__P Parameter: Plant Line Value: CS3726
  misc_feature: MA Experiment 20000578 PARAMETER Experiment Name: At_CS3726__P Parameter: Tissue Value: Whole Plant
  misc_feature: MA Experiment ID: 20000794 Result: Down-regulated in Transcription
  misc_feature: MA Experiment 20000794 PARAMETER Experiment Name: At_Petals_P Parameter: Age (day) Value: 23-25 days
  misc_feature: MA Experiment 20000794 PARAMETER Experiment Name: At_Petals_P Parameter: Plant Line Value: WS
  misc_feature: MA Experiment 20000794 PARAMETER Experiment Name: At_Petals_P Parameter: Tissue Value: Petals vs. Whole plant
  misc_feature: MA Experiment ID: 20001557 Result: Down-regulated in Transcription
  misc_feature: MA Experiment 20001557 PARAMETER Experiment Name: At_Drought_Soil_Dry_P Parameter: Age (day) Value: 27
  misc_feature: MA Experiment 20001557 PARAMETER Experiment Name: At_Drought_Soil_Dry_P Parameter: Organism Value: A. thaliana
  misc_feature: MA Experiment 20001557 PARAMETER Experiment Name: At_Drought_Soil_Dry_P Parameter: Plant Line Value: WS
  misc_feature: MA Experiment 20001557 PARAMETER Experiment Name: At_Drought_Soil_Dry_P Parameter: Post Timepoint (hr) Value: 3
  misc_feature: MA Experiment 20001557 PARAMETER Experiment Name: At_Drought_Soil_Dry_P Parameter: Post-Treatment Value: Re-Water vs. No Drought
  misc_feature: MA Experiment 20001557 PARAMETER Experiment Name: At_Drought_Soil_Dry_P Parameter: Timepoint (day) Value: 13
  misc_feature: MA Experiment 20001557 PARAMETER Experiment Name: At_Drought_Soil_Dry_P Parameter: Treatment Value: Drought vs. No Drought
  misc_feature: MA Experiment ID: 20001906 Result: Down-regulated in Transcription
  misc_feature: MA Experiment 20001906 PARAMETER Experiment Name: At_Drought_Reproduction_P Parameter: Age (day) Value: 35
  misc_feature: MA Experiment 20001906 PARAMETER Experiment Name: At_Drought_Reproduction_P Parameter: Organism Value: A. thaliana
  misc_feature: MA Experiment 20001906 PARAMETER Experiment Name: At_Drought_Reproduction_P Parameter: Plant Line Value: WS
  misc_feature: MA Experiment 20001906 PARAMETER Experiment Name: At_Drought_Reproduction_P Parameter: Timepoint (day) Value: 5
  misc_feature: MA Experiment 20001906 PARAMETER Experiment Name: At_Drought_Reproduction_P Parameter: Tissue Value: Siliques
  misc_feature: MA Experiment 20001906 PARAMETER Experiment Name: At_Drought_Reproduction_P Parameter: Treatment Value: Drought vs. No Drought
cttgattccaatccattcttcttcaagtgccgggttctcgggtcggatcttctaagtctagctagggataatggctactgtcactactcatgcctcggcctcgattttccgaccttgtacttcaaagccaagattcctcaccggttcttccggtaggttgaaccgcgacttgtcgtttacatcgatcggttcatcggccaaaacgtcgtcgttcaaggttgaagctaagaaaggagaatggttgcccggtttggcatcgcctgattatctcaccggcagtcttgccggtgacaatgggtttgacccgttgggtctagcagaggatccagagaacttgaaatggttcgtccaggcagagctggtcaacggacgatgggctatgctcggtgtcgctgggatgcttttgccggaagttttcaccaagatcggaatcataaatgttcctgagtggtacgatgctgggaaagagcagtattttgcatcgtcgtcgacattgttcgtgatcgagttcatattgtttcattacgttgagatcagacggtggcaagacatcaagaacccaggaagtgtgaaccaagaccctatctttaagcaatacagcttacctaagggtgaagttggttaccctggtggaatctttaacccgcttaactttgctcctacgcaagaggccaaggagaaagagctagcaaacgggaggttggcgatgttggcattcttagggtttgtggttcaacacaatgtgactggaaaaggaccatttgagaatctgttgcagcacttgtctgacccatggcacaacactattgtccaaaccttcaactaaagagtgaagacagacttatgatctcatacctatctatcttccatcactttcatgtctgtctgtgagtgtgtttcatcttagagttcttggtttttgagcttgaattattgttgaaccgttgtagctccatgaacaaatttggaatcttcaatgtacagaggaactaagttaatcaacattgttgtactctttaatatctattattcatgtggcaacagttatat

SEQ ID NO: 108654 - protein, 251 aa, Arabidopsis thaliana; identical to SEQ ID NO: 26326
  peptide (1)..(251): Ceres Seq. ID no. 13668012
  misc_feature (62)..(224): Pfam Name: Chlorophyll A-B binding protein Pfam Description: Chlorophyll A-B binding protein
  misc_feature (1)..(251): Homolog of NCBI NO: 30692874 NR Description: light-harvesting chlorophyll a/b binding protein
  misc_feature (1)..(251): Homolog of NCBI NO: 100196 NR Description: chlorophyll a/b-binding protein (cab-11) - tomato
  misc_feature (1)..(249): Homolog of NCBI NO: 11277626 NR Description: chlorophyll a/b-binding protein [imported] -
  misc_feature (1)..(251): Homolog of NCBI NO: 100197 NR Description: chlorophyll a/b-binding protein (cab-12) - tomato
  misc_feature (1)..(250): Homolog of NCBI NO: 13385204 NR Description: cDNA sequence BC002118 [Mus musculus]
  misc_feature (1)..(249): Homolog of NCBI NO: 322392 NR Description: chlorophyll a/b-binding protein type 4,
  misc_feature (8)..(249): Homolog of NCBI NO: 322393 NR Description: chlorophyll a/b-binding protein type 4, I - Scotch pine (fragment) >gi|829287|emb|CAA78901.1| Lhca4
  misc_feature (1)..(249): Homolog of NCBI NO: 20218813 NR Description: putative chlorophyll a/b-binding protein type 4
  misc_feature (53)..(249): Homolog of NCBI NO: 1076630 NR Description: light-harvesting chlorophyll a - common tobacco
  misc_feature (18)..(251): Homolog of NCBI NO: 9624495 NR Description: chlorophyll a/b-binding protein precursor

SEQ ID NO: 108655 - protein, 148 aa, Arabidopsis thaliana; identical to SEQ ID NO: 26327
  peptide (1)..(148): Ceres Seq. ID no. 13668013
  misc_feature (1)..(121): Pfam Name: Chlorophyll A-B binding protein Pfam Description: Chlorophyll A-B binding protein
  misc_feature (1)..(148): Homolog of NCBI NO: 30692874 NR Description: light-harvesting chlorophyll a/b binding protein
  misc_feature (1)..(148): Homolog of NCBI NO: 100196 NR Description: chlorophyll a/b-binding protein (cab-11) - tomato
  misc_feature (1)..(146): Homolog of NCBI NO: 11277626 NR Description: chlorophyll a/b-binding protein [imported] -
  misc_feature (1)..(148): Homolog of NCBI NO: 100197 NR Description: chlorophyll a/b-binding protein (cab-12) - tomato
  misc_feature (1)..(147): Homolog of NCBI NO: 13385204 NR Description: cDNA sequence BC002118 [Mus musculus]
  misc_feature (1)..(146): Homolog of NCBI NO: 322392 NR Description: chlorophyll a/b-binding protein type 4,
  misc_feature (1)..(146): Homolog of NCBI NO: 322393 NR Description: chlorophyll a/b-binding protein type 4, I - Scotch pine (fragment) >gi|829287|emb|CAA78901.1| Lhca4
  misc_feature (1)..(146): Homolog of NCBI NO: 20218813 NR Description: putative chlorophyll a/b-binding protein type 4
  misc_feature (1)..(146): Homolog of NCBI NO: 1076630 NR Description: light-harvesting chlorophyll a - common tobacco
  misc_feature (1)..(148): Homolog of NCBI NO: 9624495 NR Description: chlorophyll a/b-binding protein precursor

SEQ ID NO: 108656 - protein, 142 aa, Arabidopsis thaliana; identical to SEQ ID NO: 26328
  peptide (1)..(142): Ceres Seq. ID no. 13668014
  misc_feature (1)..(115): Pfam Name: Chlorophyll A-B binding protein Pfam Description: Chlorophyll A-B binding protein
  misc_feature (1)..(142): Homolog of NCBI NO: 30692874 NR Description: light-harvesting chlorophyll a/b binding protein
  misc_feature (1)..(142): Homolog of NCBI NO: 100196 NR Description: chlorophyll a/b-binding protein (cab-11) - tomato
  misc_feature (1)..(140): Homolog of NCBI NO: 11277626 NR Description: chlorophyll a/b-binding protein [imported] -
  misc_feature (1)..(142): Homolog of NCBI NO: 100197 NR Description: chlorophyll a/b-binding protein (cab-12) - tomato
  misc_feature (1)..(141): Homolog of NCBI NO: 13385204 NR Description: cDNA sequence BC002118 [Mus musculus]
  misc_feature (1)..(140): Homolog of NCBI NO: 322392 NR Description: chlorophyll a/b-binding protein type 4,
  misc_feature (1)..(140): Homolog of NCBI NO: 322393 NR Description: chlorophyll a/b-binding protein type 4, I - Scotch pine (fragment) >gi|829287|emb|CAA78901.1| Lhca4
  misc_feature (1)..(140): Homolog of NCBI NO: 20218813 NR Description: putative chlorophyll a/b-binding protein type 4
  misc_feature (1)..(140): Homolog of NCBI NO: 1076630 NR Description: light-harvesting chlorophyll a - common tobacco
  misc_feature (1)..(142): Homolog of NCBI NO: 9624495 NR Description: chlorophyll a/b-binding protein precursor

SEQ ID NO: 108657 - DNA, 963 bp, Arabidopsis thaliana
  misc_feature (1)..(963): Ceres Seq. ID no. 13668015
  misc_feature: MA Experiment ID: 108501 Result: Up-regulated in Transcription
  misc_feature: MA Experiment 108501 PARAMETER Experiment Name: At_ap2_floral_buds_cDNA_P Parameter: Plant Line Value: ap2 (Ler.)
  misc_feature: MA Experiment 108501 PARAMETER Experiment Name: At_ap2_floral_buds_cDNA_P Parameter: Tissue Value: Closed Flower
  misc_feature: MA Experiment ID: 20000234 Result: Up-regulated in Transcription
  misc_feature: MA Experiment 20000234 PARAMETER Experiment Name: At_Siliques_P Parameter: Age (day) Value: 21
  misc_feature: MA Experiment 20000234 PARAMETER Experiment Name: At_Siliques_P Parameter: Organism Value: A. thaliana
  misc_feature: MA Experiment 20000234 PARAMETER Experiment Name: At_Siliques_P Parameter: Plant Line Value: WS
  misc_feature: MA Experiment 20000234 PARAMETER Experiment Name: At_Siliques_P Parameter: Tissue Value: Less Than 5mm Siliques vs. Whole Plant
  misc_feature: MA Experiment ID: 20000235 Result: Up-regulated in Transcription
  misc_feature: MA Experiment 20000235 PARAMETER Experiment Name: At_Siliques_P Parameter: Age (day) Value: 21
  misc_feature: MA Experiment 20000235 PARAMETER Experiment Name: At_Siliques_P Parameter: Organism Value: A. thaliana
  misc_feature: MA Experiment 20000235 PARAMETER Experiment Name: At_Siliques_P Parameter: Plant Line Value: WS
  misc_feature: MA Experiment 20000235 PARAMETER Experiment Name: At_Siliques_P Parameter: Tissue Value: 5-10mm Siliques vs. Whole Plant
  misc_feature: MA Experiment ID: 20000264 Result: Up-regulated in Transcription
  misc_feature: MA Experiment 20000264 PARAMETER Experiment Name: At_Open_Flower_P Parameter: Age (day) Value: 21
  misc_feature: MA Experiment 20000264 PARAMETER Experiment Name: At_Open_Flower_P Parameter: Plant Line Value: WS
  misc_feature: MA Experiment 20000264 PARAMETER Experiment Name: At_Open_Flower_P Parameter: Tissue Value: Open Flower vs. Whole Plant
  misc_feature: MA Experiment ID: 20000286 Result: Up-regulated in Transcription
  misc_feature: MA Experiment 20000286 PARAMETER Experiment Name: At_Open_Flower_P Parameter: Age (day) Value: 21
  misc_feature: MA Experiment 20000286 PARAMETER Experiment Name: At_Open_Flower_P Parameter: Plant Line Value: WS
  misc_feature: MA Experiment 20000286 PARAMETER Experiment Name: At_Open_Flower_P Parameter: Tissue Value: Half Open vs. Whole Plant
gaattcatcttcccatcctcacttctctttctttctgatcataattaatcttgctaagccagctagggcttatagaaatggagggtggtgcgagtaatgaagtagcagagagcagcaagaagatagggagagggaagatagagataaagaggatagagaacactacgaatcgtcaagtcactttctgcaaacgacgcaatggtttactcaagaaagcttatgagctctctgtcttgtgtgacgctgaggttgctcttgtcatcttctccactcgaggccgtctctacgagtacgccaacaacagtgtgagaggaacaatagaaaggtacaagaaagcttgctccgacgccgttaaccctccgaccatcaccgaagctaatactcagtactatcagcaagaggcgtctaaactccggagacagattcgggacattcagaatttgaacagacacattcttggtgaatctcttggttccttgaactttaaggaactcaagaaccttgaaagtaggcttgagaaaggaatcagtcgtgtccgatccaagaagcacgagatgttagttgcagagattgaatacatgcaaaaaagggaaatcgagctgcaaaacgataacatgtatctccgctccaagattactgaaagaacaggtctacagcaacaagaatcgagtgtgatacatcaagggacagtttacgagtcgggtgttacttcttctcaccagtcggggcagtataaccggaattatattgcggttaaccttcttgaaccgaatcagaattcctccaaccaagaccaaccacctctgcaacttgtttgattcagtctaacataagcttctttcctcagcctgagatcgatctatagtgtcacctaaatgcggccgcgtccctcaacatctagtcgcaagctgaggggaaccactagtgtcatacgaacctccaagagacggttacacaaacggg

SEQ ID NO: 108658 - protein, 246 aa, Arabidopsis thaliana; identical to SEQ ID NO: 102048
  peptide (1)..(246): Ceres Seq. ID no. 13668016
  misc_feature (89)..(188): Pfam Name: K-box region Pfam Description: K-box region
  misc_feature (1)..(246): Homolog of NCBI NO: 18406070 NR Description: floral homeodomain transcription factor (AGL5)
  misc_feature (1)..(245): Homolog of NCBI NO: 25307910 NR Description: floral homeodomain transcription factor (AGL5)
  misc_feature (1)..(246): Homolog of NCBI NO: 30689162 NR Description: floral homeodomain transcription factor (AGL5)
  misc_feature (2)..(246): Homolog of NCBI NO: 15231135 NR Description: MADS-box protein [Arabidopsis thaliana]
  misc_feature (2)..(246): Homolog of NCBI NO: 12655901 NR Description: SHATTERPROOF1 [Brassica napus]
  misc_feature (68)..(246): Homolog of NCBI NO: 28392912 NR Description: putative floral homeodomain transcription factor
  misc_feature (6)..(246): Homolog of NCBI NO: 5031217 NR Description: AGAMOUS homolog [Liquidambar styraciflua]
  misc_feature (16)..(246): Homolog of NCBI NO: 14279306 NR Description: MAD-box transcripion factor [Vitis vinifera]
  misc_feature (5)..(246): Homolog of NCBI NO: 6970411 NR Description: MADS-box protein [Rosa rugosa]
  misc_feature (6)..(246): Homolog of NCBI NO: 16973296 NR Description: C-type MADS box protein [Malus x domestica]

SEQ ID NO: 108659 - DNA, 1665 bp, Arabidopsis thaliana
  misc_feature (1)..(1665): Ceres Seq. ID no. 13668024
  misc_feature: MA Experiment ID: 108501 Result: Up-regulated in Transcription
  misc_feature: MA Experiment 108501 PARAMETER Experiment Name: At_ap2_floral_buds_cDNA_P Parameter: Plant Line Value: ap2 (Ler.)
  misc_feature: MA Experiment 108501 PARAMETER Experiment Name: At_ap2_floral_buds_cDNA_P Parameter: Tissue Value: Closed Flower
  misc_feature: MA Experiment ID: 108595 Result: Up-regulated in Transcription
  misc_feature: MA Experiment 108595 PARAMETER Experiment Name: At_Ler-pi_Ovule_cDNA_P Parameter: Plant Line Value: null
  misc_feature: MA Experiment ID: 20000169 Result: Up-regulated in Transcription
  misc_feature: MA Experiment 20000169 PARAMETER Experiment Name: At_100uM_ABA_P Parameter: Age (day) Value: 14
  misc_feature: MA Experiment 20000169 PARAMETER Experiment Name: At_100uM_ABA_P Parameter: Organism Value: A. thaliana
  misc_feature: MA Experiment 20000169 PARAMETER Experiment Name: At_100uM_ABA_P Parameter: Plant Line Value: WS
  misc_feature: MA Experiment 20000169 PARAMETER Experiment Name: At_100uM_ABA_P Parameter: Timepoint (hr) Value: 6
  misc_feature: MA Experiment 20000169 PARAMETER Experiment Name: At_100uM_ABA_P Parameter: Tissue Value: Aerial
  misc_feature: MA Experiment 20000169 PARAMETER Experiment Name: At_100uM_ABA_P Parameter: Treatment Value: 100uM ABA vs. No Treatment
  misc_feature: MA Experiment ID: 20000214 Result: Down-regulated in Transcription
  misc_feature: MA Experiment 20000214 PARAMETER Experiment Name: At_4deg_Cold_P Parameter: Timepoint (hr) Value: 6
  misc_feature: MA Experiment ID: 20000267 Result: Up-regulated in Transcription
  misc_feature: MA Experiment 20000267 PARAMETER Experiment Name: At_Drought_P Parameter: Age (day) Value: 7
  misc_feature: MA Experiment 20000267 PARAMETER Experiment Name: At_Drought_P Parameter: Organism Value: A. thaliana
  misc_feature: MA Experiment 20000267 PARAMETER Experiment Name: At_Drought_P Parameter: Plant Line Value: WS
  misc_feature: MA Experiment 20000267 PARAMETER Experiment Name: At_Drought_P Parameter: Timepoint (hr) Value: 6
  misc_feature: MA Experiment 20000267 PARAMETER Experiment Name: At_Drought_P Parameter: Tissue Value: Whole Plant
  misc_feature: MA Experiment 20000267 PARAMETER Experiment Name: At_Drought_P Parameter: Treatment Value: Drought vs. No Drought
  misc_feature: MA Experiment ID: 20000268 Result: Up-regulated in Transcription
  misc_feature: MA Experiment 20000268 PARAMETER Experiment Name: At_100mM_NaCl__P Parameter: Age (day) Value: 14
  misc_feature: MA Experiment 20000268 PARAMETER Experiment Name: At_100mM_NaCl__P Parameter: Organism Value: A. thaliana
  misc_feature: MA Experiment 20000268 PARAMETER Experiment Name: At_100mM_NaCl__P Parameter: Plant Line Value: WS
  misc_feature: MA Experiment 20000268 PARAMETER Experiment Name: At_100mM_NaCl__P Parameter: Timepoint (hr) Value: 6
  misc_feature: MA Experiment 20000268 PARAMETER Experiment Name: At_100mM_NaCl__P Parameter: Tissue Value: Whole Plant
  misc_feature: MA Experiment 20000268 PARAMETER Experiment Name: At_100mM_NaCl__P Parameter: Treatment Value: 100mM NaCl vs. No Treatment
  misc_feature: MA Experiment ID: 20000436 Result: Up-regulated in Transcription
  misc_feature: MA Experiment 20000436 PARAMETER Experiment Name: At_Drought_P Parameter: Age (day) Value: 7
  misc_feature: MA Experiment 20000436 PARAMETER Experiment Name: At_Drought_P Parameter: Organism Value: A. thaliana
  misc_feature: MA Experiment 20000436 PARAMETER Experiment Name: At_Drought_P Parameter: Plant Line Value: WS
  misc_feature: MA Experiment 20000436 PARAMETER Experiment Name: At_Drought_P Parameter: Timepoint (hr) Value: 12
  misc_feature: MA Experiment 20000436 PARAMETER Experiment Name: At_Drought_P Parameter: Tissue Value: Whole Plant
  misc_feature: MA Experiment 20000436 PARAMETER Experiment Name: At_Drought_P Parameter: Treatment Value: Drought vs. No Drought
  misc_feature: MA Experiment ID: 20000437 Result: Up-regulated in Transcription
  misc_feature: MA Experiment 20000437 PARAMETER Experiment Name: At_Drought_P Parameter: Age (day) Value: 8
  misc_feature: MA Experiment 20000437 PARAMETER Experiment Name: At_Drought_P Parameter: Organism Value: A. thaliana
  misc_feature: MA Experiment 20000437 PARAMETER Experiment Name: At_Drought_P Parameter: Plant Line Value: WS
  misc_feature: MA Experiment 20000437 PARAMETER Experiment Name: At_Drought_P Parameter: Timepoint (hr) Value: 24
  misc_feature: MA Experiment 20000437 PARAMETER Experiment Name: At_Drought_P Parameter: Tissue Value: Whole Plant
  misc_feature: MA Experiment 20000437 PARAMETER Experiment Name: At_Drought_P Parameter: Treatment Value: Drought vs. No Drought
  misc_feature: MA Experiment ID: 20000439 Result: Down-regulated in Transcription
  misc_feature: MA Experiment 20000439 PARAMETER Experiment Name: At_Roots__P Parameter: Age (day) Value: 14 vs. 21
  misc_feature: MA Experiment 20000439 PARAMETER Experiment Name: At_Roots__P Parameter: Organism Value: A. thaliana
  misc_feature: MA Experiment 20000439 PARAMETER Experiment Name: At_Roots__P Parameter: Tissue Value: Roots vs. Whole Plant
  misc_feature: MA Experiment ID: 20000453 Result: Up-regulated in Transcription
  misc_feature: MA Experiment 20000453 PARAMETER Experiment Name: At_100uM_ABA_P Parameter: Age (day) Value: 15
  misc_feature: MA Experiment 20000453 PARAMETER Experiment Name: At_100uM_ABA_P Parameter: Organism Value: A. thaliana
  misc_feature: MA Experiment 20000453 PARAMETER Experiment Name: At_100uM_ABA_P Parameter: Plant Line Value: WS
  misc_feature: MA Experiment 20000453 PARAMETER Experiment Name: At_100uM_ABA_P Parameter: Timepoint (hr) Value: 24
  misc_feature: MA Experiment 20000453 PARAMETER Experiment Name: At_100uM_ABA_P Parameter: Tissue Value: Aerial
  misc_feature: MA Experiment 20000453 PARAMETER Experiment Name: At_100uM_ABA_P Parameter: Treatment Value: 100uM ABA vs. No Treatment
  misc_feature: MA Experiment ID: 20000455 Result: Up-regulated in Transcription
  misc_feature: MA Experiment 20000455 PARAMETER Experiment Name: At_100uM_ABA_P Parameter: Age (day) Value: 16
  misc_feature: MA Experiment 20000455 PARAMETER Experiment Name: At_100uM_ABA_P Parameter: Organism Value: A. thaliana
  misc_feature: MA Experiment 20000455 PARAMETER Experiment Name: At_100uM_ABA_P Parameter: Plant Line Value: WS
  misc_feature: MA Experiment 20000455 PARAMETER Experiment Name: At_100uM_ABA_P Parameter: Timepoint (hr) Value: 48
  misc_feature: MA Experiment 20000455 PARAMETER Experiment Name: At_100uM_ABA_P Parameter: Tissue Value: Aerial
  misc_feature: MA Experiment 20000455 PARAMETER Experiment Name: At_100uM_ABA_P Parameter: Treatment Value: 100uM ABA vs. No Treatment
  misc_feature: MA Experiment ID: 20000794 Result: Up-regulated in Transcription
  misc_feature: MA Experiment 20000794 PARAMETER Experiment Name: At_Petals_P Parameter: Age (day) Value: 23-25 days
  misc_feature: MA Experiment 20000794 PARAMETER Experiment Name: At_Petals_P Parameter: Plant Line Value: WS
  misc_feature: MA Experiment 20000794 PARAMETER Experiment Name: At_Petals_P Parameter: Tissue Value: Petals vs. Whole plant
  misc_feature: MA Experiment ID: 20001554 Result: Up-regulated in Transcription
  misc_feature: MA Experiment 20001554 PARAMETER Experiment Name: At_Drought_Soil_Dry_P Parameter: Age (day) Value: 21
  misc_feature: MA Experiment 20001554 PARAMETER Experiment Name: At_Drought_Soil_Dry_P Parameter: Organism Value: A. thaliana
  misc_feature: MA Experiment 20001554 PARAMETER Experiment Name: At_Drought_Soil_Dry_P Parameter: Plant Line Value: WS
  misc_feature: MA Experiment 20001554 PARAMETER Experiment Name: At_Drought_Soil_Dry_P Parameter: Post Timepoint (hr) Value: None
  misc_feature: MA Experiment 20001554 PARAMETER Experiment Name: At_Drought_Soil_Dry_P Parameter: Post-Treatment Value: None
  misc_feature: MA Experiment 20001554 PARAMETER Experiment Name: At_Drought_Soil_Dry_P Parameter: Timepoint (day) Value: 7
  misc_feature: MA Experiment 20001554 PARAMETER Experiment Name: At_Drought_Soil_Dry_P Parameter: Treatment Value: Drought vs. No Drought
  misc_feature: MA Experiment ID: 20001555 Result: Up-regulated in Transcription
  misc_feature: MA Experiment 20001555 PARAMETER Experiment Name: At_Drought_Soil_Dry_P Parameter: Age (day) Value: 24
  misc_feature: MA Experiment 20001555 PARAMETER Experiment Name: At_Drought_Soil_Dry_P Parameter: Organism Value: A. thaliana
  misc_feature: MA Experiment 20001555 PARAMETER Experiment Name: At_Drought_Soil_Dry_P Parameter: Plant Line Value: WS
  misc_feature: MA Experiment 20001555 PARAMETER Experiment Name: At_Drought_Soil_Dry_P Parameter: Post Timepoint (hr) Value: None
  misc_feature: MA Experiment 20001555 PARAMETER Experiment Name: At_Drought_Soil_Dry_P Parameter: Post-Treatment Value: None
  misc_feature: MA Experiment 20001555 PARAMETER Experiment Name: At_Drought_Soil_Dry_P Parameter: Timepoint (day) Value: 10
  misc_feature: MA Experiment 20001555 PARAMETER Experiment Name: At_Drought_Soil_Dry_P Parameter: Treatment Value: Drought vs. No Drought
  misc_feature: MA Experiment ID: 20001559 Result: Up-regulated in Transcription
  misc_feature: MA Experiment 20001559 PARAMETER Experiment Name: At_Drought_Soil_Dry_P Parameter: Age (day) Value: 28
  misc_feature: MA Experiment 20001559 PARAMETER Experiment Name: At_Drought_Soil_Dry_P Parameter: Organism Value: A. thaliana
  misc_feature: MA Experiment 20001559 PARAMETER Experiment Name: At_Drought_Soil_Dry_P Parameter: Plant Line Value: WS
  misc_feature: MA Experiment 20001559 PARAMETER Experiment Name: At_Drought_Soil_Dry_P Parameter: Post Timepoint (hr) Value: 29
  misc_feature: MA Experiment 20001559 PARAMETER Experiment Name: At_Drought_Soil_Dry_P Parameter: Post-Treatment Value: Re-Water vs. No Drought
  misc_feature: MA Experiment 20001559 PARAMETER Experiment Name: At_Drought_Soil_Dry_P Parameter: Timepoint (day) Value: 14
  misc_feature: MA Experiment 20001559 PARAMETER Experiment Name: At_Drought_Soil_Dry_P Parameter: Treatment Value: Drought vs. No Drought
  misc_feature: MA Experiment ID: 20001904 Result: Up-regulated in Transcription
  misc_feature: MA Experiment 20001904 PARAMETER Experiment Name: At_Drought_Reproduction_P Parameter: Age (day) Value: 37
  misc_feature: MA Experiment 20001904 PARAMETER Experiment Name: At_Drought_Reproduction_P Parameter: Organism Value: A. thaliana
  misc_feature: MA Experiment 20001904 PARAMETER Experiment Name: At_Drought_Reproduction_P Parameter: Plant Line Value: WS
  misc_feature: MA Experiment 20001904 PARAMETER Experiment Name: At_Drought_Reproduction_P Parameter: Timepoint (day) Value: 7
  misc_feature: MA Experiment 20001904 PARAMETER Experiment Name: At_Drought_Reproduction_P Parameter: Tissue Value: Rosettes
  misc_feature: MA Experiment 20001904 PARAMETER Experiment Name: At_Drought_Reproduction_P Parameter: Treatment Value: Drought vs. No Drought
cttaaaacatttattttatcttcttcttgttctctctttctctttctctcatcactatgaagagtttcaacacagaaggacacaaccactccacggcggaatccggcgatgcctacaccgtgtcggacccgacaaagaacgtcgatgaagatggtcgagagaagcgtaccgggacgtggcttacggcgagtgcgcatattatcacggcggtgataggctccggagtgttgtctttagcatgggctatagctcagcttggttggatcgcagggacatcgatcttactcattttctcgttcattacttacttcacctccaccatgcttgccgattgctaccgtgcgccggatcccgtcaccggaaaacggaattacacttacatggacgttgttcgatcttacctcggtggtaggaaagtgcagctctgtggagtggcacaatatgggaatctgattggggtcactgttggttacaccatcactgcttctattagtttggtagcggtagggaaatcgaactgcttccacgataaagggcacactgcggattgtactatatcgaattatccgtatatggcggtttttggcattattcaggttattcttagccagatcccaaatttccacaagctctcttttctttccattatggccgcggtcatgtcctttacttatgcaactattggaatcggtctagccatcgcaaccgtcgcaggtgggaaagtgggtaagacgagtatgacgggcacagcggttggagtagatgtaaccgcagctcaaaagatatggagatcgtttcaagcggttggggacatagcgttcgcctatgcttatgccacggttctcatcgagattcaggatacactaagatctagcccagctgagaacaaagccatgaaaagagcaagtcttgtgggagtatcaaccaccacttttttctacatcttatgtggatgcatcggctatgctgcatttggaaacaatgcccctggagatttcctcacagatttcgggtttttcgagcccttttggctcattgactttgcaaacgcttgcatcgctgtccaccttattggtgcctatcaggtgttcgcgcagccgatattccagtttgttgagaaaaaatgcaacagaaactatccagacaacaagttcatcacttctgaatattcagtaaacgtacctttccttggaaaattcaacattagcctcttcagattggtgtggaggacagcttatgtggttataaccactgttgtagctatgatattccctttcttcaacgcgatcttaggtcttatcggagcagcttccttctggcctttaacggtttatttccctgtggagatgcacattgcacaaaccaagattaagaagtactctgctagatggattgcgctgaaaacgatgtgctatgtttgcttgatcgtctcgctcttagctgcagccggatccatcgcaggacttataagtagtgtcaaaacctacaagcccttccggactatgcatgagtgagtttgagatcctcaagagagtcaaaaatatatgtagtagtttggtctttctgttaaactatctggtgtctaaatccaatgagaatgctttattgctaaaacttcatgaatctctctgtatctacatctttcaatctaagctacgtcagggc

SEQ ID NO: 108660 - protein, 485 aa, Arabidopsis thaliana; identical to SEQ ID NO: 24657
  peptide (1)..(485): Ceres Seq. ID no. 13668025
  misc_feature (1)..(485): Homolog of NCBI NO: 15217945 NR Description: amino acid permease I (AAP1) [Arabidopsis
  misc_feature (1)..(485): Homolog of NCBI NO: 2654019 NR Description: neutral amino acid transport system II
  misc_feature (9)..(483): Homolog of NCBI NO: 15218370 NR Description: amino acid permease, putative [Arabidopsis
  misc_feature (15)..(481): Homolog of NCBI NO: 15240523 NR Description: amino acid permease 6 (AAP6) [Arabidopsis
  misc_feature (24)..(457): Homolog of NCBI NO: 24370975 NR Description: amino acid transporter [Solanum tuberosum]
  misc_feature (24)..(482): Homolog of NCBI NO: 27447655 NR Description: amino acid transporter [Lycopersicon esculentum]
  misc_feature (47)..(430): Homolog of NCBI NO: 7442731 NR Description: probable amino acid transporter protein AAP1 -
  misc_feature (20)..(482): Homolog of NCBI NO: 27447657 NR Description: amino acid transporter [Lycopersicon esculentum]
  misc_feature (7)..(484): Homolog of NCBI NO: 7442735 NR Description: amino acid transport protein AAP1 - castor bean
  misc_feature (10)..(482): Homolog of NCBI NO: 21553710 NR Description: amino acid carrier, putative [Arabidopsis

SEQ ID NO: 108661 - protein, 397 aa, Arabidopsis thaliana; identical to SEQ ID NO: 24658
  peptide (1)..(397): Ceres Seq. ID no. 13668026
  misc_feature (1)..(397): Homolog of NCBI NO: 15217945 NR Description: amino acid permease I (AAP1) [Arabidopsis
  misc_feature (1)..(397): Homolog of NCBI NO: 2654019 NR Description: neutral amino acid transport system II
  misc_feature (1)..(395): Homolog of NCBI NO: 15218370 NR Description: amino acid permease, putative [Arabidopsis
  misc_feature (1)..(393): Homolog of NCBI NO: 15240523 NR Description: amino acid permease 6 (AAP6) [Arabidopsis
  misc_feature (1)..(369): Homolog of NCBI NO: 24370975 NR Description: amino acid transporter [Solanum tuberosum]
  misc_feature (1)..(394): Homolog of NCBI NO: 27447655 NR Description: amino acid transporter [Lycopersicon esculentum]
  misc_feature (1)..(342): Homolog of NCBI NO: 7442731 NR Description: probable amino acid transporter protein AAP1 -
  misc_feature (1)..(394): Homolog of NCBI NO: 27447657 NR Description: amino acid transporter [Lycopersicon esculentum]
  misc_feature (1)..(396): Homolog of NCBI NO: 7442735 NR Description: amino acid transport protein AAP1 - castor bean
  misc_feature (1)..(394): Homolog of NCBI NO: 21553710 NR Description: amino acid carrier, putative [Arabidopsis

SEQ ID NO: 108662 - protein, 377 aa, Arabidopsis thaliana; identical to SEQ ID NO: 24659
  peptide (1)..(377): Ceres Seq. ID no. 13668027
  misc_feature (1)..(377): Homolog of NCBI NO: 15217945 NR Description: amino acid permease I (AAP1) [Arabidopsis
  misc_feature (1)..(377): Homolog of NCBI NO: 2654019 NR Description: neutral amino acid transport system II
  misc_feature (1)..(375): Homolog of NCBI NO: 15218370 NR Description: amino acid permease, putative [Arabidopsis
  misc_feature (1)..(373): Homolog of NCBI NO: 15240523 NR Description: amino acid permease 6 (AAP6) [Arabidopsis
  misc_feature (1)..(349): Homolog of NCBI NO: 24370975 NR Description: amino acid transporter [Solanum tuberosum]
  misc_feature (1)..(374): Homolog of NCBI NO: 27447655 NR Description: amino acid transporter [Lycopersicon esculentum]
  misc_feature (1)..(322): Homolog of NCBI NO: 7442731 NR Description: probable amino acid transporter protein AAP1 -
  misc_feature (1)..(374): Homolog of NCBI NO: 27447657 NR Description: amino acid transporter [Lycopersicon esculentum]
  misc_feature (1)..(376): Homolog of NCBI NO: 7442735 NR Description: amino acid transport protein AAP1 - castor bean
  misc_feature (1)..(374): Homolog of NCBI NO: 21553710 NR Description: amino acid carrier, putative [Arabidopsis

SEQ ID NO: 108663 - DNA, 924 bp, Arabidopsis thaliana
  misc_feature (1)..(924): Ceres Seq. ID no. 13668028
  misc_feature: MA Experiment ID: 20000213 Result: Up-regulated in Transcription
  misc_feature: MA Experiment 20000213 PARAMETER Experiment Name: At_4deg_Cold_P Parameter: Timepoint (hr) Value: 2
  misc_feature: MA Experiment ID: 20000437 Result: Up-regulated in Transcription
  misc_feature: MA Experiment 20000437 PARAMETER Experiment Name: At_Drought_P Parameter: Age (day) Value: 8
  misc_feature: MA Experiment 20000437 PARAMETER Experiment Name: At_Drought_P Parameter: Organism Value: A. thaliana
  misc_feature: MA Experiment 20000437 PARAMETER Experiment Name: At_Drought_P Parameter: Plant Line Value: WS
  misc_feature: MA Experiment 20000437 PARAMETER Experiment Name: At_Drought_P Parameter: Timepoint (hr) Value: 24
  misc_feature: MA Experiment 20000437 PARAMETER Experiment Name: At_Drought_P Parameter: Tissue Value: Whole Plant
  misc_feature: MA Experiment 20000437 PARAMETER Experiment Name: At_Drought_P Parameter: Treatment Value: Drought vs. No Drought
  misc_feature: MA Experiment ID: 20000438 Result: Down-regulated in Transcription
  misc_feature: MA Experiment 20000438 PARAMETER Experiment Name: At_Shoots__P Parameter: Age (day) Value: 14
  misc_feature: MA Experiment 20000438 PARAMETER Experiment Name: At_Shoots__P Parameter: Tissue Value: Shoots vs. Whole Plant
  misc_feature: MA Experiment ID: 20001451 Result: Up-regulated in Transcription
  misc_feature: MA Experiment 20001451 PARAMETER Experiment Name: At_Far-red-induction_P Parameter: Age (day) Value: 7
  misc_feature: MA Experiment 20001451 PARAMETER Experiment Name: At_Far-red-induction_P Parameter: Light Value: Far-red vs. White
  misc_feature: MA Experiment 20001451 PARAMETER Experiment Name: At_Far-red-induction_P Parameter: Organism Value: A. thaliana
  misc_feature: MA Experiment 20001451 PARAMETER Experiment Name: At_Far-red-induction_P Parameter: Plant Line Value: Columbia
  misc_feature: MA Experiment 20001451 PARAMETER Experiment Name: At_Far-red-induction_P Parameter: Timepoint (hr) Value: 24
  misc_feature: MA Experiment 20001451 PARAMETER Experiment Name: At_Far-red-induction_P Parameter: Tissue Value: Whole Plant
  misc_feature: MA Experiment ID: 20001557 Result: Up-regulated in Transcription
  misc_feature: MA Experiment 20001557 PARAMETER Experiment Name: At_Drought_Soil_Dry_P Parameter: Age (day) Value: 27
  misc_feature: MA Experiment 20001557 PARAMETER Experiment Name: At_Drought_Soil_Dry_P Parameter: Organism Value: A. thaliana
  misc_feature: MA Experiment 20001557 PARAMETER Experiment Name: At_Drought_Soil_Dry_P Parameter: Plant Line Value: WS
  misc_feature: MA Experiment 20001557 PARAMETER Experiment Name: At_Drought_Soil_Dry_P Parameter: Post Timepoint (hr) Value: 3
  misc_feature: MA Experiment 20001557 PARAMETER Experiment Name: At_Drought_Soil_Dry_P Parameter: Post-Treatment Value: Re-Water vs. No Drought
  misc_feature: MA Experiment 20001557 PARAMETER Experiment Name: At_Drought_Soil_Dry_P Parameter: Timepoint (day) Value: 13
  misc_feature: MA Experiment 20001557 PARAMETER Experiment Name: At_Drought_Soil_Dry_P Parameter: Treatment Value: Drought vs. No Drought
tatcgaattcctttcaatggcgtccggtgatgttgagtatcggtgcttgttggaggtctagcatgggccactgatgacagagctcttgagactgccttcgctcaatacggcgacgttattgattccaaggtctgttacacgccgagatcggactccgagtgatatcgatgatctcatcctcgacggatctgttccgatcttgtgtttctctgttacttgattcgattactctgttactattctcgttctttgttactactactactactactgttacttgtattttcccaaatcgtaacgatcgtgagactggaagatcaaggggattcggattcgtcaccttcaaggatgagaaagccatgaaggatgcgattgagggaatgaacggacaagatctcgatggccgtagcatcactgttaacgaggctcagtcacgaggaagcggtggcggcggaggccaccgtggaggtggtggcggtggataccgcagcggcggtggtggaggttactccggtggaggtggtagctacggaggtggcggcggtagacgcgagggtggaggaggatacagcggcggcggcggcggttactcctcaagaggtggtggtggcggaagctacggtggtggaagacgtgagggaggaggaggatacggtggtggtgaaggaggaggttacggaggaagcggtggtggtggaggatggtaattcctttaattaggtttgggattaccaatgaatgttctctctctcgcttgttatgcttctacttggttttgtgtgttctctattttgttctggttctgctttagatttgatgtaacagttcgtgattaggtattttggtatctggaaacgtaatgttaagtcacttgtcattctctaaataacaaatttcttcggagatattatctctgttgattga

SEQ ID NO: 108664 - protein, 179 aa, Arabidopsis thaliana; identical to SEQ ID NO: 84053
  peptide (1)..(179): Ceres Seq. ID no. 13668029
  misc_feature (91)..(177): Pfam Name: Herpesvirus large structural phosphoprotein UL32 Pfam Description: Herpesvirus large structural phosphoprotein UL32
  misc_feature (44)..(179): Homolog of NCBI NO: 15226605 NR Description: glycine-rich RNA-binding protein (AtGRP7)
  misc_feature (44)..(179): Homolog of NCBI NO: 21553354 NR Description: glycine-rich RNA binding protein 7 [Arabidopsis
  misc_feature (44)..(179): Homolog of NCBI NO: 30681492 NR Description: glycine-rich RNA-binding protein (AtGRP7)
  misc_feature (44)..(179): Homolog of NCBI NO: 1346181 NR Description: Glycine-rich RNA-binding protein GRP2A
  misc_feature (44)..(179): Homolog of NCBI NO: 1346180 NR Description: Glycine-rich RNA-binding protein GRP1A
  misc_feature (65)..(179): Homolog of NCBI NO: 14596077 NR Description: glycine-rich RNA binding protein [Arabidopsis
  misc_feature (44)..(179): Homolog of NCBI NO: 15235002 NR Description: glycine-rich RNA-binding protein 8 (GRP8) (CCR1)
  misc_feature (44)..(179): Homolog of NCBI NO: 34851124 NR Description: putative glycine-rich RNA-binding protein [Prunus
  misc_feature (44)..(179): Homolog of NCBI NO: 544416 NR Description: Glycine-rich RNA-binding protein 10
  misc_feature (45)..(179): Homolog of NCBI NO: 544423 NR Description: Glycine-rich RNA-binding protein 2

SEQ ID NO: 108665 - protein, 115 aa, Arabidopsis thaliana; identical to SEQ ID NO: 76878
  peptide (1)..(115): Ceres Seq. ID no. 13668030
  misc_feature (27)..(113): Pfam Name: Herpesvirus large structural phosphoprotein UL32 Pfam Description: Herpesvirus large structural phosphoprotein UL32
  misc_feature (1)..(115): Homolog of NCBI NO: 15226605 NR Description: glycine-rich RNA-binding protein (AtGRP7)
  misc_feature (1)..(115): Homolog of NCBI NO: 21553354 NR Description: glycine-rich RNA binding protein 7 [Arabidopsis
  misc_feature (1)..(115): Homolog of NCBI NO: 30681492 NR Description: glycine-rich RNA-binding protein (AtGRP7)
  misc_feature (1)..(115): Homolog of NCBI NO: 1346181 NR Description: Glycine-rich RNA-binding protein GRP2A
  misc_feature (1)..(115): Homolog of NCBI NO: 1346180 NR Description: Glycine-rich RNA-binding protein GRP1A
  misc_feature (1)..(115): Homolog of NCBI NO: 14596077 NR Description: glycine-rich RNA binding protein [Arabidopsis
  misc_feature (1)..(115): Homolog of NCBI NO: 15235002 NR Description: glycine-rich RNA-binding protein 8 (GRP8) (CCR1)
  misc_feature (1)..(115): Homolog of NCBI NO: 34851124 NR Description: putative glycine-rich RNA-binding protein [Prunus
  misc_feature (1)..(115): Homolog of NCBI NO: 544416 NR Description: Glycine-rich RNA-binding protein 10
  misc_feature (1)..(115): Homolog of NCBI NO: 544423 NR Description: Glycine-rich RNA-binding protein 2

SEQ ID NO: 108666 - protein, 108 aa, Arabidopsis thaliana; identical to SEQ ID NO: 76879
  peptide (1)..(108): Ceres Seq. ID no. 13668031
  misc_feature (20)..(106): Pfam Name: Herpesvirus large structural phosphoprotein UL32 Pfam Description: Herpesvirus large structural phosphoprotein UL32
  misc_feature (1)..(108): Homolog of NCBI NO: 15226605 NR Description: glycine-rich RNA-binding protein (AtGRP7)
  misc_feature (1)..(108): Homolog of NCBI NO: 21553354 NR Description: glycine-rich RNA binding protein 7 [Arabidopsis
  misc_feature (1)..(108): Homolog of NCBI NO: 30681492 NR Description: glycine-rich RNA-binding protein (AtGRP7)
  misc_feature (1)..(108): Homolog of NCBI NO: 1346181 NR Description: Glycine-rich RNA-binding protein GRP2A
  misc_feature (1)..(108): Homolog of NCBI NO: 1346180 NR Description: Glycine-rich RNA-binding protein GRP1A
  misc_feature (1)..(108): Homolog of NCBI NO: 14596077 NR Description: glycine-rich RNA binding protein [Arabidopsis
  misc_feature (1)..(108): Homolog of NCBI NO: 15235002 NR Description: glycine-rich RNA-binding protein 8 (GRP8) (CCR1)
  misc_feature (1)..(108): Homolog of NCBI NO: 34851124 NR Description: putative glycine-rich RNA-binding protein [Prunus
  misc_feature (1)..(108): Homolog of NCBI NO: 544416 NR Description: Glycine-rich RNA-binding protein 10
  misc_feature (1)..(108): Homolog of NCBI NO: 544423 NR Description: Glycine-rich RNA-binding protein 2

SEQ ID NO: 108667 - DNA, 1444 bp, Arabidopsis thaliana
  misc_feature (1)..(1444): Ceres Seq. ID no. 13668032
  misc_feature: MA Experiment ID: 20000185 Result: Up-regulated in Transcription
  misc_feature: MA Experiment 20000185 PARAMETER Experiment Name: At_Roots__P Parameter: Age (day) Value: 7 vs. 21
  misc_feature: MA Experiment 20000185 PARAMETER Experiment Name: At_Roots__P Parameter: Organism Value: A. thaliana
  misc_feature: MA Experiment 20000185 PARAMETER Experiment Name: At_Roots__P Parameter: Tissue Value: Roots vs. Whole Plant
  misc_feature: MA Experiment ID: 20000439 Result: Up-regulated in Transcription
  misc_feature: MA Experiment 20000439 PARAMETER Experiment Name: At_Roots__P Parameter: Age (day) Value: 14 vs. 21
  misc_feature: MA Experiment 20000439 PARAMETER Experiment Name: At_Roots__P Parameter: Organism Value: A. thaliana
  misc_feature: MA Experiment 20000439 PARAMETER Experiment Name: At_Roots__P Parameter: Tissue Value: Roots vs. Whole Plant
  misc_feature: MA Experiment ID: 20000451 Result: Up-regulated in Transcription
  misc_feature: MA Experiment 20000451 PARAMETER Experiment Name: At_CS6879_Shoots-Roots_P Parameter: Age (day) Value: 14
  misc_feature: MA Experiment 20000451 PARAMETER Experiment Name: At_CS6879_Shoots-Roots_P Parameter: Organism Value: A. thaliana
  misc_feature: MA Experiment 20000451 PARAMETER Experiment Name: At_CS6879_Shoots-Roots_P Parameter: Plant Line Value: CS6879 vs. WS
  misc_feature: MA Experiment 20000451 PARAMETER Experiment Name: At_CS6879_Shoots-Roots_P Parameter: Tissue Value: Roots
  misc_feature: MA Experiment ID: 20000573 Result: Down-regulated in Transcription
  misc_feature: MA Experiment 20000573 PARAMETER Experiment Name: At_100uM_ABA_Mutants__P Parameter: Organism Value: A. thaliana
  misc_feature: MA Experiment 20000573 PARAMETER Experiment Name: At_100uM_ABA_Mutants__P Parameter: Plant Line Value: CS22 vs. Ler wt
  misc_feature: MA Experiment 20000573 PARAMETER Experiment Name: At_100uM_ABA_Mutants__P Parameter: Timepoint (hr) Value: N/A
  misc_feature: MA Experiment 20000573 PARAMETER Experiment Name: At_100uM_ABA_Mutants__P Parameter: Tissue Value: Whole Plant
  misc_feature: MA Experiment 20000573 PARAMETER Experiment Name: At_100uM_ABA_Mutants__P Parameter: Treatment Value: None
  misc_feature: MA Experiment ID: 20000794 Result: Up-regulated in Transcription
  misc_feature: MA Experiment 20000794 PARAMETER Experiment Name: At_Petals_P Parameter: Age (day) Value: 23-25 days
  misc_feature: MA Experiment 20000794 PARAMETER Experiment Name: At_Petals_P Parameter: Plant Line Value: WS
  misc_feature: MA Experiment 20000794 PARAMETER Experiment Name: At_Petals_P Parameter: Tissue Value: Petals vs. Whole plant
  misc_feature: MA Experiment ID: 20001248 Result: Down-regulated in Transcription
  misc_feature: MA Experiment 20001248 PARAMETER Experiment Name: At_Far-red-induction_P Parameter: Age (day) Value: 7
  misc_feature: MA Experiment 20001248 PARAMETER Experiment Name: At_Far-red-induction_P Parameter: Light Value: Far-red vs. White
  misc_feature: MA Experiment 20001248 PARAMETER Experiment Name: At_Far-red-induction_P Parameter: Organism Value: A. thaliana
  misc_feature: MA Experiment 20001248 PARAMETER Experiment Name: At_Far-red-induction_P Parameter: Plant Line Value: Columbia
  misc_feature: MA Experiment 20001248 PARAMETER Experiment Name: At_Far-red-induction_P Parameter: Timepoint (hr) Value: 4
  misc_feature: MA Experiment 20001248 PARAMETER Experiment Name: At_Far-red-induction_P Parameter: Tissue Value: Whole Plant
  misc_feature: MA Experiment ID: 20001450 Result: Down-regulated in Transcription
  misc_feature: MA Experiment 20001450 PARAMETER Experiment Name: At_Far-red-induction_P Parameter: Age (day) Value: 7
  misc_feature: MA Experiment 20001450 PARAMETER Experiment Name: At_Far-red-induction_P Parameter: Light Value: Far-red vs. White
  misc_feature: MA Experiment 20001450 PARAMETER Experiment Name: At_Far-red-induction_P Parameter: Organism Value: A. thaliana
  misc_feature: MA Experiment 20001450 PARAMETER Experiment Name: At_Far-red-induction_P Parameter: Plant Line Value: Columbia
  misc_feature: MA Experiment 20001450 PARAMETER Experiment Name: At_Far-red-induction_P Parameter: Timepoint (hr) Value: 8
  misc_feature: MA Experiment 20001450 PARAMETER Experiment Name: At_Far-red-induction_P Parameter: Tissue Value: Whole Plant
aatgaattttggggtcaaattcatttcaactgattcaatcaattctcatgaattccatcttgtcaagcgtccttcctgctcccgaagatcctgttctcagtgtaatttttgcttgtagagatgatcctagtccggttaagttgaatttgagcgcaggtacctatcgaactgaggaaggaaagcctcttgttcttgatgttgtgagaagagcagagcaacagttagccaacgacctggacaaggaatatcttcccctcaatggacttcctgaatttaataaattaagtaccaagctcatcttaggtgatgatagtcctgcattgaaagagaatagagttgttacaacccaatgtttgtctggtactggttctttgagagttggagctgagtttctagcaacacacaacaaagaaagtgtcattttcgttccaaacccaacgtgggggaaccatccccgtatttttactttggcgggtttgtctgtccagtatttccgttattatgatccgaagagccgaggactcgacttcaaaggcatgctcgaggatcttggcgctgcacctcctggagctatagtggtacttcaagcttgtgcgcataaccccacaggagttgacccaacattcgaacaatgggaaaagtttcgacgactagtgagatcgaaaagcttattacctttctttgatagtgcatatcagggttttgctagtggtagccttgacgcagatgcacaagcggttcgtatgtttgtagccgatggaggtgaatgtttgatagctcaaagttatgccaaaaatatgggcctttatggggagcgtattggctctcttacgatcgtatgcacatcagaagatgtcgctaagaaagttgagaaccaagtgctacttgttgtgaggcctatgtatcttacaccacctattcatggtgcatctattgttgccacaattctaaaaaacagtgatatgtacaatgactggaccattgagctgaaaggaatggctgaccgcataattagcatgcgtcaacagttatatgcagctctagaagctagaggaacacctggtgattggagtcacattattaaacatattgggatgtttacttttaccggattgagtgaggagcaagttcgcttgatggccaaagaatatcacatttacatgacttatgatgggaggataagcatggcaagtctaagttcgaagacagtgcctcaactcgctgatgctatacatgctgttgttactcgcatcgcctaattaaatttgcgattctgttcttttgttgtttaatttatgaacacaattagagaataaaactgcgttcttggtttacatttaataagatagcacaaagaagcaatattatggatgatattgtttctagttggtagtcaaacctaccaaaatgaggattgggacctttaaaccaacacagttttttt

SEQ ID NO: 108668 - protein, 403 aa, Arabidopsis thaliana
  peptide (1)..(403): Ceres Seq. ID no. 13668033
  misc_feature (82)..(399): Pfam Name: Aminotransferase class I and II Pfam Description: Aminotransferase class I and II
  misc_feature (1)..(403): Homolog of NCBI NO: 693694 NR Description: aspartate aminotransferase
  misc_feature (1)..(403): Homolog of NCBI NO: 18407664 NR Description: aspartate aminotransferase, cytoplasmic isozyme 2 A/Asp4) [Arabidopsis thaliana] >gi|21542387|sp|P46646|AAT4_ARATH
  misc_feature (1)..(403): Homolog of NCBI NO: 30696761 NR Description: aspartate aminotransferase, cytoplasmic isozyme 2
  misc_feature (1)..(376): Homolog of NCBI NO: 25287199 NR Description: protein F23N19.17 [imported] - Arabidopsis >gi|6630455|gb|AAF19543.1|AC007190_11 F23N19.17 [Arabidopsis
  misc_feature (1)..(402): Homolog of NCBI NO: 15239772 NR Description: aspartate aminotransferase, cytoplasmic isozyme 1 A/Asp2) [Arabidopsis thaliana] >gi|21542386|sp|P46645|AAT2_ARATH
  misc_feature (1)..(402): Homolog of NCBI NO: 693690 NR Description: aspartate aminotransferase
  misc_feature (1)..(400): Homolog of NCBI NO: 112972 NR Description: ASPARTATE AMINOTRANSFERASE, CYTOPLASMIC A) >gi|7434096|pir||T14311 aspartate transaminase (EC 2.6.1.1),
  misc_feature (2)..(402): Homolog of NCBI NO: 388896 NR Description: aspartate aminotransferase P1
  misc_feature (2)..(402): Homolog of NCBI NO: 168324 NR Description: aspartate aminotransferase P1
  misc_feature (3)..(401): Homolog of NCBI NO: 15239078 NR Description: aspartate aminotransferase, chloroplast A/Asp3) [Arabidopsis thaliana] >gi|1168258|sp|P46644|AAT3_ARATH aminotransferase, chloroplast precursor (Transaminase A)
MNSILSSVLPAPEDPVLSVIFACRDDPSPVKLNLSAGTYRTEEGKPLVLDVVRRAEQQLANDLDKEYLPLNGLPEFNKLSTKLILGDDSPALKENRVVTTQCLSGTGSLRVGAEFLATHNKESVIFVPNPTWGNHPRIFTLAGLSVQYFRYYDPKSRGLDFKGMLEDLGAAPPGAIVVLQACAHNPTGVDPTFEQWEKFRRLVRSKSLLPFFDSAYQGFASGSLDADAQAVRMFVADGGECLIAQSYAKNMGLYGERIGSLTIVCTSEDVAKKVENQVLLVVRPMYLTPPIHGASIVATILKNSDMYNDWTIELKGMADRIISMRQQLYAALEARGTPGDWSHIIKHIGMFTFTGLSEEQVRLMAKEYHIYMTYDGRISMASLSSKTVPQLADAIHAVVTRIA

SEQ ID NO: 108669 - protein, 240 aa, Arabidopsis thaliana
  peptide (1)..(240): Ceres Seq. ID no. 13668034
  misc_feature (1)..(236): Pfam Name: Aminotransferase class I and II Pfam Description: Aminotransferase class I and II
  misc_feature (1)..(240): Homolog of NCBI NO: 693694 NR Description: aspartate aminotransferase
  misc_feature (1)..(240): Homolog of NCBI NO: 18407664 NR Description: aspartate aminotransferase, cytoplasmic isozyme 2 A/Asp4) [Arabidopsis thaliana] >gi|21542387|sp|P46646|AAT4_ARATH
  misc_feature (1)..(240): Homolog of NCBI NO: 30696761 NR Description: aspartate aminotransferase, cytoplasmic isozyme 2
  misc_feature (1)..(213): Homolog of NCBI NO: 25287199 NR Description: protein F23N19.17 [imported] - Arabidopsis >gi|6630455|gb|AAF19543.1|AC007190_11 F23N19.17 [Arabidopsis
  misc_feature (1)..(239): Homolog of NCBI NO: 15239772 NR Description: aspartate aminotransferase, cytoplasmic isozyme 1 A/Asp2) [Arabidopsis thaliana] >gi|21542386|sp|P46645|AAT2_ARATH
  misc_feature (1)..(239): Homolog of NCBI NO: 693690 NR Description: aspartate aminotransferase
  misc_feature (1)..(237): Homolog of NCBI NO: 112972 NR Description: ASPARTATE AMINOTRANSFERASE, CYTOPLASMIC A) >gi|7434096|pir||T14311 aspartate transaminase (EC 2.6.1.1),
  misc_feature (1)..(239): Homolog of NCBI NO: 388896 NR Description: aspartate aminotransferase P1
  misc_feature (1)..(239): Homolog of NCBI NO: 168324 NR Description: aspartate aminotransferase P1
  misc_feature (1)..(238): Homolog of NCBI NO: 15239078 NR Description: aspartate aminotransferase, chloroplast A/Asp3) [Arabidopsis thaliana] >gi|1168258|sp|P46644|AAT3_ARATH aminotransferase, chloroplast precursor (Transaminase A)
MLEDLGAAPPGAIVVLQACAHNPTGVDPTFEQWEKFRRLVRSKSLLPFFDSAYQGFASGSLDADAQAVRMFVADGGECLIAQSYAKNMGLYGERIGSLTIVCTSEDVAKKVENQVLLVVRPMYLTPPIHGASIVATILKNSDMYNDWTIELKGMADRIISMRQQLYAALEARGTPGDWSHIIKHIGMFTFTGLSEEQVRLMAKEYHIYMTYDGRISMASLSSKTVPQLADAIHAVVTRIA

SEQ ID NO: 108670 - DNA, 946 bp, Arabidopsis thaliana
  misc_feature (1)..(946): Ceres Seq. ID no. 13668035
  misc_feature: MA Experiment ID: 108462 Result: Up-regulated in Transcription
  misc_feature: MA Experiment 108462 PARAMETER Experiment Name: At_Germinating_Seeds_cDNA_P Parameter: Age (day) Value: 2 vs. 0
  misc_feature: MA Experiment 108462 PARAMETER Experiment Name: At_Germinating_Seeds_cDNA_P Parameter: Tissue Value: Germinating Seeds
  misc_feature: MA Experiment ID: 108463 Result: Up-regulated in Transcription
  misc_feature: MA Experiment 108463 PARAMETER Experiment Name: At_Germinating_Seeds_cDNA_P Parameter: Age (day) Value: 3 vs. 0
  misc_feature: MA Experiment 108463 PARAMETER Experiment Name: At_Germinating_Seeds_cDNA_P Parameter: Tissue Value: Germinating Seeds
  misc_feature: MA Experiment ID: 108464 Result: Up-regulated in Transcription
  misc_feature: MA Experiment 108464 PARAMETER Experiment Name: At_Germinating_Seeds_cDNA_P Parameter: Age (day) Value: 4 vs. 0
  misc_feature: MA Experiment 108464 PARAMETER Experiment Name: At_Germinating_Seeds_cDNA_P Parameter: Tissue Value: Germinating Seeds
  misc_feature: MA Experiment ID: 108573 Result: Up-regulated in Transcription
  misc_feature: MA Experiment 108573 PARAMETER Experiment Name: At_Drought_cDNA_P Parameter: Timepoint (hr) Value: 6
  misc_feature: MA Experiment 108573 PARAMETER Experiment Name: At_Drought_cDNA_P Parameter: Tissue Value: Aerial
  misc_feature: MA Experiment 108573 PARAMETER Experiment Name: At_Drought_cDNA_P Parameter: Treatment Value: Drought vs. No Drought
  misc_feature: MA Experiment ID: 108579 Result: Down-regulated in Transcription
  misc_feature: MA Experiment 108579 PARAMETER Experiment Name: At_4deg_Cold_cDNA_P Parameter: Temperature (deg C) Value: 4 vs. 22
  misc_feature: MA Experiment 108579 PARAMETER Experiment Name: At_4deg_Cold_cDNA_P Parameter: Timepoint (hr) Value: 6
  misc_feature: MA Experiment 108579 PARAMETER Experiment Name: At_4deg_Cold_cDNA_P Parameter: Tissue Value: Aerial
  misc_feature: MA Experiment ID: 108585 Result: Up-regulated in Transcription
  misc_feature: MA Experiment 108585 PARAMETER Experiment Name: At_5mM_NaNP_cDNA_P Parameter: Timepoint (hr) Value: 6
  misc_feature: MA Experiment 108585 PARAMETER Experiment Name: At_5mM_NaNP_cDNA_P Parameter: Tissue Value: Aerial
  misc_feature: MA Experiment 108585 PARAMETER Experiment Name: At_5mM_NaNP_cDNA_P Parameter: Treatment Value: null
  misc_feature: MA Experiment ID: 108594 Result: Down-regulated in Transcription
  misc_feature: MA Experiment 108594 PARAMETER Experiment Name: At_Ler-rhl_Root_cDNA_P Parameter: Plant Line Value: null
  misc_feature: MA Experiment ID: 20000214 Result: Down-regulated in Transcription
  misc_feature: MA Experiment 20000214 PARAMETER Experiment Name: At_4deg_Cold_P Parameter: Timepoint (hr) Value: 6
  misc_feature: MA Experiment ID: 20000224 Result: Down-regulated in Transcription
  misc_feature: MA Experiment ID: 20000496 Result: Up-regulated in Transcription
  misc_feature: MA Experiment 20000496 PARAMETER Experiment Name: At_Guard_Cells_P Parameter: Harvest Date Value: 7/19/2002
  misc_feature: MA Experiment 20000496 PARAMETER Experiment Name: At_Guard_Cells_P Parameter: Organism Value: Canola
  misc_feature: MA Experiment 20000496 PARAMETER Experiment Name: At_Guard_Cells_P Parameter: Tissue Value: Guard Cells vs. Leaves
  misc_feature: MA Experiment ID: 20001248 Result: Up-regulated in Transcription
  misc_feature: MA Experiment 20001248 PARAMETER Experiment Name: At_Far-red-induction_P Parameter: Age (day) Value: 7
  misc_feature: MA Experiment 20001248 PARAMETER Experiment Name: At_Far-red-induction_P Parameter: Light Value: Far-red vs. White
  misc_feature: MA Experiment 20001248 PARAMETER Experiment Name: At_Far-red-induction_P Parameter: Organism Value: A. thaliana
  misc_feature: MA Experiment 20001248 PARAMETER Experiment Name: At_Far-red-induction_P Parameter: Plant Line Value: Columbia
  misc_feature: MA Experiment 20001248 PARAMETER Experiment Name: At_Far-red-induction_P Parameter: Timepoint (hr) Value: 4
  misc_feature: MA Experiment 20001248 PARAMETER Experiment Name: At_Far-red-induction_P Parameter: Tissue Value: Whole Plant
  misc_feature: MA Experiment ID: 20001450 Result: Up-regulated in Transcription
  misc_feature: MA Experiment 20001450 PARAMETER Experiment Name: At_Far-red-induction_P Parameter: Age (day) Value: 7
  misc_feature: MA Experiment 20001450 PARAMETER Experiment Name: At_Far-red-induction_P Parameter: Light Value: Far-red vs. White
  misc_feature: MA Experiment 20001450 PARAMETER Experiment Name: At_Far-red-induction_P Parameter: Organism Value: A. thaliana
  misc_feature: MA Experiment 20001450 PARAMETER Experiment Name: At_Far-red-induction_P Parameter: Plant Line Value: Columbia
  misc_feature: MA Experiment 20001450 PARAMETER Experiment Name: At_Far-red-induction_P Parameter: Timepoint (hr) Value: 8
  misc_feature: MA Experiment 20001450 PARAMETER Experiment Name: At_Far-red-induction_P Parameter: Tissue Value: Whole Plant
  misc_feature: MA Experiment ID: 20001905 Result: Down-regulated in Transcription
  misc_feature: MA Experiment 20001905 PARAMETER Experiment Name: At_Drought_Reproduction_P Parameter: Age (day) Value: 40
  misc_feature: MA Experiment 20001905 PARAMETER Experiment Name: At_Drought_Reproduction_P Parameter: Organism Value: A. thaliana
  misc_feature: MA Experiment 20001905 PARAMETER Experiment Name: At_Drought_Reproduction_P Parameter: Plant Line Value: WS
  misc_feature: MA Experiment 20001905 PARAMETER Experiment Name: At_Drought_Reproduction_P Parameter: Timepoint (day) Value: 10
  misc_feature: MA Experiment 20001905 PARAMETER Experiment Name: At_Drought_Reproduction_P Parameter: Tissue Value: Rosettes
  misc_feature: MA Experiment 20001905 PARAMETER Experiment Name: At_Drought_Reproduction_P Parameter: Treatment Value: Drought vs. No Drought
ccctgacgtagcctgaagtcggtcgccgcgtctccgcttcatcgtcttccgaagttcgcggcttagtctgctgcggcaccggcgtcggagttgcgatgttcgccaacaagttcccgggcgtctacgcagccacttgtctctccgtcgaagacgccgtcaacgctcgatcaataagcaattgcaatgtcctcgcattctccggcatcaaaacatccccggaaaccgccttggaaatcttcgacgcttggatcaaaactcctttcaaatctccttgtcctgcgtccggatccgaaccatggagctcagttatctcttccttcctcgacaattctctctccgagatgtctcagattggaaagtcaaccgccggcgattcaacaaccaagaagatcgatgaaacaaccgcgtcttgcgtaatttgctgcttggcgaagaacagagagttcactccagtggacatcatgccgggaggctcgatgaagatcgttagagagacgccgacgtcggcgattgtaagattcaaagcgggaagtgtggaaccggcgcatcaccacacattcggccatgaccttgtagtcataaagggaaagaaaagtgtgtggaatctgagcaagaaggagagagctgatctcgttgacggcgattacctattcactcccgccggtgatgttcaccgagtcaaatatcacgaagacactgagttcttcatcacttgggatggccattgggacatattccttgacgaagacctcgaaactgcaaagaaagccatcgaagaagaagcttgaaggtgtaaactttgtgtagtactctcttcttttgaatgttgtaagttctgagagtaaactttcttaaattgatgtactttgtaagaatctttgatttcaaaagatggtgtaatattacaaatactttctcttatgaacactatataaagggtttctac

SEQ ID NO: 108671 - protein, 230 aa, Arabidopsis thaliana
  peptide (1)..(230): Ceres Seq. ID no. 13668036
  misc_feature (1)..(66): Pfam Name: Ribose/Galactose Isomerase Pfam Description: Ribose/Galactose Isomerase
  misc_feature (1)..(230): Homolog of NCBI NO: 18397039 NR Description: DNA-damage-repair/toleration protein DRT102 thaliana] >gi|15529165|gb|AAK97677.1| AT3g04880/T9J14_17 thaliana] >gi|23505883|gb|AAN28801.1| At3g04880/T9J14_17
  misc_feature (1)..(230): Homolog of NCBI NO: 1169199 NR Description: DNA-damage-repair/toleration protein DRT102
  misc_feature (1)..(229): Homolog of NCBI NO: 34913680 NR Description: putative DNA-damage-repair/toleration protein
  misc_feature (1)..(61): Homolog of NCBI NO: 22973039 NR Description: hypothetical protein [Chloroflexus aurantiacus]
  misc_feature (1)..(56): Homolog of NCBI NO: 23111538 NR Description: hypothetical protein [Desulfitobacterium
  misc_feature (1)..(57): Homolog of NCBI NO: 23021362 NR Description: hypothetical protein [Clostridium thermocellum
  misc_feature (1)..(56): Homolog of NCBI NO: 22999141 NR Description: hypothetical protein [Magnetococcus sp. MC-1]
  misc_feature (1)..(56): Homolog of NCBI NO: 3282092 NR Description: hypothetical protein [Thermotoga neapolitana]
  misc_feature (1)..(56): Homolog of NCBI NO: 32030875 NR Description: hypothetical protein [Haemophilus somnus 2336]
  misc_feature (1)..(56): Homolog of NCBI NO: 15643838 NR Description: sugar-phosphate isomerase [Thermotoga maritima]
MFANKFPGVYAATCLSVEDAVNARSISNCNVLAFSGIKTSPETALEIFDAWIKTPFKSPCPASGSEPWSSVISSFLDNSLSEMSQIGKSTAGDSTTKKIDETTASCVICCLAKNREFTPVDIMPGGSMKIVRETPTSAIVRFKAGSVEPAHHHTFGHDLVVIKGKKSVWNLSKKERADLVDGDYLFTPAGDVHRVKYHEDTEFFITWDGHWDIFLDEDLETAKKAIEEEA

SEQ ID NO: 108672 - protein, 148 aa, Arabidopsis thaliana
  peptide (1)..(148): Ceres Seq. ID no. 13668037
  misc_feature (1)..(148): Homolog of NCBI NO: 18397039 NR Description: DNA-damage-repair/toleration protein DRT102 thaliana] >gi|15529165|gb|AAK97677.1| AT3g04880/T9J14_17 thaliana] >gi|23505883|gb|AAN28801.1| At3g04880/T9J14_17
  misc_feature (1)..(148): Homolog of NCBI NO: 1169199 NR Description: DNA-damage-repair/toleration protein DRT102
  misc_feature (1)..(147): Homolog of NCBI NO: 34913680 NR Description: putative DNA-damage-repair/toleration protein
MSQIGKSTAGDSTTKKIDETTASCVICCLAKNREFTPVDIMPGGSMKIVRETPTSAIVRFKAGSVEPAHHHTFGHDLVVIKGKKSVWNLSKKERADLVDGDYLFTPAGDVHRVKYHEDTEFFITWDGHWDIFLDEDLETAKKAIEEEA

SEQ ID NO: 108673 - DNA, 1364 bp, Arabidopsis thaliana
  misc_feature (1)..(1364): Ceres Seq. ID no. 13668038
  misc_feature: MA Experiment ID: 20000171 Result: Up-regulated in Transcription
  misc_feature: MA Experiment 20000171 PARAMETER Experiment Name: At_42deg_Heat_P Parameter: Age (day) Value: 14
  misc_feature: MA Experiment 20000171 PARAMETER Experiment Name: At_42deg_Heat_P Parameter: Organism Value: A. thaliana
  misc_feature: MA Experiment 20000171 PARAMETER Experiment Name: At_42deg_Heat_P Parameter: Plant Line Value: WS
  misc_feature: MA Experiment 20000171 PARAMETER Experiment Name: At_42deg_Heat_P Parameter: Temperature (deg C) Value: 42 vs. 22
  misc_feature: MA Experiment 20000171 PARAMETER Experiment Name: At_42deg_Heat_P Parameter: Timepoint (hr) Value: 1
  misc_feature: MA Experiment 20000171 PARAMETER Experiment Name: At_42deg_Heat_P Parameter: Tissue Value: Aerial
  misc_feature: MA Experiment ID: 20000184 Result: Down-regulated in Transcription
  misc_feature: MA Experiment 20000184 PARAMETER Experiment Name: At_Shoots__P Parameter: Age (day) Value: 7
  misc_feature: MA Experiment 20000184 PARAMETER Experiment Name: At_Shoots__P Parameter: Tissue Value: Shoots vs. Whole Plant
cagatctttccaattgaaagcgaaccgtgaattttgagtctctttaccggaggagaaaaaatgcttggtggattatacggagatcttcctccaccgaccgatgatgagaaacccagtggaaactcctcttccgtctggtcacgcagtaccaaaatggctccacctacacttcgcaaaccaccagcttttgctcccccgcaaacaatcttaagacctctcaacaaacctaaacctatcgtttcggctccgtacaagcctcctccgaattcatcgcaatcggtgcttattccggcgaacgaatcagcaccttcgcatcagcctgcattggttggtgtgacttcatcggtgattgaagagtacgatccagcgagacctaacgattacgaggagtataagagggagaagaagaggaaagctacggaagctgagatgaaacgagagatggataagagaaggcaagtgtatccggaaagagatatgagagaaagagaagagagggagaggagagagagagagataacagtgatcctctcggttgatatctccggtgaggaacgtggaagagaccctgctagagtagtggtggaagtgttgggaagggaagatcctcgtctcctccctgggaatgttgatgggtttagtattgggaaatcgaagccgagtgggttaggagtaggagcaggtggacagatgacacctgctcagaggatgatgccgaagatgggatggaaacaaggacaagggcttgggaaatcagagcaagggattcctacgccattgatggctaagaagactgatcgtagagctggtgtcattgtcaatgctagtgagaataaatcttcttcggcggagaagaaggttgttaagagtgttaatatcaatggtgaaccaaccagggttttgcttcttagaaacatggttgggccaggacaagtagatgatgagctagaagatgaggtaggaggcgagtgtgccaaatacggtacagtcactcgtgtactgatattcgagatcactgaaccgaacttccctgtacacgaagcagtaagaatctttgttcagttttcaagacccgaggaaacaactaaagcccttgtagacctcgatgggagatactttggaggaagaaccgtacgtgcaacgttctatgatgaagagaaattcagtaagaacgagttggctccagttccaggtgaaatccctggctattaataactcctaagacaaagaagaaacttcatcttctaggagattcttgttagagaaagaaatcatagactgaggttttaaaaacatttgtaaagtacttagaaatcttgggttatctctttattgttgttcaataaagcttcacaaggatcaag

SEQ ID NO: 108674 - protein, 383 aa, Arabidopsis thaliana
  peptide (1)..(383): Ceres Seq. ID no. 13668039
  misc_feature (281)..(360): Pfam Name: RNA recognition motif. (a.k.a. RRM, RBD, or RNP domain) Pfam Description: RNA recognition motif. (a.k.a. RRM, RBD, or RNP
  misc_feature (1)..(383): Homolog of NCBI NO: 421829 NR Description: DNA-damage repair protein DRT111 precursor -
  misc_feature (1)..(383): Homolog of NCBI NO: 15220757 NR Description: DNA damage repair protein -related [Arabidopsis
  misc_feature (1)..(383): Homolog of NCBI NO: 34913374 NR Description: putative DNA damage repair protein [Oryza sativa
  misc_feature (214)..(379): Homolog of NCBI NO: 21666567 NR Description: DNA repair enzyme [Toxoplasma gondii]
  misc_feature (98)..(144): Homolog of NCBI NO: 21666567 NR Description: DNA repair enzyme [Toxoplasma gondii]
  misc_feature (214)..(379): Homolog of NCBI NO: 21666569 NR Description: DNA repair enzyme [Toxoplasma gondii]
  misc_feature (98)..(144): Homolog of NCBI NO: 21666569 NR Description: DNA repair enzyme [Toxoplasma gondii]
  misc_feature (58)..(374): Homolog of NCBI NO: 14290573 NR Description: Unknown (protein for IMAGE:3868191) [Homo sapiens]
  misc_feature (58)..(374): Homolog of NCBI NO: 14249678 NR Description: splicing factor (45kD) [Homo sapiens] Similar to splicing factor (45kD) [Homo sapiens]
  misc_feature (51)..(374): Homolog of NCBI NO: 22779924 NR Description: RIKEN cDNA 2700027J02 [Mus musculus]
MLGGLYGDLPPPTDDEKPSGNSSSVWSRSTKMAPPTLRKPPAFAPPQTILRPLNKPKPIVSAPYKPPPNSSQSVLIPANESAPSHQPALVGVTSSVIEEYDPARPNDYEEYKREKKRKATEAEMKREMDKRRQVYPERDMREREERERREREITVILSVDISGEERGRDPARVVVEVLGREDPRLLPGNVDGFSIGKSKPSGLGVGAGGQMTPAQRMMPKMGWKQGQGLGKSEQGIPTPLMAKKTDRRAGVIVNASENKSSSAEKKVVKSVNINGEPTRVLLLRNMVGPGQVDDELEDEVGGECAKYGTVTRVLIFEITEPNFPVHEAVRIFVQFSRPEETTKALVDLDGRYFGGRTVRATFYDEEKFSKNELAPVPGEIPGY

SEQ ID NO: 108675 - protein, 352 aa, Arabidopsis thaliana
  peptide (1)..(352): Ceres Seq. ID no. 13668040
  misc_feature (250)..(329): Pfam Name: RNA recognition motif. (a.k.a. RRM, RBD, or RNP domain) Pfam Description: RNA recognition motif. (a.k.a. RRM, RBD, or RNP
  misc_feature (1)..(352): Homolog of NCBI NO: 421829 NR Description: DNA-damage repair protein DRT111 precursor -
  misc_feature (1)..(352): Homolog of NCBI NO: 15220757 NR Description: DNA damage repair protein -related [Arabidopsis
  misc_feature (1)..(352): Homolog of NCBI NO: 34913374 NR Description: putative DNA damage repair protein [Oryza sativa
  misc_feature (183)..(348): Homolog of NCBI NO: 21666567 NR Description: DNA repair enzyme [Toxoplasma gondii]
  misc_feature (67)..(113): Homolog of NCBI NO: 21666567 NR Description: DNA repair enzyme [Toxoplasma gondii]
  misc_feature (183)..(348): Homolog of NCBI NO: 21666569 NR Description: DNA repair enzyme [Toxoplasma gondii]
  misc_feature (67)..(113): Homolog of NCBI NO: 21666569 NR Description: DNA repair enzyme [Toxoplasma gondii]
  misc_feature (27)..(343): Homolog of NCBI NO: 14290573 NR Description: Unknown (protein for IMAGE:3868191) [Homo sapiens]
  misc_feature (27)..(343): Homolog of NCBI NO: 14249678 NR Description: splicing factor (45kD) [Homo sapiens] Similar to splicing factor (45kD) [Homo sapiens]
  misc_feature (20)..(343): Homolog of NCBI NO: 22779924 NR Description: RIKEN cDNA 2700027J02 [Mus musculus]
MAPPTLRKPPAFAPPQTILRPLNKPKPIVSAPYKPPPNSSQSVLIPANESAPSHQPALVGVTSSVIEEYDPARPNDYEEYKREKKRKATEAEMKREMDKRRQVYPERDMREREERERREREITVILSVDISGEERGRDPARVVVEVLGREDPRLLPGNVDGFSIGKSKPSGLGVGAGGQMTPAQRMMPKMGWKQGQGLGKSEQGIPTPLMAKKTDRRAGVIVNASENKSSSAEKKVVKSVNINGEPTRVLLLRNMVGPGQVDDELEDEVGGECAKYGTVTRVLIFEITEPNFPVHEAVRIFVQFSRPEETTKALVDLDGRYFGGRTVRATFYDEEKFSKNELAPVPGEIPGY

SEQ ID NO: 108676 - protein, 260 aa, Arabidopsis thaliana
  peptide (1)..(260): Ceres Seq. ID no. 13668041
  misc_feature (158)..(237): Pfam Name: RNA recognition motif. (a.k.a. RRM, RBD, or RNP domain) Pfam Description: RNA recognition motif. (a.k.a. RRM, RBD, or RNP
  misc_feature (1)..(260): Homolog of NCBI NO: 421829 NR Description: DNA-damage repair protein DRT111 precursor -
  misc_feature (1)..(260): Homolog of NCBI NO: 15220757 NR Description: DNA damage repair protein -related [Arabidopsis
  misc_feature (1)..(260): Homolog of NCBI NO: 34913374 NR Description: putative DNA damage repair protein [Oryza sativa
  misc_feature (91)..(256): Homolog of NCBI NO: 21666567 NR Description: DNA repair enzyme [Toxoplasma gondii]
  misc_feature (1)..(21): Homolog of NCBI NO: 21666567 NR Description: DNA repair enzyme [Toxoplasma gondii]
  misc_feature (91)..(256): Homolog of NCBI NO: 21666569 NR Description: DNA repair enzyme [Toxoplasma gondii]
  misc_feature (1)..(21): Homolog of NCBI NO: 21666569 NR Description: DNA repair enzyme [Toxoplasma gondii]
  misc_feature (1)..(251): Homolog of NCBI NO: 14290573 NR Description: Unknown (protein for IMAGE:3868191) [Homo sapiens]
  misc_feature (1)..(251): Homolog of NCBI NO: 14249678 NR Description: splicing factor (45kD) [Homo sapiens] Similar to splicing factor (45kD) [Homo sapiens]
  misc_feature (1)..(251): Homolog of NCBI NO: 22779924 NR Description: RIKEN cDNA 2700027J02 [Mus musculus]
MKREMDKRRQVYPERDMREREERERREREITVILSVDISGEERGRDPARVVVEVLGREDPRLLPGNVDGFSIGKSKPSGLGVGAGGQMTPAQRMMPKMGWKQGQGLGKSEQGIPTPLMAKKTDRRAGVIVNASENKSSSAEKKVVKSVNINGEPTRVLLLRNMVGPGQVDDELEDEVGGECAKYGTVTRVLIFEITEPNFPVHEAVRIFVQFSRPEETTKALVDLDGRYFGGRTVRATFYDEEKFSKNELAPVPGEIPGY

SEQ ID NO: 108677 - DNA, 1447 bp, Arabidopsis thaliana
  misc_feature (1)..(1447): Ceres Seq. ID no. 13668042
  misc_feature: MA Experiment ID: 20000184 Result: Down-regulated in Transcription
  misc_feature: MA Experiment 20000184 PARAMETER Experiment Name: At_Shoots__P Parameter: Age (day) Value: 7
  misc_feature: MA Experiment 20000184 PARAMETER Experiment Name: At_Shoots__P Parameter: Tissue Value: Shoots vs. Whole Plant
  misc_feature: MA Experiment ID: 20001911 Result: Up-regulated in Transcription
  misc_feature: MA Experiment 20001911 PARAMETER Experiment Name: At_Drought_Reproduction_P Parameter: Age (day) Value: 40
  misc_feature: MA Experiment 20001911 PARAMETER Experiment Name: At_Drought_Reproduction_P Parameter: Organism Value: A. thaliana
  misc_feature: MA Experiment 20001911 PARAMETER Experiment Name: At_Drought_Reproduction_P Parameter: Plant Line Value: WS
  misc_feature: MA Experiment 20001911 PARAMETER Experiment Name: At_Drought_Reproduction_P Parameter: Timepoint (day) Value: 10
  misc_feature: MA Experiment 20001911 PARAMETER Experiment Name: At_Drought_Reproduction_P Parameter: Tissue Value: Flowers
  misc_feature: MA Experiment 20001911 PARAMETER Experiment Name: At_Drought_Reproduction_P Parameter: Treatment Value: Drought vs. No Drought
  misc_feature: Pfam Name: WD40 Pfam Description: WD domain, G-beta repeat
gagacagacacggaggatggcgaatcagagtacagagacgaatcaaccgtcgaatatgcagacttacggtgtaccgatttacgccgccgactggattccggaggtagatgtcagatccaaaatcataatggatccggagaaatctgaagatgatgatgagtcgtcttcttcttcttcttcttcccggagctgcatcgttttgtccggcggaggcggagagggacgaagtggaatctctaatgtcatattaatatgccgtgttgatctaaacaccaattctctctcggaacaacctctgggtaggcttgtggttggctctgatctgccttatcggatggctgttcatcctcgggaaggtggtcttatttgcgcgttgcctaacagttgcaaactgtttcattgggaagacattatgagccgagaggataatcaggctggtgagtcggaggaagtgattaaagagttaagagatgttggacaacagttggctctggcgtttaatccggaggggtctgttcttgctgctggtgcggaggatgggactttgagggtttttaaatggcctagcatgaatactttacttaatgagtcccaggctcattcttcagttaaatgccttactttcagcgaaagtggtcaatttcttgtatctcttggcggtccagtttgtcgagtttgggacgtgaatgcttctgctgctgttgccagtctatcaaaagagaaggacgagatgtttgcctcctgtagattctctgtagacagtgcaggcaatgaagttctttacattgctgcaaacactgaacgtggtgggagtattataacatgtgatacaaaattatggaaaagaaaatggtcgaagcctataaaaaagaactctatatcagcttttaatgtctcagctgatgggaagcttcttgcaataggaacccttgaaggagatgttttaatacttgaatcgacaagaatgcaaactatccaaatcgtcaagaaagcgcatcttggtttggtcacagcactgactttctctcctgattcaaggggattagtgtcggtatcttttgactcaagggcaaggctgaccatgattgaacaaaagggggacaaacctggagtaaggtggtggctactggttttattgatagtgttgctatacgtggttgcatactattatatgaaggcaaagggtatcataccttagaaaggcctttaagtgaccacacaggacgatacagcggaatggcttgtaaccaacatatcatacgattacgctttgagttagctttttatgtttgacatctaccagaaacttgcttgctttatatcaataaaacatgtaaactaacactaaaacagcaaaagttacaatttgtttcctcttttttttttttgtagacatagtaaactagaaaactattatcatatgatggatcagtaagactctttcttc

SEQ ID NO: 108678 - protein, 398 aa, Arabidopsis thaliana
  peptide (1)..(398): Ceres Seq. ID no. 13668043
  misc_feature: Pfam Name: WD40 Pfam Description: WD domain, G-beta repeat
  misc_feature (6)..(398): Homolog of NCBI NO: 11358859 NR Description: St12p protein [imported] - Arabidopsis thaliana
  misc_feature (6)..(398): Homolog of NCBI NO: 15226281 NR Description: SEC12p protein / St12p protein [Arabidopsis
  misc_feature (6)..(372): Homolog of NCBI NO: 322598 NR Description: St12p protein - Arabidopsis thaliana
  misc_feature (13)..(397): Homolog of NCBI NO: 18423177 NR Description: St12p protein [Arabidopsis thaliana] St12p protein [Arabidopsis thaliana] >gi|9758764|dbj|BAB09140.1|
  misc_feature (6)..(279): Homolog of NCBI NO: 17473926 NR Description: putative protein transport protein SEC12p
  misc_feature (13)..(368): Homolog of NCBI NO: 8777388 NR Description: protein transport protein SEC12p-like
  misc_feature (74)..(389): Homolog of NCBI NO: 34394605 NR Description: transducin / WD-40 repeat protein-like [Oryza
  misc_feature (88)..(392): Homolog of NCBI NO: 34897162 NR Description: putative membrane protein [Oryza sativa (japonica group)] >gi|28209528|gb|AAO37546.1| putative membrane protein
  misc_feature (74)..(389): Homolog of NCBI NO: 18409509 NR Description: transducin / WD-40 repeat protein family
  misc_feature (164)..(389): Homolog of NCBI NO: 26450470 NR Description: unknown protein [Arabidopsis thaliana]
RQTRRMANQSTETNQPSNMQTYGVPIYAADWIPEVDVRSKIIMDPEKSEDDDESSSSSSSSRSCIVLSGGGGEGRSGISNVILICRVDLNTNSLSEQPLGRLVVGSDLPYRMAVHPREGGLICALPNSCKLFHWEDIMSREDNQAGESEEVIKELRDVGQQLALAFNPEGSVLAAGAEDGTLRVFKWPSMNTLLNESQAHSSVKCLTFSESGQFLVSLGGPVCRVWDVNASAAVASLSKEKDEMFASCRFSVDSAGNEVLYIAANTERGGSIITCDTKLWKRKWSKPIKKNSISAFNVSADGKLLAIGTLEGDVLILESTRMQTIQIVKKAHLGLVTALTFSPDSRGLVSVSFDSRARLTMIEQKGDKPGVRWWLLVLLIVLLYVVAYYYMKAKGIIP

SEQ ID NO: 108679 - protein, 393 aa, Arabidopsis thaliana
  peptide (1)..(393): Ceres Seq. ID no. 13668044
  misc_feature: Pfam Name: WD40 Pfam Description: WD domain, G-beta repeat
  misc_feature (1)..(393): Homolog of NCBI NO: 11358859 NR Description: St12p protein [imported] - Arabidopsis thaliana
  misc_feature (1)..(393): Homolog of NCBI NO: 15226281 NR Description: SEC12p protein / St12p protein [Arabidopsis
  misc_feature (1)..(367): Homolog of NCBI NO: 322598 NR Description: St12p protein - Arabidopsis thaliana
  misc_feature (8)..(392): Homolog of NCBI NO: 18423177 NR Description: St12p protein [Arabidopsis thaliana] St12p protein [Arabidopsis thaliana] >gi|9758764|dbj|BAB09140.1|
  misc_feature (1)..(274): Homolog of NCBI NO: 17473926 NR Description: putative protein transport protein SEC12p
  misc_feature (8)..(363): Homolog of NCBI NO: 8777388 NR Description: protein transport protein SEC12p-like
  misc_feature (69)..(384): Homolog of NCBI NO: 34394605 NR Description: transducin / WD-40 repeat protein-like [Oryza
  misc_feature (83)..(387): Homolog of NCBI NO: 34897162 NR Description: putative membrane protein [Oryza sativa (japonica group)] >gi|28209528|gb|AAO37546.1| putative membrane protein
  misc_feature (69)..(384): Homolog of NCBI NO: 18409509 NR Description: transducin / WD-40 repeat protein family
  misc_feature (159)..(384): Homolog of NCBI NO: 26450470 NR Description: unknown protein [Arabidopsis thaliana]
MANQSTETNQPSNMQTYGVPIYAADWIPEVDVRSKIIMDPEKSEDDDESSSSSSSSRSCIVLSGGGGEGRSGISNVILICRVDLNTNSLSEQPLGRLVVGSDLPYRMAVHPREGGLICALPNSCKLFHWEDIMSREDNQAGESEEVIKELRDVGQQLALAFNPEGSVLAAGAEDGTLRVFKWPSMNTLLNESQAHSSVKCLTFSESGQFLVSLGGPVCRVWDVNASAAVASLSKEKDEMFASCRFSVDSAGNEVLYIAANTERGGSIITCDTKLWKRKWSKPIKKNSISAFNVSADGKLLAIGTLEGDVLILESTRMQTIQIVKKAHLGLVTALTFSPDSRGLVSVSFDSRARLTMIEQKGDKPGVRWWLLVLLIVLLYVVAYYYMKAKGIIP

SEQ ID NO: 108680 - protein, 380 aa, Arabidopsis thaliana
  peptide (1)..(380): Ceres Seq. ID no. 13668045
  misc_feature: Pfam Name: WD40 Pfam Description: WD domain, G-beta repeat
  misc_feature (1)..(380): Homolog of NCBI NO: 11358859 NR Description: St12p protein [imported] - Arabidopsis thaliana
  misc_feature (1)..(380): Homolog of NCBI NO: 15226281 NR Description: SEC12p protein / St12p protein [Arabidopsis
  misc_feature (1)..(354): Homolog of NCBI NO: 322598 NR Description: St12p protein - Arabidopsis thaliana
  misc_feature (1)..(379): Homolog of NCBI NO: 18423177 NR Description: St12p protein [Arabidopsis thaliana] St12p protein [Arabidopsis thaliana] >gi|9758764|dbj|BAB09140.1|
  misc_feature (1)..(261): Homolog of NCBI NO: 17473926 NR Description: putative protein transport protein SEC12p
  misc_feature (1)..(350): Homolog of NCBI NO: 8777388 NR Description: protein transport protein SEC12p-like
  misc_feature (56)..(371): Homolog of NCBI NO: 34394605 NR Description: transducin / WD-40 repeat protein-like [Oryza
  misc_feature (70)..(374): Homolog of NCBI NO: 34897162 NR Description: putative membrane protein [Oryza sativa (japonica group)] >gi|28209528|gb|AAO37546.1| putative membrane protein
  misc_feature (56)..(371): Homolog of NCBI NO: 18409509 NR Description: transducin / WD-40 repeat protein family
  misc_feature (146)..(371): Homolog of NCBI NO: 26450470 NR Description: unknown protein [Arabidopsis thaliana]
MQTYGVPIYAADWIPEVDVRSKIIMDPEKSEDDDESSSSSSSSRSCIVLSGGGGEGRSGISNVILICRVDLNTNSLSEQPLGRLVVGSDLPYRMAVHPREGGLICALPNSCKLFHWEDIMSREDNQAGESEEVIKELRDVGQQLALAFNPEGSVLAAGAEDGTLRVFKWPSMNTLLNESQAHSSVKCLTFSESGQFLVSLGGPVCRVWDVNASAAVASLSKEKDEMFASCRFSVDSAGNEVLYIAANTERGGSIITCDTKLWKRKWSKPIKKNSISAFNVSADGKLLAIGTLEGDVLILESTRMQTIQIVKKAHLGLVTALTFSPDSRGLVSVSFDSRARLTMIEQKGDKPGVRWWLLVLLIVLLYVVAYYYMKAKGIIP

SEQ ID NO: 108681 - DNA, 1197 bp, Arabidopsis thaliana
  misc_feature (1)..(1197): Ceres Seq. ID no. 13668054
  misc_feature: MA Experiment ID: 108573 Result: Up-regulated in Transcription
  misc_feature: MA Experiment 108573 PARAMETER Experiment Name: At_Drought_cDNA_P Parameter: Timepoint (hr) Value: 6
  misc_feature: MA Experiment 108573 PARAMETER Experiment Name: At_Drought_cDNA_P Parameter: Tissue Value: Aerial
  misc_feature: MA Experiment 108573 PARAMETER Experiment Name: At_Drought_cDNA_P Parameter: Treatment Value: Drought vs. No Drought
  misc_feature: MA Experiment ID: 108577 Result: Down-regulated in Transcription
  misc_feature: MA Experiment 108577 PARAMETER Experiment Name: At_42deg_Heat_cDNA_P Parameter: Temperature (deg C) Value: 42 vs. 22
  misc_feature: MA Experiment 108577 PARAMETER Experiment Name: At_42deg_Heat_cDNA_P Parameter: Timepoint (hr) Value: 6
  misc_feature: MA Experiment 108577 PARAMETER Experiment Name: At_42deg_Heat_cDNA_P Parameter: Tissue Value: Aerial
  misc_feature: MA Experiment ID: 108595 Result: Down-regulated in Transcription
  misc_feature: MA Experiment 108595 PARAMETER Experiment Name: At_Ler-pi_Ovule_cDNA_P Parameter: Plant Line Value: null
  misc_feature: MA Experiment ID: 20000224 Result: Down-regulated in Transcription
  misc_feature: MA Experiment ID: 20001248 Result: Up-regulated in Transcription
  misc_feature: MA Experiment 20001248 PARAMETER Experiment Name: At_Far-red-induction_P Parameter: Age (day) Value: 7
  misc_feature: MA Experiment 20001248 PARAMETER Experiment Name: At_Far-red-induction_P Parameter: Light Value: Far-red vs. White
  misc_feature: MA Experiment 20001248 PARAMETER Experiment Name: At_Far-red-induction_P Parameter: Organism Value: A. thaliana
  misc_feature: MA Experiment 20001248 PARAMETER Experiment Name: At_Far-red-induction_P Parameter: Plant Line Value: Columbia
  misc_feature: MA Experiment 20001248 PARAMETER Experiment Name: At_Far-red-induction_P Parameter: Timepoint (hr) Value: 4
  misc_feature: MA Experiment 20001248 PARAMETER Experiment Name: At_Far-red-induction_P Parameter: Tissue Value: Whole Plant
cgggcaggtcgacgtgttcgatttacaacgattcggtggctattggttgtaagatttagaattaaaggttaaaggagacgacgacgagagatgccgttaaacggagatctcgaccgtcagatcgaacagctaatggagtgtaagccgttaggtgaagcagacgtgaagatcctttgcgatcaagctaaagcgattcttgttgaggaatataatgttcaaccggttaagtgtccggttacggtatgcggcgatatccatggccagttttatgacctaattgagctatttcgtattggtggtaatgctcctgatactaattacctcttcatgggagattatgtagatcgtggctactattctgtagaaacagtctctctattggtggcattaaaggtgcgttacagggacagacttacgatcctgcgagggaatcatgagagccgtcagattacacaagtctatggtttttatgacgaatgcttgaggaaatacggaaatgcaaatgtgtggaagtattttacggaccttttcgattatctccctcttacagcactcatagagagtcaggttttctgtttgcatggaggcctttcaccttctctggatactcttgacaatatccgaagcttggatcgaatacaagaggttccacacgaaggaccaatgtgcgatctactctggtctgatcccgacgatcgttgtggatggggaatatctcctcgtggtgctggttacacgtttggacaggacattgctactcagtttaatcataacaatggactgagtctgatctcaagagcgcatcaacttgtaatggaaggctataattggtgtcaggaaaagaacgtagtgacagtgtttagtgcaccgaactactgttacagatgtggaaacatggccgcaattcttgagattggagaaaagatggaacagaacttccttcaattcgatccagcacctagacaagtcgaacccgataccacgcgcaagacccctgattattttttgtgatttcattttttttcttccaaagtttgtttgttgctgtatcattgtagatgtgtctgttttattttgttttttcgagtctctagatggaatgtgataccaaagacgaaaaacccatcatttttttgttgatgttgatactgaaacaggtttgtagaagcctcttcttattatagaaaatgtcttttg

SEQ ID NO: 108682 - protein, 306 aa, Arabidopsis thaliana; identical to SEQ ID NO: 23564
  peptide (1)..(306): Ceres Seq. ID no. 13668055
  misc_feature (47)..(242): Pfam Name: Calcineurin-like phosphoesterase Pfam Description: Calcineurin-like phosphoesterase
  misc_feature (1)..(306): Homolog of NCBI NO: 15218928 NR Description: serine/threonine protein phosphatase PP2A thaliana] >gi|585629|sp|Q07099|P2A2_ARATH Serine/threonine
  misc_feature (1)..(306): Homolog of NCBI NO: 21593150 NR Description: serine/threonine protein phosphatase type 2A,
  misc_feature (1)..(306): Homolog of NCBI NO: 15218524 NR Description: serine/threonine protein phosphatase, PP2A thaliana] >gi|585628|sp|Q07098|P2A1_ARATH Serine/threonine
  misc_feature (1)..(306): Homolog of NCBI NO: 7248359 NR Description: type 2A protein phosphatase-1 [Vicia faba]
  misc_feature (2)..(306): Homolog of NCBI NO: 15222511 NR Description: serine/threonine protein phosphatase type 2A [Arabidopsis thaliana] >gi|12643532|sp|O04951|P2A5_ARATH
  misc_feature (1)..(306): Homolog of NCBI NO: 10638985 NR Description: protein phosphatase 2A [Fagus sylvatica]
  misc_feature (1)..(306): Homolog of NCBI NO: 11133825 NR Description: Serine/threonine protein phosphatase PP2A subunit >gi|3986750|gb|AAD09953.1| serine/threonine protein
  misc_feature (1)..(306): Homolog of NCBI NO: 7248361 NR Description: type 2A protein phosphatase-2 [Vicia faba]
  misc_feature (1)..(306): Homolog of NCBI NO: 11134222 NR Description: Serine/threonine protein phosphatase PP2A-3 subunit >gi|5231210|gb|AAD41126.1|AF159061_1 serine/threonine
  misc_feature (1)..(306): Homolog of NCBI NO: 11134285 NR Description: Serine/threonine protein phosphatase PP2A-1 subunit >gi|3859548|gb|AAC72838.1| protein phosphatase 2A

SEQ ID NO: 108683 - protein, 292 aa, Arabidopsis thaliana; identical to SEQ ID NO: 23565
  peptide (1)..(292): Ceres Seq. ID no. 13668056
  misc_feature (33)..(228): Pfam Name: Calcineurin-like phosphoesterase Pfam Description: Calcineurin-like phosphoesterase
  misc_feature (1)..(292): Homolog of NCBI NO: 15218928 NR Description: serine/threonine protein phosphatase PP2A thaliana] >gi|585629|sp|Q07099|P2A2_ARATH Serine/threonine
  misc_feature (1)..(292): Homolog of NCBI NO: 21593150 NR Description: serine/threonine protein phosphatase type 2A,
  misc_feature (1)..(292): Homolog of NCBI NO: 15218524 NR Description: serine/threonine protein phosphatase, PP2A thaliana] >gi|585628|sp|Q07098|P2A1_ARATH Serine/threonine
  misc_feature (1)..(292): Homolog of NCBI NO: 7248359 NR Description: type 2A protein phosphatase-1 [Vicia faba]
  misc_feature (1)..(292): Homolog of NCBI NO: 15222511 NR Description: serine/threonine protein phosphatase type 2A [Arabidopsis thaliana] >gi|12643532|sp|O04951|P2A5_ARATH
  misc_feature (1)..(292): Homolog of NCBI NO: 10638985 NR Description: protein phosphatase 2A [Fagus sylvatica]
  misc_feature (1)..(292): Homolog of NCBI NO: 11133825 NR Description: Serine/threonine protein phosphatase PP2A subunit >gi|3986750|gb|AAD09953.1| serine/threonine protein
  misc_feature (1)..(292): Homolog of NCBI NO: 7248361 NR Description: type 2A protein phosphatase-2 [Vicia faba]
  misc_feature (1)..(292): Homolog of NCBI NO: 11134222 NR Description: Serine/threonine protein phosphatase PP2A-3 subunit >gi|5231210|gb|AAD41126.1|AF159061_1 serine/threonine
  misc_feature (1)..(292): Homolog of NCBI NO: 11134285 NR Description: Serine/threonine protein phosphatase PP2A-1 subunit >gi|3859548|gb|AAC72838.1| protein phosphatase 2A

SEQ ID NO: 108684 - protein, 227 aa, Arabidopsis thaliana; identical to SEQ ID NO: 23566
  peptide (1)..(227): Ceres Seq. ID no. 13668057
  misc_feature (1)..(163): Pfam Name: Calcineurin-like phosphoesterase Pfam Description: Calcineurin-like phosphoesterase
  misc_feature (1)..(227): Homolog of NCBI NO: 15218928 NR Description: serine/threonine protein phosphatase PP2A thaliana] >gi|585629|sp|Q07099|P2A2_ARATH Serine/threonine
  misc_feature (1)..(227): Homolog of NCBI NO: 21593150 NR Description: serine/threonine protein phosphatase type 2A,
  misc_feature (1)..(227): Homolog of NCBI NO: 15218524 NR Description: serine/threonine protein phosphatase, PP2A thaliana] >gi|585628|sp|Q07098|P2A1_ARATH Serine/threonine
  misc_feature (1)..(227): Homolog of NCBI NO: 7248359 NR Description: type 2A protein phosphatase-1 [Vicia faba]
  misc_feature (1)..(227): Homolog of NCBI NO: 15222511 NR Description: serine/threonine protein phosphatase type 2A [Arabidopsis thaliana] >gi|12643532|sp|O04951|P2A5_ARATH
  misc_feature (1)..(227): Homolog of NCBI NO: 10638985 NR Description: protein phosphatase 2A [Fagus sylvatica]
  misc_feature (1)..(227): Homolog of NCBI NO: 11133825 NR Description: Serine/threonine protein phosphatase PP2A subunit >gi|3986750|gb|AAD09953.1| serine/threonine protein
  misc_feature (1)..(227): Homolog of NCBI NO: 7248361 NR Description: type 2A protein phosphatase-2 [Vicia faba]
  misc_feature (1)..(227): Homolog of NCBI NO: 11134222 NR Description: Serine/threonine protein phosphatase PP2A-3 subunit >gi|5231210|gb|AAD41126.1|AF159061_1 serine/threonine
  misc_feature (1)..(227): Homolog of NCBI NO: 11134285 NR Description: Serine/threonine protein phosphatase PP2A-1 subunit >gi|3859548|gb|AAC72838.1| protein phosphatase 2A

SEQ ID NO: 108685 - DNA, 1448 bp, Arabidopsis thaliana
  misc_feature (1)..(1448): Ceres Seq. ID no. 13668058
  misc_feature: MA Experiment ID: 20000184 Result: Down-regulated in Transcription
  misc_feature: MA Experiment 20000184 PARAMETER Experiment Name: At_Shoots__P Parameter: Age (day) Value: 7
  misc_feature: MA Experiment 20000184 PARAMETER Experiment Name: At_Shoots__P Parameter: Tissue Value: Shoots vs. Whole Plant
  misc_feature: MA Experiment ID: 20000227 Result: Down-regulated in Transcription
  misc_feature: MA Experiment 20000227 PARAMETER Experiment Name: At_Root-Tips-vs-Tops_P Parameter: Tissue Value: Root Tips vs. Root Tops
  misc_feature: MA Experiment ID: 20000234 Result: Down-regulated in Transcription
  misc_feature: MA Experiment 20000234 PARAMETER Experiment Name: At_Siliques_P Parameter: Age (day) Value: 21
  misc_feature: MA Experiment 20000234 PARAMETER Experiment Name: At_Siliques_P Parameter: Organism Value: A. thaliana
  misc_feature: MA Experiment 20000234 PARAMETER Experiment Name: At_Siliques_P Parameter: Plant Line Value: WS
  misc_feature: MA Experiment 20000234 PARAMETER Experiment Name: At_Siliques_P Parameter: Tissue Value: Less Than 5mm Siliques vs. Whole Plant
  misc_feature: MA Experiment ID: 20000265 Result: Down-regulated in Transcription
  misc_feature: MA Experiment 20000265 PARAMETER Experiment Name: At_Open_Flower_P Parameter: Age (day) Value: 21
  misc_feature: MA Experiment 20000265 PARAMETER Experiment Name: At_Open_Flower_P Parameter: Plant Line Value: WS
  misc_feature: MA Experiment 20000265 PARAMETER Experiment Name: At_Open_Flower_P Parameter: Tissue Value: Closed Flower vs. Whole Plant
  misc_feature: MA Experiment ID: 20000286 Result: Down-regulated in Transcription
  misc_feature: MA Experiment 20000286 PARAMETER Experiment Name: At_Open_Flower_P Parameter: Age (day) Value: 21
  misc_feature: MA Experiment 20000286 PARAMETER Experiment Name: At_Open_Flower_P Parameter: Plant Line Value: WS
  misc_feature: MA Experiment 20000286 PARAMETER Experiment Name: At_Open_Flower_P Parameter: Tissue Value: Half Open vs. Whole Plant
  misc_feature: MA Experiment ID: 20000437 Result: Up-regulated in Transcription
  misc_feature: MA Experiment 20000437 PARAMETER Experiment Name: At_Drought_P Parameter: Age (day) Value: 8
  misc_feature: MA Experiment 20000437 PARAMETER Experiment Name: At_Drought_P Parameter: Organism Value: A. thaliana
  misc_feature: MA Experiment 20000437 PARAMETER Experiment Name: At_Drought_P Parameter: Plant Line Value: WS
  misc_feature: MA Experiment 20000437 PARAMETER Experiment Name: At_Drought_P Parameter: Timepoint (hr) Value: 24
  misc_feature: MA Experiment 20000437 PARAMETER Experiment Name: At_Drought_P Parameter: Tissue Value: Whole Plant
  misc_feature: MA Experiment 20000437 PARAMETER Experiment Name: At_Drought_P Parameter: Treatment Value: Drought vs. No Drought
  misc_feature: MA Experiment ID: 20000438 Result: Down-regulated in Transcription
  misc_feature: MA Experiment 20000438 PARAMETER Experiment Name: At_Shoots__P Parameter: Age (day) Value: 14
  misc_feature: MA Experiment 20000438 PARAMETER Experiment Name: At_Shoots__P Parameter: Tissue Value: Shoots vs. Whole Plant
  misc_feature: MA Experiment ID: 20000439 Result: Down-regulated in Transcription
  misc_feature: MA Experiment 20000439 PARAMETER Experiment Name: At_Roots__P Parameter: Age (day) Value: 14 vs. 21
  misc_feature: MA Experiment 20000439 PARAMETER Experiment Name: At_Roots__P Parameter: Organism Value: A. thaliana
  misc_feature: MA Experiment 20000439 PARAMETER Experiment Name: At_Roots__P Parameter: Tissue Value: Roots vs. Whole Plant
  misc_feature: MA Experiment ID: 20001248 Result: Up-regulated in Transcription
  misc_feature: MA Experiment 20001248 PARAMETER Experiment Name: At_Far-red-induction_P Parameter: Age (day) Value: 7
  misc_feature: MA Experiment 20001248 PARAMETER Experiment Name: At_Far-red-induction_P Parameter: Light Value: Far-red vs. White
  misc_feature: MA Experiment 20001248 PARAMETER Experiment Name: At_Far-red-induction_P Parameter: Organism Value: A. thaliana
  misc_feature: MA Experiment 20001248 PARAMETER Experiment Name: At_Far-red-induction_P Parameter: Plant Line Value: Columbia
  misc_feature: MA Experiment 20001248 PARAMETER Experiment Name: At_Far-red-induction_P Parameter: Timepoint (hr) Value: 4
  misc_feature: MA Experiment 20001248 PARAMETER Experiment Name: At_Far-red-induction_P Parameter: Tissue Value: Whole Plant
  misc_feature: MA Experiment ID: 20001558 Result: Down-regulated in Transcription
  misc_feature: MA Experiment 20001558 PARAMETER Experiment Name: At_Drought_Soil_Dry_P Parameter: Age (day) Value: 27
  misc_feature: MA Experiment 20001558 PARAMETER Experiment Name: At_Drought_Soil_Dry_P Parameter: Organism Value: A. thaliana
  misc_feature: MA Experiment 20001558 PARAMETER Experiment Name: At_Drought_Soil_Dry_P Parameter: Plant Line Value: WS
  misc_feature: MA Experiment 20001558 PARAMETER Experiment Name: At_Drought_Soil_Dry_P Parameter: Post Timepoint (hr) Value: 6
  misc_feature: MA Experiment 20001558 PARAMETER Experiment Name: At_Drought_Soil_Dry_P Parameter: Post-Treatment Value: Re-Water vs. No Drought
  misc_feature: MA Experiment 20001558 PARAMETER Experiment Name: At_Drought_Soil_Dry_P Parameter: Timepoint (day) Value: 13
  misc_feature: MA Experiment 20001558 PARAMETER Experiment Name: At_Drought_Soil_Dry_P Parameter: Treatment Value: Drought vs. No Drought
ggaattccctttttcccccaaattcatatccttccttagatatttttctccttcttcttcttctagattccagctactccagaagattcttcgacttaatctgatgtgattaggaagagcaatagaggaagagaatcagaaaaaatggatccggcgactaattcaccgattatgccgattgatttaccgattatgcacgacagtgatcgttacgacttcgttaaagatattggctctggtaatttcggcgttgctcgtctcatgaccgatagagtcaccaaggagcttgttgctgttaaatacatcgagagaggagaaaagattgatgaaaatgttcagagggagattatcaatcatagatcattgagacatcctaatattgttaggtttaaagaggtgattttgacgccttcccatttggctattgttatggaatatgctgctggtggagaactttatgagcggatttgtaatgccggacggtttagtgaagatgaggctcggttcttctttcagcagcttatatctggagttagctattgtcatgcaatgcaaatatgccatcgggatctgaagctggaaaatacattgttagatggaagtccggcacctcgtttgaaaatatgtgattttggttattccaagtcttctgttcttcattcccaaccaaagtcaactgttggtactcctgcatacattgcaccagagattcttcttcgacaggaatatgatggcaagcttgcagatgtatggtcttgcggtgtaacattatatgtaatgttggttggagcttatccattcgaggatccacaggagccacgagattatcgaaagacaatacaaagaatccttagtgtcacatactcgatcccagaggacttacacctctcaccagaatgtcgccatctaatatcgaggatcttcgtggctgatccggcaacaagaatcactattccggagatcacatccgataaatggttcttgaagaatctaccaggtgatttgatggatgagaaccgaatgggaagtcagtttcaagagcctgagcagccaatgcagagccttgacacgattatgcagataatatcggaggctacgattccgactgttcgtaatcgttgcctcgatgatttcatggcggataatcttgatctagacgatgacatggatgactttgattccgaatctgagattgatgttgacagtagtggagagatagtttatgctctctgagattcctgaggacaaagtctgttttgtccgtactgttgagacacaccactggagttttgtcttagctccacgcactccatcgttcatttttggatcgtttgttgttttttactctacaagctttggattcacatacatatatatgtattgtaatgtaatatgtaatatattctatgtatttctctttgtttaataactattggcacattttatac

SEQ ID NO: 108686 - protein, 362 aa, Arabidopsis thaliana; identical to SEQ ID NO: 103144
  peptide (1)..(362): Ceres Seq. ID no. 13668059
  misc_feature (23)..(279): Pfam Name: Protein kinase domain Pfam Description: Protein kinase domain
  misc_feature (1)..(362): Homolog of NCBI NO: 15229772 NR Description: protein kinase, putative [Arabidopsis thaliana]
  misc_feature (1)..(362): Homolog of NCBI NO: 21593534 NR Description: protein kinase SPK-2 [Arabidopsis thaliana]
  misc_feature (11)..(362): Homolog of NCBI NO: 15240124 NR Description: serine/threonine protein kinase, putative
  misc_feature (14)..(362): Homolog of NCBI NO: 20260398 NR Description: putative protein [Arabidopsis thaliana]
  misc_feature (12)..(362): Homolog of NCBI NO: 31415944 NR Description: putative serine-threonine protein kinase [Oryza
  misc_feature (1)..(362): Homolog of NCBI NO: 18418337 NR Description: protein kinase, putative [Arabidopsis thaliana]
  misc_feature (1)..(362): Homolog of NCBI NO: 7446439 NR Description: probable serine/threonine-specific protein kinase
  misc_feature (10)..(362): Homolog of NCBI NO: 6739629 NR Description: abscisic acid-activated protein kinase [Vicia
  misc_feature (21)..(362): Homolog of NCBI NO: 29164823 NR Description: abcisic acid-inducible protein kinanase [Oryza
  misc_feature (21)..(362): Homolog of NCBI NO: 34906840 NR Description: putative protein kinase HvPKABA1(Abcisic

SEQ ID NO: 108687 - protein, 353 aa, Arabidopsis thaliana; identical to SEQ ID NO: 103145
  peptide (1)..(353): Ceres Seq. ID no. 13668060
  misc_feature (14)..(270): Pfam Name: Protein kinase domain Pfam Description: Protein kinase domain
  misc_feature (1)..(353): Homolog of NCBI NO: 15229772 NR Description: protein kinase, putative [Arabidopsis thaliana]
  misc_feature (1)..(353): Homolog of NCBI NO: 21593534 NR Description: protein kinase SPK-2 [Arabidopsis thaliana]
  misc_feature (2)..(353): Homolog of NCBI NO: 15240124 NR Description: serine/threonine protein kinase, putative
  misc_feature (5)..(353): Homolog of NCBI NO: 20260398 NR Description: putative protein [Arabidopsis thaliana]
  misc_feature (3)..(353): Homolog of NCBI NO: 31415944 NR Description: putative serine-threonine protein kinase [Oryza
  misc_feature (1)..(353): Homolog of NCBI NO: 18418337 NR Description: protein kinase, putative [Arabidopsis thaliana]
  misc_feature (1)..(353): Homolog of NCBI NO: 7446439 NR Description: probable serine/threonine-specific protein kinase
  misc_feature (1)..(353): Homolog of NCBI NO: 6739629 NR Description: abscisic acid-activated protein kinase [Vicia
  misc_feature (12)..(353): Homolog of NCBI NO: 29164823 NR Description: abcisic acid-inducible protein kinanase [Oryza
  misc_feature (12)..(353): Homolog of NCBI NO: 34906840 NR Description: putative protein kinase HvPKABA1(Abcisic

SEQ ID NO: 108688 - protein, 346 aa, Arabidopsis thaliana; identical to SEQ ID NO: 103146
  peptide (1)..(346): Ceres Seq. ID no. 13668061
  misc_feature (7)..(263): Pfam Name: Protein kinase domain Pfam Description: Protein kinase domain
  misc_feature (1)..(346): Homolog of NCBI NO: 15229772 NR Description: protein kinase, putative [Arabidopsis thaliana]
  misc_feature (1)..(346): Homolog of NCBI NO: 21593534 NR Description: protein kinase SPK-2 [Arabidopsis thaliana]
  misc_feature (1)..(346): Homolog of NCBI NO: 15240124 NR Description: serine/threonine protein kinase, putative
  misc_feature (1)..(346): Homolog of NCBI NO: 20260398 NR Description: putative protein [Arabidopsis thaliana]
  misc_feature (1)..(346): Homolog of NCBI NO: 31415944 NR Description: putative serine-threonine protein kinase [Oryza
  misc_feature (1)..(346): Homolog of NCBI NO: 18418337 NR Description: protein kinase, putative [Arabidopsis thaliana]
  misc_feature (1)..(346): Homolog of NCBI NO: 7446439 NR Description: probable serine/threonine-specific protein kinase
  misc_feature (1)..(346): Homolog of NCBI NO: 6739629 NR Description: abscisic acid-activated protein kinase [Vicia
  misc_feature (5)..(346): Homolog of NCBI NO: 29164823 NR Description: abcisic acid-inducible protein kinanase [Oryza
  misc_feature (5)..(346): Homolog of NCBI NO: 34906840 NR Description: putative protein kinase HvPKABA1(Abcisic

SEQ ID NO: 108689 - DNA, 674 bp, Arabidopsis thaliana
  misc_feature (1)..(674): Ceres Seq. ID no. 13668062
  misc_feature: MA Experiment ID: 20000169 Result: Down-regulated in Transcription
  misc_feature: MA Experiment 20000169 PARAMETER Experiment Name: At_100uM_ABA_P Parameter: Age (day) Value: 14
  misc_feature: MA Experiment 20000169 PARAMETER Experiment Name: At_100uM_ABA_P Parameter: Organism Value: A. thaliana
  misc_feature: MA Experiment 20000169 PARAMETER Experiment Name: At_100uM_ABA_P Parameter: Plant Line Value: WS
  misc_feature: MA Experiment 20000169 PARAMETER Experiment Name: At_100uM_ABA_P Parameter: Timepoint (hr) Value: 6
  misc_feature: MA Experiment 20000169 PARAMETER Experiment Name: At_100uM_ABA_P Parameter: Tissue Value: Aerial
  misc_feature: MA Experiment 20000169 PARAMETER Experiment Name: At_100uM_ABA_P Parameter: Treatment Value: 100uM ABA vs. No Treatment
  misc_feature: MA Experiment ID: 20000182 Result: Up-regulated in Transcription
  misc_feature: MA Experiment 20000182 PARAMETER Experiment Name: At_2mM_SA_P Parameter: Age (day) Value: 14
  misc_feature: MA Experiment 20000182 PARAMETER Experiment Name: At_2mM_SA_P Parameter: Organism Value: A. thaliana
  misc_feature: MA Experiment 20000182 PARAMETER Experiment Name: At_2mM_SA_P Parameter: Plant Line Value: WS
  misc_feature: MA Experiment 20000182 PARAMETER Experiment Name: At_2mM_SA_P Parameter: Timepoint (hr) Value: 6
  misc_feature: MA Experiment 20000182 PARAMETER Experiment Name: At_2mM_SA_P Parameter: Tissue Value: Aerial
  misc_feature: MA Experiment 20000182 PARAMETER Experiment Name: At_2mM_SA_P Parameter: Treatment Value: 2mM SA vs. No Treatment
  misc_feature: MA Experiment ID: 20000264 Result: Down-regulated in Transcription
  misc_feature: MA Experiment 20000264 PARAMETER Experiment Name: At_Open_Flower_P Parameter: Age (day) Value: 21
  misc_feature: MA Experiment 20000264 PARAMETER Experiment Name: At_Open_Flower_P Parameter: Plant Line Value: WS
  misc_feature: MA Experiment 20000264 PARAMETER Experiment Name: At_Open_Flower_P Parameter: Tissue Value: Open Flower vs. Whole Plant
  misc_feature: MA Experiment ID: 20000265 Result: Down-regulated in Transcription
  misc_feature: MA Experiment 20000265 PARAMETER Experiment Name: At_Open_Flower_P Parameter: Age (day) Value: 21
  misc_feature: MA Experiment 20000265 PARAMETER Experiment Name: At_Open_Flower_P Parameter: Plant Line Value: WS
  misc_feature: MA Experiment 20000265 PARAMETER Experiment Name: At_Open_Flower_P Parameter: Tissue Value: Closed Flower vs. Whole Plant
  misc_feature: MA Experiment ID: 20000267 Result: Down-regulated in Transcription
  misc_feature: MA Experiment 20000267 PARAMETER Experiment Name: At_Drought_P Parameter: Age (day) Value: 7
  misc_feature: MA Experiment 20000267 PARAMETER Experiment Name: At_Drought_P Parameter: Organism Value: A. thaliana
  misc_feature: MA Experiment 20000267 PARAMETER Experiment Name: At_Drought_P Parameter: Plant Line Value: WS
  misc_feature: MA Experiment 20000267 PARAMETER Experiment Name: At_Drought_P Parameter: Timepoint (hr) Value: 6
  misc_feature: MA Experiment 20000267 PARAMETER Experiment Name: At_Drought_P Parameter: Tissue Value: Whole Plant
  misc_feature: MA Experiment 20000267 PARAMETER Experiment Name: At_Drought_P Parameter: Treatment Value: Drought vs. No Drought
  misc_feature: MA Experiment ID: 20000286 Result: Down-regulated in Transcription
  misc_feature: MA Experiment 20000286 PARAMETER Experiment Name: At_Open_Flower_P Parameter: Age (day) Value: 21
  misc_feature: MA Experiment 20000286 PARAMETER Experiment Name: At_Open_Flower_P Parameter: Plant Line Value: WS
  misc_feature: MA Experiment 20000286 PARAMETER Experiment Name: At_Open_Flower_P Parameter: Tissue Value: Half Open vs. Whole Plant
  misc_feature: MA Experiment ID: 20000436 Result: Down-regulated in Transcription
  misc_feature: MA Experiment 20000436 PARAMETER Experiment Name: At_Drought_P Parameter: Age (day) Value: 7
  misc_feature: MA Experiment 20000436 PARAMETER Experiment Name: At_Drought_P Parameter: Organism Value: A. thaliana
  misc_feature: MA Experiment 20000436 PARAMETER Experiment Name: At_Drought_P Parameter: Plant Line Value: WS
  misc_feature: MA Experiment 20000436 PARAMETER Experiment Name: At_Drought_P Parameter: Timepoint (hr) Value: 12
  misc_feature: MA Experiment 20000436 PARAMETER Experiment Name: At_Drought_P Parameter: Tissue Value: Whole Plant
  misc_feature: MA Experiment 20000436 PARAMETER Experiment Name: At_Drought_P Parameter: Treatment Value: Drought vs. No Drought
  misc_feature: MA Experiment ID: 20000437 Result: Down-regulated in Transcription
  misc_feature: MA Experiment 20000437 PARAMETER Experiment Name: At_Drought_P Parameter: Age (day) Value: 8
  misc_feature: MA Experiment 20000437 PARAMETER Experiment Name: At_Drought_P Parameter: Organism Value: A. thaliana
  misc_feature: MA Experiment 20000437 PARAMETER Experiment Name: At_Drought_P Parameter: Plant Line Value: WS
  misc_feature: MA Experiment 20000437 PARAMETER Experiment Name: At_Drought_P Parameter: Timepoint (hr) Value: 24
  misc_feature: MA Experiment 20000437 PARAMETER Experiment Name: At_Drought_P Parameter: Tissue Value: Whole Plant
  misc_feature: MA Experiment 20000437 PARAMETER Experiment Name: At_Drought_P Parameter: Treatment Value: Drought vs. No Drought
  misc_feature: MA Experiment ID: 20000445 Result: Down-regulated in Transcription
  misc_feature: MA Experiment 20000445 PARAMETER Experiment Name: At_100uM_NAA__P Parameter: Age (day) Value: 14
  misc_feature: MA Experiment 20000445 PARAMETER Experiment Name: At_100uM_NAA__P Parameter: Organism Value: A. thaliana
  misc_feature: MA Experiment 20000445 PARAMETER Experiment Name: At_100uM_NAA__P Parameter: Plant Line Value: WS
  misc_feature: MA Experiment 20000445 PARAMETER Experiment Name: At_100uM_NAA__P Parameter: Timepoint (hr) Value: 6
  misc_feature: MA Experiment 20000445 PARAMETER Experiment Name: At_100uM_NAA__P Parameter: Tissue Value: Aerial
  misc_feature: MA Experiment 20000445 PARAMETER Experiment Name: At_100uM_NAA__P Parameter: Treatment Value: 100uM NAA vs. No Treatment
  misc_feature: MA Experiment ID: 20000451 Result: Up-regulated in Transcription
  misc_feature: MA Experiment 20000451 PARAMETER Experiment Name: At_CS6879_Shoots-Roots_P Parameter: Age (day) Value: 14
  misc_feature: MA Experiment 20000451 PARAMETER Experiment Name: At_CS6879_Shoots-Roots_P Parameter: Organism Value: A. thaliana
  misc_feature: MA Experiment 20000451 PARAMETER Experiment Name: At_CS6879_Shoots-Roots_P Parameter: Plant Line Value: CS6879 vs. WS
  misc_feature: MA Experiment 20000451 PARAMETER Experiment Name: At_CS6879_Shoots-Roots_P Parameter: Tissue Value: Roots
  misc_feature: MA Experiment ID: 20000496 Result: Up-regulated in Transcription
  misc_feature: MA Experiment 20000496 PARAMETER Experiment Name: At_Guard_Cells_P Parameter: Harvest Date Value: 7/19/2002
  misc_feature: MA Experiment 20000496 PARAMETER Experiment Name: At_Guard_Cells_P Parameter: Organism Value: Canola
  misc_feature: MA Experiment 20000496 PARAMETER Experiment Name: At_Guard_Cells_P Parameter: Tissue Value: Guard Cells vs. Leaves
  misc_feature: MA Experiment ID: 20000794 Result: Down-regulated in Transcription
  misc_feature: MA Experiment 20000794 PARAMETER Experiment Name: At_Petals_P Parameter: Age (day) Value: 23-25 days
  misc_feature: MA Experiment 20000794 PARAMETER Experiment Name: At_Petals_P Parameter: Plant Line Value: WS
  misc_feature: MA Experiment 20000794 PARAMETER Experiment Name: At_Petals_P Parameter: Tissue Value: Petals vs. Whole plant
  misc_feature: MA Experiment ID: 20001248 Result: Down-regulated in Transcription
  misc_feature: MA Experiment 20001248 PARAMETER Experiment Name: At_Far-red-induction_P Parameter: Age (day) Value: 7
  misc_feature: MA Experiment 20001248 PARAMETER Experiment Name: At_Far-red-induction_P Parameter: Light Value: Far-red vs. White
  misc_feature: MA Experiment 20001248 PARAMETER Experiment Name: At_Far-red-induction_P Parameter: Organism Value: A. thaliana
  misc_feature: MA Experiment 20001248 PARAMETER Experiment Name: At_Far-red-induction_P Parameter: Plant Line Value: Columbia
  misc_feature: MA Experiment 20001248 PARAMETER Experiment Name: At_Far-red-induction_P Parameter: Timepoint (hr) Value: 4
  misc_feature: MA Experiment 20001248 PARAMETER Experiment Name: At_Far-red-induction_P Parameter: Tissue Value: Whole Plant
  misc_feature: MA Experiment ID: 20001450 Result: Down-regulated in Transcription
  misc_feature: MA Experiment 20001450 PARAMETER Experiment Name: At_Far-red-induction_P Parameter: Age (day) Value: 7
  misc_feature: MA Experiment 20001450 PARAMETER Experiment Name: At_Far-red-induction_P Parameter: Light Value: Far-red vs. White
  misc_feature: MA Experiment 20001450 PARAMETER Experiment Name: At_Far-red-induction_P Parameter: Organism Value: A. thaliana
  misc_feature: MA Experiment 20001450 PARAMETER Experiment Name: At_Far-red-induction_P Parameter: Plant Line Value: Columbia
  misc_feature: MA Experiment 20001450 PARAMETER Experiment Name: At_Far-red-induction_P Parameter: Timepoint (hr) Value: 8
  misc_feature: MA Experiment 20001450 PARAMETER Experiment Name: At_Far-red-induction_P Parameter: Tissue Value: Whole Plant
  misc_feature: MA Experiment ID: 20001451 Result: Down-regulated in Transcription
  misc_feature: MA Experiment 20001451 PARAMETER Experiment Name: At_Far-red-induction_P Parameter: Age (day) Value: 7
  misc_feature: MA Experiment 20001451 PARAMETER Experiment Name: At_Far-red-induction_P Parameter: Light Value: Far-red vs. White
  misc_feature: MA Experiment 20001451 PARAMETER Experiment Name: At_Far-red-induction_P Parameter: Organism Value: A. thaliana
  misc_feature: MA Experiment 20001451 PARAMETER Experiment Name: At_Far-red-induction_P Parameter: Plant Line Value: Columbia
  misc_feature: MA Experiment 20001451 PARAMETER Experiment Name: At_Far-red-induction_P Parameter: Timepoint (hr) Value: 24
  misc_feature: MA Experiment 20001451 PARAMETER Experiment Name: At_Far-red-induction_P Parameter: Tissue Value: Whole Plant
  misc_feature: MA Experiment ID: 20001554 Result: Down-regulated in Transcription
  misc_feature: MA Experiment 20001554 PARAMETER Experiment Name: At_Drought_Soil_Dry_P Parameter: Age (day) Value: 21
  misc_feature: MA Experiment 20001554 PARAMETER Experiment Name: At_Drought_Soil_Dry_P Parameter: Organism Value: A. thaliana
  misc_feature: MA Experiment 20001554 PARAMETER Experiment Name: At_Drought_Soil_Dry_P Parameter: Plant Line Value: WS
  misc_feature: MA Experiment 20001554 PARAMETER Experiment Name: At_Drought_Soil_Dry_P Parameter: Post Timepoint (hr) Value: None
  misc_feature: MA Experiment 20001554 PARAMETER Experiment Name: At_Drought_Soil_Dry_P Parameter: Post-Treatment Value: None
  misc_feature: MA Experiment 20001554 PARAMETER Experiment Name: At_Drought_Soil_Dry_P Parameter: Timepoint (day) Value: 7
  misc_feature: MA Experiment 20001554 PARAMETER Experiment Name: At_Drought_Soil_Dry_P Parameter: Treatment Value: Drought vs. No Drought
  misc_feature: MA Experiment ID: 20001560 Result: Up-regulated in Transcription
  misc_feature: MA Experiment 20001560 PARAMETER Experiment Name: At_Drought_Soil_Dry_P Parameter: Age (day) Value: 28
  misc_feature: MA Experiment 20001560 PARAMETER Experiment Name: At_Drought_Soil_Dry_P Parameter: Organism Value: A. thaliana
  misc_feature: MA Experiment 20001560 PARAMETER Experiment Name: At_Drought_Soil_Dry_P Parameter: Plant Line Value: WS
  misc_feature: MA Experiment 20001560 PARAMETER Experiment Name: At_Drought_Soil_Dry_P Parameter: Post Timepoint (hr) Value: None
  misc_feature: MA Experiment 20001560 PARAMETER Experiment Name: At_Drought_Soil_Dry_P Parameter: Post-Treatment Value: None
  misc_feature: MA Experiment 20001560 PARAMETER Experiment Name: At_Drought_Soil_Dry_P Parameter: Timepoint (day) Value: 14
  misc_feature: MA Experiment 20001560 PARAMETER Experiment Name: At_Drought_Soil_Dry_P Parameter: Treatment Value: Drought vs. No Drought
  misc_feature: MA Experiment ID: 20001768 Result: Down-regulated in Transcription
  misc_feature: MA Experiment 20001768 PARAMETER Experiment Name: At_Far-red-enriched-adult_P Parameter: Age (day) Value: 28
  misc_feature: MA Experiment 20001768 PARAMETER Experiment Name: At_Far-red-enriched-adult_P Parameter: Light Value: Far-red enriched vs. White
  misc_feature: MA Experiment 20001768 PARAMETER Experiment Name: At_Far-red-enriched-adult_P Parameter: Organism Value: A. thaliana
  misc_feature: MA Experiment 20001768 PARAMETER Experiment Name: At_Far-red-enriched-adult_P Parameter: Plant Line Value: Columbia
  misc_feature: MA Experiment 20001768 PARAMETER Experiment Name: At_Far-red-enriched-adult_P Parameter: Timepoint (hr) Value: 1
  misc_feature: MA Experiment 20001768 PARAMETER Experiment Name: At_Far-red-enriched-adult_P Parameter: Tissue Value: Aerial
  misc_feature: MA Experiment ID: 20001771 Result: Down-regulated in Transcription
  misc_feature: MA Experiment 20001771 PARAMETER Experiment Name: At_Far-red-enriched-adult_P Parameter: Age (day) Value: 28
  misc_feature: MA Experiment 20001771 PARAMETER Experiment Name: At_Far-red-enriched-adult_P Parameter: Light Value: Far-red enriched vs. White
  misc_feature: MA Experiment 20001771 PARAMETER Experiment Name: At_Far-red-enriched-adult_P Parameter: Organism Value: A. thaliana
  misc_feature: MA Experiment 20001771 PARAMETER Experiment Name: At_Far-red-enriched-adult_P Parameter: Plant Line Value: Columbia
  misc_feature: MA Experiment 20001771 PARAMETER Experiment Name: At_Far-red-enriched-adult_P Parameter: Timepoint (hr) Value: 16
  misc_feature: MA Experiment 20001771 PARAMETER Experiment Name: At_Far-red-enriched-adult_P Parameter: Tissue Value: Aerial
  misc_feature: Pfam Name: PMEI Pfam Description: Plant invertase/pectin methylesterase inhibitor
gggttccacttcatacaagcctcttgcaaagccacaacatacccaaccgtatgcgtcaactctctcaccggttacgccaactccatccaaacaagccctcgacgtctagccgagaccgcactcaatgtgaccgtgactcaggcccagtccaccaaggtcttcgtctggcgcttggggcgtttcactagtctcaagaaacgagagattcaagccgttaaggactgcatcgaggagatccatgatgccgttgaccgtttgaccatgtcgatccatgaagtgaagatgtgtggtagtgctaaaggtcgtgaccagttttggttccacatgagcaatgctcaaacgtggaccagcgctgctttgactaatgcaaacacttgctccgatgggtttgcgggtcgggtcatggatgggcgggtaaagaactcagtaagggcacggatcttgaatttgggaagaggaactagtaacgctttagccttgatcaatgctttcgctaaaaaatactaaataatgtaatacattttctttttgttcttaattctgtaatttgagctacgaatgtgtggatcagctcgagggaaattttatttcttaaaatgtttcatgcataatccgatgtaattctggataaattttgattaaaaatgaatgtacaagtataacattgttaagtt

SEQ ID NO: 108690 - protein, 168 aa, Arabidopsis thaliana
  peptide (1)..(168): Ceres Seq. ID no. 13668063
  misc_feature: Pfam Name: PMEI Pfam Description: Plant invertase/pectin methylesterase inhibitor
  misc_feature (3)..(168): Homolog of NCBI NO: 15232790 NR Description: pectinesterase - related [Arabidopsis thaliana]
  misc_feature (3)..(168): Homolog of NCBI NO: 15241799 NR Description: pectinesterase family [Arabidopsis thaliana]
  misc_feature (3)..(168): Homolog of NCBI NO: 21618088 NR Description: ripening-related protein-like [Arabidopsis
  misc_feature (17)..(168): Homolog of NCBI NO: 11127599 NR Description: DC 1.2 homolog [Arabidopsis thaliana]
  misc_feature (4)..(167): Homolog of NCBI NO: 7406663 NR Description: putative ripening-related protein [Vitis vinifera]
  misc_feature (4)..(168): Homolog of NCBI NO: 112717 NR Description: 21 KD PROTEIN PRECURSOR (1.2 PROTEIN)
  misc_feature (3)..(168): Homolog of NCBI NO: 7488727 NR Description: 21K protein precursor - alfalfa
  misc_feature (4)..(168): Homolog of NCBI NO: 15234982 NR Description: pectinesterase - related [Arabidopsis thaliana]
  misc_feature (3)..(168): Homolog of NCBI NO: 15234547 NR Description: pectinesterase - related [Arabidopsis thaliana]
  misc_feature (3)..(168): Homolog of NCBI NO: 21555297 NR Description: unknown [Arabidopsis thaliana]
GFHFIQASCKATTYPTVCVNSLTGYANSIQTSPRRLAETALNVTVTQAQSTKVFVWRLGRFTSLKKREIQAVKDCIEEIHDAVDRLTMSIHEVKMCGSAKGRDQFWFHMSNAQTWTSAALTNANTCSDGFAGRVMDGRVKNSVRARILNLGRGTSNALALINAFAKKY

SEQ ID NO: 108691 - DNA, 1082 bp, Arabidopsis thaliana
  misc_feature (1)..(1082): Ceres Seq. ID no. 13668072
  misc_feature: MA Experiment ID: 20000171 Result: Down-regulated in Transcription
  misc_feature: MA Experiment 20000171 PARAMETER Experiment Name: At_42deg_Heat_P Parameter: Age (day) Value: 14
  misc_feature: MA Experiment 20000171 PARAMETER Experiment Name: At_42deg_Heat_P Parameter: Organism Value: A. thaliana
  misc_feature: MA Experiment 20000171 PARAMETER Experiment Name: At_42deg_Heat_P Parameter: Plant Line Value: WS
  misc_feature: MA Experiment 20000171 PARAMETER Experiment Name: At_42deg_Heat_P Parameter: Temperature (deg C) Value: 42 vs. 22
  misc_feature: MA Experiment 20000171 PARAMETER Experiment Name: At_42deg_Heat_P Parameter: Timepoint (hr) Value: 1
  misc_feature: MA Experiment 20000171 PARAMETER Experiment Name: At_42deg_Heat_P Parameter: Tissue Value: Aerial
  misc_feature: MA Experiment ID: 20000173 Result: Down-regulated in Transcription
  misc_feature: MA Experiment 20000173 PARAMETER Experiment Name: At_42deg_Heat_P Parameter: Age (day) Value: 14
  misc_feature: MA Experiment 20000173 PARAMETER Experiment Name: At_42deg_Heat_P Parameter: Organism Value: A. thaliana
  misc_feature: MA Experiment 20000173 PARAMETER Experiment Name: At_42deg_Heat_P Parameter: Plant Line Value: WS
  misc_feature: MA Experiment 20000173 PARAMETER Experiment Name: At_42deg_Heat_P Parameter: Temperature (deg C) Value: 42 vs. 22
  misc_feature: MA Experiment 20000173 PARAMETER Experiment Name: At_42deg_Heat_P Parameter: Timepoint (hr) Value: 6
  misc_feature: MA Experiment 20000173 PARAMETER Experiment Name: At_42deg_Heat_P Parameter: Tissue Value: Aerial
  misc_feature: MA Experiment ID: 20000184 Result: Up-regulated in Transcription
  misc_feature: MA Experiment 20000184 PARAMETER Experiment Name: At_Shoots__P Parameter: Age (day) Value: 7
  misc_feature: MA Experiment 20000184 PARAMETER Experiment Name: At_Shoots__P Parameter: Tissue Value: Shoots vs. Whole Plant
  misc_feature: MA Experiment ID: 20000234 Result: Down-regulated in Transcription
  misc_feature: MA Experiment 20000234 PARAMETER Experiment Name: At_Siliques_P Parameter: Age (day) Value: 21
  misc_feature: MA Experiment 20000234 PARAMETER Experiment Name: At_Siliques_P Parameter: Organism Value: A. thaliana
  misc_feature: MA Experiment 20000234 PARAMETER Experiment Name: At_Siliques_P Parameter: Plant Line Value: WS
  misc_feature: MA Experiment 20000234 PARAMETER Experiment Name: At_Siliques_P Parameter: Tissue Value: Less Than 5mm Siliques vs. Whole Plant
  misc_feature: MA Experiment ID: 20000235 Result: Down-regulated in Transcription
  misc_feature: MA Experiment 20000235 PARAMETER Experiment Name: At_Siliques_P Parameter: Age (day) Value: 21
  misc_feature: MA Experiment 20000235 PARAMETER Experiment Name: At_Siliques_P Parameter: Organism Value: A. thaliana
  misc_feature: MA Experiment 20000235 PARAMETER Experiment Name: At_Siliques_P Parameter: Plant Line Value: WS
  misc_feature: MA Experiment 20000235 PARAMETER Experiment Name: At_Siliques_P Parameter: Tissue Value: 5-10mm Siliques vs. Whole Plant
  misc_feature: MA Experiment ID: 20000264 Result: Down-regulated in Transcription
  misc_feature: MA Experiment 20000264 PARAMETER Experiment Name: At_Open_Flower_P Parameter: Age (day) Value: 21
  misc_feature: MA Experiment 20000264 PARAMETER Experiment Name: At_Open_Flower_P Parameter: Plant Line Value: WS
  misc_feature: MA Experiment 20000264 PARAMETER Experiment Name: At_Open_Flower_P Parameter: Tissue Value: Open Flower vs. Whole Plant
  misc_feature: MA Experiment ID: 20000265 Result: Down-regulated in Transcription
  misc_feature: MA Experiment 20000265 PARAMETER Experiment Name: At_Open_Flower_P Parameter: Age (day) Value: 21
  misc_feature: MA Experiment 20000265 PARAMETER Experiment Name: At_Open_Flower_P Parameter: Plant Line Value: WS
  misc_feature: MA Experiment 20000265 PARAMETER Experiment Name: At_Open_Flower_P Parameter: Tissue Value: Closed Flower vs. Whole Plant
  misc_feature: MA Experiment ID: 20000286 Result: Down-regulated in Transcription
  misc_feature: MA Experiment 20000286 PARAMETER Experiment Name: At_Open_Flower_P Parameter: Age (day) Value: 21
  misc_feature: MA Experiment 20000286 PARAMETER Experiment Name: At_Open_Flower_P Parameter: Plant Line Value: WS
  misc_feature: MA Experiment 20000286 PARAMETER Experiment Name: At_Open_Flower_P Parameter: Tissue Value: Half Open vs. Whole Plant
  misc_feature: MA Experiment ID: 20000573 Result: Down-regulated in Transcription
  misc_feature: MA Experiment 20000573 PARAMETER Experiment Name: At_100uM_ABA_Mutants__P Parameter: Organism Value: A. thaliana
  misc_feature: MA Experiment 20000573 PARAMETER Experiment Name: At_100uM_ABA_Mutants__P Parameter: Plant Line Value: CS22 vs. Ler wt
  misc_feature: MA Experiment 20000573 PARAMETER Experiment Name: At_100uM_ABA_Mutants__P Parameter: Timepoint (hr) Value: N/A
  misc_feature: MA Experiment 20000573 PARAMETER Experiment Name: At_100uM_ABA_Mutants__P Parameter: Tissue Value: Whole Plant
  misc_feature: MA Experiment 20000573 PARAMETER Experiment Name: At_100uM_ABA_Mutants__P Parameter: Treatment Value: None
  misc_feature: MA Experiment ID: 20000574 Result: Down-regulated in Transcription
  misc_feature: MA Experiment 20000574 PARAMETER Experiment Name: At_100uM_ABA_Mutants__P Parameter: Organism Value: A. thaliana
  misc_feature: MA Experiment 20000574 PARAMETER Experiment Name: At_100uM_ABA_Mutants__P Parameter: Plant Line Value: CS23 vs. Ler wt
  misc_feature: MA Experiment 20000574 PARAMETER Experiment Name: At_100uM_ABA_Mutants__P Parameter: Timepoint (hr) Value: N/A
  misc_feature: MA Experiment 20000574 PARAMETER Experiment Name: At_100uM_ABA_Mutants__P Parameter: Tissue Value: Whole Plant
  misc_feature: MA Experiment 20000574 PARAMETER Experiment Name: At_100uM_ABA_Mutants__P Parameter: Treatment Value: None
  misc_feature: MA Experiment ID: 20000709 Result: Up-regulated in Transcription
  misc_feature: MA Experiment 20000709 PARAMETER Experiment Name: At_15mM_NH4NO3_L-to-H_P Parameter: Age (hr) Value: 14
  misc_feature: MA Experiment 20000709 PARAMETER Experiment Name: At_15mM_NH4NO3_L-to-H_P Parameter: Organism Value: A. thaliana
  misc_feature: MA Experiment 20000709 PARAMETER Experiment Name: At_15mM_NH4NO3_L-to-H_P Parameter: Plant Line Value: WS
  misc_feature: MA Experiment 20000709 PARAMETER Experiment Name: At_15mM_NH4NO3_L-to-H_P Parameter: Timepoint (hr) Value: 4
  misc_feature: MA Experiment 20000709 PARAMETER Experiment Name: At_15mM_NH4NO3_L-to-H_P Parameter: Tissue Value: Aerial
  misc_feature: MA Experiment 20000709 PARAMETER Experiment Name: At_15mM_NH4NO3_L-to-H_P Parameter: Treatment Value: 15mM NH4NO3 vs. 30mM Mannitol
  misc_feature: MA Experiment ID: 20000794 Result: Down-regulated in Transcription
  misc_feature: MA Experiment 20000794 PARAMETER Experiment Name: At_Petals_P Parameter: Age (day) Value: 23-25 days
  misc_feature: MA Experiment 20000794 PARAMETER Experiment Name: At_Petals_P Parameter: Plant Line Value: WS
  misc_feature: MA Experiment 20000794 PARAMETER Experiment Name: At_Petals_P Parameter: Tissue Value: Petals vs. Whole plant
  misc_feature: MA Experiment ID: 20001248 Result: Down-regulated in Transcription
  misc_feature: MA Experiment 20001248 PARAMETER Experiment Name: At_Far-red-induction_P Parameter: Age (day) Value: 7
  misc_feature: MA Experiment 20001248 PARAMETER Experiment Name: At_Far-red-induction_P Parameter: Light Value: Far-red vs. White
  misc_feature: MA Experiment 20001248 PARAMETER Experiment Name: At_Far-red-induction_P Parameter: Organism Value: A. thaliana
  misc_feature: MA Experiment 20001248 PARAMETER Experiment Name: At_Far-red-induction_P Parameter: Plant Line Value: Columbia
  misc_feature: MA Experiment 20001248 PARAMETER Experiment Name: At_Far-red-induction_P Parameter: Timepoint (hr) Value: 4
  misc_feature: MA Experiment 20001248 PARAMETER Experiment Name: At_Far-red-induction_P Parameter: Tissue Value: Whole Plant
  misc_feature: MA Experiment ID: 20001557 Result: Down-regulated in Transcription
  misc_feature: MA Experiment 20001557 PARAMETER Experiment Name: At_Drought_Soil_Dry_P Parameter: Age (day) Value: 27
  misc_feature: MA Experiment 20001557 PARAMETER Experiment Name: At_Drought_Soil_Dry_P Parameter: Organism Value: A. thaliana
  misc_feature: MA Experiment 20001557 PARAMETER Experiment Name: At_Drought_Soil_Dry_P Parameter: Plant Line Value: WS
  misc_feature: MA Experiment 20001557 PARAMETER Experiment Name: At_Drought_Soil_Dry_P Parameter: Post Timepoint (hr) Value: 3
  misc_feature: MA Experiment 20001557 PARAMETER Experiment Name: At_Drought_Soil_Dry_P Parameter: Post-Treatment Value: Re-Water vs. No Drought
  misc_feature: MA Experiment 20001557 PARAMETER Experiment Name: At_Drought_Soil_Dry_P Parameter: Timepoint (day) Value: 13
  misc_feature: MA Experiment 20001557 PARAMETER Experiment Name: At_Drought_Soil_Dry_P Parameter: Treatment Value: Drought vs. No Drought
  misc_feature: MA Experiment ID: 20001755 Result: Up-regulated in Transcription
  misc_feature: MA Experiment 20001755 PARAMETER Experiment Name: At_50mM_NH4NO3_L-to-H_P Parameter: Timepoint (hr) Value: 2
  misc_feature: MA Experiment 20001755 PARAMETER Experiment Name: At_50mM_NH4NO3_L-to-H_P Parameter: Tissue Value: Leaf
  misc_feature: MA Experiment 20001755 PARAMETER Experiment Name: At_50mM_NH4NO3_L-to-H_P Parameter: Treatment Value: 50mM NH4NO3 vs 100mM Mannitol
  misc_feature: MA Experiment ID: 20001757 Result: Up-regulated in Transcription
  misc_feature: MA Experiment 20001757 PARAMETER Experiment Name: At_50mM_NH4NO3_L-to-H_P Parameter: Timepoint (hr) Value: 6
  misc_feature: MA Experiment 20001757 PARAMETER Experiment Name: At_50mM_NH4NO3_L-to-H_P Parameter: Tissue Value: Leaf
  misc_feature: MA Experiment 20001757 PARAMETER Experiment Name: At_50mM_NH4NO3_L-to-H_P Parameter: Treatment Value: 50mM NH4NO3 vs 100mM Mannitol
cagactctttatttctcttcctcacctaagcttcagcatcgtaaatttaaaactaaaatcgcatcaaatcccggagataggaaagaaaataattgattgtttctagtgaagaacaaaaaaaaaaaagtcgaagactttacatctgggttcatcgatttgagataagatcttctttatttgttatcttcaagtttctgcaatgggtatggcagcagaatcgcagtttcatgttttagctgttgatgatagtttatttgatcggaaacttattgagagattgcttcaaaagtcttcgtgtcaagtaacaactgttgattctggctcaaaggctttggagtttctgggtttaagacaaagtactgatagtaacgacccaaatgcgttttctaaggctcctgttaatcaccaggtagttgaagtgaatcttataattacagattattgtatgcctggcatgactggttatgatttgctcaagaaagtcaaggaatcatcagcttttagagatataccagtagttatcatgtcctcagagaacgttcctgcaagaatcagcagatgtttagaagaaggagctgaagagtttttcttgaaaccagtaagattggctgatcttaacaagttgaaacctcatatgatgaaaacaaagttgaagaaccagaagctggaggagattgagacaacttcaaaagtcgaaaatggagtccccactgcagtagctgatccagagattaaagattcaacaaacattgaaattgaaatcttgcctctgcaacaagatctgctattagttcaacaagaggagcaaacattgagtatcaacaacaagaggaagtcagtggaagaagggatttcaactgatagagcacgtcctagattcgacggtatcgcaaccgctgtctgatctaccagctatgatacttcttttttcggtttctgatttagatttttgtagattttcttaggaatgcttctactggtacagtacatggtttcagtagggaatgcagagaggggaatatgatgatgatgttgtatgtggggataatgtttataagtacatcagtaaatcttacatggtt

SEQ ID NO: 108692 - protein, 234 aa, Arabidopsis thaliana; identical to SEQ ID NO: 83919
  peptide (1)..(234): Ceres Seq. ID no. 13668073
  misc_feature (9)..(139): Pfam Name: Response regulator receiver domain Pfam Description: Response regulator receiver domain
  misc_feature (1)..(234): Homolog of NCBI NO: 15230202 NR Description: responce reactor 4 [Arabidopsis thaliana]
  misc_feature (1)..(234): Homolog of NCBI NO: 15227325 NR Description: two-component response regulator 3 protein
  misc_feature (5)..(150): Homolog of NCBI NO: 34906626 NR Description: putative response regulator [Oryza sativa
  misc_feature (3)..(180): Homolog of NCBI NO: 12060388 NR Description: response regulator 6 [Zea mays]
  misc_feature (5)..(185): Homolog of NCBI NO: 12060386 NR Description: response regulator 5 [Zea mays]
  misc_feature (5)..(187): Homolog of NCBI NO: 12060384 NR Description: response regulator 4 [Zea mays]
  misc_feature (9)..(163): Homolog of NCBI NO: 33330868 NR Description: type-A response regulator [Catharanthus roseus]
  misc_feature (8)..(170): Homolog of NCBI NO: 15218550 NR Description: response regulator1 (ATRR1) [Arabidopsis thaliana]
  misc_feature (8)..(213): Homolog of NCBI NO: 15218957 NR Description: response regulator 3 [Arabidopsis thaliana]
  misc_feature (8)..(182): Homolog of NCBI NO: 15221927 NR Description: response regulator 7 [Arabidopsis thaliana]

SEQ ID NO: 108693 - protein, 232 aa, Arabidopsis thaliana; identical to SEQ ID NO: 83920
  peptide (1)..(232): Ceres Seq. ID no. 13668074
  misc_feature (7)..(137): Pfam Name: Response regulator receiver domain Pfam Description: Response regulator receiver domain
  misc_feature (1)..(232): Homolog of NCBI NO: 15230202 NR Description: responce reactor 4 [Arabidopsis thaliana]
  misc_feature (1)..(232): Homolog of NCBI NO: 15227325 NR Description: two-component response regulator 3 protein
  misc_feature (3)..(148): Homolog of NCBI NO: 34906626 NR Description: putative response regulator [Oryza sativa
  misc_feature (1)..(178): Homolog of NCBI NO: 12060388 NR Description: response regulator 6 [Zea mays]
  misc_feature (3)..(183): Homolog of NCBI NO: 12060386 NR Description: response regulator 5 [Zea mays]
  misc_feature (3)..(185): Homolog of NCBI NO: 12060384 NR Description: response regulator 4 [Zea mays]
  misc_feature (7)..(161): Homolog of NCBI NO: 33330868 NR Description: type-A response regulator [Catharanthus roseus]
  misc_feature (6)..(168): Homolog of NCBI NO: 15218550 NR Description: response regulator1 (ATRR1) [Arabidopsis thaliana]
  misc_feature (6)..(211): Homolog of NCBI NO: 15218957 NR Description: response regulator 3 [Arabidopsis thaliana]
  misc_feature (6)..(180): Homolog of NCBI NO: 15221927 NR Description: response regulator 7 [Arabidopsis thaliana]

SEQ ID NO: 108694 - protein, 152 aa, Arabidopsis thaliana; identical to SEQ ID NO: 83921
  peptide (1)..(152): Ceres Seq. ID no. 13668075
  misc_feature (1)..(57): Pfam Name: Response regulator receiver domain Pfam Description: Response regulator receiver domain
  misc_feature (1)..(152): Homolog of NCBI NO: 15230202 NR Description: responce reactor 4 [Arabidopsis thaliana]
  misc_feature (1)..(152): Homolog of NCBI NO: 15227325 NR Description: two-component response regulator 3 protein
  misc_feature (1)..(68): Homolog of NCBI NO: 34906626 NR Description: putative response regulator [Oryza sativa
  misc_feature (1)..(98): Homolog of NCBI NO: 12060388 NR Description: response regulator 6 [Zea mays]
  misc_feature (1)..(103): Homolog of NCBI NO: 12060386 NR Description: response regulator 5 [Zea mays]
  misc_feature (1)..(105): Homolog of NCBI NO: 12060384 NR Description: response regulator 4 [Zea mays]
  misc_feature (1)..(81): Homolog of NCBI NO: 33330868 NR Description: type-A response regulator [Catharanthus roseus]
  misc_feature (1)..(88): Homolog of NCBI NO: 15218550 NR Description: response regulator1 (ATRR1) [Arabidopsis thaliana]
  misc_feature (1)..(131): Homolog of NCBI NO: 15218957 NR Description: response regulator 3 [Arabidopsis thaliana]
  misc_feature (1)..(100): Homolog of NCBI NO: 15221927 NR Description: response regulator 7 [Arabidopsis thaliana]

SEQ ID NO: 108695 - DNA, 788 bp, Arabidopsis thaliana
  misc_feature (1)..(788): Ceres Seq. ID no. 13668079
  misc_feature: MA Experiment ID: 20000166 Result: Up-regulated in Transcription
  misc_feature: MA Experiment 20000166 PARAMETER Experiment Name: At_100uM_ABA_P Parameter: Age (day) Value: 14
  misc_feature: MA Experiment 20000166 PARAMETER Experiment Name: At_100uM_ABA_P Parameter: Organism Value: A. thaliana
  misc_feature: MA Experiment 20000166 PARAMETER Experiment Name: At_100uM_ABA_P Parameter: Plant Line Value: WS
  misc_feature: MA Experiment 20000166 PARAMETER Experiment Name: At_100uM_ABA_P Parameter: Timepoint (hr) Value: 1
  misc_feature: MA Experiment 20000166 PARAMETER Experiment Name: At_100uM_ABA_P Parameter: Tissue Value: Aerial
  misc_feature: MA Experiment 20000166 PARAMETER Experiment Name: At_100uM_ABA_P Parameter: Treatment Value: 100uM ABA vs. No Treatment
  misc_feature: MA Experiment ID: 20000171 Result: Down-regulated in Transcription
  misc_feature: MA Experiment 20000171 PARAMETER Experiment Name: At_42deg_Heat_P Parameter: Age (day) Value: 14
  misc_feature: MA Experiment 20000171 PARAMETER Experiment Name: At_42deg_Heat_P Parameter: Organism Value: A. thaliana
  misc_feature: MA Experiment 20000171 PARAMETER Experiment Name: At_42deg_Heat_P Parameter: Plant Line Value: WS
  misc_feature: MA Experiment 20000171 PARAMETER Experiment Name: At_42deg_Heat_P Parameter: Temperature (deg C) Value: 42 vs. 22
  misc_feature: MA Experiment 20000171 PARAMETER Experiment Name: At_42deg_Heat_P Parameter: Timepoint (hr) Value: 1
  misc_feature: MA Experiment 20000171 PARAMETER Experiment Name: At_42deg_Heat_P Parameter: Tissue Value: Aerial
  misc_feature: MA Experiment ID: 20000173 Result: Down-regulated in Transcription
  misc_feature: MA Experiment 20000173 PARAMETER Experiment Name: At_42deg_Heat_P Parameter: Age (day) Value: 14
  misc_feature: MA Experiment 20000173 PARAMETER Experiment Name: At_42deg_Heat_P Parameter: Organism Value: A. thaliana
  misc_feature: MA Experiment 20000173 PARAMETER Experiment Name: At_42deg_Heat_P Parameter: Plant Line Value: WS
  misc_feature: MA Experiment 20000173 PARAMETER Experiment Name: At_42deg_Heat_P Parameter: Temperature (deg C) Value: 42 vs. 22
  misc_feature: MA Experiment 20000173 PARAMETER Experiment Name: At_42deg_Heat_P Parameter: Timepoint (hr) Value: 6
  misc_feature: MA Experiment 20000173 PARAMETER Experiment Name: At_42deg_Heat_P Parameter: Tissue Value: Aerial
  misc_feature: MA Experiment ID: 20000179 Result: Up-regulated in Transcription
  misc_feature: MA Experiment 20000179 PARAMETER Experiment Name: At_Germinating_Seeds_P Parameter: Age (hr) Value: 6 vs. 0
  misc_feature: MA Experiment 20000179 PARAMETER Experiment Name: At_Germinating_Seeds_P Parameter: Tissue Value: Germinating Seeds
  misc_feature: MA Experiment ID: 20000180 Result: Up-regulated in Transcription
  misc_feature: MA Experiment 20000180 PARAMETER Experiment Name: At_Germinating_Seeds_P Parameter: Age (hr) Value: 24 vs. 0
  misc_feature: MA Experiment 20000180 PARAMETER Experiment Name: At_Germinating_Seeds_P Parameter: Tissue Value: Germinating Seeds
  misc_feature: MA Experiment ID: 20000185 Result: Up-regulated in Transcription
  misc_feature: MA Experiment 20000185 PARAMETER Experiment Name: At_Roots__P Parameter: Age (day) Value: 7 vs. 21
  misc_feature: MA Experiment 20000185 PARAMETER Experiment Name: At_Roots__P Parameter: Organism Value: A. thaliana
  misc_feature: MA Experiment 20000185 PARAMETER Experiment Name: At_Roots__P Parameter: Tissue Value: Roots vs. Whole Plant
  misc_feature: MA Experiment ID: 20000214 Result: Down-regulated in Transcription
  misc_feature: MA Experiment 20000214 PARAMETER Experiment Name: At_4deg_Cold_P Parameter: Timepoint (hr) Value: 6
  misc_feature: MA Experiment ID: 20000234 Result: Up-regulated in Transcription
  misc_feature: MA Experiment 20000234 PARAMETER Experiment Name: At_Siliques_P Parameter: Age (day) Value: 21
  misc_feature: MA Experiment 20000234 PARAMETER Experiment Name: At_Siliques_P Parameter: Organism Value: A. thaliana
  misc_feature: MA Experiment 20000234 PARAMETER Experiment Name: At_Siliques_P Parameter: Plant Line Value: WS
  misc_feature: MA Experiment 20000234 PARAMETER Experiment Name: At_Siliques_P Parameter: Tissue Value: Less Than 5mm Siliques vs. Whole Plant
  misc_feature: MA Experiment ID: 20000264 Result: Up-regulated in Transcription
  misc_feature: MA Experiment 20000264 PARAMETER Experiment Name: At_Open_Flower_P Parameter: Age (day) Value: 21
  misc_feature: MA Experiment 20000264 PARAMETER Experiment Name: At_Open_Flower_P Parameter: Plant Line Value: WS
  misc_feature: MA Experiment 20000264 PARAMETER Experiment Name: At_Open_Flower_P Parameter: Tissue Value: Open Flower vs. Whole Plant
  misc_feature: MA Experiment ID: 20000265 Result: Up-regulated in Transcription
  misc_feature: MA Experiment 20000265 PARAMETER Experiment Name: At_Open_Flower_P Parameter: Age (day) Value: 21
  misc_feature: MA Experiment 20000265 PARAMETER Experiment Name: At_Open_Flower_P Parameter: Plant Line Value: WS
  misc_feature: MA Experiment 20000265 PARAMETER Experiment Name: At_Open_Flower_P Parameter: Tissue Value: Closed Flower vs. Whole Plant
  misc_feature: MA Experiment ID: 20000286 Result: Up-regulated in Transcription
  misc_feature: MA Experiment 20000286 PARAMETER Experiment Name: At_Open_Flower_P Parameter: Age (day) Value: 21
  misc_feature: MA Experiment 20000286 PARAMETER Experiment Name: At_Open_Flower_P Parameter: Plant Line Value: WS
  misc_feature: MA Experiment 20000286 PARAMETER Experiment Name: At_Open_Flower_P Parameter: Tissue Value: Half Open vs. Whole Plant
  misc_feature: MA Experiment ID: 20000438 Result: Up-regulated in Transcription
  misc_feature: MA Experiment 20000438 PARAMETER Experiment Name: At_Shoots__P Parameter: Age (day) Value: 14
  misc_feature: MA Experiment 20000438 PARAMETER Experiment Name: At_Shoots__P Parameter: Tissue Value: Shoots vs. Whole Plant
  misc_feature: MA Experiment ID: 20000439 Result: Up-regulated in Transcription
  misc_feature: MA Experiment 20000439 PARAMETER Experiment Name: At_Roots__P Parameter: Age (day) Value: 14 vs. 21
  misc_feature: MA Experiment 20000439 PARAMETER Experiment Name: At_Roots__P Parameter: Organism Value: A. thaliana
  misc_feature: MA Experiment 20000439 PARAMETER Experiment Name: At_Roots__P Parameter: Tissue Value: Roots vs. Whole Plant
  misc_feature: MA Experiment ID: 20000453 Result: Up-regulated in Transcription
  misc_feature: MA Experiment 20000453 PARAMETER Experiment Name: At_100uM_ABA_P Parameter: Age (day) Value: 15
  misc_feature: MA Experiment 20000453 PARAMETER Experiment Name: At_100uM_ABA_P Parameter: Organism Value: A. thaliana
  misc_feature: MA Experiment 20000453 PARAMETER Experiment Name: At_100uM_ABA_P Parameter: Plant Line Value: WS
  misc_feature: MA Experiment 20000453 PARAMETER Experiment Name: At_100uM_ABA_P Parameter: Timepoint (hr) Value: 24
  misc_feature: MA Experiment 20000453 PARAMETER Experiment Name: At_100uM_ABA_P Parameter: Tissue Value: Aerial
  misc_feature: MA Experiment 20000453 PARAMETER Experiment Name: At_100uM_ABA_P Parameter: Treatment Value: 100uM ABA vs. No Treatment
  misc_feature: MA Experiment ID: 20000794 Result: Up-regulated in Transcription
  misc_feature: MA Experiment 20000794 PARAMETER Experiment Name: At_Petals_P Parameter: Age (day) Value: 23-25 days
  misc_feature: MA Experiment 20000794 PARAMETER Experiment Name: At_Petals_P Parameter: Plant Line Value: WS
  misc_feature: MA Experiment 20000794 PARAMETER Experiment Name: At_Petals_P Parameter: Tissue Value: Petals vs. Whole plant
  misc_feature: MA Experiment ID: 20001248 Result: Down-regulated in Transcription
  misc_feature: MA Experiment 20001248 PARAMETER Experiment Name: At_Far-red-induction_P Parameter: Age (day) Value: 7
  misc_feature: MA Experiment 20001248 PARAMETER Experiment Name: At_Far-red-induction_P Parameter: Light Value: Far-red vs. White
  misc_feature: MA Experiment 20001248 PARAMETER Experiment Name: At_Far-red-induction_P Parameter: Organism Value: A. thaliana
  misc_feature: MA Experiment 20001248 PARAMETER Experiment Name: At_Far-red-induction_P Parameter: Plant Line Value: Columbia
  misc_feature: MA Experiment 20001248 PARAMETER Experiment Name: At_Far-red-induction_P Parameter: Timepoint (hr) Value: 4
  misc_feature: MA Experiment 20001248 PARAMETER Experiment Name: At_Far-red-induction_P Parameter: Tissue Value: Whole Plant
  misc_feature: MA Experiment ID: 20001450 Result: Down-regulated in Transcription
  misc_feature: MA Experiment 20001450 PARAMETER Experiment Name: At_Far-red-induction_P Parameter: Age (day) Value: 7
  misc_feature: MA Experiment 20001450 PARAMETER Experiment Name: At_Far-red-induction_P Parameter: Light Value: Far-red vs. White
  misc_feature: MA Experiment 20001450 PARAMETER Experiment Name: At_Far-red-induction_P Parameter: Organism Value: A. thaliana
  misc_feature: MA Experiment 20001450 PARAMETER Experiment Name: At_Far-red-induction_P Parameter: Plant Line Value: Columbia
  misc_feature: MA Experiment 20001450 PARAMETER Experiment Name: At_Far-red-induction_P Parameter: Timepoint (hr) Value: 8
  misc_feature: MA Experiment 20001450 PARAMETER Experiment Name: At_Far-red-induction_P Parameter: Tissue Value: Whole Plant
  misc_feature: MA Experiment ID: 20001555 Result: Up-regulated in Transcription
  misc_feature: MA Experiment 20001555 PARAMETER Experiment Name: At_Drought_Soil_Dry_P Parameter: Age (day) Value: 24
  misc_feature: MA Experiment 20001555 PARAMETER Experiment Name: At_Drought_Soil_Dry_P Parameter: Organism Value: A. thaliana
  misc_feature: MA Experiment 20001555 PARAMETER Experiment Name: At_Drought_Soil_Dry_P Parameter: Plant Line Value: WS
  misc_feature: MA Experiment 20001555 PARAMETER Experiment Name: At_Drought_Soil_Dry_P Parameter: Post Timepoint (hr) Value: None
  misc_feature: MA Experiment 20001555 PARAMETER Experiment Name: At_Drought_Soil_Dry_P Parameter: Post-Treatment Value: None
  misc_feature: MA Experiment 20001555 PARAMETER Experiment Name: At_Drought_Soil_Dry_P Parameter: Timepoint (day) Value: 10
  misc_feature: MA Experiment 20001555 PARAMETER Experiment Name: At_Drought_Soil_Dry_P Parameter: Treatment Value: Drought vs. No Drought
cgggtacaggaaagggtattgcatgggtgaatggacagagcataggtaggtactggccaactagtatcgctggaaatggcggttgtacagaatcatgcgactatagaggttcttaccgtgcaaacaaatgcctcaagaactgtggaaaaccttcacagacattgtatcatgtacctcgctcgtggctaaaaccgagcgggaacatacttgttctgtttgaggagatgggaggagatccaacacaaatatcatttgcgacaaaacaaacaggaagcaatctttgtctaacggtgtcacagtctcatccaccaccggtggacacatggacttccgactcaaagatctcaaacagaaacagaaccaggccggttctttcgttgaaatgccctatctctactcaggtgatattttctataaaatttgcaagctttggtacacccaaaggtacttgcggtagcttcacacaaggccattgcaatagctctcgatctctctccctcgtccaaaaggcatgtattggattgaggagttgcaacgttgaagtatcgactagagtgttcggggaaccttgtcgtggcgtcgtcaagagcttagctgttgaagcttcttgttcatgaggagtgcccggttcctaaacctctgctgatttgatattattttaagcatgtaattgttggaaataaagcaaaatgaaatggaaattagtagtatagttttatggtctatccaaataaatttggctggaattaaagttactaaactatgtatgtgtgtggtaagcactttgg

SEQ ID NO: 108696 - protein, 204 aa, Arabidopsis thaliana
  peptide (1)..(204): Ceres Seq. ID no. 13668080
  misc_feature (1)..(88): Pfam Name: Glycosyl hydrolases family 35 Pfam Description: Glycosyl hydrolases family 35
  misc_feature (1)..(204): Homolog of NCBI NO: 1669595 NR Description: AR782 [Arabidopsis thaliana]
  misc_feature (1)..(204): Homolog of NCBI NO: 6686888 NR Description: putative beta-galactosidase [Arabidopsis thaliana]
  misc_feature (1)..(204): Homolog of NCBI NO: 30683905 NR Description: glycosyl hydrolase family 35 (beta-galactosidase)
  misc_feature (1)..(204): Homolog of NCBI NO: 25326167 NR Description: probable beta-galactosidase [imported] -
  misc_feature (1)..(203): Homolog of NCBI NO: 14970841 NR Description: beta-galactosidase [Fragaria x ananassa]
  misc_feature (1)..(204): Homolog of NCBI NO: 7939623 NR Description: putative beta-galactosidase [Lycopersicon
  misc_feature (3)..(204): Homolog of NCBI NO: 14517399 NR Description: At2g32810/F24L7.5 [Arabidopsis thaliana]
  misc_feature (3)..(204): Homolog of NCBI NO: 18403090 NR Description: glycosyl hydrolase family 35 (beta-galactosidase)
  misc_feature (3)..(204): Homolog of NCBI NO: 7488064 NR Description: probable beta-galactosidase (EC 3.2.1.23) F24L7.5
  misc_feature (3)..(204): Homolog of NCBI NO: 7939617 NR Description: beta-galactosidase [Lycopersicon esculentum]
GTGKGIAWVNGQSIGRYWPTSIAGNGGCTESCDYRGSYRANKCLKNCGKPSQTLYHVPRSWLKPSGNILVLFEEMGGDPTQISFATKQTGSNLCLTVSQSHPPPVDTWTSDSKISNRNRTRPVLSLKCPISTQVIFSIKFASFGTPKGTCGSFTQGHCNSSRSLSLVQKACIGLRSCNVEVSTRVFGEPCRGVVKSLAVEASCS

SEQ ID NO: 108697 - protein, 130 aa, Arabidopsis thaliana
  peptide (1)..(130): Ceres Seq. ID no. 13668081
  misc_feature (52)..(129): Pfam Name: Galactose binding lectin domain Pfam Description: Galactose binding lectin domain
  misc_feature (1)..(130): Homolog of NCBI NO: 1669595 NR Description: AR782 [Arabidopsis thaliana]
  misc_feature (1)..(130): Homolog of NCBI NO: 30683905 NR Description: glycosyl hydrolase family 35 (beta-galactosidase)
  misc_feature (1)..(130): Homolog of NCBI NO: 25326167 NR Description: probable beta-galactosidase [imported] -
  misc_feature (1)..(130): Homolog of NCBI NO: 6686888 NR Description: putative beta-galactosidase [Arabidopsis thaliana]
  misc_feature (1)..(129): Homolog of NCBI NO: 14970841 NR Description: beta-galactosidase [Fragaria x ananassa]
  misc_feature (1)..(130): Homolog of NCBI NO: 7939623 NR Description: putative beta-galactosidase [Lycopersicon
  misc_feature (1)..(130): Homolog of NCBI NO: 14517399 NR Description: At2g32810/F24L7.5 [Arabidopsis thaliana]
  misc_feature (1)..(130): Homolog of NCBI NO: 18403090 NR Description: glycosyl hydrolase family 35 (beta-galactosidase)
  misc_feature (1)..(130): Homolog of NCBI NO: 7488064 NR Description: probable beta-galactosidase (EC 3.2.1.23) F24L7.5
  misc_feature (1)..(130): Homolog of NCBI NO: 7939617 NR Description: beta-galactosidase [Lycopersicon esculentum]
MGGDPTQISFATKQTGSNLCLTVSQSHPPPVDTWTSDSKISNRNRTRPVLSLKCPISTQVIFSIKFASFGTPKGTCGSFTQGHCNSSRSLSLVQKACIGLRSCNVEVSTRVFGEPCRGVVKSLAVEASCS

SEQ ID NO: 108698 - DNA, 796 bp, Arabidopsis thaliana
  misc_feature (1)..(796): Ceres Seq. ID no. 13668082
  misc_feature: MA Experiment ID: 108464 Result: Up-regulated in Transcription
  misc_feature: MA Experiment 108464 PARAMETER Experiment Name: At_Germinating_Seeds_cDNA_P Parameter: Age (day) Value: 4 vs. 0
  misc_feature: MA Experiment 108464 PARAMETER Experiment Name: At_Germinating_Seeds_cDNA_P Parameter: Tissue Value: Germinating Seeds
  misc_feature: MA Experiment ID: 108488 Result: Down-regulated in Transcription
  misc_feature: MA Experiment ID: 108573 Result: Down-regulated in Transcription
  misc_feature: MA Experiment 108573 PARAMETER Experiment Name: At_Drought_cDNA_P Parameter: Timepoint (hr) Value: 6
  misc_feature: MA Experiment 108573 PARAMETER Experiment Name: At_Drought_cDNA_P Parameter: Tissue Value: Aerial
  misc_feature: MA Experiment 108573 PARAMETER Experiment Name: At_Drought_cDNA_P Parameter: Treatment Value: Drought vs. No Drought
  misc_feature: MA Experiment ID: 108595 Result: Up-regulated in Transcription
  misc_feature: MA Experiment 108595 PARAMETER Experiment Name: At_Ler-pi_Ovule_cDNA_P Parameter: Plant Line Value: null
  misc_feature: MA Experiment ID: 20000069 Result: Up-regulated in Transcription
  misc_feature: MA Experiment 20000069 PARAMETER Experiment Name: At_100uM_ABA_Mutants_cDNA_P Parameter: Plant Line Value: CS23
  misc_feature: MA Experiment 20000069 PARAMETER Experiment Name: At_100uM_ABA_Mutants_cDNA_P Parameter: Timepoint (hr) Value: 6
  misc_feature: MA Experiment 20000069 PARAMETER Experiment Name: At_100uM_ABA_Mutants_cDNA_P Parameter: Tissue Value: Aerial
  misc_feature: MA Experiment 20000069 PARAMETER Experiment Name: At_100uM_ABA_Mutants_cDNA_P Parameter: Treatment Value: 100uM ABA vs. No Treatment
  misc_feature: MA Experiment ID: 20000070 Result: Up-regulated in Transcription
  misc_feature: MA Experiment 20000070 PARAMETER Experiment Name: At_100uM_ABA_Mutants_cDNA_P Parameter: Plant Line Value: CS24
  misc_feature: MA Experiment 20000070 PARAMETER Experiment Name: At_100uM_ABA_Mutants_cDNA_P Parameter: Timepoint (hr) Value: 6
  misc_feature: MA Experiment 20000070 PARAMETER Experiment Name: At_100uM_ABA_Mutants_cDNA_P Parameter: Tissue Value: Aerial
  misc_feature: MA Experiment 20000070 PARAMETER Experiment Name: At_100uM_ABA_Mutants_cDNA_P Parameter: Treatment Value: 100uM ABA vs. No Treatment
  misc_feature: MA Experiment ID: 20000071 Result: Up-regulated in Transcription
  misc_feature: MA Experiment 20000071 PARAMETER Experiment Name: At_100uM_ABA_Mutants_cDNA_P Parameter: Plant Line Value: CS8104
  misc_feature: MA Experiment 20000071 PARAMETER Experiment Name: At_100uM_ABA_Mutants_cDNA_P Parameter: Timepoint (hr) Value: 6
  misc_feature: MA Experiment 20000071 PARAMETER Experiment Name: At_100uM_ABA_Mutants_cDNA_P Parameter: Tissue Value: Aerial
  misc_feature: MA Experiment 20000071 PARAMETER Experiment Name: At_100uM_ABA_Mutants_cDNA_P Parameter: Treatment Value: 100uM ABA vs. No Treatment
  misc_feature: MA Experiment ID: 20000072 Result: Up-regulated in Transcription
  misc_feature: MA Experiment 20000072 PARAMETER Experiment Name: At_100uM_ABA_Mutants_cDNA_P Parameter: Plant Line Value: CS8105
  misc_feature: MA Experiment 20000072 PARAMETER Experiment Name: At_100uM_ABA_Mutants_cDNA_P Parameter: Timepoint (hr) Value: 6
  misc_feature: MA Experiment 20000072 PARAMETER Experiment Name: At_100uM_ABA_Mutants_cDNA_P Parameter: Tissue Value: Aerial
  misc_feature: MA Experiment 20000072 PARAMETER Experiment Name: At_100uM_ABA_Mutants_cDNA_P Parameter: Treatment Value: 100uM ABA vs. No Treatment
  misc_feature: MA Experiment ID: 20000087 Result: Up-regulated in Transcription
  misc_feature: MA Experiment 20000087 PARAMETER Experiment Name: At_100uM_ABA_Mutants_cDNA_P Parameter: Plant Line Value: WS
  misc_feature: MA Experiment 20000087 PARAMETER Experiment Name: At_100uM_ABA_Mutants_cDNA_P Parameter: Timepoint (hr) Value: 6
  misc_feature: MA Experiment 20000087 PARAMETER Experiment Name: At_100uM_ABA_Mutants_cDNA_P Parameter: Tissue Value: Aerial
  misc_feature: MA Experiment 20000087 PARAMETER Experiment Name: At_100uM_ABA_Mutants_cDNA_P Parameter: Treatment Value: 100uM ABA vs. No Treatment
  misc_feature: MA Experiment ID: 20000088 Result: Up-regulated in Transcription
  misc_feature: MA Experiment 20000088 PARAMETER Experiment Name: At_100uM_ABA_Mutants_cDNA_P Parameter: Plant Line Value: Landsberg
  misc_feature: MA Experiment 20000088 PARAMETER Experiment Name: At_100uM_ABA_Mutants_cDNA_P Parameter: Timepoint (hr) Value: 6
  misc_feature: MA Experiment 20000088 PARAMETER Experiment Name: At_100uM_ABA_Mutants_cDNA_P Parameter: Tissue Value: Aerial
  misc_feature: MA Experiment 20000088 PARAMETER Experiment Name: At_100uM_ABA_Mutants_cDNA_P Parameter: Treatment Value: 100uM ABA vs. No Treatment
  misc_feature: MA Experiment ID: 20000089 Result: Up-regulated in Transcription
  misc_feature: MA Experiment ID: 20000090 Result: Up-regulated in Transcription
  misc_feature: MA Experiment ID: 20000111 Result: Down-regulated in Transcription
  misc_feature: MA Experiment 20000111 PARAMETER Experiment Name: At_42deg_Heat_cDNA_P Parameter: Temperature (deg C) Value: 42 vs. 22
  misc_feature: MA Experiment 20000111 PARAMETER Experiment Name: At_42deg_Heat_cDNA_P Parameter: Timepoint (hr) Value: 6
  misc_feature: MA Experiment 20000111 PARAMETER Experiment Name: At_42deg_Heat_cDNA_P Parameter: Tissue Value: Aerial
  misc_feature: MA Experiment ID: 20000113 Result: Down-regulated in Transcription
  misc_feature: MA Experiment 20000113 PARAMETER Experiment Name: At_42deg_Heat_cDNA_P Parameter: Temperature (deg C) Value: 42 vs. 22
  misc_feature: MA Experiment 20000113 PARAMETER Experiment Name: At_42deg_Heat_cDNA_P Parameter: Timepoint (hr) Value: 8
  misc_feature: MA Experiment 20000113 PARAMETER Experiment Name: At_42deg_Heat_cDNA_P Parameter: Tissue Value: Aerial
  misc_feature: MA Experiment ID: 20000117 Result: Up-regulated in Transcription
  misc_feature: MA Experiment 20000117 PARAMETER Experiment Name: At_100uM_ABA_Mutants_cDNA_P Parameter: Plant Line Value: Columbia
  misc_feature: MA Experiment 20000117 PARAMETER Experiment Name: At_100uM_ABA_Mutants_cDNA_P Parameter: Timepoint (hr) Value: 6
  misc_feature: MA Experiment 20000117 PARAMETER Experiment Name: At_100uM_ABA_Mutants_cDNA_P Parameter: Tissue Value: Aerial
  misc_feature: MA Experiment 20000117 PARAMETER Experiment Name: At_100uM_ABA_Mutants_cDNA_P Parameter: Treatment Value: 100uM ABA vs. No Treatment
  misc_feature: MA Experiment ID: 20000173 Result: Down-regulated in Transcription
  misc_feature: MA Experiment 20000173 PARAMETER Experiment Name: At_42deg_Heat_P Parameter: Age (day) Value: 14
  misc_feature: MA Experiment 20000173 PARAMETER Experiment Name: At_42deg_Heat_P Parameter: Organism Value: A. thaliana
  misc_feature: MA Experiment 20000173 PARAMETER Experiment Name: At_42deg_Heat_P Parameter: Plant Line Value: WS
  misc_feature: MA Experiment 20000173 PARAMETER Experiment Name: At_42deg_Heat_P Parameter: Temperature (deg C) Value: 42 vs. 22
  misc_feature: MA Experiment 20000173 PARAMETER Experiment Name: At_42deg_Heat_P Parameter: Timepoint (hr) Value: 6
  misc_feature: MA Experiment 20000173 PARAMETER Experiment Name: At_42deg_Heat_P Parameter: Tissue Value: Aerial
  misc_feature: MA Experiment ID: 20000235 Result: Down-regulated in Transcription
  misc_feature: MA Experiment 20000235 PARAMETER Experiment Name: At_Siliques_P Parameter: Age (day) Value: 21
  misc_feature: MA Experiment 20000235 PARAMETER Experiment Name: At_Siliques_P Parameter: Organism Value: A. thaliana
  misc_feature: MA Experiment 20000235 PARAMETER Experiment Name: At_Siliques_P Parameter: Plant Line Value: WS
  misc_feature: MA Experiment 20000235 PARAMETER Experiment Name: At_Siliques_P Parameter: Tissue Value: 5-10mm Siliques vs. Whole Plant
  misc_feature: MA Experiment ID: 20000437 Result: Up-regulated in Transcription
  misc_feature: MA Experiment 20000437 PARAMETER Experiment Name: At_Drought_P Parameter: Age (day) Value: 8
  misc_feature: MA Experiment 20000437 PARAMETER Experiment Name: At_Drought_P Parameter: Organism Value: A. thaliana
  misc_feature: MA Experiment 20000437 PARAMETER Experiment Name: At_Drought_P Parameter: Plant Line Value: WS
  misc_feature: MA Experiment 20000437 PARAMETER Experiment Name: At_Drought_P Parameter: Timepoint (hr) Value: 24
  misc_feature: MA Experiment 20000437 PARAMETER Experiment Name: At_Drought_P Parameter: Tissue Value: Whole Plant
  misc_feature: MA Experiment 20000437 PARAMETER Experiment Name: At_Drought_P Parameter: Treatment Value: Drought vs. No Drought
  misc_feature: MA Experiment ID: 20001248 Result: Up-regulated in Transcription
  misc_feature: MA Experiment 20001248 PARAMETER Experiment Name: At_Far-red-induction_P Parameter: Age (day) Value: 7
  misc_feature: MA Experiment 20001248 PARAMETER Experiment Name: At_Far-red-induction_P Parameter: Light Value: Far-red vs. White
  misc_feature: MA Experiment 20001248 PARAMETER Experiment Name: At_Far-red-induction_P Parameter: Organism Value: A. thaliana
  misc_feature: MA Experiment 20001248 PARAMETER Experiment Name: At_Far-red-induction_P Parameter: Plant Line Value: Columbia
  misc_feature: MA Experiment 20001248 PARAMETER Experiment Name: At_Far-red-induction_P Parameter: Timepoint (hr) Value: 4
  misc_feature: MA Experiment 20001248 PARAMETER Experiment Name: At_Far-red-induction_P Parameter: Tissue Value: Whole Plant
  misc_feature: MA Experiment ID: 20001451 Result: Up-regulated in Transcription
  misc_feature: MA Experiment 20001451 PARAMETER Experiment Name: At_Far-red-induction_P Parameter: Age (day) Value: 7
  misc_feature: MA Experiment 20001451 PARAMETER Experiment Name: At_Far-red-induction_P Parameter: Light Value: Far-red vs. White
  misc_feature: MA Experiment 20001451 PARAMETER Experiment Name: At_Far-red-induction_P Parameter: Organism Value: A. thaliana
  misc_feature: MA Experiment 20001451 PARAMETER Experiment Name: At_Far-red-induction_P Parameter: Plant Line Value: Columbia
  misc_feature: MA Experiment 20001451 PARAMETER Experiment Name: At_Far-red-induction_P Parameter: Timepoint (hr) Value: 24
  misc_feature: MA Experiment 20001451 PARAMETER Experiment Name: At_Far-red-induction_P Parameter: Tissue Value: Whole Plant
  misc_feature: MA Experiment ID: 20001558 Result: Down-regulated in Transcription
  misc_feature: MA Experiment 20001558 PARAMETER Experiment Name: At_Drought_Soil_Dry_P Parameter: Age (day) Value: 27
  misc_feature: MA Experiment 20001558 PARAMETER Experiment Name: At_Drought_Soil_Dry_P Parameter: Organism Value: A. thaliana
  misc_feature: MA Experiment 20001558 PARAMETER Experiment Name: At_Drought_Soil_Dry_P Parameter: Plant Line Value: WS
  misc_feature: MA Experiment 20001558 PARAMETER Experiment Name: At_Drought_Soil_Dry_P Parameter: Post Timepoint (hr) Value: 6
  misc_feature: MA Experiment 20001558 PARAMETER Experiment Name: At_Drought_Soil_Dry_P Parameter: Post-Treatment Value: Re-Water vs. No Drought
  misc_feature: MA Experiment 20001558 PARAMETER Experiment Name: At_Drought_Soil_Dry_P Parameter: Timepoint (day) Value: 13
  misc_feature: MA Experiment 20001558 PARAMETER Experiment Name: At_Drought_Soil_Dry_P Parameter: Treatment Value: Drought vs. No Drought
acaaagcgtacaaatcacaaacacgtagttattctctctttactctctctatttctctctcttcaaaccctacgaagatcttcttcttcttcttcaagaatcgatcatgaaaggagctaaatctaaggctgaaaccaggagcacaaagctctctgtgactaagaagcctgctaagggagccaaaggtgctgctaaagatccaaacaaacctaagaggccttccagtgccttcttcgttttcatggaagatttccgtgtgacgtacaaggaggagcaccctaagaacaagtctgttgctgctgttggcaaagctggtggtgaaaagtggaaatccttgtctgactctgagaaggctccttatgtggctaaggctgacaagcgcaaggttgagtatgagaagaacatgaaagcctacaacaagaaattggaggaaggccctaaggaagatgaggaatctgacaagtcagtttcagaggttaacgatgaggatgatgctgaggatggcagtgaagaggaggaagacgatgattaagaagttgaagttgtggtagcgtaatatagaaggctgcaaggaatctctcggatgtttttatctcctctcttaaaatgttaattcgggtggttaaagtggttttttttttttttctttttctttttcttactgatgtttcgttttagtaaactattacctatctcccactgattctacgggtaatggaaaaagtgaatgtagaatgtttagatggtgaaatgagagatttgtagctctatataatgaatgatttagtttttaatt

SEQ ID NO: 108699 - protein, 141 aa, Arabidopsis thaliana; identical to SEQ ID NO: 28781
  peptide (1)..(141): Ceres Seq. ID no. 13668083
  misc_feature (35)..(104): Pfam Name: HMG (high mobility group) box Pfam Description: HMG (high mobility group) box
  misc_feature (1)..(141): Homolog of NCBI NO: 25402921 NR Description: protein F2D10.18 [imported] - Arabidopsis >gi|8886929|gb|AAF80615.1|AC069251_8 F2D10.18 [Arabidopsis
  misc_feature (1)..(141): Homolog of NCBI NO: 18394900 NR Description: expressed protein [Arabidopsis thaliana]
  misc_feature (1)..(141): Homolog of NCBI NO: 18394898 NR Description: expressed protein [Arabidopsis thaliana]
  misc_feature (1)..(136): Homolog of NCBI NO: 25402921 NR Description: protein F2D10.18 [imported] - Arabidopsis >gi|8886929|gb|AAF80615.1|AC069251_8 F2D10.18 [Arabidopsis
  misc_feature (1)..(140): Homolog of NCBI NO: 7446212 NR Description: high mobility group protein - potato

SEQ ID NO: 108700 - protein, 96 aa, Arabidopsis thaliana; identical to SEQ ID NO: 28782
  peptide (1)..(96): Ceres Seq. ID no. 13668084
  misc_feature (1)..(59): Pfam Name: HMG (high mobility group) box Pfam Description: HMG (high mobility group) box
  misc_feature (1)..(96): Homolog of NCBI NO: 25402921 NR Description: protein F2D10.18 [imported] - Arabidopsis >gi|8886929|gb|AAF80615.1|AC069251_8 F2D10.18 [Arabidopsis
  misc_feature (1)..(96): Homolog of NCBI NO: 18394900 NR Description: expressed protein [Arabidopsis thaliana]
  misc_feature (1)..(96): Homolog of NCBI NO: 18394898 NR Description: expressed protein [Arabidopsis thaliana]
  misc_feature (1)..(91): Homolog of NCBI NO: 25402921 NR Description: protein F2D10.18 [imported] - Arabidopsis >gi|8886929|gb|AAF80615.1|AC069251_8 F2D10.18 [Arabidopsis
  misc_feature (1)..(95): Homolog of NCBI NO: 7446212 NR Description: high mobility group protein - potato

SEQ ID NO: 108701 - DNA, 1636 bp, Arabidopsis thaliana
  misc_feature (1)..(1636): Ceres Seq. ID no. 13668088
  misc_feature: MA Experiment ID: 20000173 Result: Down-regulated in Transcription
  misc_feature: MA Experiment 20000173 PARAMETER Experiment Name: At_42deg_Heat_P Parameter: Age (day) Value: 14
  misc_feature: MA Experiment 20000173 PARAMETER Experiment Name: At_42deg_Heat_P Parameter: Organism Value: A. thaliana
  misc_feature: MA Experiment 20000173 PARAMETER Experiment Name: At_42deg_Heat_P Parameter: Plant Line Value: WS
  misc_feature: MA Experiment 20000173 PARAMETER Experiment Name: At_42deg_Heat_P Parameter: Temperature (deg C) Value: 42 vs. 22
  misc_feature: MA Experiment 20000173 PARAMETER Experiment Name: At_42deg_Heat_P Parameter: Timepoint (hr) Value: 6
  misc_feature: MA Experiment 20000173 PARAMETER Experiment Name: At_42deg_Heat_P Parameter: Tissue Value: Aerial
  misc_feature: MA Experiment ID: 20000182 Result: Up-regulated in Transcription
  misc_feature: MA Experiment 20000182 PARAMETER Experiment Name: At_2mM_SA_P Parameter: Age (day) Value: 14
  misc_feature: MA Experiment 20000182 PARAMETER Experiment Name: At_2mM_SA_P Parameter: Organism Value: A. thaliana
  misc_feature: MA Experiment 20000182 PARAMETER Experiment Name: At_2mM_SA_P Parameter: Plant Line Value: WS
  misc_feature: MA Experiment 20000182 PARAMETER Experiment Name: At_2mM_SA_P Parameter: Timepoint (hr) Value: 6
  misc_feature: MA Experiment 20000182 PARAMETER Experiment Name: At_2mM_SA_P Parameter: Tissue Value: Aerial
  misc_feature: MA Experiment 20000182 PARAMETER Experiment Name: At_2mM_SA_P Parameter: Treatment Value: 2mM SA vs. No Treatment
  misc_feature: MA Experiment ID: 20000184 Result: Down-regulated in Transcription
  misc_feature: MA Experiment 20000184 PARAMETER Experiment Name: At_Shoots__P Parameter: Age (day) Value: 7
  misc_feature: MA Experiment 20000184 PARAMETER Experiment Name: At_Shoots__P Parameter: Tissue Value: Shoots vs. Whole Plant
  misc_feature: MA Experiment ID: 20000185 Result: Down-regulated in Transcription
  misc_feature: MA Experiment 20000185 PARAMETER Experiment Name: At_Roots__P Parameter: Age (day) Value: 7 vs. 21
  misc_feature: MA Experiment 20000185 PARAMETER Experiment Name: At_Roots__P Parameter: Organism Value: A. thaliana
  misc_feature: MA Experiment 20000185 PARAMETER Experiment Name: At_Roots__P Parameter: Tissue Value: Roots vs. Whole Plant
  misc_feature: MA Experiment ID: 20000213 Result: Down-regulated in Transcription
  misc_feature: MA Experiment 20000213 PARAMETER Experiment Name: At_4deg_Cold_P Parameter: Timepoint (hr) Value: 2
  misc_feature: MA Experiment ID: 20000214 Result: Down-regulated in Transcription
  misc_feature: MA Experiment 20000214 PARAMETER Experiment Name: At_4deg_Cold_P Parameter: Timepoint (hr) Value: 6
  misc_feature: MA Experiment ID: 20000227 Result: Down-regulated in Transcription
  misc_feature: MA Experiment 20000227 PARAMETER Experiment Name: At_Root-Tips-vs-Tops_P Parameter: Tissue Value: Root Tips vs. Root Tops
  misc_feature: MA Experiment ID: 20000234 Result: Down-regulated in Transcription
  misc_feature: MA Experiment 20000234 PARAMETER Experiment Name: At_Siliques_P Parameter: Age (day) Value: 21
  misc_feature: MA Experiment 20000234 PARAMETER Experiment Name: At_Siliques_P Parameter: Organism Value: A. thaliana
  misc_feature: MA Experiment 20000234 PARAMETER Experiment Name: At_Siliques_P Parameter: Plant Line Value: WS
  misc_feature: MA Experiment 20000234 PARAMETER Experiment Name: At_Siliques_P Parameter: Tissue Value: Less Than 5mm Siliques vs. Whole Plant
  misc_feature: MA Experiment ID: 20000235 Result: Down-regulated in Transcription
  misc_feature: MA Experiment 20000235 PARAMETER Experiment Name: At_Siliques_P Parameter: Age (day) Value: 21
  misc_feature: MA Experiment 20000235 PARAMETER Experiment Name: At_Siliques_P Parameter: Organism Value: A. thaliana
  misc_feature: MA Experiment 20000235 PARAMETER Experiment Name: At_Siliques_P Parameter: Plant Line Value: WS
  misc_feature: MA Experiment 20000235 PARAMETER Experiment Name: At_Siliques_P Parameter: Tissue Value: 5-10mm Siliques vs. Whole Plant
  misc_feature: MA Experiment ID: 20000264 Result: Down-regulated in Transcription
  misc_feature: MA Experiment 20000264 PARAMETER Experiment Name: At_Open_Flower_P Parameter: Age (day) Value: 21
  misc_feature: MA Experiment 20000264 PARAMETER Experiment Name: At_Open_Flower_P Parameter: Plant Line Value: WS
  misc_feature: MA Experiment 20000264 PARAMETER Experiment Name: At_Open_Flower_P Parameter: Tissue Value: Open Flower vs. Whole Plant
  misc_feature: MA Experiment ID: 20000265 Result: Down-regulated in Transcription
  misc_feature: MA Experiment 20000265 PARAMETER Experiment Name: At_Open_Flower_P Parameter: Age (day) Value: 21
  misc_feature: MA Experiment 20000265 PARAMETER Experiment Name: At_Open_Flower_P Parameter: Plant Line Value: WS
  misc_feature: MA Experiment 20000265 PARAMETER Experiment Name: At_Open_Flower_P Parameter: Tissue Value: Closed Flower vs. Whole Plant
  misc_feature: MA Experiment ID: 20000286 Result: Down-regulated in Transcription
  misc_feature: MA Experiment 20000286 PARAMETER Experiment Name: At_Open_Flower_P Parameter: Age (day) Value: 21
  misc_feature: MA Experiment 20000286 PARAMETER Experiment Name: At_Open_Flower_P Parameter: Plant Line Value: WS
  misc_feature: MA Experiment 20000286 PARAMETER Experiment Name: At_Open_Flower_P Parameter: Tissue Value: Half Open vs. Whole Plant
  misc_feature: MA Experiment ID: 20000436 Result: Up-regulated in Transcription
  misc_feature: MA Experiment 20000436 PARAMETER Experiment Name: At_Drought_P Parameter: Age (day) Value: 7
  misc_feature: MA Experiment 20000436 PARAMETER Experiment Name: At_Drought_P Parameter: Organism Value: A. thaliana
  misc_feature: MA Experiment 20000436 PARAMETER Experiment Name: At_Drought_P Parameter: Plant Line Value: WS
  misc_feature: MA Experiment 20000436 PARAMETER Experiment Name: At_Drought_P Parameter: Timepoint (hr) Value: 12
  misc_feature: MA Experiment 20000436 PARAMETER Experiment Name: At_Drought_P Parameter: Tissue Value: Whole Plant
  misc_feature: MA Experiment 20000436 PARAMETER Experiment Name: At_Drought_P Parameter: Treatment Value: Drought vs. No Drought
  misc_feature: MA Experiment ID: 20000437 Result: Up-regulated in Transcription
  misc_feature: MA Experiment 20000437 PARAMETER Experiment Name: At_Drought_P Parameter: Age (day) Value: 8
  misc_feature: MA Experiment 20000437 PARAMETER Experiment Name: At_Drought_P Parameter: Organism Value: A. thaliana
  misc_feature: MA Experiment 20000437 PARAMETER Experiment Name: At_Drought_P Parameter: Plant Line Value: WS
  misc_feature: MA Experiment 20000437 PARAMETER Experiment Name: At_Drought_P Parameter: Timepoint (hr) Value: 24
  misc_feature: MA Experiment 20000437 PARAMETER Experiment Name: At_Drought_P Parameter: Tissue Value: Whole Plant
  misc_feature: MA Experiment 20000437 PARAMETER Experiment Name: At_Drought_P Parameter: Treatment Value: Drought vs. No Drought
  misc_feature: MA Experiment ID: 20000438 Result: Down-regulated in Transcription
  misc_feature: MA Experiment 20000438 PARAMETER Experiment Name: At_Shoots__P Parameter: Age (day) Value: 14
  misc_feature: MA Experiment 20000438 PARAMETER Experiment Name: At_Shoots__P Parameter: Tissue Value: Shoots vs. Whole Plant
  misc_feature: MA Experiment ID: 20000441 Result: Up-regulated in Transcription
  misc_feature: MA Experiment 20000441 PARAMETER Experiment Name: At_1uM_BR-BRZ__P Parameter: Tissue Value: Shoot Apices
  misc_feature: MA Experiment 20000441 PARAMETER Experiment Name: At_1uM_BR-BRZ__P Parameter: Treatment Value: 1uM BR vs. No Treatment
  misc_feature: MA Experiment ID: 20000495 Result: Up-regulated in Transcription
  misc_feature: MA Experiment 20000495 PARAMETER Experiment Name: At_Guard_Cells_P Parameter: Harvest Date Value: 8/2/2002
  misc_feature: MA Experiment 20000495 PARAMETER Experiment Name: At_Guard_Cells_P Parameter: Organism Value: A. thaliana
  misc_feature: MA Experiment 20000495 PARAMETER Experiment Name: At_Guard_Cells_P Parameter: Tissue Value: Guard Cells vs. Leaves
  misc_feature: MA Experiment ID: 20000573 Result: Up-regulated in Transcription
  misc_feature: MA Experiment 20000573 PARAMETER Experiment Name: At_100uM_ABA_Mutants__P Parameter: Organism Value: A. thaliana
  misc_feature: MA Experiment 20000573 PARAMETER Experiment Name: At_100uM_ABA_Mutants__P Parameter: Plant Line Value: CS22 vs. Ler wt
  misc_feature: MA Experiment 20000573 PARAMETER Experiment Name: At_100uM_ABA_Mutants__P Parameter: Timepoint (hr) Value: N/A
  misc_feature: MA Experiment 20000573 PARAMETER Experiment Name: At_100uM_ABA_Mutants__P Parameter: Tissue Value: Whole Plant
  misc_feature: MA Experiment 20000573 PARAMETER Experiment Name: At_100uM_ABA_Mutants__P Parameter: Treatment Value: None
  misc_feature: MA Experiment ID: 20000574 Result: Up-regulated in Transcription
  misc_feature: MA Experiment 20000574 PARAMETER Experiment Name: At_100uM_ABA_Mutants__P Parameter: Organism Value: A. thaliana
  misc_feature: MA Experiment 20000574 PARAMETER Experiment Name: At_100uM_ABA_Mutants__P Parameter: Plant Line Value: CS23 vs. Ler wt
  misc_feature: MA Experiment 20000574 PARAMETER Experiment Name: At_100uM_ABA_Mutants__P Parameter: Timepoint (hr) Value: N/A
  misc_feature: MA Experiment 20000574 PARAMETER Experiment Name: At_100uM_ABA_Mutants__P Parameter: Tissue Value: Whole Plant
  misc_feature: MA Experiment 20000574 PARAMETER Experiment Name: At_100uM_ABA_Mutants__P Parameter: Treatment Value: None
  misc_feature: MA Experiment ID: 20000575 Result: Down-regulated in Transcription
  misc_feature: MA Experiment 20000575 PARAMETER Experiment Name: At_100uM_ABA_Mutants__P Parameter: Organism Value: A. thaliana
  misc_feature: MA Experiment 20000575 PARAMETER Experiment Name: At_100uM_ABA_Mutants__P Parameter: Plant Line Value: CS22
  misc_feature: MA Experiment 20000575 PARAMETER Experiment Name: At_100uM_ABA_Mutants__P Parameter: Timepoint (hr) Value: 6
  misc_feature: MA Experiment 20000575 PARAMETER Experiment Name: At_100uM_ABA_Mutants__P Parameter: Tissue Value: Whole Plant
  misc_feature: MA Experiment 20000575 PARAMETER Experiment Name: At_100uM_ABA_Mutants__P Parameter: Treatment Value: 1uM ABA vs. No Treatment
  misc_feature: MA Experiment ID: 20000576 Result: Down-regulated in Transcription
  misc_feature: MA Experiment 20000576 PARAMETER Experiment Name: At_100uM_ABA_Mutants__P Parameter: Organism Value: A. thaliana
  misc_feature: MA Experiment 20000576 PARAMETER Experiment Name: At_100uM_ABA_Mutants__P Parameter: Plant Line Value: CS23
  misc_feature: MA Experiment 20000576 PARAMETER Experiment Name: At_100uM_ABA_Mutants__P Parameter: Timepoint (hr) Value: 6
  misc_feature: MA Experiment 20000576 PARAMETER Experiment Name: At_100uM_ABA_Mutants__P Parameter: Tissue Value: Whole Plant
  misc_feature: MA Experiment 20000576 PARAMETER Experiment Name: At_100uM_ABA_Mutants__P Parameter: Treatment Value: 1uM ABA vs. No Treatment
  misc_feature: MA Experiment ID: 20000709 Result: Down-regulated in Transcription
  misc_feature: MA Experiment 20000709 PARAMETER Experiment Name: At_15mM_NH4NO3_L-to-H_P Parameter: Age (hr) Value: 14
  misc_feature: MA Experiment 20000709 PARAMETER Experiment Name: At_15mM_NH4NO3_L-to-H_P Parameter: Organism Value: A. thaliana
  misc_feature: MA Experiment 20000709 PARAMETER Experiment Name: At_15mM_NH4NO3_L-to-H_P Parameter: Plant Line Value: WS
  misc_feature: MA Experiment 20000709 PARAMETER Experiment Name: At_15mM_NH4NO3_L-to-H_P Parameter: Timepoint (hr) Value: 4
  misc_feature: MA Experiment 20000709 PARAMETER Experiment Name: At_15mM_NH4NO3_L-to-H_P Parameter: Tissue Value: Aerial
  misc_feature: MA Experiment 20000709 PARAMETER Experiment Name: At_15mM_NH4NO3_L-to-H_P Parameter: Treatment Value: 15mM NH4NO3 vs. 30mM Mannitol
  misc_feature: MA Experiment ID: 20001247 Result: Up-regulated in Transcription
  misc_feature: MA Experiment 20001247 PARAMETER Experiment Name: At_Far-red-induction_P Parameter: Age (day) Value: 7
  misc_feature: MA Experiment 20001247 PARAMETER Experiment Name: At_Far-red-induction_P Parameter: Light Value: Far-red vs. White
  misc_feature: MA Experiment 20001247 PARAMETER Experiment Name: At_Far-red-induction_P Parameter: Organism Value: A. thaliana
  misc_feature: MA Experiment 20001247 PARAMETER Experiment Name: At_Far-red-induction_P Parameter: Plant Line Value: Columbia
  misc_feature: MA Experiment 20001247 PARAMETER Experiment Name: At_Far-red-induction_P Parameter: Timepoint (hr) Value: 1
  misc_feature: MA Experiment 20001247 PARAMETER Experiment Name: At_Far-red-induction_P Parameter: Tissue Value: Whole Plant
  misc_feature: MA Experiment ID: 20001248 Result: Up-regulated in Transcription
  misc_feature: MA Experiment 20001248 PARAMETER Experiment Name: At_Far-red-induction_P Parameter: Age (day) Value: 7
  misc_feature: MA Experiment 20001248 PARAMETER Experiment Name: At_Far-red-induction_P Parameter: Light Value: Far-red vs. White
  misc_feature: MA Experiment 20001248 PARAMETER Experiment Name: At_Far-red-induction_P Parameter: Organism Value: A. thaliana
  misc_feature: MA Experiment 20001248 PARAMETER Experiment Name: At_Far-red-induction_P Parameter: Plant Line Value: Columbia
  misc_feature: MA Experiment 20001248 PARAMETER Experiment Name: At_Far-red-induction_P Parameter: Timepoint (hr) Value: 4
  misc_feature: MA Experiment 20001248 PARAMETER Experiment Name: At_Far-red-induction_P Parameter: Tissue Value: Whole Plant
  misc_feature: MA Experiment ID: 20001450 Result: Up-regulated in Transcription
  misc_feature: MA Experiment 20001450 PARAMETER Experiment Name: At_Far-red-induction_P Parameter: Age (day) Value: 7
  misc_feature: MA Experiment 20001450 PARAMETER Experiment Name: At_Far-red-induction_P Parameter: Light Value: Far-red vs. White
  misc_feature: MA Experiment 20001450 PARAMETER Experiment Name: At_Far-red-induction_P Parameter: Organism Value: A. thaliana
  misc_feature: MA Experiment 20001450 PARAMETER Experiment Name: At_Far-red-induction_P Parameter: Plant Line Value: Columbia
  misc_feature: MA Experiment 20001450 PARAMETER Experiment Name: At_Far-red-induction_P Parameter: Timepoint (hr) Value: 8
  misc_feature: MA Experiment 20001450 PARAMETER Experiment Name: At_Far-red-induction_P Parameter: Tissue Value: Whole Plant
  misc_feature: MA Experiment ID: 20001451 Result: Up-regulated in Transcription
  misc_feature: MA Experiment 20001451 PARAMETER Experiment Name: At_Far-red-induction_P Parameter: Age (day) Value: 7
  misc_feature: MA Experiment 20001451 PARAMETER Experiment Name: At_Far-red-induction_P Parameter: Light Value: Far-red vs. White
  misc_feature: MA Experiment 20001451 PARAMETER Experiment Name: At_Far-red-induction_P Parameter: Organism Value: A. thaliana
  misc_feature: MA Experiment 20001451 PARAMETER Experiment Name: At_Far-red-induction_P Parameter: Plant Line Value: Columbia
  misc_feature: MA Experiment 20001451 PARAMETER Experiment Name: At_Far-red-induction_P Parameter: Timepoint (hr) Value: 24
  misc_feature: MA Experiment 20001451 PARAMETER Experiment Name: At_Far-red-induction_P Parameter: Tissue Value: Whole Plant
  misc_feature: MA Experiment ID: 20001554 Result: Up-regulated in Transcription
  misc_feature: MA Experiment 20001554 PARAMETER Experiment Name: At_Drought_Soil_Dry_P Parameter: Age (day) Value: 21
  misc_feature: MA Experiment 20001554 PARAMETER Experiment Name: At_Drought_Soil_Dry_P Parameter: Organism Value: A. thaliana
  misc_feature: MA Experiment 20001554 PARAMETER Experiment Name: At_Drought_Soil_Dry_P Parameter: Plant Line Value: WS
  misc_feature: MA Experiment 20001554 PARAMETER Experiment Name: At_Drought_Soil_Dry_P Parameter: Post Timepoint (hr) Value: None
  misc_feature: MA Experiment 20001554 PARAMETER Experiment Name: At_Drought_Soil_Dry_P Parameter: Post-Treatment Value: None
  misc_feature: MA Experiment 20001554 PARAMETER Experiment Name: At_Drought_Soil_Dry_P Parameter: Timepoint (day) Value: 7
  misc_feature: MA Experiment 20001554 PARAMETER Experiment Name: At_Drought_Soil_Dry_P Parameter: Treatment Value: Drought vs. No Drought
  misc_feature: MA Experiment ID: 20001555 Result: Up-regulated in Transcription
  misc_feature: MA Experiment 20001555 PARAMETER Experiment Name: At_Drought_Soil_Dry_P Parameter: Age (day) Value: 24
  misc_feature: MA Experiment 20001555 PARAMETER Experiment Name: At_Drought_Soil_Dry_P Parameter: Organism Value: A. thaliana
  misc_feature: MA Experiment 20001555 PARAMETER Experiment Name: At_Drought_Soil_Dry_P Parameter: Plant Line Value: WS
  misc_feature: MA Experiment 20001555 PARAMETER Experiment Name: At_Drought_Soil_Dry_P Parameter: Post Timepoint (hr) Value: None
  misc_feature: MA Experiment 20001555 PARAMETER Experiment Name: At_Drought_Soil_Dry_P Parameter: Post-Treatment Value: None
  misc_feature: MA Experiment 20001555 PARAMETER Experiment Name: At_Drought_Soil_Dry_P Parameter: Timepoint (day) Value: 10
  misc_feature: MA Experiment 20001555 PARAMETER Experiment Name: At_Drought_Soil_Dry_P Parameter: Treatment Value: Drought vs. No Drought
  misc_feature: MA Experiment ID: 20001757 Result: Down-regulated in Transcription
  misc_feature: MA Experiment 20001757 PARAMETER Experiment Name: At_50mM_NH4NO3_L-to-H_P Parameter: Timepoint (hr) Value: 6
  misc_feature: MA Experiment 20001757 PARAMETER Experiment Name: At_50mM_NH4NO3_L-to-H_P Parameter: Tissue Value: Leaf
  misc_feature: MA Experiment 20001757 PARAMETER Experiment Name: At_50mM_NH4NO3_L-to-H_P Parameter: Treatment Value: 50mM NH4NO3 vs 100mM Mannitol
  misc_feature: MA Experiment ID: 20001771 Result: Up-regulated in Transcription
  misc_feature: MA Experiment 20001771 PARAMETER Experiment Name: At_Far-red-enriched-adult_P Parameter: Age (day) Value: 28
  misc_feature: MA Experiment 20001771 PARAMETER Experiment Name: At_Far-red-enriched-adult_P Parameter: Light Value: Far-red enriched vs. White
  misc_feature: MA Experiment 20001771 PARAMETER Experiment Name: At_Far-red-enriched-adult_P Parameter: Organism Value: A. thaliana
  misc_feature: MA Experiment 20001771 PARAMETER Experiment Name: At_Far-red-enriched-adult_P Parameter: Plant Line Value: Columbia
  misc_feature: MA Experiment 20001771 PARAMETER Experiment Name: At_Far-red-enriched-adult_P Parameter: Timepoint (hr) Value: 16
  misc_feature: MA Experiment 20001771 PARAMETER Experiment Name: At_Far-red-enriched-adult_P Parameter: Tissue Value: Aerial
  misc_feature: MA Experiment ID: 20001773 Result: Up-regulated in Transcription
  misc_feature: MA Experiment 20001773 PARAMETER Experiment Name: At_Far-red-enriched-adult_P Parameter: Age (day) Value: 30
  misc_feature: MA Experiment 20001773 PARAMETER Experiment Name: At_Far-red-enriched-adult_P Parameter: Light Value: Far-red enriched vs. White
  misc_feature: MA Experiment 20001773 PARAMETER Experiment Name: At_Far-red-enriched-adult_P Parameter: Organism Value: A. thaliana
  misc_feature: MA Experiment 20001773 PARAMETER Experiment Name: At_Far-red-enriched-adult_P Parameter: Plant Line Value: Columbia
  misc_feature: MA Experiment 20001773 PARAMETER Experiment Name: At_Far-red-enriched-adult_P Parameter: Timepoint (hr) Value: 48
  misc_feature: MA Experiment 20001773 PARAMETER Experiment Name: At_Far-red-enriched-adult_P Parameter: Tissue Value: Aerial
acttacgtgttggatacttaatttgacactcttctttgtgttttctcttccaccttctttttcggtatatcattcaacaaaattctctcttcatttctttattttgttgttttttttattattattgaaatcaagagaattaaaacagaggctctgcaaaagaagatgatcaaaacaatcacatctctacgcaaaactctggttctacctcttcatttacatattcgtacgctacaaactttcgccaagtacaacgcacaagctgcatcggctttgcgagaagagcgtaagaaacctctttatcaaaatggagatgatgtatatgcggatttggattgggataatctcgggtttggtctaaatccagctgattacatgtatgtcatgaaatgctcaaaagacggcgaattcactcaaggagaacttagtccctatgggaatattcagctaagtccttctgctggagtcttaaactatggacaggcgatatacgaaggtacaaaagcatacaggaaagaaaatgggaagcttcttttgtttcgtccggatcacaacgctatccggatgaagcttggcgctgaacggatgctcatgccttctccttcggttgatcagtttgttaatgcagttaaacaaaccgctcttgcaaacaaacgttgggttcctcctgcagggaaagggactttgtacattaggcctttgttgatgggaagtggtccaatacttggtttaggtcctgcacctgaatatacattcattgtctatgcatctccagttggtaactacttcaaggaagggatggctgctcttaacctctatgttgaggaagaatatgtccgagcggctcctggtggagctggaggcgtcaagagcatcacaaattatgcgccagttttgaaagcactgagcagagccaagagtcgggggttttcagacgttctttatctcgactctgtcaagaagaagtacttagaggaggcttcttcttgcaacgtctttgttgtcaagggtcggacaatctcaactcctgcaactaatggaacaattcttgaagggattacgcggaaaagtgtgatggagatcgcaagtgatcaaggttatcaggtagtagagaaggcagttcatgtggatgaagtaatggatgcagatgaagttttttgcaccggaactgctgtagtagttgctcccgtgggcactatcacatatcaggaaaaaagagtagagtataaaaccggggatgaatctgtctgccagaaactgcgttcagtcctcgtaggtatccagacaggattgattgaagataacaagggatgggtcacagatatcaactgaagaataacaatcttcaatattttgccacaaaggagattactctgcattttaagctgtgtatacacgacaatgaagaacactataaacatatatatgagatagaaacagaaagctcttttgctcatttctatatcgtaaagtcaatgtctttcacaaaactatgacaaagaaaagaatcgtctattgtacttgtagacaagtgtttccaaggatagtttcatttcctcctgcagtaactccaaatttacatttcattttaggaggcaaaactgtatatacgtttcaatggctttccccacttctt

SEQ ID NO: 108702 - protein, 388 aa, Arabidopsis thaliana
  peptide (1)..(388): Ceres Seq. ID no. 13668089
  misc_feature (1)..(388): Homolog of NCBI NO: 15218409 NR Description: tat-binding protein -related [Arabidopsis
  misc_feature (71)..(388): Homolog of NCBI NO: 7450517 NR Description: branched-chain amino acid aminotransferase
  misc_feature (29)..(387): Homolog of NCBI NO: 14280354 NR Description: branched-chain amino acid aminotransferase
  misc_feature (55)..(388): Homolog of NCBI NO: 27311239 NR Description: Unknown protein [Oryza sativa (japonica
  misc_feature (54)..(387): Homolog of NCBI NO: 6319167 NR Description: branched-chain amino acid aminotransferase
  misc_feature (54)..(388): Homolog of NCBI NO: 34902362 NR Description: Putative aminotransferase [Oryza sativa (japonica group)] >gi|24418036|gb|AAN60486.1| Putative aminotransferase
  misc_feature (54)..(388): Homolog of NCBI NO: 18408919 NR Description: branched-chain-amino-acid transaminase -related
  misc_feature (54)..(388): Homolog of NCBI NO: 21593211 NR Description: branched-chain-amino-acid transaminase-like
  misc_feature (18)..(388): Homolog of NCBI NO: 26391655 NR Description: Branched-chain amino acid aminotransferase 5,
  misc_feature (1)..(383): Homolog of NCBI NO: 6319165 NR Description: branched-chain amino acid aminotransferase
MIKTITSLRKTLVLPLHLHIRTLQTFAKYNAQAASALREERKKPLYQNGDDVYADLDWDNLGFGLNPADYMYVMKCSKDGEFTQGELSPYGNIQLSPSAGVLNYGQAIYEGTKAYRKENGKLLLFRPDHNAIRMKLGAERMLMPSPSVDQFVNAVKQTALANKRWVPPAGKGTLYIRPLLMGSGPILGLGPAPEYTFIVYASPVGNYFKEGMAALNLYVEEEYVRAAPGGAGGVKSITNYAPVLKALSRAKSRGFSDVLYLDSVKKKYLEEASSCNVFVVKGRTISTPATNGTILEGITRKSVMEIASDQGYQVVEKAVHVDEVMDADEVFCTGTAVVVAPVGTITYQEKRVEYKTGDESVCQKLRSVLVGIQTGLIEDNKGWVTDIN

SEQ ID NO: 108703 - protein, 318 aa, Arabidopsis thaliana
  peptide (1)..(318): Ceres Seq. ID no. 13668090
  misc_feature (1)..(318): Homolog of NCBI NO: 15218409 NR Description: tat-binding protein -related [Arabidopsis
  misc_feature (1)..(318): Homolog of NCBI NO: 7450517 NR Description: branched-chain amino acid aminotransferase
  misc_feature (1)..(317): Homolog of NCBI NO: 14280354 NR Description: branched-chain amino acid aminotransferase
  misc_feature (1)..(318): Homolog of NCBI NO: 27311239 NR Description: Unknown protein [Oryza sativa (japonica
  misc_feature (1)..(317): Homolog of NCBI NO: 6319167 NR Description: branched-chain amino acid aminotransferase
  misc_feature (1)..(318): Homolog of NCBI NO: 34902362 NR Description: Putative aminotransferase [Oryza sativa (japonica group)] >gi|24418036|gb|AAN60486.1| Putative aminotransferase
  misc_feature (1)..(318): Homolog of NCBI NO: 18408919 NR Description: branched-chain-amino-acid transaminase -related
  misc_feature (1)..(318): Homolog of NCBI NO: 21593211 NR Description: branched-chain-amino-acid transaminase-like
  misc_feature (1)..(318): Homolog of NCBI NO: 26391655 NR Description: Branched-chain amino acid aminotransferase 5,
  misc_feature (1)..(313): Homolog of NCBI NO: 6319165 NR Description: branched-chain amino acid aminotransferase
MYVMKCSKDGEFTQGELSPYGNIQLSPSAGVLNYGQAIYEGTKAYRKENGKLLLFRPDHNAIRMKLGAERMLMPSPSVDQFVNAVKQTALANKRWVPPAGKGTLYIRPLLMGSGPILGLGPAPEYTFIVYASPVGNYFKEGMAALNLYVEEEYVRAAPGGAGGVKSITNYAPVLKALSRAKSRGFSDVLYLDSVKKKYLEEASSCNVFVVKGRTISTPATNGTILEGITRKSVMEIASDQGYQVVEKAVHVDEVMDADEVFCTGTAVVVAPVGTITYQEKRVEYKTGDESVCQKLRSVLVGIQTGLIEDNKGWVTDIN

SEQ ID NO: 108704 - protein, 315 aa, Arabidopsis thaliana
  peptide (1)..(315): Ceres Seq. ID no. 13668091
  misc_feature (1)..(315): Homolog of NCBI NO: 15218409 NR Description: tat-binding protein -related [Arabidopsis
  misc_feature (1)..(315): Homolog of NCBI NO: 7450517 NR Description: branched-chain amino acid aminotransferase
  misc_feature (1)..(314): Homolog of NCBI NO: 14280354 NR Description: branched-chain amino acid aminotransferase
  misc_feature (1)..(315): Homolog of NCBI NO: 27311239 NR Description: Unknown protein [Oryza sativa (japonica
  misc_feature (1)..(314): Homolog of NCBI NO: 6319167 NR Description: branched-chain amino acid aminotransferase
  misc_feature (1)..(315): Homolog of NCBI NO: 34902362 NR Description: Putative aminotransferase [Oryza sativa (japonica group)] >gi|24418036|gb|AAN60486.1| Putative aminotransferase
  misc_feature (1)..(315): Homolog of NCBI NO: 18408919 NR Description: branched-chain-amino-acid transaminase -related
  misc_feature (1)..(315): Homolog of NCBI NO: 21593211 NR Description: branched-chain-amino-acid transaminase-like
  misc_feature (1)..(315): Homolog of NCBI NO: 26391655 NR Description: Branched-chain amino acid aminotransferase 5,
  misc_feature (1)..(310): Homolog of NCBI NO: 6319165 NR Description: branched-chain amino acid aminotransferase
MKCSKDGEFTQGELSPYGNIQLSPSAGVLNYGQAIYEGTKAYRKENGKLLLFRPDHNAIRMKLGAERMLMPSPSVDQFVNAVKQTALANKRWVPPAGKGTLYIRPLLMGSGPILGLGPAPEYTFIVYASPVGNYFKEGMAALNLYVEEEYVRAAPGGAGGVKSITNYAPVLKALSRAKSRGFSDVLYLDSVKKKYLEEASSCNVFVVKGRTISTPATNGTILEGITRKSVMEIASDQGYQVVEKAVHVDEVMDADEVFCTGTAVVVAPVGTITYQEKRVEYKTGDESVCQKLRSVLVGIQTGLIEDNKGWVTDIN

SEQ ID NO: 108705 - DNA, 3076 bp, Arabidopsis thaliana
  misc_feature (1)..(3076): Ceres Seq. ID no. 13668100
  misc_feature: MA Experiment ID: 20000182 Result: Up-regulated in Transcription
  misc_feature: MA Experiment 20000182 PARAMETER Experiment Name: At_2mM_SA_P Parameter: Age (day) Value: 14
  misc_feature: MA Experiment 20000182 PARAMETER Experiment Name: At_2mM_SA_P Parameter: Organism Value: A. thaliana
  misc_feature: MA Experiment 20000182 PARAMETER Experiment Name: At_2mM_SA_P Parameter: Plant Line Value: WS
  misc_feature: MA Experiment 20000182 PARAMETER Experiment Name: At_2mM_SA_P Parameter: Timepoint (hr) Value: 6
  misc_feature: MA Experiment 20000182 PARAMETER Experiment Name: At_2mM_SA_P Parameter: Tissue Value: Aerial
  misc_feature: MA Experiment 20000182 PARAMETER Experiment Name: At_2mM_SA_P Parameter: Treatment Value: 2mM SA vs. No Treatment
  misc_feature: MA Experiment ID: 20000184 Result: Up-regulated in Transcription
  misc_feature: MA Experiment 20000184 PARAMETER Experiment Name: At_Shoots__P Parameter: Age (day) Value: 7
  misc_feature: MA Experiment 20000184 PARAMETER Experiment Name: At_Shoots__P Parameter: Tissue Value: Shoots vs. Whole Plant
  misc_feature: MA Experiment ID: 20000185 Result: Down-regulated in Transcription
  misc_feature: MA Experiment 20000185 PARAMETER Experiment Name: At_Roots__P Parameter: Age (day) Value: 7 vs. 21
  misc_feature: MA Experiment 20000185 PARAMETER Experiment Name: At_Roots__P Parameter: Organism Value: A. thaliana
  misc_feature: MA Experiment 20000185 PARAMETER Experiment Name: At_Roots__P Parameter: Tissue Value: Roots vs. Whole Plant
  misc_feature: MA Experiment ID: 20000213 Result: Up-regulated in Transcription
  misc_feature: MA Experiment 20000213 PARAMETER Experiment Name: At_4deg_Cold_P Parameter: Timepoint (hr) Value: 2
  misc_feature: MA Experiment ID: 20000234 Result: Down-regulated in Transcription
  misc_feature: MA Experiment 20000234 PARAMETER Experiment Name: At_Siliques_P Parameter: Age (day) Value: 21
  misc_feature: MA Experiment 20000234 PARAMETER Experiment Name: At_Siliques_P Parameter: Organism Value: A. thaliana
  misc_feature: MA Experiment 20000234 PARAMETER Experiment Name: At_Siliques_P Parameter: Plant Line Value: WS
  misc_feature: MA Experiment 20000234 PARAMETER Experiment Name: At_Siliques_P Parameter: Tissue Value: Less Than 5mm Siliques vs. Whole Plant
  misc_feature: MA Experiment ID: 20000264 Result: Down-regulated in Transcription
  misc_feature: MA Experiment 20000264 PARAMETER Experiment Name: At_Open_Flower_P Parameter: Age (day) Value: 21
  misc_feature: MA Experiment 20000264 PARAMETER Experiment Name: At_Open_Flower_P Parameter: Plant Line Value: WS
  misc_feature: MA Experiment 20000264 PARAMETER Experiment Name: At_Open_Flower_P Parameter: Tissue Value: Open Flower vs. Whole Plant
  misc_feature: MA Experiment ID: 20000265 Result: Down-regulated in Transcription
  misc_feature: MA Experiment 20000265 PARAMETER Experiment Name: At_Open_Flower_P Parameter: Age (day) Value: 21
  misc_feature: MA Experiment 20000265 PARAMETER Experiment Name: At_Open_Flower_P Parameter: Plant Line Value: WS
  misc_feature: MA Experiment 20000265 PARAMETER Experiment Name: At_Open_Flower_P Parameter: Tissue Value: Closed Flower vs. Whole Plant
  misc_feature: MA Experiment ID: 20000267 Result: Down-regulated in Transcription
  misc_feature: MA Experiment 20000267 PARAMETER Experiment Name: At_Drought_P Parameter: Age (day) Value: 7
  misc_feature: MA Experiment 20000267 PARAMETER Experiment Name: At_Drought_P Parameter: Organism Value: A. thaliana
  misc_feature: MA Experiment 20000267 PARAMETER Experiment Name: At_Drought_P Parameter: Plant Line Value: WS
  misc_feature: MA Experiment 20000267 PARAMETER Experiment Name: At_Drought_P Parameter: Timepoint (hr) Value: 6
  misc_feature: MA Experiment 20000267 PARAMETER Experiment Name: At_Drought_P Parameter: Tissue Value: Whole Plant
  misc_feature: MA Experiment 20000267 PARAMETER Experiment Name: At_Drought_P Parameter: Treatment Value: Drought vs. No Drought
  misc_feature: MA Experiment ID: 20000269 Result: Up-regulated in Transcription
  misc_feature: MA Experiment 20000269 PARAMETER Experiment Name: At_1mM_KNO3_L-vs-H_Roots_P Parameter: Age (day) Value: 7,10,12
  misc_feature: MA Experiment 20000269 PARAMETER Experiment Name: At_1mM_KNO3_L-vs-H_Roots_P Parameter: Organism Value: A. thaliana
  misc_feature: MA Experiment 20000269 PARAMETER Experiment Name: At_1mM_KNO3_L-vs-H_Roots_P Parameter: Plant Line Value: WS
  misc_feature: MA Experiment 20000269 PARAMETER Experiment Name: At_1mM_KNO3_L-vs-H_Roots_P Parameter: Timepoint (day) Value: 7,10,12
  misc_feature: MA Experiment 20000269 PARAMETER Experiment Name: At_1mM_KNO3_L-vs-H_Roots_P Parameter: Tissue Value: Roots
  misc_feature: MA Experiment 20000269 PARAMETER Experiment Name: At_1mM_KNO3_L-vs-H_Roots_P Parameter: Treatment Value: 1mM KNO3 vs. 50mM KNO3
  misc_feature: MA Experiment ID: 20000286 Result: Down-regulated in Transcription
  misc_feature: MA Experiment 20000286 PARAMETER Experiment Name: At_Open_Flower_P Parameter: Age (day) Value: 21
  misc_feature: MA Experiment 20000286 PARAMETER Experiment Name: At_Open_Flower_P Parameter: Plant Line Value: WS
  misc_feature: MA Experiment 20000286 PARAMETER Experiment Name: At_Open_Flower_P Parameter: Tissue Value: Half Open vs. Whole Plant
  misc_feature: MA Experiment ID: 20000308 Result: Down-regulated in Transcription
  misc_feature: MA Experiment 20000308 PARAMETER Experiment Name: At_100mM_NaCl__P Parameter: Age (day) Value: 17
  misc_feature: MA Experiment 20000308 PARAMETER Experiment Name: At_100mM_NaCl__P Parameter: Organism Value: A. thaliana
  misc_feature: MA Experiment 20000308 PARAMETER Experiment Name: At_100mM_NaCl__P Parameter: Plant Line Value: WS
  misc_feature: MA Experiment 20000308 PARAMETER Experiment Name: At_100mM_NaCl__P Parameter: Timepoint (hr) Value: 72
  misc_feature: MA Experiment 20000308 PARAMETER Experiment Name: At_100mM_NaCl__P Parameter: Tissue Value: Whole Plant
  misc_feature: MA Experiment 20000308 PARAMETER Experiment Name: At_100mM_NaCl__P Parameter: Treatment Value: 100mM NaCl vs. No Treatment
  misc_feature: MA Experiment ID: 20000437 Result: Down-regulated in Transcription
  misc_feature: MA Experiment 20000437 PARAMETER Experiment Name: At_Drought_P Parameter: Age (day) Value: 8
  misc_feature: MA Experiment 20000437 PARAMETER Experiment Name: At_Drought_P Parameter: Organism Value: A. thaliana
  misc_feature: MA Experiment 20000437 PARAMETER Experiment Name: At_Drought_P Parameter: Plant Line Value: WS
  misc_feature: MA Experiment 20000437 PARAMETER Experiment Name: At_Drought_P Parameter: Timepoint (hr) Value: 24
  misc_feature: MA Experiment 20000437 PARAMETER Experiment Name: At_Drought_P Parameter: Tissue Value: Whole Plant
  misc_feature: MA Experiment 20000437 PARAMETER Experiment Name: At_Drought_P Parameter: Treatment Value: Drought vs. No Drought
  misc_feature: MA Experiment ID: 20000441 Result: Up-regulated in Transcription
  misc_feature: MA Experiment 20000441 PARAMETER Experiment Name: At_1uM_BR-BRZ__P Parameter: Tissue Value: Shoot Apices
  misc_feature: MA Experiment 20000441 PARAMETER Experiment Name: At_1uM_BR-BRZ__P Parameter: Treatment Value: 1uM BR vs. No Treatment
  misc_feature: MA Experiment ID: 20000443 Result: Up-regulated in Transcription
  misc_feature: MA Experiment 20000443 PARAMETER Experiment Name: At_1uM_BR-BRZ__P Parameter: Tissue Value: Shoot Apices
  misc_feature: MA Experiment 20000443 PARAMETER Experiment Name: At_1uM_BR-BRZ__P Parameter: Treatment Value: 1uM BRZ vs. No Treatment
  misc_feature: MA Experiment ID: 20000495 Result: Down-regulated in Transcription
  misc_feature: MA Experiment 20000495 PARAMETER Experiment Name: At_Guard_Cells_P Parameter: Harvest Date Value: 8/2/2002
  misc_feature: MA Experiment 20000495 PARAMETER Experiment Name: At_Guard_Cells_P Parameter: Organism Value: A. thaliana
  misc_feature: MA Experiment 20000495 PARAMETER Experiment Name: At_Guard_Cells_P Parameter: Tissue Value: Guard Cells vs. Leaves
  misc_feature: MA Experiment ID: 20000709 Result: Up-regulated in Transcription
  misc_feature: MA Experiment 20000709 PARAMETER Experiment Name: At_15mM_NH4NO3_L-to-H_P Parameter: Age (hr) Value: 14
  misc_feature: MA Experiment 20000709 PARAMETER Experiment Name: At_15mM_NH4NO3_L-to-H_P Parameter: Organism Value: A. thaliana
  misc_feature: MA Experiment 20000709 PARAMETER Experiment Name: At_15mM_NH4NO3_L-to-H_P Parameter: Plant Line Value: WS
  misc_feature: MA Experiment 20000709 PARAMETER Experiment Name: At_15mM_NH4NO3_L-to-H_P Parameter: Timepoint (hr) Value: 4
  misc_feature: MA Experiment 20000709 PARAMETER Experiment Name: At_15mM_NH4NO3_L-to-H_P Parameter: Tissue Value: Aerial
  misc_feature: MA Experiment 20000709 PARAMETER Experiment Name: At_15mM_NH4NO3_L-to-H_P Parameter: Treatment Value: 15mM NH4NO3 vs. 30mM Mannitol
  misc_feature: MA Experiment ID: 20000794 Result: Down-regulated in Transcription
  misc_feature: MA Experiment 20000794 PARAMETER Experiment Name: At_Petals_P Parameter: Age (day) Value: 23-25 days
  misc_feature: MA Experiment 20000794 PARAMETER Experiment Name: At_Petals_P Parameter: Plant Line Value: WS
  misc_feature: MA Experiment 20000794 PARAMETER Experiment Name: At_Petals_P Parameter: Tissue Value: Petals vs. Whole plant
  misc_feature: MA Experiment ID: 20001457 Result: Up-regulated in Transcription
  misc_feature: MA Experiment 20001457 PARAMETER Experiment Name: At_50mM_NH4NO3_L-to-H_P Parameter: Age (day) Value: Undefined
  misc_feature: MA Experiment 20001457 PARAMETER Experiment Name: At_50mM_NH4NO3_L-to-H_P Parameter: Organism Value: Undefined
  misc_feature: MA Experiment 20001457 PARAMETER Experiment Name: At_50mM_NH4NO3_L-to-H_P Parameter: Plant Line Value: Undefined
  misc_feature: MA Experiment 20001457 PARAMETER Experiment Name: At_50mM_NH4NO3_L-to-H_P Parameter: Timepoint (hr) Value: 0.5
  misc_feature: MA Experiment 20001457 PARAMETER Experiment Name: At_50mM_NH4NO3_L-to-H_P Parameter: Tissue Value: Siliques
  misc_feature: MA Experiment 20001457 PARAMETER Experiment Name: At_50mM_NH4NO3_L-to-H_P Parameter: Treatment Value: 50mM NH4NO3 vs. 100mM Manitol
  misc_feature: MA Experiment ID: 20001458 Result: Up-regulated in Transcription
  misc_feature: MA Experiment 20001458 PARAMETER Experiment Name: At_50mM_NH4NO3_L-to-H_P Parameter: Age (day) Value: Undefined
  misc_feature: MA Experiment 20001458 PARAMETER Experiment Name: At_50mM_NH4NO3_L-to-H_P Parameter: Organism Value: Undefined
  misc_feature: MA Experiment 20001458 PARAMETER Experiment Name: At_50mM_NH4NO3_L-to-H_P Parameter: Plant Line Value: Undefined
  misc_feature: MA Experiment 20001458 PARAMETER Experiment Name: At_50mM_NH4NO3_L-to-H_P Parameter: Timepoint (hr) Value: 2
  misc_feature: MA Experiment 20001458 PARAMETER Experiment Name: At_50mM_NH4NO3_L-to-H_P Parameter: Tissue Value: Siliques
  misc_feature: MA Experiment 20001458 PARAMETER Experiment Name: At_50mM_NH4NO3_L-to-H_P Parameter: Treatment Value: 50mM NH4NO3 vs. 100mM Manitol
  misc_feature: MA Experiment ID: 20001459 Result: Up-regulated in Transcription
  misc_feature: MA Experiment 20001459 PARAMETER Experiment Name: At_50mM_NH4NO3_L-to-H_P Parameter: Age (day) Value: Undefined
  misc_feature: MA Experiment 20001459 PARAMETER Experiment Name: At_50mM_NH4NO3_L-to-H_P Parameter: Organism Value: Undefined
  misc_feature: MA Experiment 20001459 PARAMETER Experiment Name: At_50mM_NH4NO3_L-to-H_P Parameter: Plant Line Value: Undefined
  misc_feature: MA Experiment 20001459 PARAMETER Experiment Name: At_50mM_NH4NO3_L-to-H_P Parameter: Timepoint (hr) Value: 4
  misc_feature: MA Experiment 20001459 PARAMETER Experiment Name: At_50mM_NH4NO3_L-to-H_P Parameter: Tissue Value: Siliques
  misc_feature: MA Experiment 20001459 PARAMETER Experiment Name: At_50mM_NH4NO3_L-to-H_P Parameter: Treatment Value: 50mM NH4NO3 vs. 100mM Manitol
  misc_feature: MA Experiment ID: 20001557 Result: Up-regulated in Transcription
  misc_feature: MA Experiment 20001557 PARAMETER Experiment Name: At_Drought_Soil_Dry_P Parameter: Age (day) Value: 27
  misc_feature: MA Experiment 20001557 PARAMETER Experiment Name: At_Drought_Soil_Dry_P Parameter: Organism Value: A. thaliana
  misc_feature: MA Experiment 20001557 PARAMETER Experiment Name: At_Drought_Soil_Dry_P Parameter: Plant Line Value: WS
  misc_feature: MA Experiment 20001557 PARAMETER Experiment Name: At_Drought_Soil_Dry_P Parameter: Post Timepoint (hr) Value: 3
  misc_feature: MA Experiment 20001557 PARAMETER Experiment Name: At_Drought_Soil_Dry_P Parameter: Post-Treatment Value: Re-Water vs. No Drought
  misc_feature: MA Experiment 20001557 PARAMETER Experiment Name: At_Drought_Soil_Dry_P Parameter: Timepoint (day) Value: 13
  misc_feature: MA Experiment 20001557 PARAMETER Experiment Name: At_Drought_Soil_Dry_P Parameter: Treatment Value: Drought vs. No Drought
  misc_feature: MA Experiment ID: 20001755 Result: Up-regulated in Transcription
  misc_feature: MA Experiment 20001755 PARAMETER Experiment Name: At_50mM_NH4NO3_L-to-H_P Parameter: Timepoint (hr) Value: 2
  misc_feature: MA Experiment 20001755 PARAMETER Experiment Name: At_50mM_NH4NO3_L-to-H_P Parameter: Tissue Value: Leaf
  misc_feature: MA Experiment 20001755 PARAMETER Experiment Name: At_50mM_NH4NO3_L-to-H_P Parameter: Treatment Value: 50mM NH4NO3 vs 100mM Mannitol
  misc_feature: MA Experiment ID: 20001757 Result: Up-regulated in Transcription
  misc_feature: MA Experiment 20001757 PARAMETER Experiment Name: At_50mM_NH4NO3_L-to-H_P Parameter: Timepoint (hr) Value: 6
  misc_feature: MA Experiment 20001757 PARAMETER Experiment Name: At_50mM_NH4NO3_L-to-H_P Parameter: Tissue Value: Leaf
  misc_feature: MA Experiment 20001757 PARAMETER Experiment Name: At_50mM_NH4NO3_L-to-H_P Parameter: Treatment Value: 50mM NH4NO3 vs 100mM Mannitol
  misc_feature: MA Experiment ID: 20001759 Result: Up-regulated in Transcription
  misc_feature: MA Experiment 20001759 PARAMETER Experiment Name: At_50mM_NH4NO3_L-to-H_P Parameter: Timepoint (hr) Value: 1
  misc_feature: MA Experiment 20001759 PARAMETER Experiment Name: At_50mM_NH4NO3_L-to-H_P Parameter: Tissue Value: Siliques
  misc_feature: MA Experiment 20001759 PARAMETER Experiment Name: At_50mM_NH4NO3_L-to-H_P Parameter: Treatment Value: 50mM NH4NO3 vs 100mM Mannitol
  misc_feature: MA Experiment ID: 20001760 Result: Up-regulated in Transcription
  misc_feature: MA Experiment 20001760 PARAMETER Experiment Name: At_50mM_NH4NO3_L-to-H_P Parameter: Timepoint (hr) Value: 2
  misc_feature: MA Experiment 20001760 PARAMETER Experiment Name: At_50mM_NH4NO3_L-to-H_P Parameter: Tissue Value: Siliques
  misc_feature: MA Experiment 20001760 PARAMETER Experiment Name: At_50mM_NH4NO3_L-to-H_P Parameter: Treatment Value: 50mM NH4NO3 vs 100mM Mannitol
  misc_feature: MA Experiment ID: 20001906 Result: Down-regulated in Transcription
  misc_feature: MA Experiment 20001906 PARAMETER Experiment Name: At_Drought_Reproduction_P Parameter: Age (day) Value: 35
  misc_feature: MA Experiment 20001906 PARAMETER Experiment Name: At_Drought_Reproduction_P Parameter: Organism Value: A. thaliana
  misc_feature: MA Experiment 20001906 PARAMETER Experiment Name: At_Drought_Reproduction_P Parameter: Plant Line Value: WS
  misc_feature: MA Experiment 20001906 PARAMETER Experiment Name: At_Drought_Reproduction_P Parameter: Timepoint (day) Value: 5
  misc_feature: MA Experiment 20001906 PARAMETER Experiment Name: At_Drought_Reproduction_P Parameter: Tissue Value: Siliques
  misc_feature: MA Experiment 20001906 PARAMETER Experiment Name: At_Drought_Reproduction_P Parameter: Treatment Value: Drought vs. No Drought
  misc_feature: MA Experiment ID: 20001910 Result: Down-regulated in Transcription
  misc_feature: MA Experiment 20001910 PARAMETER Experiment Name: At_Drought_Reproduction_P Parameter: Age (day) Value: 37
  misc_feature: MA Experiment 20001910 PARAMETER Experiment Name: At_Drought_Reproduction_P Parameter: Organism Value: A. thaliana
  misc_feature: MA Experiment 20001910 PARAMETER Experiment Name: At_Drought_Reproduction_P Parameter: Plant Line Value: WS
  misc_feature: MA Experiment 20001910 PARAMETER Experiment Name: At_Drought_Reproduction_P Parameter: Timepoint (day) Value: 7
  misc_feature: MA Experiment 20001910 PARAMETER Experiment Name: At_Drought_Reproduction_P Parameter: Tissue Value: Flowers
  misc_feature: MA Experiment 20001910 PARAMETER Experiment Name: At_Drought_Reproduction_P Parameter: Treatment Value: Drought vs. No Drought
agatctcatctcactcacaagagagagatagagagagaaaaaggctctgctttctacattatttacgattatacactttccaacatggcggcctctgtagataatcgccaatacgctcgtctcgagccaggtttgaacggcgtggttcgttcttacaaacctcccgttccaggccggtccgattcccctaaggcgcaccagaaccaaaccaccaaccaaaccgtgttcttgaaaccagccaaggttcatgacgatgacgaagacgtgtcgagcgaagacgagaacgagacacacaacagcaacgccgtgtactacaaggagatgataagaaaatccaacgccgagcttgaaccgtccgttttggacccgagggacgaatacacggctgatagctggatcgagcgtaacccttccatggtacgtctcacagggaaacatcccttcaactccgaggcgcctcttaaccgtttaatgcaccacgggtttatcacccctgtcccgttgcactacgttcgtaaccacggccacgtccctaaagcccaatgggccgaatggacggtcgaggtgaccggattcgtcaaacggcccatgaaattcaccatggaccagctcgtctccgagtttgcttaccgcgagttcgccgcgacgctagtctgcgcggggaaccgccgtaaggaacagaacatggtgaagaagtcaaagggattcaactggggatccgccggagtttccacctccgtgtggcgtggtgtccctctctgcgacgtactgcgtcgctgcgggatctttagccgaaaaggcggcgctctcaacgtctgcttcgaagggtcggaggatcttccgggcggtgccggaactgctggttccaaatacggaacgagcatcaagaaggaatatgccatggatccatcaagagacatcattttggcttatatgcaaaacggagagtatctaacaccagaccacggttttccggttcggatcatcatccccggtttcattggtggccggatggttaaatggttgaaacgaatcattgtcacaactaaagaatccgacaatttctaccatttcaaggacaacagagttttaccttctttggtagacgccgaactcgccgacgaagaaggttggtggtataagccagagtacataatcaacgagctaaacataaactccgtgattacgacgccatgtcacgaggagattcttcccatcaacgctttcacaacccaaagaccttatactttaaagggttacgcatattccggaggtggaaaaaaagtgacccgtgtggaggtcacggtagatggtggagagacatggaacgtatgtgcacttgaccatcaagagaagccaaacaagtatgggaagttctggtgttggtgtttttggtcacttgaggttgaggttttggacttgcttagtgccaaagagattgctgttcgtgcatgggacgagactctcaacacgcagcccgagaaaatgatatggaatctcatggggatgatgaataactgctggtttagagtgaagactaacgtgtgcaagccacacaagggagagattgggattgtgttcgagcatccaacgcttcctggtaatgaatctggtggatggatggcgaaggaacgtcacctcgaaaaatcggctgacgcgcctcctagtctaaagaagtctgtctcgacgccgtttatgaacacaactgcgaagatgtactcgatgtccgaggtcaagaagcataattcggctgactcttgctggatcattgtccatggacatatctatgattgtacacgattccttatggatcacccgggtggttcggattcaatcttgatcaatgctggtacggattgtacggaggagtttgaagccattcactcggataaagccaagaagatgcttgaggattaccgtatcggtgagctcatcaccactggttattcctctgactcttcctcgcctaacaactcggttcacggttcatccgccgtgttctcgctgttggctcccattggagaggcgactccggttaggaacctcgctttggttaatccccgggctaaagtcccggttcaactcgtcgaaaagacttccatttctcatgatgttcgtaaattccggtttgctttaccggttgaggatatggttctaggcttaccggttggtaagcacattttcctttgcgccaccatcaatgacaagctctgcctcagagcttacacaccaagcagcaccgttgatgtggttggctacttcgagctcgtggtcaagatttactttggcggtgtccacccaagattccctaacggcgggctcatgtctcagtacctagactctttgcctatagggtcaactttggagattaaaggaccattgggtcacgttgagtatctcggcaagggtagtttcacggttcacggtaaaccaaagtttgctgataaattggcaatgttggcaggtggaaccggaataactccggtttaccaaattatccaagccattctcaaggatccagaggatgagactgaaatgtacgtcatttatgctaaccggaccgaggaagatattctcctaagggaggaactggatggttgggcagagcaatacccggaccggttaaaggtttggtacgtagtggaatcagctaaggaaggttgggcatacagtaccgggtttatttccgaggcgattatgcgagaacatatccctgatggattagatggctcagcccttgccatggcttgcggaccaccaccgatgattcagtttgcggttcagccgaatttggagaagatgcaatataacatcaaggaggatttcttgatattctagtctaaagccaagatatttcaaagtcaaaacgttaagtcgtcaaaaagcctagtgttatgatagattctaaataagtattgagggatttgtttgtatataatgttggttctttaaagtcttggatttggaaatataatgtgttcgttgtattcacgatcgatattttttttcacaataatatacaaaaagtaatttcagaaatttttgtggttaggttatcgtacattgaattttctgc

SEQ ID NO: 108706 - protein, 945 aa, Arabidopsis thaliana
  peptide (1)..(945): Ceres Seq. ID no. 13668101
  misc_feature (125)..(357): Pfam Name: Oxidoreductase molybdopterin binding domain Pfam Description: Oxidoreductase molybdopterin binding domain
  misc_feature (120)..(936): Homolog of NCBI NO: 7432652 NR Description: nitrate reductase (NADH) (EC 1.7.1.1) - Chlorella vulgaris >gi|1113861|gb|AAC49459.1| nitrate reductase
  misc_feature (121)..(945): Homolog of NCBI NO: 730148 NR Description: Nitrate reductase [NADPH] (NR)
  misc_feature (371)..(945): Homolog of NCBI NO: 548358 NR Description: Nitrate reductase [NADPH] (NR)
  misc_feature (371)..(945): Homolog of NCBI NO: 1071816 NR Description: nitrate reductase (NADPH) (EC 1.6.6.3) -
  misc_feature (123)..(451): Homolog of NCBI NO: 548358 NR Description: Nitrate reductase [NADPH] (NR)
  misc_feature (123)..(451): Homolog of NCBI NO: 1071816 NR Description: nitrate reductase (NADPH) (EC 1.6.6.3) -
  misc_feature (114)..(945): Homolog of NCBI NO: 730145 NR Description: Nitrate reductase [NADPH] (NR)
  misc_feature (118)..(945): Homolog of NCBI NO: 1171706 NR Description: Nitrate reductase [NADPH] (NR)
  misc_feature (25)..(449): Homolog of NCBI NO: 14456133 NR Description: putative nitrate reductase [Ustilago maydis]
  misc_feature (588)..(905): Homolog of NCBI NO: 14456133 NR Description: putative nitrate reductase [Ustilago maydis]
RSHLTHKREIEREKGSAFYIIYDYTLSNMAASVDNRQYARLEPGLNGVVRSYKPPVPGRSDSPKAHQNQTTNQTVFLKPAKVHDDDEDVSSEDENETHNSNAVYYKEMIRKSNAELEPSVLDPRDEYTADSWIERNPSMVRLTGKHPFNSEAPLNRLMHHGFITPVPLHYVRNHGHVPKAQWAEWTVEVTGFVKRPMKFTMDQLVSEFAYREFAATLVCAGNRRKEQNMVKKSKGFNWGSAGVSTSVWRGVPLCDVLRRCGIFSRKGGALNVCFEGSEDLPGGAGTAGSKYGTSIKKEYAMDPSRDIILAYMQNGEYLTPDHGFPVRIIIPGFIGGRMVKWLKRIIVTTKESDNFYHFKDNRVLPSLVDAELADEEGWWYKPEYIINELNINSVITTPCHEEILPINAFTTQRPYTLKGYAYSGGGKKVTRVEVTVDGGETWNVCALDHQEKPNKYGKFWCWCFWSLEVEVLDLLSAKEIAVRAWDETLNTQPEKMIWNLMGMMNNCWFRVKTNVCKPHKGEIGIVFEHPTLPGNESGGWMAKERHLEKSADAPPSLKKSVSTPFMNTTAKMYSMSEVKKHNSADSCWIIVHGHIYDCTRFLMDHPGGSDSILINAGTDCTEEFEAIHSDKAKKMLEDYRIGELITTGYSSDSSSPNNSVHGSSAVFSLLAPIGEATPVRNLALVNPRAKVPVQLVEKTSISHDVRKFRFALPVEDMVLGLPVGKHIFLCATINDKLCLRAYTPSSTVDVVGYFELVVKIYFGGVHPRFPNGGLMSQYLDSLPIGSTLEIKGPLGHVEYLGKGSFTVHGKPKFADKLAMLAGGTGITPVYQIIQAILKDPEDETEMYVIYANRTEEDILLREELDGWAEQYPDRLKVWYVVESAKEGWAYSTGFISEAIMREHIPDGLDGSALAMACGPPPMIQFAVQPNLEKMQYNIKEDFLIF

SEQ ID NO: 108707 - protein, 917 aa, Arabidopsis thaliana; identical to SEQ ID NO: 45155
  peptide (1)..(917): Ceres Seq. ID no. 13668102
  misc_feature (97)..(329): Pfam Name: Oxidoreductase molybdopterin binding domain Pfam Description: Oxidoreductase molybdopterin binding domain
  misc_feature (92)..(908): Homolog of NCBI NO: 7432652 NR Description: nitrate reductase (NADH) (EC 1.7.1.1) - Chlorella vulgaris >gi|1113861|gb|AAC49459.1| nitrate reductase
  misc_feature (93)..(917): Homolog of NCBI NO: 730148 NR Description: Nitrate reductase [NADPH] (NR)
  misc_feature (343)..(917): Homolog of NCBI NO: 548358 NR Description: Nitrate reductase [NADPH] (NR)
  misc_feature (343)..(917): Homolog of NCBI NO: 1071816 NR Description: nitrate reductase (NADPH) (EC 1.6.6.3) -
  misc_feature (95)..(423): Homolog of NCBI NO: 548358 NR Description: Nitrate reductase [NADPH] (NR)
  misc_feature (95)..(423): Homolog of NCBI NO: 1071816 NR Description: nitrate reductase (NADPH) (EC 1.6.6.3) -
  misc_feature (86)..(917): Homolog of NCBI NO: 730145 NR Description: Nitrate reductase [NADPH] (NR)
  misc_feature (90)..(917): Homolog of NCBI NO: 1171706 NR Description: Nitrate reductase [NADPH] (NR)
  misc_feature (1)..(421): Homolog of NCBI NO: 14456133 NR Description: putative nitrate reductase [Ustilago maydis]
  misc_feature (560)..(877): Homolog of NCBI NO: 14456133 NR Description: putative nitrate reductase [Ustilago maydis]

SEQ ID NO: 108708 - protein, 838 aa, Arabidopsis thaliana; identical to SEQ ID NO: 45156
  peptide (1)..(838): Ceres Seq. ID no. 13668103
  misc_feature (18)..(250): Pfam Name: Oxidoreductase molybdopterin binding domain Pfam Description: Oxidoreductase molybdopterin binding domain
  misc_feature (13)..(829): Homolog of NCBI NO: 7432652 NR Description: nitrate reductase (NADH) (EC 1.7.1.1) - Chlorella vulgaris >gi|1113861|gb|AAC49459.1| nitrate reductase
  misc_feature (14)..(838): Homolog of NCBI NO: 730148 NR Description: Nitrate reductase [NADPH] (NR)
  misc_feature (264)..(838): Homolog of NCBI NO: 548358 NR Description: Nitrate reductase [NADPH] (NR)
  misc_feature (264)..(838): Homolog of NCBI NO: 1071816 NR Description: nitrate reductase (NADPH) (EC 1.6.6.3) -
  misc_feature (16)..(344): Homolog of NCBI NO: 548358 NR Description: Nitrate reductase [NADPH] (NR)
  misc_feature (16)..(344): Homolog of NCBI NO: 1071816 NR Description: nitrate reductase (NADPH) (EC 1.6.6.3) -
  misc_feature (7)..(838): Homolog of NCBI NO: 730145 NR Description: Nitrate reductase [NADPH] (NR)
  misc_feature (11)..(838): Homolog of NCBI NO: 1171706 NR Description: Nitrate reductase [NADPH] (NR)
  misc_feature (1)..(342): Homolog of NCBI NO: 14456133 NR Description: putative nitrate reductase [Ustilago maydis]
  misc_feature (481)..(798): Homolog of NCBI NO: 14456133 NR Description: putative nitrate reductase [Ustilago maydis]

SEQ ID NO: 108709 - DNA, 1243 bp, Arabidopsis thaliana
  misc_feature (1)..(1243): Ceres Seq. ID no. 13668108
  misc_feature: MA Experiment ID: 108434 Result: Up-regulated in Transcription
  misc_feature: MA Experiment 108434 PARAMETER Experiment Name: At_Root_Tips_cDNA_P Parameter: Tissue Value: Root Tips
  misc_feature: MA Experiment ID: 108461 Result: Up-regulated in Transcription
  misc_feature: MA Experiment 108461 PARAMETER Experiment Name: At_Germinating_Seeds_cDNA_P Parameter: Age (day) Value: 1 vs. 0
  misc_feature: MA Experiment 108461 PARAMETER Experiment Name: At_Germinating_Seeds_cDNA_P Parameter: Tissue Value: Germinating Seeds
  misc_feature: MA Experiment ID: 108462 Result: Up-regulated in Transcription
  misc_feature: MA Experiment 108462 PARAMETER Experiment Name: At_Germinating_Seeds_cDNA_P Parameter: Age (day) Value: 2 vs. 0
  misc_feature: MA Experiment 108462 PARAMETER Experiment Name: At_Germinating_Seeds_cDNA_P Parameter: Tissue Value: Germinating Seeds
  misc_feature: MA Experiment ID: 108464 Result: Up-regulated in Transcription
  misc_feature: MA Experiment 108464 PARAMETER Experiment Name: At_Germinating_Seeds_cDNA_P Parameter: Age (day) Value: 4 vs. 0
  misc_feature: MA Experiment 108464 PARAMETER Experiment Name: At_Germinating_Seeds_cDNA_P Parameter: Tissue Value: Germinating Seeds
  misc_feature: MA Experiment ID: 108577 Result: Down-regulated in Transcription
  misc_feature: MA Experiment 108577 PARAMETER Experiment Name: At_42deg_Heat_cDNA_P Parameter: Temperature (deg C) Value: 42 vs. 22
  misc_feature: MA Experiment 108577 PARAMETER Experiment Name: At_42deg_Heat_cDNA_P Parameter: Timepoint (hr) Value: 6
  misc_feature: MA Experiment 108577 PARAMETER Experiment Name: At_42deg_Heat_cDNA_P Parameter: Tissue Value: Aerial
  misc_feature: MA Experiment ID: 108595 Result: Down-regulated in Transcription
  misc_feature: MA Experiment 108595 PARAMETER Experiment Name: At_Ler-pi_Ovule_cDNA_P Parameter: Plant Line Value: null
  misc_feature: MA Experiment ID: 20000087 Result: Down-regulated in Transcription
  misc_feature: MA Experiment 20000087 PARAMETER Experiment Name: At_100uM_ABA_Mutants_cDNA_P Parameter: Plant Line Value: WS
  misc_feature: MA Experiment 20000087 PARAMETER Experiment Name: At_100uM_ABA_Mutants_cDNA_P Parameter: Timepoint (hr) Value: 6
  misc_feature: MA Experiment 20000087 PARAMETER Experiment Name: At_100uM_ABA_Mutants_cDNA_P Parameter: Tissue Value: Aerial
  misc_feature: MA Experiment 20000087 PARAMETER Experiment Name: At_100uM_ABA_Mutants_cDNA_P Parameter: Treatment Value: 100uM ABA vs. No Treatment
  misc_feature: MA Experiment ID: 20000111 Result: Down-regulated in Transcription
  misc_feature: MA Experiment 20000111 PARAMETER Experiment Name: At_42deg_Heat_cDNA_P Parameter: Temperature (deg C) Value: 42 vs. 22
  misc_feature: MA Experiment 20000111 PARAMETER Experiment Name: At_42deg_Heat_cDNA_P Parameter: Timepoint (hr) Value: 6
  misc_feature: MA Experiment 20000111 PARAMETER Experiment Name: At_42deg_Heat_cDNA_P Parameter: Tissue Value: Aerial
  misc_feature: MA Experiment ID: 20000113 Result: Down-regulated in Transcription
  misc_feature: MA Experiment 20000113 PARAMETER Experiment Name: At_42deg_Heat_cDNA_P Parameter: Temperature (deg C) Value: 42 vs. 22
  misc_feature: MA Experiment 20000113 PARAMETER Experiment Name: At_42deg_Heat_cDNA_P Parameter: Timepoint (hr) Value: 8
  misc_feature: MA Experiment 20000113 PARAMETER Experiment Name: At_42deg_Heat_cDNA_P Parameter: Tissue Value: Aerial
  misc_feature: MA Experiment ID: 20000173 Result: Down-regulated in Transcription
  misc_feature: MA Experiment 20000173 PARAMETER Experiment Name: At_42deg_Heat_P Parameter: Age (day) Value: 14
  misc_feature: MA Experiment 20000173 PARAMETER Experiment Name: At_42deg_Heat_P Parameter: Organism Value: A. thaliana
  misc_feature: MA Experiment 20000173 PARAMETER Experiment Name: At_42deg_Heat_P Parameter: Plant Line Value: WS
  misc_feature: MA Experiment 20000173 PARAMETER Experiment Name: At_42deg_Heat_P Parameter: Temperature (deg C) Value: 42 vs. 22
  misc_feature: MA Experiment 20000173 PARAMETER Experiment Name: At_42deg_Heat_P Parameter: Timepoint (hr) Value: 6
  misc_feature: MA Experiment 20000173 PARAMETER Experiment Name: At_42deg_Heat_P Parameter: Tissue Value: Aerial
  misc_feature: MA Experiment ID: 20000180 Result: Up-regulated in Transcription
  misc_feature: MA Experiment 20000180 PARAMETER Experiment Name: At_Germinating_Seeds_P Parameter: Age (hr) Value: 24 vs. 0
  misc_feature: MA Experiment 20000180 PARAMETER Experiment Name: At_Germinating_Seeds_P Parameter: Tissue Value: Germinating Seeds
  misc_feature: MA Experiment ID: 20000227 Result: Up-regulated in Transcription
  misc_feature: MA Experiment 20000227 PARAMETER Experiment Name: At_Root-Tips-vs-Tops_P Parameter: Tissue Value: Root Tips vs. Root Tops
  misc_feature: MA Experiment ID: 20000267 Result: Down-regulated in Transcription
  misc_feature: MA Experiment 20000267 PARAMETER Experiment Name: At_Drought_P Parameter: Age (day) Value: 7
  misc_feature: MA Experiment 20000267 PARAMETER Experiment Name: At_Drought_P Parameter: Organism Value: A. thaliana
  misc_feature: MA Experiment 20000267 PARAMETER Experiment Name: At_Drought_P Parameter: Plant Line Value: WS
  misc_feature: MA Experiment 20000267 PARAMETER Experiment Name: At_Drought_P Parameter: Timepoint (hr) Value: 6
  misc_feature: MA Experiment 20000267 PARAMETER Experiment Name: At_Drought_P Parameter: Tissue Value: Whole Plant
  misc_feature: MA Experiment 20000267 PARAMETER Experiment Name: At_Drought_P Parameter: Treatment Value: Drought vs. No Drought
  misc_feature: MA Experiment ID: 20000436 Result: Down-regulated in Transcription
  misc_feature: MA Experiment 20000436 PARAMETER Experiment Name: At_Drought_P Parameter: Age (day) Value: 7
  misc_feature: MA Experiment 20000436 PARAMETER Experiment Name: At_Drought_P Parameter: Organism Value: A. thaliana
  misc_feature: MA Experiment 20000436 PARAMETER Experiment Name: At_Drought_P Parameter: Plant Line Value: WS
  misc_feature: MA Experiment 20000436 PARAMETER Experiment Name: At_Drought_P Parameter: Timepoint (hr) Value: 12
  misc_feature: MA Experiment 20000436 PARAMETER Experiment Name: At_Drought_P Parameter: Tissue Value: Whole Plant
  misc_feature: MA Experiment 20000436 PARAMETER Experiment Name: At_Drought_P Parameter: Treatment Value: Drought vs. No Drought
  misc_feature: MA Experiment ID: 20000437 Result: Down-regulated in Transcription
  misc_feature: MA Experiment 20000437 PARAMETER Experiment Name: At_Drought_P Parameter: Age (day) Value: 8
  misc_feature: MA Experiment 20000437 PARAMETER Experiment Name: At_Drought_P Parameter: Organism Value: A. thaliana
  misc_feature: MA Experiment 20000437 PARAMETER Experiment Name: At_Drought_P Parameter: Plant Line Value: WS
  misc_feature: MA Experiment 20000437 PARAMETER Experiment Name: At_Drought_P Parameter: Timepoint (hr) Value: 24
  misc_feature: MA Experiment 20000437 PARAMETER Experiment Name: At_Drought_P Parameter: Tissue Value: Whole Plant
  misc_feature: MA Experiment 20000437 PARAMETER Experiment Name: At_Drought_P Parameter: Treatment Value: Drought vs. No Drought
  misc_feature: MA Experiment ID: 20001247 Result: Up-regulated in Transcription
  misc_feature: MA Experiment 20001247 PARAMETER Experiment Name: At_Far-red-induction_P Parameter: Age (day) Value: 7
  misc_feature: MA Experiment 20001247 PARAMETER Experiment Name: At_Far-red-induction_P Parameter: Light Value: Far-red vs. White
  misc_feature: MA Experiment 20001247 PARAMETER Experiment Name: At_Far-red-induction_P Parameter: Organism Value: A. thaliana
  misc_feature: MA Experiment 20001247 PARAMETER Experiment Name: At_Far-red-induction_P Parameter: Plant Line Value: Columbia
  misc_feature: MA Experiment 20001247 PARAMETER Experiment Name: At_Far-red-induction_P Parameter: Timepoint (hr) Value: 1
  misc_feature: MA Experiment 20001247 PARAMETER Experiment Name: At_Far-red-induction_P Parameter: Tissue Value: Whole Plant
  misc_feature: MA Experiment ID: 20001248 Result: Up-regulated in Transcription
  misc_feature: MA Experiment 20001248 PARAMETER Experiment Name: At_Far-red-induction_P Parameter: Age (day) Value: 7
  misc_feature: MA Experiment 20001248 PARAMETER Experiment Name: At_Far-red-induction_P Parameter: Light Value: Far-red vs. White
  misc_feature: MA Experiment 20001248 PARAMETER Experiment Name: At_Far-red-induction_P Parameter: Organism Value: A. thaliana
  misc_feature: MA Experiment 20001248 PARAMETER Experiment Name: At_Far-red-induction_P Parameter: Plant Line Value: Columbia
  misc_feature: MA Experiment 20001248 PARAMETER Experiment Name: At_Far-red-induction_P Parameter: Timepoint (hr) Value: 4
  misc_feature: MA Experiment 20001248 PARAMETER Experiment Name: At_Far-red-induction_P Parameter: Tissue Value: Whole Plant
  misc_feature: MA Experiment ID: 20001450 Result: Up-regulated in Transcription
  misc_feature: MA Experiment 20001450 PARAMETER Experiment Name: At_Far-red-induction_P Parameter: Age (day) Value: 7
  misc_feature: MA Experiment 20001450 PARAMETER Experiment Name: At_Far-red-induction_P Parameter: Light Value: Far-red vs. White
  misc_feature: MA Experiment 20001450 PARAMETER Experiment Name: At_Far-red-induction_P Parameter: Organism Value: A. thaliana
  misc_feature: MA Experiment 20001450 PARAMETER Experiment Name: At_Far-red-induction_P Parameter: Plant Line Value: Columbia
  misc_feature: MA Experiment 20001450 PARAMETER Experiment Name: At_Far-red-induction_P Parameter: Timepoint (hr) Value: 8
  misc_feature: MA Experiment 20001450 PARAMETER Experiment Name: At_Far-red-induction_P Parameter: Tissue Value: Whole Plant
  misc_feature: MA Experiment ID: 20001451 Result: Up-regulated in Transcription
  misc_feature: MA Experiment 20001451 PARAMETER Experiment Name: At_Far-red-induction_P Parameter: Age (day) Value: 7
  misc_feature: MA Experiment 20001451 PARAMETER Experiment Name: At_Far-red-induction_P Parameter: Light Value: Far-red vs. White
  misc_feature: MA Experiment 20001451 PARAMETER Experiment Name: At_Far-red-induction_P Parameter: Organism Value: A. thaliana
  misc_feature: MA Experiment 20001451 PARAMETER Experiment Name: At_Far-red-induction_P Parameter: Plant Line Value: Columbia
  misc_feature: MA Experiment 20001451 PARAMETER Experiment Name: At_Far-red-induction_P Parameter: Timepoint (hr) Value: 24
  misc_feature: MA Experiment 20001451 PARAMETER Experiment Name: At_Far-red-induction_P Parameter: Tissue Value: Whole Plant
  misc_feature: MA Experiment ID: 20001554 Result: Down-regulated in Transcription
  misc_feature: MA Experiment 20001554 PARAMETER Experiment Name: At_Drought_Soil_Dry_P Parameter: Age (day) Value: 21
  misc_feature: MA Experiment 20001554 PARAMETER Experiment Name: At_Drought_Soil_Dry_P Parameter: Organism Value: A. thaliana
  misc_feature: MA Experiment 20001554 PARAMETER Experiment Name: At_Drought_Soil_Dry_P Parameter: Plant Line Value: WS
  misc_feature: MA Experiment 20001554 PARAMETER Experiment Name: At_Drought_Soil_Dry_P Parameter: Post Timepoint (hr) Value: None
  misc_feature: MA Experiment 20001554 PARAMETER Experiment Name: At_Drought_Soil_Dry_P Parameter: Post-Treatment Value: None
  misc_feature: MA Experiment 20001554 PARAMETER Experiment Name: At_Drought_Soil_Dry_P Parameter: Timepoint (day) Value: 7
  misc_feature: MA Experiment 20001554 PARAMETER Experiment Name: At_Drought_Soil_Dry_P Parameter: Treatment Value: Drought vs. No Drought
  misc_feature: MA Experiment ID: 20001555 Result: Down-regulated in Transcription
  misc_feature: MA Experiment 20001555 PARAMETER Experiment Name: At_Drought_Soil_Dry_P Parameter: Age (day) Value: 24
  misc_feature: MA Experiment 20001555 PARAMETER Experiment Name: At_Drought_Soil_Dry_P Parameter: Organism Value: A. thaliana
  misc_feature: MA Experiment 20001555 PARAMETER Experiment Name: At_Drought_Soil_Dry_P Parameter: Plant Line Value: WS
  misc_feature: MA Experiment 20001555 PARAMETER Experiment Name: At_Drought_Soil_Dry_P Parameter: Post Timepoint (hr) Value: None
  misc_feature: MA Experiment 20001555 PARAMETER Experiment Name: At_Drought_Soil_Dry_P Parameter: Post-Treatment Value: None
  misc_feature: MA Experiment 20001555 PARAMETER Experiment Name: At_Drought_Soil_Dry_P Parameter: Timepoint (day) Value: 10
  misc_feature: MA Experiment 20001555 PARAMETER Experiment Name: At_Drought_Soil_Dry_P Parameter: Treatment Value: Drought vs. No Drought
  misc_feature: MA Experiment ID: 20001560 Result: Up-regulated in Transcription
  misc_feature: MA Experiment 20001560 PARAMETER Experiment Name: At_Drought_Soil_Dry_P Parameter: Age (day) Value: 28
  misc_feature: MA Experiment 20001560 PARAMETER Experiment Name: At_Drought_Soil_Dry_P Parameter: Organism Value: A. thaliana
  misc_feature: MA Experiment 20001560 PARAMETER Experiment Name: At_Drought_Soil_Dry_P Parameter: Plant Line Value: WS
  misc_feature: MA Experiment 20001560 PARAMETER Experiment Name: At_Drought_Soil_Dry_P Parameter: Post Timepoint (hr) Value: None
  misc_feature: MA Experiment 20001560 PARAMETER Experiment Name: At_Drought_Soil_Dry_P Parameter: Post-Treatment Value: None
  misc_feature: MA Experiment 20001560 PARAMETER Experiment Name: At_Drought_Soil_Dry_P Parameter: Timepoint (day) Value: 14
  misc_feature: MA Experiment 20001560 PARAMETER Experiment Name: At_Drought_Soil_Dry_P Parameter: Treatment Value: Drought vs. No Drought
  misc_feature: MA Experiment ID: 20001904 Result: Down-regulated in Transcription
  misc_feature: MA Experiment 20001904 PARAMETER Experiment Name: At_Drought_Reproduction_P Parameter: Age (day) Value: 37
  misc_feature: MA Experiment 20001904 PARAMETER Experiment Name: At_Drought_Reproduction_P Parameter: Organism Value: A. thaliana
  misc_feature: MA Experiment 20001904 PARAMETER Experiment Name: At_Drought_Reproduction_P Parameter: Plant Line Value: WS
  misc_feature: MA Experiment 20001904 PARAMETER Experiment Name: At_Drought_Reproduction_P Parameter: Timepoint (day) Value: 7
  misc_feature: MA Experiment 20001904 PARAMETER Experiment Name: At_Drought_Reproduction_P Parameter: Tissue Value: Rosettes
  misc_feature: MA Experiment 20001904 PARAMETER Experiment Name: At_Drought_Reproduction_P Parameter: Treatment Value: Drought vs. No Drought
  misc_feature: MA Experiment ID: 20001905 Result: Down-regulated in Transcription
  misc_feature: MA Experiment 20001905 PARAMETER Experiment Name: At_Drought_Reproduction_P Parameter: Age (day) Value: 40
  misc_feature: MA Experiment 20001905 PARAMETER Experiment Name: At_Drought_Reproduction_P Parameter: Organism Value: A. thaliana
  misc_feature: MA Experiment 20001905 PARAMETER Experiment Name: At_Drought_Reproduction_P Parameter: Plant Line Value: WS
  misc_feature: MA Experiment 20001905 PARAMETER Experiment Name: At_Drought_Reproduction_P Parameter: Timepoint (day) Value: 10
  misc_feature: MA Experiment 20001905 PARAMETER Experiment Name: At_Drought_Reproduction_P Parameter: Tissue Value: Rosettes
  misc_feature: MA Experiment 20001905 PARAMETER Experiment Name: At_Drought_Reproduction_P Parameter: Treatment Value: Drought vs. No Drought
  misc_feature: MA Experiment ID: 20001911 Result: Down-regulated in Transcription
  misc_feature: MA Experiment 20001911 PARAMETER Experiment Name: At_Drought_Reproduction_P Parameter: Age (day) Value: 40
  misc_feature: MA Experiment 20001911 PARAMETER Experiment Name: At_Drought_Reproduction_P Parameter: Organism Value: A. thaliana
  misc_feature: MA Experiment 20001911 PARAMETER Experiment Name: At_Drought_Reproduction_P Parameter: Plant Line Value: WS
  misc_feature: MA Experiment 20001911 PARAMETER Experiment Name: At_Drought_Reproduction_P Parameter: Timepoint (day) Value: 10
  misc_feature: MA Experiment 20001911 PARAMETER Experiment Name: At_Drought_Reproduction_P Parameter: Tissue Value: Flowers
  misc_feature: MA Experiment 20001911 PARAMETER Experiment Name: At_Drought_Reproduction_P Parameter: Treatment Value: Drought vs. No Drought
tcttccccaccactccgattcatctttatcctctctctcatctcgtccgttgttgcataagtgctatggatctcgcgtcgaatcttggtgggaagatcgataaatccgatgttctcaccgccgtcgaaaagtatgagcaatatcatgtcttccatggaggaaacgaggaagagagaaaagccaattatactgacatggttaataagtactatgaccttgctactagcttttatgagtacggatggggagaatccttccattttgcacaaagatggaaaggagaatcgcttcgagagagtattaagcgacacgagcactttcttgctcttcagcttggcatccaaccaggacaaaaggtactggatgtaggatgtggaattggtggaccgttgagggaaattgcaagattcagcaattcagttgttaccgggctcaacaataacgaataccagatcaccagaggcaaggaactaaaccgacttgcaggtgtcgacaagacatgtaactttgtcaaggctgacttcatgaagatgccattcccggaaaacagtttcgatgcagtttatgcaatagaagcaacttgccatgcacctgatgcgtatggatgctacaaagagatctacagagtgctaaagcctgggcaatgttttgctgcctatgagtggtgtatgactgatgcatttgaccctgataacgccgaacatcagaaaataaagggagagatagagattggagatggtcttcctgacattaggctgactacaaaatgcctcgaagctctgaagcaggccggttttgaagtgatatgggaaaaggatctggccaaggactcgccggtcccatggtacttacctcttgacaaaaatcatttctcactcagtagcttccgccttacagctgttggacgattcataaccaaaaacatggtcaagatccttgaatacataagacttgcacctcaaggaagccaaagggtctcaaatttcctggagcaggctgcggaaggattagtcgacggtggaaggagagagattttcacgccaatgtatttcttcttggcccggaagccagagtaagcggatgagagatggcgatggtcatcgtaggtcgaatgaagtgacaaaatttctcaatttgcagtcttattttctatgtttatcggatttgttgcagagtttcttattcaccaactatattttggatgttcgtaacatgtcacgtgttgttcatgtgcactctgcct

SEQ ID NO: 108710 - protein, 357 aa, Arabidopsis thaliana
  peptide (1)..(357): Ceres Seq. ID no. 13668109
  misc_feature (72)..(273): Pfam Name: ubiE/COQ5 methyltransferase family Pfam Description: ubiE/COQ5 methyltransferase family
  misc_feature (22)..(357): Homolog of NCBI NO: 15240691 NR Description: 24-sterol C-methyltransferase [Arabidopsis
  misc_feature (22)..(357): Homolog of NCBI NO: 21434843 NR Description: cephalopod [Arabidopsis thaliana]
  misc_feature (19)..(357): Homolog of NCBI NO: 7443720 NR Description: probable sterol 24-C-methyltransferase (EC
  misc_feature (21)..(356): Homolog of NCBI NO: 7443719 NR Description: sterol 24-C-methyltransferase (EC 2.1.1.41) -
  misc_feature (21)..(356): Homolog of NCBI NO: 7443716 NR Description: sterol 24-C-methyltransferase (EC 2.1.1.41)
  misc_feature (21)..(356): Homolog of NCBI NO: 3560474 NR Description: S-adenosyl-methionine-sterol-C- methyltransferase
  misc_feature (21)..(356): Homolog of NCBI NO: 34393309 NR Description: cycloartenol-C24-methyltransferase [Oryza sativa
  misc_feature (21)..(356): Homolog of NCBI NO: 7443715 NR Description: sterol 24-C-methyltransferase (EC 2.1.1.41) -
  misc_feature (21)..(356): Homolog of NCBI NO: 3560531 NR Description: cycloartenol-C24-methyltransferase [Oryza sativa
  misc_feature (23)..(356): Homolog of NCBI NO: 3603295 NR Description: S-adenosyl-methionine
FPTTPIHLYPLSHLVRCCISAMDLASNLGGKIDKSDVLTAVEKYEQYHVFHGGNEEERKANYTDMVNKYYDLATSFYEYGWGESFHFAQRWKGESLRESIKRHEHFLALQLGIQPGQKVLDVGCGIGGPLREIARFSNSVVTGLNNNEYQITRGKELNRLAGVDKTCNFVKADFMKMPFPENSFDAVYAIEATCHAPDAYGCYKEIYRVLKPGQCFAAYEWCMTDAFDPDNAEHQKIKGEIEIGDGLPDIRLTTKCLEALKQAGFEVIWEKDLAKDSPVPWYLPLDKNHFSLSSFRLTAVGRFITKNMVKILEYIRLAPQGSQRVSNFLEQAAEGLVDGGRREIFTPMYFFLARKPE

SEQ ID NO: 108711 - protein, 336 aa, Arabidopsis thaliana; identical to SEQ ID NO: 26651
  peptide (1)..(336): Ceres Seq. ID no. 13668110
  misc_feature (51)..(252): Pfam Name: ubiE/COQ5 methyltransferase family Pfam Description: ubiE/COQ5 methyltransferase family
  misc_feature (1)..(336): Homolog of NCBI NO: 15240691 NR Description: 24-sterol C-methyltransferase [Arabidopsis
  misc_feature (1)..(336): Homolog of NCBI NO: 21434843 NR Description: cephalopod [Arabidopsis thaliana]
  misc_feature (1)..(336): Homolog of NCBI NO: 7443720 NR Description: probable sterol 24-C-methyltransferase (EC
  misc_feature (1)..(335): Homolog of NCBI NO: 7443719 NR Description: sterol 24-C-methyltransferase (EC 2.1.1.41) -
  misc_feature (1)..(335): Homolog of NCBI NO: 7443716 NR Description: sterol 24-C-methyltransferase (EC 2.1.1.41)
  misc_feature (1)..(335): Homolog of NCBI NO: 3560474 NR Description: S-adenosyl-methionine-sterol-C- methyltransferase
  misc_feature (1)..(335): Homolog of NCBI NO: 34393309 NR Description: cycloartenol-C24-methyltransferase [Oryza sativa
  misc_feature (1)..(335): Homolog of NCBI NO: 7443715 NR Description: sterol 24-C-methyltransferase (EC 2.1.1.41) -
  misc_feature (1)..(335): Homolog of NCBI NO: 3560531 NR Description: cycloartenol-C24-methyltransferase [Oryza sativa
  misc_feature (2)..(335): Homolog of NCBI NO: 3603295 NR Description: S-adenosyl-methionine

SEQ ID NO: 108712 - protein, 293 aa, Arabidopsis thaliana; identical to SEQ ID NO: 26652
  peptide (1)..(293): Ceres Seq. ID no. 13668111
  misc_feature (8)..(209): Pfam Name: ubiE/COQ5 methyltransferase family Pfam Description: ubiE/COQ5 methyltransferase family
  misc_feature (1)..(293): Homolog of NCBI NO: 15240691 NR Description: 24-sterol C-methyltransferase [Arabidopsis
  misc_feature (1)..(293): Homolog of NCBI NO: 21434843 NR Description: cephalopod [Arabidopsis thaliana]
  misc_feature (1)..(293): Homolog of NCBI NO: 7443720 NR Description: probable sterol 24-C-methyltransferase (EC
  misc_feature (1)..(292): Homolog of NCBI NO: 7443719 NR Description: sterol 24-C-methyltransferase (EC 2.1.1.41) -
  misc_feature (1)..(292): Homolog of NCBI NO: 7443716 NR Description: sterol 24-C-methyltransferase (EC 2.1.1.41)
  misc_feature (1)..(292): Homolog of NCBI NO: 3560474 NR Description: S-adenosyl-methionine-sterol-C- methyltransferase
  misc_feature (1)..(292): Homolog of NCBI NO: 34393309 NR Description: cycloartenol-C24-methyltransferase [Oryza sativa
  misc_feature (1)..(292): Homolog of NCBI NO: 7443715 NR Description: sterol 24-C-methyltransferase (EC 2.1.1.41) -
  misc_feature (1)..(292): Homolog of NCBI NO: 3560531 NR Description: cycloartenol-C24-methyltransferase [Oryza sativa
  misc_feature (1)..(292): Homolog of NCBI NO: 3603295 NR Description: S-adenosyl-methionine

SEQ ID NO: 108713 - DNA, 1461 bp, Arabidopsis thaliana
  misc_feature (1)..(1461): Ceres Seq. ID no. 13668112
  misc_feature: MA Experiment ID: 20000234 Result: Down-regulated in Transcription
  misc_feature: MA Experiment 20000234 PARAMETER Experiment Name: At_Siliques_P Parameter: Age (day) Value: 21
  misc_feature: MA Experiment 20000234 PARAMETER Experiment Name: At_Siliques_P Parameter: Organism Value: A. thaliana
  misc_feature: MA Experiment 20000234 PARAMETER Experiment Name: At_Siliques_P Parameter: Plant Line Value: WS
  misc_feature: MA Experiment 20000234 PARAMETER Experiment Name: At_Siliques_P Parameter: Tissue Value: Less Than 5mm Siliques vs. Whole Plant
  misc_feature: MA Experiment ID: 20000265 Result: Down-regulated in Transcription
  misc_feature: MA Experiment 20000265 PARAMETER Experiment Name: At_Open_Flower_P Parameter: Age (day) Value: 21
  misc_feature: MA Experiment 20000265 PARAMETER Experiment Name: At_Open_Flower_P Parameter: Plant Line Value: WS
  misc_feature: MA Experiment 20000265 PARAMETER Experiment Name: At_Open_Flower_P Parameter: Tissue Value: Closed Flower vs. Whole Plant
  misc_feature: MA Experiment ID: 20000438 Result: Down-regulated in Transcription
  misc_feature: MA Experiment 20000438 PARAMETER Experiment Name: At_Shoots__P Parameter: Age (day) Value: 14
  misc_feature: MA Experiment 20000438 PARAMETER Experiment Name: At_Shoots__P Parameter: Tissue Value: Shoots vs. Whole Plant
  misc_feature: MA Experiment ID: 20000794 Result: Up-regulated in Transcription
  misc_feature: MA Experiment 20000794 PARAMETER Experiment Name: At_Petals_P Parameter: Age (day) Value: 23-25 days
  misc_feature: MA Experiment 20000794 PARAMETER Experiment Name: At_Petals_P Parameter: Plant Line Value: WS
  misc_feature: MA Experiment 20000794 PARAMETER Experiment Name: At_Petals_P Parameter: Tissue Value: Petals vs. Whole plant
  misc_feature: MA Experiment ID: 20001248 Result: Up-regulated in Transcription
  misc_feature: MA Experiment 20001248 PARAMETER Experiment Name: At_Far-red-induction_P Parameter: Age (day) Value: 7
  misc_feature: MA Experiment 20001248 PARAMETER Experiment Name: At_Far-red-induction_P Parameter: Light Value: Far-red vs. White
  misc_feature: MA Experiment 20001248 PARAMETER Experiment Name: At_Far-red-induction_P Parameter: Organism Value: A. thaliana
  misc_feature: MA Experiment 20001248 PARAMETER Experiment Name: At_Far-red-induction_P Parameter: Plant Line Value: Columbia
  misc_feature: MA Experiment 20001248 PARAMETER Experiment Name: At_Far-red-induction_P Parameter: Timepoint (hr) Value: 4
  misc_feature: MA Experiment 20001248 PARAMETER Experiment Name: At_Far-red-induction_P Parameter: Tissue Value: Whole Plant
  misc_feature: MA Experiment ID: 20001558 Result: Down-regulated in Transcription
  misc_feature: MA Experiment 20001558 PARAMETER Experiment Name: At_Drought_Soil_Dry_P Parameter: Age (day) Value: 27
  misc_feature: MA Experiment 20001558 PARAMETER Experiment Name: At_Drought_Soil_Dry_P Parameter: Organism Value: A. thaliana
  misc_feature: MA Experiment 20001558 PARAMETER Experiment Name: At_Drought_Soil_Dry_P Parameter: Plant Line Value: WS
  misc_feature: MA Experiment 20001558 PARAMETER Experiment Name: At_Drought_Soil_Dry_P Parameter: Post Timepoint (hr) Value: 6
  misc_feature: MA Experiment 20001558 PARAMETER Experiment Name: At_Drought_Soil_Dry_P Parameter: Post-Treatment Value: Re-Water vs. No Drought
  misc_feature: MA Experiment 20001558 PARAMETER Experiment Name: At_Drought_Soil_Dry_P Parameter: Timepoint (day) Value: 13
  misc_feature: MA Experiment 20001558 PARAMETER Experiment Name: At_Drought_Soil_Dry_P Parameter: Treatment Value: Drought vs. No Drought
  misc_feature: MA Experiment ID: 20001560 Result: Down-regulated in Transcription
  misc_feature: MA Experiment 20001560 PARAMETER Experiment Name: At_Drought_Soil_Dry_P Parameter: Age (day) Value: 28
  misc_feature: MA Experiment 20001560 PARAMETER Experiment Name: At_Drought_Soil_Dry_P Parameter: Organism Value: A. thaliana
  misc_feature: MA Experiment 20001560 PARAMETER Experiment Name: At_Drought_Soil_Dry_P Parameter: Plant Line Value: WS
  misc_feature: MA Experiment 20001560 PARAMETER Experiment Name: At_Drought_Soil_Dry_P Parameter: Post Timepoint (hr) Value: None
  misc_feature: MA Experiment 20001560 PARAMETER Experiment Name: At_Drought_Soil_Dry_P Parameter: Post-Treatment Value: None
  misc_feature: MA Experiment 20001560 PARAMETER Experiment Name: At_Drought_Soil_Dry_P Parameter: Timepoint (day) Value: 14
  misc_feature: MA Experiment 20001560 PARAMETER Experiment Name: At_Drought_Soil_Dry_P Parameter: Treatment Value: Drought vs. No Drought
atcttaaaagaaaccgaaagctaatctccaaagggaaaaagacgtgtagcagagacctatacatacacctatacattcacgttgcgtgtgataatctactgagggttctatctatattaatccttctctgcttccttcaatctaattgcaaatcaaatggatcgtcttaagctttatttctccgttttcgttttgtctttctttatcgtctcggtttcgtcgtctgatgtcaacgacggcgatgatctcgtgatccgtcaggtggttggtggagccgagcctcaggttttgacctcagaggatcacttttctctcttcaagcggaagttcgggaaggtctacgcttccaacgaggagcatgactatagattctcggttttcaaagcgaatctcaggcgagcgaggcgtcaccagaagttggatccgtcggcgactcatggtgttacgcagttctcagatctgactcggtctgagttccgtaagaagcacttgggggttagaagtggctttaagcttcctaaagatgccaacaaggctccgattctccctaccgaaaatctccctgaggattttgattggagagatcatggcgccgttactcccgtcaaaaatcagggatcttgcggctcttgctggagtttcagcgccactggagctttggaaggtgctaacttcctcgctaccggcaaactcgtcagcctcagcgaacaacagctcgtcgactgtgatcacgagtgtgatcccgaggaggcagattcctgcgactctggttgcaatggtgggctaatgaacagcgcttttgaatacaccctcaaaaccggagggctcatgaaagaagaagactatccttacaccggaaaggacggcaagacctgcaagctagacaagtccaagatcgttgcctctgtctccaacttcagtgttatctccattgatgaagaacagattgctgcaaaccttgtcaagaacggacctcttgctgtagccatcaacgctggctatatgcagacttacattggaggagtctcatgcccttacatatgcaccaggaggctcaaccacggtgtcttattggttggctatggagcggcaggttacgctccggctaggttcaaggagaagccttactggatcatcaagaactcgtggggagagacttggggtgaaaatggtttctacaaaatctgcaaaggccgtaacatttgtggtgttgacagtatggtctccactgttgcagccaccgtctcaaccaccgcccattaagcatctcgtcaataagttttaattactttggtgatttgtatgagcgagctctctttgcgctgctgactctctctatttatctctgcttcttgcttgtaaataaaatgcgttctattgagcaaaaccgtacaatgctcattagcaatgagcccactttaacaagtatcagtttatggcccaatatatgaaagttaaatt

SEQ ID NO: 108714 - protein, 368 aa, Arabidopsis thaliana; identical to SEQ ID NO: 23807
  peptide (1)..(368): Ceres Seq. ID no. 13668113
  misc_feature (135)..(360): Pfam Name: Papain family cysteine protease Pfam Description: Papain family cysteine protease
  misc_feature (1)..(368): Homolog of NCBI NO: 18420375 NR Description: cysteine proteinase RD19A [Arabidopsis thaliana]
  misc_feature (1)..(368): Homolog of NCBI NO: 21593213 NR Description: cysteine proteinase RD19A [Arabidopsis thaliana]
  misc_feature (1)..(368): Homolog of NCBI NO: 18141287 NR Description: senescence-associated cysteine protease [Brassica
  misc_feature (1)..(364): Homolog of NCBI NO: 18399697 NR Description: cysteine proteinase A494 precursor, putative thaliana] >gi|12643282|sp|P43295|A494_ARATH Probable cysteine
  misc_feature (8)..(367): Homolog of NCBI NO: 7211741 NR Description: papain-like cysteine proteinase isoform I
  misc_feature (8)..(367): Homolog of NCBI NO: 7381219 NR Description: papain-like cysteine proteinase isoform I
  misc_feature (52)..(364): Homolog of NCBI NO: 516865 NR Description: putative thiol protease [Arabidopsis thaliana]
  misc_feature (3)..(367): Homolog of NCBI NO: 7211745 NR Description: papain-like cysteine proteinase isoform III
  misc_feature (3)..(367): Homolog of NCBI NO: 7381221 NR Description: papain-like cysteine proteinase isoform II
  misc_feature (8)..(367): Homolog of NCBI NO: 7211743 NR Description: papain-like cysteine proteinase isoform II

SEQ ID NO: 108715 - DNA, 1173 bp, Arabidopsis thaliana
  misc_feature (1)..(1173): Ceres Seq. ID no. 13668118
  misc_feature: MA Experiment ID: 108434 Result: Down-regulated in Transcription
  misc_feature: MA Experiment 108434 PARAMETER Experiment Name: At_Root_Tips_cDNA_P Parameter: Tissue Value: Root Tips
  misc_feature: MA Experiment ID: 108435 Result: Up-regulated in Transcription
  misc_feature: MA Experiment 108435 PARAMETER Experiment Name: At_stm_Mutants_cDNA_P Parameter: Plant Line Value: wt Landsburg vs stm
  misc_feature: MA Experiment 108435 PARAMETER Experiment Name: At_stm_Mutants_cDNA_P Parameter: Tissue Value: Shoot Apical Meristem Region
  misc_feature: MA Experiment ID: 108464 Result: Down-regulated in Transcription
  misc_feature: MA Experiment 108464 PARAMETER Experiment Name: At_Germinating_Seeds_cDNA_P Parameter: Age (day) Value: 4 vs. 0
  misc_feature: MA Experiment 108464 PARAMETER Experiment Name: At_Germinating_Seeds_cDNA_P Parameter: Tissue Value: Germinating Seeds
  misc_feature: MA Experiment ID: 108473 Result: Down-regulated in Transcription
  misc_feature: MA Experiment 108473 PARAMETER Experiment Name: At_Drought_Flowers_cDNA_P Parameter: Timepoint (hr) Value: 7 d
  misc_feature: MA Experiment 108473 PARAMETER Experiment Name: At_Drought_Flowers_cDNA_P Parameter: Tissue Value: Flower
  misc_feature: MA Experiment 108473 PARAMETER Experiment Name: At_Drought_Flowers_cDNA_P Parameter: Treatment Value: Drought vs. No Drought
  misc_feature: MA Experiment ID: 108569 Result: Up-regulated in Transcription
  misc_feature: MA Experiment 108569 PARAMETER Experiment Name: At_0.001%_MeJA__cDNA_P Parameter: Timepoint (hr) Value: 6
  misc_feature: MA Experiment 108569 PARAMETER Experiment Name: At_0.001%_MeJA__cDNA_P Parameter: Tissue Value: Aerial
  misc_feature: MA Experiment 108569 PARAMETER Experiment Name: At_0.001%_MeJA__cDNA_P Parameter: Treatment Value: 0.001% MeJA vs. No Treatment
  misc_feature: MA Experiment ID: 108574 Result: Up-regulated in Transcription
  misc_feature: MA Experiment 108574 PARAMETER Experiment Name: At_Wounding__cDNA_P Parameter: Timepoint (hr) Value: 1
  misc_feature: MA Experiment 108574 PARAMETER Experiment Name: At_Wounding__cDNA_P Parameter: Tissue Value: Aerial
  misc_feature: MA Experiment 108574 PARAMETER Experiment Name: At_Wounding__cDNA_P Parameter: Treatment Value: Wounding vs. No Wounding
  misc_feature: MA Experiment ID: 108576 Result: Down-regulated in Transcription
  misc_feature: MA Experiment 108576 PARAMETER Experiment Name: At_42deg_Heat_cDNA_P Parameter: Temperature (deg C) Value: 42 vs. 22
  misc_feature: MA Experiment 108576 PARAMETER Experiment Name: At_42deg_Heat_cDNA_P Parameter: Timepoint (hr) Value: 1
  misc_feature: MA Experiment 108576 PARAMETER Experiment Name: At_42deg_Heat_cDNA_P Parameter: Tissue Value: Aerial
  misc_feature: MA Experiment ID: 108585 Result: Up-regulated in Transcription
  misc_feature: MA Experiment 108585 PARAMETER Experiment Name: At_5mM_NaNP_cDNA_P Parameter: Timepoint (hr) Value: 6
  misc_feature: MA Experiment 108585 PARAMETER Experiment Name: At_5mM_NaNP_cDNA_P Parameter: Tissue Value: Aerial
  misc_feature: MA Experiment 108585 PARAMETER Experiment Name: At_5mM_NaNP_cDNA_P Parameter: Treatment Value: null
  misc_feature: MA Experiment ID: 108595 Result: Up-regulated in Transcription
  misc_feature: MA Experiment 108595 PARAMETER Experiment Name: At_Ler-pi_Ovule_cDNA_P Parameter: Plant Line Value: null
  misc_feature: MA Experiment ID: 108668 Result: Down-regulated in Transcription
  misc_feature: MA Experiment 108668 PARAMETER Experiment Name: At_2mM_SA_cDNA_P Parameter: Plant Line Value: WS
  misc_feature: MA Experiment 108668 PARAMETER Experiment Name: At_2mM_SA_cDNA_P Parameter: Timepoint (hr) Value: 6
  misc_feature: MA Experiment 108668 PARAMETER Experiment Name: At_2mM_SA_cDNA_P Parameter: Treatment Value: 2mM SA vs. No Treatment
  misc_feature: MA Experiment ID: 20000070 Result: Up-regulated in Transcription
  misc_feature: MA Experiment 20000070 PARAMETER Experiment Name: At_100uM_ABA_Mutants_cDNA_P Parameter: Plant Line Value: CS24
  misc_feature: MA Experiment 20000070 PARAMETER Experiment Name: At_100uM_ABA_Mutants_cDNA_P Parameter: Timepoint (hr) Value: 6
  misc_feature: MA Experiment 20000070 PARAMETER Experiment Name: At_100uM_ABA_Mutants_cDNA_P Parameter: Tissue Value: Aerial
  misc_feature: MA Experiment 20000070 PARAMETER Experiment Name: At_100uM_ABA_Mutants_cDNA_P Parameter: Treatment Value: 100uM ABA vs. No Treatment
  misc_feature: MA Experiment ID: 20000087 Result: Up-regulated in Transcription
  misc_feature: MA Experiment 20000087 PARAMETER Experiment Name: At_100uM_ABA_Mutants_cDNA_P Parameter: Plant Line Value: WS
  misc_feature: MA Experiment 20000087 PARAMETER Experiment Name: At_100uM_ABA_Mutants_cDNA_P Parameter: Timepoint (hr) Value: 6
  misc_feature: MA Experiment 20000087 PARAMETER Experiment Name: At_100uM_ABA_Mutants_cDNA_P Parameter: Tissue Value: Aerial
  misc_feature: MA Experiment 20000087 PARAMETER Experiment Name: At_100uM_ABA_Mutants_cDNA_P Parameter: Treatment Value: 100uM ABA vs. No Treatment
  misc_feature: MA Experiment ID: 20000112 Result: Down-regulated in Transcription
  misc_feature: MA Experiment 20000112 PARAMETER Experiment Name: At_42deg_Heat_cDNA_P Parameter: Temperature (deg C) Value: 42 vs. 22
  misc_feature: MA Experiment 20000112 PARAMETER Experiment Name: At_42deg_Heat_cDNA_P Parameter: Timepoint (hr) Value: 2
  misc_feature: MA Experiment 20000112 PARAMETER Experiment Name: At_42deg_Heat_cDNA_P Parameter: Tissue Value: Aerial
  misc_feature: MA Experiment ID: 20000113 Result: Down-regulated in Transcription
  misc_feature: MA Experiment 20000113 PARAMETER Experiment Name: At_42deg_Heat_cDNA_P Parameter: Temperature (deg C) Value: 42 vs. 22
  misc_feature: MA Experiment 20000113 PARAMETER Experiment Name: At_42deg_Heat_cDNA_P Parameter: Timepoint (hr) Value: 8
  misc_feature: MA Experiment 20000113 PARAMETER Experiment Name: At_42deg_Heat_cDNA_P Parameter: Tissue Value: Aerial
  misc_feature: MA Experiment ID: 20000180 Result: Up-regulated in Transcription
  misc_feature: MA Experiment 20000180 PARAMETER Experiment Name: At_Germinating_Seeds_P Parameter: Age (hr) Value: 24 vs. 0
  misc_feature: MA Experiment 20000180 PARAMETER Experiment Name: At_Germinating_Seeds_P Parameter: Tissue Value: Germinating Seeds
  misc_feature: MA Experiment ID: 20000185 Result: Down-regulated in Transcription
  misc_feature: MA Experiment 20000185 PARAMETER Experiment Name: At_Roots__P Parameter: Age (day) Value: 7 vs. 21
  misc_feature: MA Experiment 20000185 PARAMETER Experiment Name: At_Roots__P Parameter: Organism Value: A. thaliana
  misc_feature: MA Experiment 20000185 PARAMETER Experiment Name: At_Roots__P Parameter: Tissue Value: Roots vs. Whole Plant
  misc_feature: MA Experiment ID: 20000211 Result: Up-regulated in Transcription
  misc_feature: MA Experiment 20000211 PARAMETER Experiment Name: At_0.001percent_MeJA__P Parameter: Age (day) Value: 14
  misc_feature: MA Experiment 20000211 PARAMETER Experiment Name: At_0.001percent_MeJA__P Parameter: Organism Value: A. thaliana
  misc_feature: MA Experiment 20000211 PARAMETER Experiment Name: At_0.001percent_MeJA__P Parameter: Plant Line Value: WS
  misc_feature: MA Experiment 20000211 PARAMETER Experiment Name: At_0.001percent_MeJA__P Parameter: Timepoint (hr) Value: 1
  misc_feature: MA Experiment 20000211 PARAMETER Experiment Name: At_0.001percent_MeJA__P Parameter: Tissue Value: Aerial
  misc_feature: MA Experiment 20000211 PARAMETER Experiment Name: At_0.001percent_MeJA__P Parameter: Treatment Value: 0.001percent MeJA vs. No Treatment
  misc_feature: MA Experiment ID: 20000224 Result: Up-regulated in Transcription
  misc_feature: MA Experiment ID: 20000264 Result: Up-regulated in Transcription
  misc_feature: MA Experiment 20000264 PARAMETER Experiment Name: At_Open_Flower_P Parameter: Age (day) Value: 21
  misc_feature: MA Experiment 20000264 PARAMETER Experiment Name: At_Open_Flower_P Parameter: Plant Line Value: WS
  misc_feature: MA Experiment 20000264 PARAMETER Experiment Name: At_Open_Flower_P Parameter: Tissue Value: Open Flower vs. Whole Plant
  misc_feature: MA Experiment ID: 20000265 Result: Up-regulated in Transcription
  misc_feature: MA Experiment 20000265 PARAMETER Experiment Name: At_Open_Flower_P Parameter: Age (day) Value: 21
  misc_feature: MA Experiment 20000265 PARAMETER Experiment Name: At_Open_Flower_P Parameter: Plant Line Value: WS
  misc_feature: MA Experiment 20000265 PARAMETER Experiment Name: At_Open_Flower_P Parameter: Tissue Value: Closed Flower vs. Whole Plant
  misc_feature: MA Experiment ID: 20000286 Result: Up-regulated in Transcription
  misc_feature: MA Experiment 20000286 PARAMETER Experiment Name: At_Open_Flower_P Parameter: Age (day) Value: 21
  misc_feature: MA Experiment 20000286 PARAMETER Experiment Name: At_Open_Flower_P Parameter: Plant Line Value: WS
  misc_feature: MA Experiment 20000286 PARAMETER Experiment Name: At_Open_Flower_P Parameter: Tissue Value: Half Open vs. Whole Plant
  misc_feature: MA Experiment ID: 20000437 Result: Down-regulated in Transcription
  misc_feature: MA Experiment 20000437 PARAMETER Experiment Name: At_Drought_P Parameter: Age (day) Value: 8
  misc_feature: MA Experiment 20000437 PARAMETER Experiment Name: At_Drought_P Parameter: Organism Value: A. thaliana
  misc_feature: MA Experiment 20000437 PARAMETER Experiment Name: At_Drought_P Parameter: Plant Line Value: WS
  misc_feature: MA Experiment 20000437 PARAMETER Experiment Name: At_Drought_P Parameter: Timepoint (hr) Value: 24
  misc_feature: MA Experiment 20000437 PARAMETER Experiment Name: At_Drought_P Parameter: Tissue Value: Whole Plant
  misc_feature: MA Experiment 20000437 PARAMETER Experiment Name: At_Drought_P Parameter: Treatment Value: Drought vs. No Drought
  misc_feature: MA Experiment ID: 20000438 Result: Down-regulated in Transcription
  misc_feature: MA Experiment 20000438 PARAMETER Experiment Name: At_Shoots__P Parameter: Age (day) Value: 14
  misc_feature: MA Experiment 20000438 PARAMETER Experiment Name: At_Shoots__P Parameter: Tissue Value: Shoots vs. Whole Plant
  misc_feature: MA Experiment ID: 20000495 Result: Up-regulated in Transcription
  misc_feature: MA Experiment 20000495 PARAMETER Experiment Name: At_Guard_Cells_P Parameter: Harvest Date Value: 8/2/2002
  misc_feature: MA Experiment 20000495 PARAMETER Experiment Name: At_Guard_Cells_P Parameter: Organism Value: A. thaliana
  misc_feature: MA Experiment 20000495 PARAMETER Experiment Name: At_Guard_Cells_P Parameter: Tissue Value: Guard Cells vs. Leaves
  misc_feature: MA Experiment ID: 20000794 Result: Down-regulated in Transcription
  misc_feature: MA Experiment 20000794 PARAMETER Experiment Name: At_Petals_P Parameter: Age (day) Value: 23-25 days
  misc_feature: MA Experiment 20000794 PARAMETER Experiment Name: At_Petals_P Parameter: Plant Line Value: WS
  misc_feature: MA Experiment 20000794 PARAMETER Experiment Name: At_Petals_P Parameter: Tissue Value: Petals vs. Whole plant
  misc_feature: MA Experiment ID: 20001248 Result: Down-regulated in Transcription
  misc_feature: MA Experiment 20001248 PARAMETER Experiment Name: At_Far-red-induction_P Parameter: Age (day) Value: 7
  misc_feature: MA Experiment 20001248 PARAMETER Experiment Name: At_Far-red-induction_P Parameter: Light Value: Far-red vs. White
  misc_feature: MA Experiment 20001248 PARAMETER Experiment Name: At_Far-red-induction_P Parameter: Organism Value: A. thaliana
  misc_feature: MA Experiment 20001248 PARAMETER Experiment Name: At_Far-red-induction_P Parameter: Plant Line Value: Columbia
  misc_feature: MA Experiment 20001248 PARAMETER Experiment Name: At_Far-red-induction_P Parameter: Timepoint (hr) Value: 4
  misc_feature: MA Experiment 20001248 PARAMETER Experiment Name: At_Far-red-induction_P Parameter: Tissue Value: Whole Plant
  misc_feature: MA Experiment ID: 20001450 Result: Down-regulated in Transcription
  misc_feature: MA Experiment 20001450 PARAMETER Experiment Name: At_Far-red-induction_P Parameter: Age (day) Value: 7
  misc_feature: MA Experiment 20001450 PARAMETER Experiment Name: At_Far-red-induction_P Parameter: Light Value: Far-red vs. White
  misc_feature: MA Experiment 20001450 PARAMETER Experiment Name: At_Far-red-induction_P Parameter: Organism Value: A. thaliana
  misc_feature: MA Experiment 20001450 PARAMETER Experiment Name: At_Far-red-induction_P Parameter: Plant Line Value: Columbia
  misc_feature: MA Experiment 20001450 PARAMETER Experiment Name: At_Far-red-induction_P Parameter: Timepoint (hr) Value: 8
  misc_feature: MA Experiment 20001450 PARAMETER Experiment Name: At_Far-red-induction_P Parameter: Tissue Value: Whole Plant
  misc_feature: MA Experiment ID: 20001451 Result: Down-regulated in Transcription
  misc_feature: MA Experiment 20001451 PARAMETER Experiment Name: At_Far-red-induction_P Parameter: Age (day) Value: 7
  misc_feature: MA Experiment 20001451 PARAMETER Experiment Name: At_Far-red-induction_P Parameter: Light Value: Far-red vs. White
  misc_feature: MA Experiment 20001451 PARAMETER Experiment Name: At_Far-red-induction_P Parameter: Organism Value: A. thaliana
  misc_feature: MA Experiment 20001451 PARAMETER Experiment Name: At_Far-red-induction_P Parameter: Plant Line Value: Columbia
  misc_feature: MA Experiment 20001451 PARAMETER Experiment Name: At_Far-red-induction_P Parameter: Timepoint (hr) Value: 24
  misc_feature: MA Experiment 20001451 PARAMETER Experiment Name: At_Far-red-induction_P Parameter: Tissue Value: Whole Plant
  misc_feature: MA Experiment ID: 20001560 Result: Up-regulated in Transcription
  misc_feature: MA Experiment 20001560 PARAMETER Experiment Name: At_Drought_Soil_Dry_P Parameter: Age (day) Value: 28
  misc_feature: MA Experiment 20001560 PARAMETER Experiment Name: At_Drought_Soil_Dry_P Parameter: Organism Value: A. thaliana
  misc_feature: MA Experiment 20001560 PARAMETER Experiment Name: At_Drought_Soil_Dry_P Parameter: Plant Line Value: WS
  misc_feature: MA Experiment 20001560 PARAMETER Experiment Name: At_Drought_Soil_Dry_P Parameter: Post Timepoint (hr) Value: None
  misc_feature: MA Experiment 20001560 PARAMETER Experiment Name: At_Drought_Soil_Dry_P Parameter: Post-Treatment Value: None
  misc_feature: MA Experiment 20001560 PARAMETER Experiment Name: At_Drought_Soil_Dry_P Parameter: Timepoint (day) Value: 14
  misc_feature: MA Experiment 20001560 PARAMETER Experiment Name: At_Drought_Soil_Dry_P Parameter: Treatment Value: Drought vs. No Drought
  misc_feature: MA Experiment ID: 20001911 Result: Down-regulated in Transcription
  misc_feature: MA Experiment 20001911 PARAMETER Experiment Name: At_Drought_Reproduction_P Parameter: Age (day) Value: 40
  misc_feature: MA Experiment 20001911 PARAMETER Experiment Name: At_Drought_Reproduction_P Parameter: Organism Value: A. thaliana
  misc_feature: MA Experiment 20001911 PARAMETER Experiment Name: At_Drought_Reproduction_P Parameter: Plant Line Value: WS
  misc_feature: MA Experiment 20001911 PARAMETER Experiment Name: At_Drought_Reproduction_P Parameter: Timepoint (day) Value: 10
  misc_feature: MA Experiment 20001911 PARAMETER Experiment Name: At_Drought_Reproduction_P Parameter: Tissue Value: Flowers
  misc_feature: MA Experiment 20001911 PARAMETER Experiment Name: At_Drought_Reproduction_P Parameter: Treatment Value: Drought vs. No Drought
attgaagtctctgcttatatacaagaacttgctcattcctcaaagcatccacacataatcacgatgaagctctttgttcatctctctatcttcttctccatcctcttcatcactctcccatcttcttacagctgcaccgaaaaatgacaagaatgccctccttcaaatcaagaaagcacttggcaatcctccccttctatcctcctggaacccccgaaccgactgttgtaccggctggaccggcgtcgaatgcactaaccgtcgcgttaccggtctcagcgttacctccggcgaagtctccggtcagatctcgtaccagatcggcgacctcgttgacctccgtacactagatttcagctacctgccacacctcaccggaaacatcccacgcaccatcaccaaactcaagaacctcaacactctctacttgaagcacactagtctctccggtccgattcctgattacatcagcgagctcaagagcctcacgttcttggacctttcttttaaccaatttaccggtccaattcccggttcgctatctcagatgccgaagcttgaagccattcaaatcaacgataataagctaaccggttctataccaaactctttcggttcttttgttggcaacgtccctaatctctacttgtctaacaataagctgtcaggaaaaataccggaatcgttgtctaaatacgacttcaacgcagtggatttgtcgggaaatggtttcgaaggagatgcctttatgttcttcggacggaacaaaacaacagtacgagtggatttgtcgagaaacatgtttaatttcgatctcgtcaaggttaagttcgctagaagcatagtttcgttggatctgagccagaaccatatctacgggaagataccaccagcactgactaaactacacctcgagcatttcaacgtgagcgacaaccatctctgcggaaaaatcccaagtggcggtctacttcagacctttgaaccatctgccttcgctcacaacatctgtctttgtggaactccccttaaggcttgttaatttggtttaatcttggcggaagaataaaaataatgttgaatatgttatgatgatgtgttcattatcaccgccaaaccaagtttattgtttctttgttatgaatttaatttaatggcaagaattggttacgt

SEQ ID NO: 108716 - protein, 164 aa, Arabidopsis thaliana; identical to SEQ ID NO: 31013
  peptide (1)..(164): Ceres Seq. ID no. 13668119
  misc_feature (121)..(143): Pfam Name: Leucine Rich Repeat Pfam Description: Leucine Rich Repeat
  misc_feature (1)..(164): Homolog of NCBI NO: 9294113 NR Description: leucine-rich repeat protein FLR1 [Arabidopsis
  misc_feature (1)..(164): Homolog of NCBI NO: 16323089 NR Description: At3g12148/T23B7.11 [Arabidopsis thaliana]
  misc_feature (1)..(164): Homolog of NCBI NO: 7637423 NR Description: leucine-rich repeat protein FLR1 [Arabidopsis
  misc_feature (1)..(41): Homolog of NCBI NO: 12322044 NR Description: unknown protein; 756-145 [Arabidopsis thaliana]
  misc_feature (1)..(164): Homolog of NCBI NO: 18148925 NR Description: polygalacturonase-inhibitor protein [Citrus sp.
  misc_feature (1)..(164): Homolog of NCBI NO: 34068091 NR Description: polygalacturonase inhibiting protein [Prunus
  misc_feature (1)..(164): Homolog of NCBI NO: 21667647 NR Description: polygalacturonase-inhibiting protein [Vitis
  misc_feature (1)..(164): Homolog of NCBI NO: 18148376 NR Description: polygalacturonase-inhibitor protein [Citrus sp.
  misc_feature (1)..(164): Homolog of NCBI NO: 15240182 NR Description: polygalacturonase inhibiting protein (PGIP1) thaliana] >gi|21263838|sp|Q9M5J9|PGI1_ARATH Polygalacturonase
  misc_feature (1)..(164): Homolog of NCBI NO: 21593869 NR Description: polygalacturonase inhibiting protein 1

SEQ ID NO: 108717 - protein, 97 aa, Arabidopsis thaliana; identical to SEQ ID NO: 84115
  peptide (1)..(97): Ceres Seq. ID no. 13668120
  misc_feature (54)..(76): Pfam Name: Leucine Rich Repeat Pfam Description: Leucine Rich Repeat
  misc_feature (1)..(97): Homolog of NCBI NO: 9294113 NR Description: leucine-rich repeat protein FLR1 [Arabidopsis
  misc_feature (1)..(97): Homolog of NCBI NO: 16323089 NR Description: At3g12148/T23B7.11 [Arabidopsis thaliana]
  misc_feature (1)..(97): Homolog of NCBI NO: 7637423 NR Description: leucine-rich repeat protein FLR1 [Arabidopsis
  misc_feature (1)..(97): Homolog of NCBI NO: 18148925 NR Description: polygalacturonase-inhibitor protein [Citrus sp.
  misc_feature (1)..(97): Homolog of NCBI NO: 34068091 NR Description: polygalacturonase inhibiting protein [Prunus
  misc_feature (1)..(97): Homolog of NCBI NO: 21667647 NR Description: polygalacturonase-inhibiting protein [Vitis
  misc_feature (1)..(97): Homolog of NCBI NO: 18148376 NR Description: polygalacturonase-inhibitor protein [Citrus sp.
  misc_feature (1)..(97): Homolog of NCBI NO: 15240182 NR Description: polygalacturonase inhibiting protein (PGIP1) thaliana] >gi|21263838|sp|Q9M5J9|PGI1_ARATH Polygalacturonase
  misc_feature (1)..(97): Homolog of NCBI NO: 21593869 NR Description: polygalacturonase inhibiting protein 1
  misc_feature (1)..(95): Homolog of NCBI NO: 3337095 NR Description: polygalacturonase inhibitor (PGIP) [Citrus iyo]

SEQ ID NO: 108718 - DNA, 2181 bp, Zea mays subsp. mays
  misc_feature (1)..(2181): Ceres Seq. ID no. 14307940
  misc_feature: MA Experiment ID: 108528 Result: Down-regulated in Transcription
  misc_feature: MA Experiment 108528 PARAMETER Experiment Name: Zm_Imbibed_Seeds_P Parameter: Age (day) Value: 5 vs. 2
  misc_feature: MA Experiment 108528 PARAMETER Experiment Name: Zm_Imbibed_Seeds_P Parameter: Organism Value: Zea mays
  misc_feature: MA Experiment 108528 PARAMETER Experiment Name: Zm_Imbibed_Seeds_P Parameter: Plant Line Value: 35A19
  misc_feature: MA Experiment 108528 PARAMETER Experiment Name: Zm_Imbibed_Seeds_P Parameter: Tissue Value: Aerial vs. Embryo
  misc_feature: MA Experiment ID: 108530 Result: Down-regulated in Transcription
  misc_feature: MA Experiment 108530 PARAMETER Experiment Name: Zm_Imbibed_Seeds_P Parameter: Age (day) Value: 6 vs. 2
  misc_feature: MA Experiment 108530 PARAMETER Experiment Name: Zm_Imbibed_Seeds_P Parameter: Organism Value: Zea mays
  misc_feature: MA Experiment 108530 PARAMETER Experiment Name: Zm_Imbibed_Seeds_P Parameter: Plant Line Value: 35A19
  misc_feature: MA Experiment 108530 PARAMETER Experiment Name: Zm_Imbibed_Seeds_P Parameter: Tissue Value: Aerial vs. Embryo
  misc_feature: MA Experiment ID: 108535 Result: Up-regulated in Transcription
  misc_feature: MA Experiment 108535 PARAMETER Experiment Name: Zm_Meristem_P Parameter: Age (day) Value: 8
  misc_feature: MA Experiment 108535 PARAMETER Experiment Name: Zm_Meristem_P Parameter: Organism Value: Zea mays
  misc_feature: MA Experiment 108535 PARAMETER Experiment Name: Zm_Meristem_P Parameter: Plant Line Value: 35A19
  misc_feature: MA Experiment 108535 PARAMETER Experiment Name: Zm_Meristem_P Parameter: Tissue Value: Root Meristem vs. Above Root Meristem
  misc_feature: MA Experiment ID: 108543 Result: Up-regulated in Transcription
  misc_feature: MA Experiment ID: 108556 Result: Down-regulated in Transcription
  misc_feature: MA Experiment 108556 PARAMETER Experiment Name: Zm_Drought_P Parameter: Age (day) Value: 9
  misc_feature: MA Experiment 108556 PARAMETER Experiment Name: Zm_Drought_P Parameter: Organism Value: Zea mays
  misc_feature: MA Experiment 108556 PARAMETER Experiment Name: Zm_Drought_P Parameter: Plant Line Value: 35A19
  misc_feature: MA Experiment 108556 PARAMETER Experiment Name: Zm_Drought_P Parameter: Timepoint (hr) Value: 24
  misc_feature: MA Experiment 108556 PARAMETER Experiment Name: Zm_Drought_P Parameter: Tissue Value: Aerial
  misc_feature: MA Experiment 108556 PARAMETER Experiment Name: Zm_Drought_P Parameter: Treatment Value: Drought vs. No Drought
  misc_feature: MA Experiment ID: 20000108 Result: Up-regulated in Transcription
  misc_feature: MA Experiment 20000108 PARAMETER Experiment Name: Zm_Root-Tips_P Parameter: Age (day) Value: 12
  misc_feature: MA Experiment 20000108 PARAMETER Experiment Name: Zm_Root-Tips_P Parameter: Organism Value: Zea mays
  misc_feature: MA Experiment 20000108 PARAMETER Experiment Name: Zm_Root-Tips_P Parameter: Tissue Value: Root tips vs. Root mid region    35
  misc_feature: MA Experiment 20000108 PARAMETER Experiment Name: Zm_Root-Tips_P Parameter: Tissue Value: Root tips vs. Root mid region   Sequence Listing-Misc Features (4)
  misc_feature: MA Experiment ID: 20000477 Result: Down-regulated in Transcription
  misc_feature: MA Experiment 20000477 PARAMETER Experiment Name: Zm_5mM_SA_P Parameter: Age (day) Value: 10
  misc_feature: MA Experiment 20000477 PARAMETER Experiment Name: Zm_5mM_SA_P Parameter: Organism Value: Zea mays
  misc_feature: MA Experiment 20000477 PARAMETER Experiment Name: Zm_5mM_SA_P Parameter: Plant Line Value: 35A19
  misc_feature: MA Experiment 20000477 PARAMETER Experiment Name: Zm_5mM_SA_P Parameter: Timepoint (hr) Value: 48
  misc_feature: MA Experiment 20000477 PARAMETER Experiment Name: Zm_5mM_SA_P Parameter: Tissue Value: Aerial
  misc_feature: MA Experiment 20000477 PARAMETER Experiment Name: Zm_5mM_SA_P Parameter: Treatment Value: 5mM SA vs. No Treatment
  misc_feature: MA Experiment ID: 20000478 Result: Down-regulated in Transcription
  misc_feature: MA Experiment 20000478 PARAMETER Experiment Name: Zm_5mM_SA_P Parameter: Age (day) Value: 11
  misc_feature: MA Experiment 20000478 PARAMETER Experiment Name: Zm_5mM_SA_P Parameter: Organism Value: Zea mays
  misc_feature: MA Experiment 20000478 PARAMETER Experiment Name: Zm_5mM_SA_P Parameter: Plant Line Value: 35A19
  misc_feature: MA Experiment 20000478 PARAMETER Experiment Name: Zm_5mM_SA_P Parameter: Timepoint (hr) Value: 72
  misc_feature: MA Experiment 20000478 PARAMETER Experiment Name: Zm_5mM_SA_P Parameter: Tissue Value: Aerial
  misc_feature: MA Experiment 20000478 PARAMETER Experiment Name: Zm_5mM_SA_P Parameter: Treatment Value: 5mM SA vs. No Treatment
  misc_feature: MA Experiment ID: 20000479 Result: Down-regulated in Transcription
  misc_feature: MA Experiment 20000479 PARAMETER Experiment Name: Zm_Drought_P Parameter: Age (day) Value: 10
  misc_feature: MA Experiment 20000479 PARAMETER Experiment Name: Zm_Drought_P Parameter: Organism Value: Zea mays
  misc_feature: MA Experiment 20000479 PARAMETER Experiment Name: Zm_Drought_P Parameter: Plant Line Value: 35A19
  misc_feature: MA Experiment 20000479 PARAMETER Experiment Name: Zm_Drought_P Parameter: Timepoint (hr) Value: 48
  misc_feature: MA Experiment 20000479 PARAMETER Experiment Name: Zm_Drought_P Parameter: Tissue Value: Aerial
  misc_feature: MA Experiment 20000479 PARAMETER Experiment Name: Zm_Drought_P Parameter: Treatment Value: Drought vs. No Drought
  misc_feature: MA Experiment ID: 20000533 Result: Down-regulated in Transcription
  misc_feature: MA Experiment 20000533 PARAMETER Experiment Name: Zm_0.001percent_MeJA_P Parameter: Age (day) Value: 11
  misc_feature: MA Experiment 20000533 PARAMETER Experiment Name: Zm_0.001percent_MeJA_P Parameter: Organism Value: Zea mays
  misc_feature: MA Experiment 20000533 PARAMETER Experiment Name: Zm_0.001percent_MeJA_P Parameter: Plant Line Value: 35A19
  misc_feature: MA Experiment 20000533 PARAMETER Experiment Name: Zm_0.001percent_MeJA_P Parameter: Timepoint (hr) Value: 72
  misc_feature: MA Experiment 20000533 PARAMETER Experiment Name: Zm_0.001percent_MeJA_P Parameter: Tissue Value: Aerial
  misc_feature: MA Experiment 20000533 PARAMETER Experiment Name: Zm_0.001percent_MeJA_P Parameter: Treatment Value: 0.001percent MeJA vs. No Treatment
  misc_feature: MA Experiment ID: 20000535 Result: Up-regulated in Transcription
  misc_feature: MA Experiment 20000535 PARAMETER Experiment Name: Zm_Hybrid_Seed_Dev_P Parameter: DAP Value: 30 vs. 12
  misc_feature: MA Experiment 20000535 PARAMETER Experiment Name: Zm_Hybrid_Seed_Dev_P Parameter: Organism Value: Zea mays
  misc_feature: MA Experiment 20000535 PARAMETER Experiment Name: Zm_Hybrid_Seed_Dev_P Parameter: Plant Line Value: 35A19
  misc_feature: MA Experiment 20000535 PARAMETER Experiment Name: Zm_Hybrid_Seed_Dev_P Parameter: Tissue Value: Embryo vs. Unfert Floret
tctcccatcacagtgcgccacccgcacccaccaacgaggcaacgaaacccagtcggaagctagaccggcgacaagtgcagcgctcgccgcgatggattctgactacggcgtgccgcgcgagctgtcggaggtgcagaagaagcgcgcgctctaccagcccgaggtgcccccctgcctccaggggactactgtcagggtggagtatggtgacgccgcaattgcagctgaccaggcaggcgctcatgtgatcagccatgcgttccctcacacctatgggcagccccttgcacatttcctcaggaagacggctgttgtccttgatgctaaggtcatatctgaacacccggtggtcagggttggcattgtcttctgtggcaggcaatccccaggaggccacaatgttgtttggggactctatgaggctatcaaggcccacaaccaaaacagcaaactcattggtttcctcggtggatcagatggtttgctagcgcagagaacattggagatcactaatgaagttcttgcttcatataaaaatcaaggtggatatgacatgcttggtcggacaaaggatcagattaggacgacagagcaggtcaatggtgcaatggctagttgccaggctttgaagttggatgctctggttataattggaggtgtcacttccaacactgacgctgctcaacttgctgagacttttgctgaggcaaagtgtgcaacgaaggttgtaggtgttcctgtaactttgaatggggacctcaagaaccagtttgttgagactactgttggctttgacaccatatgcaaggtgaatgcacaacttatcagcaatgtctgcactgatgctctatctgctgagaagtattactacttcattcgtttgatgggacgcaaggcttctcatgtggcattggaatgtgctcttcaatcacacccgaacatggtcatcctaggagaggaggtggctgcttccaaacttacaatttttgatattacgaagcagatttgtgatgcggttcaggcaagggcagaaaaagacaagaaccatggggttgttcttattcctgagggtcttgtggagagtattcctgaactatatgctctgcttcaggaaatccatggcctccatggcaaaggtgtttctgttgagaatatctcttctcagctttcaccctgggcatctgcactctttgagtttttgcccccttttatcaggaagcagctacttctccatcctgaatctgatgattcagctcaactttctcagattgagacagagaagcttctagcccagttagttgagactgagatgaacagacgtttgaaggagggcacttacaaaggaaagaagtttaatgcaatctgtcacttctttggctaccaagctaggggagcactgccttccaagtttgactgcgattatgcctatgtcttggggcatgtgtgctaccacatcatagctgccggtttgaacggttacatggccacagtgacaaatgttaagagtccagtgaacaagtggcgatgtggtgcggctcctatttcgtctatgatgactgtgcagcgatggtcgcgtggcccttcagccacccaaatcggaaagcctgctgttcacatggctagcgttgacttgaaaggaaaagcatacgatgtattgaggcagaattcttccaggtttttgttggaagatgtctacaggaacccaggtccgctccagtttgaaggaccaggtgccgattcaaagcctatctcactgtgcgtcgaggatcaagactacatgggcaggataaagaaattgcaggaatacctggagaaggtgaagagcattgtgaagcctgggtgctcgcaggatgtccttaaggcggcgctgagcgccatgtcttctgtgacggagacactgaacatcatgacctcatcgtccaccggccagactgcactgtgactcgtttggtgccgttttgtggtgcggatcagaatccccactttttccatggtgtcgattgacaaagttaggagcagtaatcctggtgccacacgggtcattcttttgtagcttcttgggagagttctgtcagttttgaattcgatagtttattatggagaggcttgttggtgagtttgagctcgaataatttttgaaacagacggattgcggaatcttaataaaccaaaatttgtgac

SEQ ID NO: 108719 - protein, 646 aa, Zea mays subsp. mays
  misc_feature (1)..(646): Ceres Seq. ID no. 14307941
  misc_feature (118)..(398): Pfam Name: Phosphofructokinase Pfam Description: Phosphofructokinase
  misc_feature (42)..(588): Homolog of NCBI NO: 15221156 NR Description: pyrophosphate-fructose-6-phosphate
  misc_feature (41)..(576): Homolog of NCBI NO: 11528427 NR Description: pyrophosphate-dependent phosphofructokinase
  misc_feature (118)..(515): Homolog of NCBI NO: 29367525 NR Description: fructose-6-phosphate 1-phosphotransferase
  misc_feature (31)..(637): Homolog of NCBI NO: 29647436 NR Description: putative pyrophosphate--fructose 6-phosphate
  misc_feature (31)..(643): Homolog of NCBI NO: 15218074 NR Description: pyrophosphate-dependent phosphofructokinase alpha
  misc_feature (42)..(588): Homolog of NCBI NO: 2507174 NR Description: PYROPHOSPHATE--FRUCTOSE 6-PHOSPHATE BETA SUBUNIT (PFP) (6-PHOSPHOFRUCTOKINASE (PYROPHOSPHATE))
  misc_feature (31)..(644): Homolog of NCBI NO: 129881 NR Description: Pyrophosphate--fructose 6-phosphate alpha subunit (PFP) (6-phosphofructokinase, (Pyrophosphate-dependent 6-phosphofructose-1-kinase) (PPI-PFK)
  misc_feature (31)..(643): Homolog of NCBI NO: 15223082 NR Description: pyrophosphate-dependent phosphofructokinase alpha
  misc_feature (31)..(646): Homolog of NCBI NO: 3790102 NR Description: pyrophosphate-dependent phosphofructokinase alpha
  misc_feature (31)..(646): Homolog of NCBI NO: 2499488 NR Description: Pyrophosphate--fructose 6-phosphate alpha subunit (PFP) (6-phosphofructokinase, pyrophosphate
LPSQCATRTHQRGNETQSEARPATSAALAAMDSDYGVPRELSEVQKKRALYQPEVPPCLQGTTVRVEYGDAAIAADQAGAHVISHAFPHTYGQPLAHFLRKTAVVLDAKVISEHPVVRVGIVFCGRQSPGGHNVVWGLYEAIKAHNQNSKLIGFLGGSDGLLAQRTLEITNEVLASYKNQGGYDMLGRTKDQIRTTEQVNGAMASCQALKLDALVIIGGVTSNTDAAQLAETFAEAKCATKVVGVPVTLNGDLKNQFVETTVGFDTICKVNAQLISNVCTDALSAEKYYYFIRLMGRKASHVALECALQSHPNMVILGEEVAASKLTIFDITKQICDAVQARAEKDKNHGVVLIPEGLVESIPELYALLQEIHGLHGKGVSVENISSQLSPWASALFEFLPPFIRKQLLLHPESDDSAQLSQIETEKLLAQLVETEMNRRLKEGTYKGKKFNAICHFFGYQARGALPSKFDCDYAYVLGHVCYHIIAAGLNGYMATVTNVKSPVNKWRCGAAPISSMMTVQRWSRGPSATQIGKPAVHMASVDLKGKAYDVLRQNSSRFLLEDVYRNPGPLQFEGPGADSKPISLCVEDQDYMGRIKKLQEYLEKVKSIVKPGCSQDVLKAALSAMSSVTETLNIMTSSSTGQTAL

SEQ ID NO: 108720 - protein, 616 aa, Zea mays subsp. mays
  misc_feature (1)..(616): Ceres Seq. ID no. 14307942
  misc_feature (88)..(368): Pfam Name: Phosphofructokinase Pfam Description: Phosphofructokinase
  misc_feature (12)..(558): Homolog of NCBI NO: 2507174 NR Description: PYROPHOSPHATE--FRUCTOSE 6-PHOSPHATE BETA SUBUNIT (PFP) (6-PHOSPHOFRUCTOKINASE (PYROPHOSPHATE))
  misc_feature (12)..(558): Homolog of NCBI NO: 15221156 NR Description: pyrophosphate-fructose-6-phosphate
  misc_feature (11)..(546): Homolog of NCBI NO: 11528427 NR Description: pyrophosphate-dependent phosphofructokinase
  misc_feature (88)..(485): Homolog of NCBI NO: 29367525 NR Description: fructose-6-phosphate 1-phosphotransferase
  misc_feature (1)..(607): Homolog of NCBI NO: 29647436 NR Description: putative pyrophosphate--fructose 6-phosphate
  misc_feature (1)..(613): Homolog of NCBI NO: 15218074 NR Description: pyrophosphate-dependent phosphofructokinase alpha
  misc_feature (1)..(614): Homolog of NCBI NO: 129881 NR Description: Pyrophosphate--fructose 6-phosphate alpha subunit (PFP) (6-phosphofructokinase, (Pyrophosphate-dependent 6-phosphofructose-1-kinase) (PPI-PFK)
  misc_feature (1)..(613): Homolog of NCBI NO: 15223082 NR Description: pyrophosphate-dependent phosphofructokinase alpha
  misc_feature (1)..(616): Homolog of NCBI NO: 3790102 NR Description: pyrophosphate-dependent phosphofructokinase alpha
  misc_feature (1)..(616): Homolog of NCBI NO: 2499488 NR Description: Pyrophosphate--fructose 6-phosphate alpha subunit (PFP) (6-phosphofructokinase, pyrophosphate
MDSDYGVPRELSEVQKKRALYQPEVPPCLQGTTVRVEYGDAAIAADQAGAHVISHAFPHTYGQPLAHFLRKTAVVLDAKVISEHPVVRVGIVFCGRQSPGGHNVVWGLYEAIKAHNQNSKLIGFLGGSDGLLAQRTLEITNEVLASYKNQGGYDMLGRTKDQIRTTEQVNGAMASCQALKLDALVIIGGVTSNTDAAQLAETFAEAKCATKVVGVPVTLNGDLKNQFVETTVGFDTICKVNAQLISNVCTDALSAEKYYYFIRLMGRKASHVALECALQSHPNMVILGEEVAASKLTIFDITKQICDAVQARAEKDKNHGVVLIPEGLVESIPELYALLQEIHGLHGKGVSVENISSQLSPWASALFEFLPPFIRKQLLLHPESDDSAQLSQIETEKLLAQLVETEMNRRLKEGTYKGKKFNAICHFFGYQARGALPSKFDCDYAYVLGHVCYHIIAAGLNGYMATVTNVKSPVNKWRCGAAPISSMMTVQRWSRGPSATQIGKPAVHMASVDLKGKAYDVLRQNSSRFLLEDVYRNPGPLQFEGPGADSKPISLCVEDQDYMGRIKKLQEYLEKVKSIVKPGCSQDVLKAALSAMSSVTETLNIMTSSSTGQTAL

SEQ ID NO: 108721 - protein, 462 aa, Zea mays subsp. mays
  misc_feature (1)..(462): Ceres Seq. ID no. 14307943
  misc_feature (1)..(214): Pfam Name: Phosphofructokinase Pfam Description: Phosphofructokinase
  misc_feature (1)..(404): Homolog of NCBI NO: 2507174 NR Description: PYROPHOSPHATE--FRUCTOSE 6-PHOSPHATE BETA SUBUNIT (PFP) (6-PHOSPHOFRUCTOKINASE (PYROPHOSPHATE))
  misc_feature (1)..(404): Homolog of NCBI NO: 15221156 NR Description: pyrophosphate-fructose-6-phosphate
  misc_feature (1)..(392): Homolog of NCBI NO: 11528427 NR Description: pyrophosphate-dependent phosphofructokinase
  misc_feature (1)..(331): Homolog of NCBI NO: 29367525 NR Description: fructose-6-phosphate 1-phosphotransferase
  misc_feature (1)..(453): Homolog of NCBI NO: 29647436 NR Description: putative pyrophosphate--fructose 6-phosphate
  misc_feature (1)..(459): Homolog of NCBI NO: 15218074 NR Description: pyrophosphate-dependent phosphofructokinase alpha
  misc_feature (1)..(460): Homolog of NCBI NO: 129881 NR Description: Pyrophosphate--fructose 6-phosphate alpha subunit (PFP) (6-phosphofructokinase, (Pyrophosphate-dependent 6-phosphofructose-1-kinase) (PPI-PFK)
  misc_feature (1)..(459): Homolog of NCBI NO: 15223082 NR Description: pyrophosphate-dependent phosphofructokinase alpha
  misc_feature (1)..(462): Homolog of NCBI NO: 3790102 NR Description: pyrophosphate-dependent phosphofructokinase alpha
  misc_feature (1)..(462): Homolog of NCBI NO: 2499488 NR Description: Pyrophosphate--fructose 6-phosphate alpha subunit (PFP) (6-phosphofructokinase, pyrophosphate
MLGRTKDQIRTTEQVNGAMASCQALKLDALVIIGGVTSNTDAAQLAETFAEAKCATKVVGVPVTLNGDLKNQFVETTVGFDTICKVNAQLISNVCTDALSAEKYYYFIRLMGRKASHVALECALQSHPNMVILGEEVAASKLTIFDITKQICDAVQARAEKDKNHGVVLIPEGLVESIPELYALLQEIHGLHGKGVSVENISSQLSPWASALFEFLPPFIRKQLLLHPESDDSAQLSQIETEKLLAQLVETEMNRRLKEGTYKGKKFNAICHFFGYQARGALPSKFDCDYAYVLGHVCYHIIAAGLNGYMATVTNVKSPVNKWRCGAAPISSMMTVQRWSRGPSATQIGKPAVHMASVDLKGKAYDVLRQNSSRFLLEDVYRNPGPLQFEGPGADSKPISLCVEDQDYMGRIKKLQEYLEKVKSIVKPGCSQDVLKAALSAMSSVTETLNIMTSSSTGQTAL

SEQ ID NO: 108722 - DNA, 958 bp, Zea mays subsp. mays
  misc_feature (1)..(958): Ceres Seq. ID no. 14306246
aagtacgcctctatccgaagccaaaccacacgcacacgccgcgccagcctcacgctctcacccatgttttgtgcgcgcacgcgtcctgcttcttctcgccaacgacaagccgcacgcagcgtctcgccagctagctgatcatgagcaacggcgacacgctcgacaagctggtggtgttcctggcgaagcgcgacggcatcgacaagctggtcaagacgttccagtacgtgtccaagctggcgcactggggcgccgagtcttcgctcccggagctcgcgcagcgcgccaagagctgggagacggcgtccgggctgagccgcaaggcgttccggtcgggccgcttcctggccgggttcaacgcgctgcgccgcggcccggtcccggtcccgggggagctcggcgcgctggccgtgctggccaacgccggcgagatggtctacttcttcttcgaccacttcacgtggctgtcccgcgcgggcgtgctcgagccctggctggcgcgccgggccagcttcgtgtcggccttcggcgaggccgtcggctacgtgtttttcatcgccatggacttcatcatgatcaggcggggcctgcggcaggagagggagctgctgagggaaggcgccaaggacgccgcggagaaggaggtgcggaggatccgggtggacagggtgatgcggctcatggcgacggcggccaacgccgccgacctgatcatcgccgtcgcggaaaccgatcccaacccgttctgcaaccacgccgtcacgctggggattagcggcctcgtgtcagcgtgggctggctggtacagaaactggccctcgtgaactgggccgcttcggcctacatgtgcatatttttcattcacttatttaactgcggctgcgatgcatgatgatattgccagatttgaaccttttctatctccagcaataacctttaaggcctaatttgaaaactt

SEQ ID NO: 108723 - protein, 257 aa, Zea mays subsp. mays
  misc_feature (1)..(257): Ceres Seq. ID no. 14306247
  misc_feature (43)..(220): Homolog of NCBI NO: 34499419 NR Description: conserved hypothetical protein
STPLSEAKPHAHAAPASRSHPCFVRARVLLLLANDKPHAASRQLADHEQRRHARQAGGVPGEARRHRQAGQDVPVRVQAGALGRRVFAPGARAARQELGDGVRAEPQGVPVGPLPGRVQRAAPRPGPGPGGARRAGRAGQRRRDGLLLLRPLHVAVPRGRARALAGAPGQLRVGLRRGRRLRVFHRHGLHHDQAGPAAGEGAAEGRRQGRRGEGGAEDPGGQGDAAHGDGGQRRRPDHRRRGNRSQPVLQPRRHAGD

SEQ ID NO: 108724 - protein, 227 aa, Zea mays subsp. mays
  misc_feature (1)..(227): Ceres Seq. ID no. 14306248
  misc_feature (7)..(225): Pfam Name: Peroxisomal biogenesis factor 11 (PEX11) Pfam Description: Peroxisomal biogenesis factor 11 (PEX11)
  misc_feature (5)..(227): Homolog of NCBI NO: 21536511 NR Description: unknown [Arabidopsis thaliana]
  misc_feature (5)..(227): Homolog of NCBI NO: 18401872 NR Description: expressed protein [Arabidopsis thaliana]
  misc_feature (5)..(227): Homolog of NCBI NO: 15232797 NR Description: expressed protein [Arabidopsis thaliana]
  misc_feature (1)..(227): Homolog of NCBI NO: 38605902 NR Description: OSJNBb0020O11.14 [Oryza sativa (japonica
MSNGDTLDKLVVFLAKRDGIDKLVKTFQYVSKLAHWGAESSLPELAQRAKSWETASGLSRKAFRSGRFLAGFNALRRGPVPVPGELGALAVLANAGEMVYFFFDHFTWLSRAGVLEPWLARRASFVSAFGEAVGYVFFIAMDFIMIRRGLRQERELLREGAKDAAEKEVRRIRVDRVMRLMATAANAADLIIAVAETDPNPFCNHAVTLGISGLVSAWAGWYRNWPS

SEQ ID NO: 108725 - protein, 130 aa, Zea mays subsp. mays
  misc_feature (1)..(130): Ceres Seq. ID no. 14306249
  misc_feature (1)..(128): Pfam Name: Peroxisomal biogenesis factor 11 (PEX11) Pfam Description: Peroxisomal biogenesis factor 11 (PEX11)
  misc_feature (1)..(130): Homolog of NCBI NO: 21536511 NR Description: unknown [Arabidopsis thaliana]
  misc_feature (1)..(130): Homolog of NCBI NO: 18401872 NR Description: expressed protein [Arabidopsis thaliana]
  misc_feature (1)..(130): Homolog of NCBI NO: 15232797 NR Description: expressed protein [Arabidopsis thaliana]
  misc_feature (1)..(130): Homolog of NCBI NO: 38605902 NR Description: OSJNBb0020O11.14 [Oryza sativa (japonica
MVYFFFDHFTWLSRAGVLEPWLARRASFVSAFGEAVGYVFFIAMDFIMIRRGLRQERELLREGAKDAAEKEVRRIRVDRVMRLMATAANAADLIIAVAETDPNPFCNHAVTLGISGLVSAWAGWYRNWPS

SEQ ID NO: 108726 - DNA, 748 bp, Zea mays subsp. mays
  misc_feature (1)..(748): Ceres Seq. ID no. 12635481
acaacacacgtacgattcctttcctctgctctcctctctctctctctctctacaaaccctgcgatcctcttcctcaagattcgagtatgaaaggaggtaaatcgaagactgaaaccaggagctccaagctctctgtggctaagaagcctgctaaagcagcaggtcgtagcaaagcggcggctaaggatcctaacaaacctaagaggccagccagtgccttcttcgttttcatggaggactttcgtcagacttacaagaaggatcaccccaacaacaaatctgttgctgctgttggtaaagctggtggagagaagtggaagtcgttgtctgactctgagaaggctcccttcgtagctaaggctgataagcgcaaggttgagtatgagaagaccatgaaagcctacaacaagaagctggaggaaggtccaaaggaggacgaggaggaatctgacaagtctgtgtccgaggtgaatgatgaggatgatgccgatgatggtagtgatgaggaggaagacgatgactaaaagaagttgaagctggtagcacaatataggaacgctacaacaaggatctctcggatgttttttattttctttctttttactgatgttttcaacttagtaaaagctgccactatctctctgattatgattctacgggtaatggaaaaagtgtgtgtagaatgtttgaatgggagatatgcacctctatgtaacgatttagcttttttatcattctgaaatatgtt

SEQ ID NO: 108727 - protein, 173 aa, Zea mays subsp. mays
  misc_feature (1)..(173): Ceres Seq. ID no. 12635482
  misc_feature (66)..(135): Pfam Name: HMG (high mobility group) box Pfam Description: HMG (high mobility group) box
  misc_feature (29)..(173): Homolog of NCBI NO: 18394900 NR Description: Expressed protein
  misc_feature (26)..(173): Homolog of NCBI NO: 25402921 NR Description: protein F2D10.18 [imported] - Arabidopsis
  misc_feature (26)..(173): Homolog of NCBI NO: 25402921 NR Description: protein F2D10.18 [imported] - Arabidopsis
  misc_feature (29)..(173): Homolog of NCBI NO: 18394898 NR Description: Expressed protein
NTRTIPFLCSPLSLSLYKPCDPLPQDSSMKGGKSKTETRSSKLSVAKKPAKAAGRSKAAAKDPNKPKRPASAFFVFMEDFRQTYKKDHPNNKSVAAVGKAGGEKWKSLSDSEKAPFVAKADKRKVEYEKTMKAYNKKLEEGPKEDEEESDKSVSEVNDEDDADDGSDEEEDDD

SEQ ID NO: 108728 - protein, 145 aa, Zea mays subsp. mays
  misc_feature (1)..(145): Ceres Seq. ID no. 12635483
  misc_feature (38)..(107): Pfam Name: HMG (high mobility group) box Pfam Description: HMG (high mobility group) box
  misc_feature (1)..(145): Homolog of NCBI NO: 18394900 NR Description: Expressed protein
  misc_feature (1)..(145): Homolog of NCBI NO: 25402921 NR Description: protein F2D10.18 [imported] - Arabidopsis
  misc_feature (1)..(145): Homolog of NCBI NO: 25402921 NR Description: protein F2D10.18 [imported] - Arabidopsis
  misc_feature (1)..(145): Homolog of NCBI NO: 18394898 NR Description: Expressed protein
MKGGKSKTETRSSKLSVAKKPAKAAGRSKAAAKDPNKPKRPASAFFVFMEDFRQTYKKDHPNNKSVAAVGKAGGEKWKSLSDSEKAPFVAKADKRKVEYEKTMKAYNKKLEEGPKEDEEESDKSVSEVNDEDDADDGSDEEEDDD

SEQ ID NO: 108729 - protein, 97 aa, Zea mays subsp. mays
  misc_feature (1)..(97): Ceres Seq. ID no. 12635484
  misc_feature (1)..(59): Pfam Name: HMG (high mobility group) box Pfam Description: HMG (high mobility group) box
  misc_feature (1)..(97): Homolog of NCBI NO: 18394900 NR Description: Expressed protein
  misc_feature (1)..(97): Homolog of NCBI NO: 25402921 NR Description: protein F2D10.18 [imported] - Arabidopsis
  misc_feature (1)..(97): Homolog of NCBI NO: 25402921 NR Description: protein F2D10.18 [imported] - Arabidopsis
  misc_feature (1)..(97): Homolog of NCBI NO: 18394898 NR Description: Expressed protein
MEDFRQTYKKDHPNNKSVAAVGKAGGEKWKSLSDSEKAPFVAKADKRKVEYEKTMKAYNKKLEEGPKEDEEESDKSVSEVNDEDDADDGSDEEEDDD

SEQ ID NO: 108730 - DNA, 1106 bp, Zea mays subsp. mays
  misc_feature (1)..(1106): Ceres Seq. ID no. 13599456
attatctatcttcgttaataatatcgacgcggttaattgattctctctctctggaagcaaaagaaaacaaaaagacatggattcgttctcgtccttcttcgattctcagccaggcagcagaagctggagctatgattctctcaagaacctccatcagatctccccgtccgtccagaatcatctcaagcgggtttacctcactttatgctatgcccttgttgcgtctgcctttggagcttacctccacgtgctctggaacatcggtggtattctcacaaccattgcatgttgtggaaccatgatttggcttctctcatgccctccttatgaacaacaaaagaggctctcacttctcttcatgtctgccgttcttgaaggtgcctctgttggccccttgatcaaagtggctgttgattttgacccaagcatccttatcactgcgtttgtcggaactgcgatagcgtttatctgtttctcaggagcagcgatgctggcaagacgcagagagtatctctacctcggaggacttctctcttctggcttgtccatgcttatgtggcttcagtttgcttcttccatctttggtggctctgcgtccatctttaagttcgagctctactttggactcttgatctttgtgggatacatggtggtggacacacaagagattatagagaaagcacacctaggggacatggactatgtgaaacatgcattgacccttttcaccgattttgtggctgtgtttgtccgtgttctcatcataatgctgaagaactcggcagataaagaggagaagaagaagaagaggagaaactgaaactaaaagtgacaaggaaagctaataagagtgggtgttttaaataacatgaaagcgttggtgtttttacgtgttaggacgtacttttggtttgcgtatgcctcttatcgcacgcgattgtaaatggatcaagtagttttcgtttttatctcgactctcgttcactttcgtattgttcgaagtgtttcctctactgtttaatcactttgagatgagaattagcagggtaataattaagtaattggaccaaaaaaaaaaaaaaaaaagcttatcgataccgtcgacc

SEQ ID NO: 108731 - protein, 247 aa, Zea mays subsp. mays
  misc_feature (1)..(247): Ceres Seq. ID no. 13599457
  misc_feature (28)..(235): Pfam Name: Uncharacterised protein family UPF0005 Pfam Description: Uncharacterised protein family UPF0005
  misc_feature (86)..(230): Homolog of NCBI NO: 7485137 NR Description: hypothetical protein - Arabidopsis thaliana
  misc_feature (10)..(154): Homolog of NCBI NO: 27526517 NR Description: putative BAX inhibitor 1 [Hordeum vulgare subsp.
  misc_feature (17)..(247): Homolog of NCBI NO: 15236582 NR Description: Bax inhibitor-1 (BI1) family [Arabidopsis
  misc_feature (1)..(247): Homolog of NCBI NO: 12229685 NR Description: Bax inhibitor-1 (BI-1) (OsBI-1)
  misc_feature (1)..(246): Homolog of NCBI NO: 13940165 NR Description: BAX inhibitor 1 [Hordeum vulgare subsp. vulgare]
  misc_feature (1)..(247): Homolog of NCBI NO: 14719276 NR Description: Bax inhibitor 1 [Nicotiana tabacum]
  misc_feature (1)..(247): Homolog of NCBI NO: 21593125 NR Description: Bax inhibitor-1 like [Arabidopsis thaliana]
  misc_feature (1)..(247): Homolog of NCBI NO: 15238017 NR Description: Bax inhibitor-1 (BI-1), putative [Arabidopsis
  misc_feature (1)..(247): Homolog of NCBI NO: 14719274 NR Description: Bax inhibitor 1 [Brassica napus]
  misc_feature (1)..(245): Homolog of NCBI NO: 17981376 NR Description: bax inhibitor-like protein [Brassica oleracea]
MDSFSSFFDSQPGSRSWSYDSLKNLHQISPSVQNHLKRVYLTLCYALVASAFGAYLHVLWNIGGILTTIACCGTMIWLLSCPPYEQQKRLSLLFMSAVLEGASVGPLIKVAVDFDPSILITAFVGTAIAFICFSGAAMLARRREYLYLGGLLSSGLSMLMWLQFASSIFGGSASIFKFELYFGLLIFVGYMVVDTQEIIEKAHLGDMDYVKHALTLFTDFVAVFVRVLIIMLKNSADKEEKKKKRRN

SEQ ID NO: 108732 - protein, 173 aa, Zea mays subsp. mays
  misc_feature (1)..(173): Ceres Seq. ID no. 13599458
  misc_feature (1)..(161): Pfam Name: Uncharacterised protein family UPF0005 Pfam Description: Uncharacterised protein family UPF0005
  misc_feature (12)..(156): Homolog of NCBI NO: 7485137 NR Description: hypothetical protein - Arabidopsis thaliana
  misc_feature (1)..(80): Homolog of NCBI NO: 27526517 NR Description: putative BAX inhibitor 1 [Hordeum vulgare subsp.
  misc_feature (1)..(173): Homolog of NCBI NO: 15236582 NR Description: Bax inhibitor-1 (BI1) family [Arabidopsis
  misc_feature (1)..(173): Homolog of NCBI NO: 12229685 NR Description: Bax inhibitor-1 (BI-1) (OsBI-1)
  misc_feature (1)..(172): Homolog of NCBI NO: 13940165 NR Description: BAX inhibitor 1 [Hordeum vulgare subsp. vulgare]
  misc_feature (1)..(173): Homolog of NCBI NO: 14719276 NR Description: Bax inhibitor 1 [Nicotiana tabacum]
  misc_feature (1)..(173): Homolog of NCBI NO: 21593125 NR Description: Bax inhibitor-1 like [Arabidopsis thaliana]
  misc_feature (1)..(173): Homolog of NCBI NO: 15238017 NR Description: Bax inhibitor-1 (BI-1), putative [Arabidopsis
  misc_feature (1)..(173): Homolog of NCBI NO: 14719274 NR Description: Bax inhibitor 1 [Brassica napus]
  misc_feature (1)..(171): Homolog of NCBI NO: 17981376 NR Description: bax inhibitor-like protein [Brassica oleracea]
MIWLLSCPPYEQQKRLSLLFMSAVLEGASVGPLIKVAVDFDPSILITAFVGTAIAFICFSGAAMLARRREYLYLGGLLSSGLSMLMWLQFASSIFGGSASIFKFELYFGLLIFVGYMVVDTQEIIEKAHLGDMDYVKHALTLFTDFVAVFVRVLIIMLKNSADKEEKKKKRRN

SEQ ID NO: 108733 - protein, 153 aa, Zea mays subsp. mays
  misc_feature (1)..(153): Ceres Seq. ID no. 13599459
  misc_feature (1)..(141): Pfam Name: Uncharacterised protein family UPF0005 Pfam Description: Uncharacterised protein family UPF0005
  misc_feature (1)..(136): Homolog of NCBI NO: 7485137 NR Description: hypothetical protein - Arabidopsis thaliana
  misc_feature (1)..(60): Homolog of NCBI NO: 27526517 NR Description: putative BAX inhibitor 1 [Hordeum vulgare subsp.
  misc_feature (1)..(153): Homolog of NCBI NO: 15236582 NR Description: Bax inhibitor-1 (BI1) family [Arabidopsis
  misc_feature (1)..(153): Homolog of NCBI NO: 12229685 NR Description: Bax inhibitor-1 (BI-1) (OsBI-1)
  misc_feature (1)..(152): Homolog of NCBI NO: 13940165 NR Description: BAX inhibitor 1 [Hordeum vulgare subsp. vulgare]
  misc_feature (1)..(153): Homolog of NCBI NO: 14719276 NR Description: Bax inhibitor 1 [Nicotiana tabacum]
  misc_feature (1)..(153): Homolog of NCBI NO: 21593125 NR Description: Bax inhibitor-1 like [Arabidopsis thaliana]
  misc_feature (1)..(153): Homolog of NCBI NO: 15238017 NR Description: Bax inhibitor-1 (BI-1), putative [Arabidopsis
  misc_feature (1)..(153): Homolog of NCBI NO: 14719274 NR Description: Bax inhibitor 1 [Brassica napus]
  misc_feature (1)..(151): Homolog of NCBI NO: 17981376 NR Description: bax inhibitor-like protein [Brassica oleracea]
MSAVLEGASVGPLIKVAVDFDPSILITAFVGTAIAFICFSGAAMLARRREYLYLGGLLSSGLSMLMWLQFASSIFGGSASIFKFELYFGLLIFVGYMVVDTQEIIEKAHLGDMDYVKHALTLFTDFVAVFVRVLIIMLKNSADKEEKKKKRRN

SEQ ID NO: 108734 - DNA, 1355 bp, Zea mays subsp. mays
  misc_feature (1)..(1355): Ceres Seq. ID no. 13599254
agaacatcctaatcgaaaaagtgtatgctttggcctttaataatataaaaagaaaaaaagaaaaaaaaactggtatcgagagcgagaccgctgggaactaactaagccctaagattctcaactgccgattcgtcattgacacaaatctcagatcttatttggcgctaatggagttttccttacaagacgacgactttggcggcgatttctccgcttctaacgccaccagagctgcttcaggcagcaaaagaagtttcggtgatcttgaagacgatgaggatgacatcttcggatccaaaaaggttcgtacgaaagctgaggaagctgcccctggtgttgcaactggcatgatcctgtcactccgtgagagtcttcagaactgtaaagatgatcttgcttcatctcagaatgagcttgaatcagcaaaagcagagattctcaaatggaaatcagcgtttcagaacgagtctttcatacctgctggaaaatctcctgagcctagatttttgattgactacatccaaaatctaaaatcttctgagagatctttgaaagaacagttggaaattgcaaagagaaaagaagcttcgtacattgtacaatatgcaaaacgggaacaggaaatggcagagttgaagtctgctgttcgtgatttgaaatctcagctcaagccggcgtcaatgcaagcgaggaggctgttactggatccagctattcatgaagaattttcacgtttgaagaatctagttgaggaaaaagacaagaaggtcaaggaactacaggatagtcttacagcatttacttttacccctctgagtttaaagggtaagatgcttatggaaaagtgcaaaaccctgcaagaggaaaacgaggagattggacaccaagctgctgaaggaaagattcatgaactagcaatgaagctgtcgatgcagaagtctcagaacgcagaacttagaaagcaatttgaaggactgtacaaacacatggaagaactaactaacgatgttgaaagatcaaacgaaacggtgataatactgcaagataaattggaagagaaagacaaggagctagagagagtaaagaaagggatggaggttgttgtgtctgatgtggctgaaaagaaagatgatggtgaagataaagatccaaaatactcggctctccaaacgatgttcacttctatacaatctgagagataattgcaattgtattcattcacgctcttatattgttcaaagagttttctgataaatgcatgaaaacattagtttccattaggaggctttgtaccctttatttttccgatttttcattgatagcccgaaggcaaataagatgcacacaatccagcc

SEQ ID NO: 108735 - protein, 344 aa, Zea mays subsp. mays
  misc_feature (1)..(344): Ceres Seq. ID no. 15222549
  misc_feature (22)..(335): Pfam Name: Myosin tail Pfam Description: Myosin tail
  misc_feature (128)..(307): Homolog of NCBI NO: 24653461 NR Description: female lethal d CG6315-PB [Drosophila
  misc_feature (128)..(307): Homolog of NCBI NO: 5441313 NR Description: FL(2)D-s protein [Drosophila melanogaster]
  misc_feature (105)..(307): Homolog of NCBI NO: 5420159 NR Description: FL(2)D protein [Drosophila melanogaster]
  misc_feature (105)..(307): Homolog of NCBI NO: 24653459 NR Description: female lethal d CG6315-PA [Drosophila
  misc_feature (79)..(307): Homolog of NCBI NO: 33416867 NR Description: Unknown (protein for MGC:66202) [Danio rerio]
  misc_feature (90)..(307): Homolog of NCBI NO: 11322455 NR Description: WTAP protein [Mus musculus]
  misc_feature (90)..(307): Homolog of NCBI NO: 21361159 NR Description: Wilms' tumour 1-associating protein isoform 1
  misc_feature (90)..(307): Homolog of NCBI NO: 10334526 NR Description: WTAP protein [Homo sapiens]
  misc_feature (87)..(324): Homolog of NCBI NO: 38648992 NR Description: Unknown (protein for MGC:75954) [Silurana
  misc_feature (1)..(329): Homolog of NCBI NO: 15232439 NR Description: FKBP12 interacting protein (FIP37) [Arabidopsis
MEFSLQDDDFGGDFSASNATRAASGSKRSFGDLEDDEDDIFGSKKVRTKAEEAAPGVATGMILSLRESLQNCKDDLASSQNELESAKAEILKWKSAFQNESFIPAGKSPEPRFLIDYIQNLKSSERSLKEQLEIAKRKEASYIVQYAKREQEMAELKSAVRDLKSQLKPASMQARRLLLDPAIHEEFSRLKNLVEEKDKKVKELQDSLTAFTFTPLSLKGKMLMEKCKTLQEENEEIGHQAAEGKIHELAMKLSMQKSQNAELRKQFEGLYKHMEELTNDVERSNETVIILQDKLEEKDKELERVKKGMEVVVSDVAEKKDDGEDKDPKYSALQTMFTSIQSER

SEQ ID NO: 108736 - protein, 284 aa, Zea mays subsp. mays
  misc_feature (1)..(284): Ceres Seq. ID no. 15222550
  misc_feature (1)..(275): Pfam Name: Myosin tail Pfam Description: Myosin tail
  misc_feature (1)..(269): Homolog of NCBI NO: 15232439 NR Description: FKBP12 interacting protein (FIP37) [Arabidopsis
  misc_feature (30)..(247): Homolog of NCBI NO: 10334526 NR Description: WTAP protein [Homo sapiens]
  misc_feature (27)..(264): Homolog of NCBI NO: 38648992 NR Description: Unknown (protein for MGC:75954) [Silurana
  misc_feature (68)..(247): Homolog of NCBI NO: 24653461 NR Description: female lethal d CG6315-PB [Drosophila
  misc_feature (68)..(247): Homolog of NCBI NO: 5441313 NR Description: FL(2)D-s protein [Drosophila melanogaster]
  misc_feature (45)..(247): Homolog of NCBI NO: 5420159 NR Description: FL(2)D protein [Drosophila melanogaster]
  misc_feature (45)..(247): Homolog of NCBI NO: 24653459 NR Description: female lethal d CG6315-PA [Drosophila
  misc_feature (19)..(247): Homolog of NCBI NO: 33416867 NR Description: Unknown (protein for MGC:66202) [Danio rerio]
  misc_feature (30)..(247): Homolog of NCBI NO: 11322455 NR Description: WTAP protein [Mus musculus]
  misc_feature (30)..(247): Homolog of NCBI NO: 21361159 NR Description: Wilms' tumour 1-associating protein isoform 1
MILSLRESLQNCKDDLASSQNELESAKAEILKWKSAFQNESFIPAGKSPEPRFLIDYIQNLKSSERSLKEQLEIAKRKEASYIVQYAKREQEMAELKSAVRDLKSQLKPASMQARRLLLDPAIHEEFSRLKNLVEEKDKKVKELQDSLTAFTFTPLSLKGKMLMEKCKTLQEENEEIGHQAAEGKIHELAMKLSMQKSQNAELRKQFEGLYKHMEELTNDVERSNETVIILQDKLEEKDKELERVKKGMEVVVSDVAEKKDDGEDKDPKYSALQTMFTSIQSER

SEQ ID NO: 108737 - protein, 192 aa, Zea mays subsp. mays
  misc_feature (1)..(192): Ceres Seq. ID no. 15222551
  misc_feature (1)..(183): Pfam Name: Myosin tail Pfam Description: Myosin tail
  misc_feature (1)..(155): Homolog of NCBI NO: 24653461 NR Description: female lethal d CG6315-PB [Drosophila
  misc_feature (1)..(155): Homolog of NCBI NO: 5441313 NR Description: FL(2)D-s protein [Drosophila melanogaster]
  misc_feature (1)..(155): Homolog of NCBI NO: 5420159 NR Description: FL(2)D protein [Drosophila melanogaster]
  misc_feature (1)..(155): Homolog of NCBI NO: 24653459 NR Description: female lethal d CG6315-PA [Drosophila
  misc_feature (1)..(155): Homolog of NCBI NO: 33416867 NR Description: Unknown (protein for MGC:66202) [Danio rerio]
  misc_feature (1)..(155): Homolog of NCBI NO: 21361159 NR Description: Wilms' tumour 1-associating protein isoform 1
  misc_feature (1)..(155): Homolog of NCBI NO: 11322455 NR Description: WTAP protein [Mus musculus]
  misc_feature (1)..(155): Homolog of NCBI NO: 10334526 NR Description: WTAP protein [Homo sapiens]
  misc_feature (1)..(172): Homolog of NCBI NO: 38648992 NR Description: Unknown (protein for MGC:75954) [Silurana
  misc_feature (1)..(177): Homolog of NCBI NO: 15232439 NR Description: FKBP12 interacting protein (FIP37) [Arabidopsis
MAELKSAVRDLKSQLKPASMQARRLLLDPAIHEEFSRLKNLVEEKDKKVKELQDSLTAFTFTPLSLKGKMLMEKCKTLQEENEEIGHQAAEGKIHELAMKLSMQKSQNAELRKQFEGLYKHMEELTNDVERSNETVIILQDKLEEKDKELERVKKGMEVVVSDVAEKKDDGEDKDPKYSALQTMFTSIQSER

SEQ ID NO: 108738 - DNA, 1129 bp, Zea mays subsp. mays
  misc_feature (1)..(1129): Ceres Seq. ID no. 12635496
  misc_feature: MA Experiment ID: 20000534 Result: Up-regulated in Transcription
  misc_feature: MA Experiment 20000534 PARAMETER Experiment Name: Zm_Hybrid_Pollen_P Parameter: Age (day) Value: 8
  misc_feature: MA Experiment 20000534 PARAMETER Experiment Name: Zm_Hybrid_Pollen_P Parameter: Organism Value: Zea mays
  misc_feature: MA Experiment 20000534 PARAMETER Experiment Name: Zm_Hybrid_Pollen_P Parameter: Plant Line Value: 35A19
  misc_feature: MA Experiment 20000534 PARAMETER Experiment Name: Zm_Hybrid_Pollen_P Parameter: Tissue Value: Pollen vs. Aerial
aaacacaaagactcaccagctccacgagcagaggagccgacacccaacccagcccggccaggagagagacaacatgcgttcatctcgggacctccggctcgccgtgctcctcctcctcttctcggcgtccgtcctcctcccggtagccagagcccagcaggaaaccgaggaggaggaggagttcagctactcgctggacgcggagaatgggcctgcgcactggggcgacatcaaggaggagtggtccgcatgcggcaagggcaacatgcagtcgcccatcgacctcgccagcccgcgcgtctccctcgtgcgcggcctcggctacctcaaccactcctaccaccctgccaacgccaccatcgtcaaccgcggccacgacatcatgctcaagttcgagggcgacgccgggagcgtctccatcggcggcacgccctacttcctccggcagctgcactggcactcccccaccgagcacagcgtcaacggccgccggtacgacatggagctccacatgttccacgagagcgctcagggcaaggccgccgtgatcggcgtcttctatgagattggtgcccatgacgccttcctgcacaagctggagccatacctggagatgatagcggatcgcaaggacagagaggagaagatgggcatgatggatcccaggggcgccagaggaaaggccagcgtgtactatcgctacgtgggctccctcaccaccccaccctgcgcggaaggggtcatctggaccatcgtcaagagggtgcgcactgtgtcgaggcaccagctggagcttctcagggaggccgttcacgacgacatggagaagaacgcgaggccccgtcaggaggtgaacagcagagatatcagcatgttccgaccttttgagcaaaatagacattgattactagtgttgatcctctggctaattagtctggtgcttcagctattttttatgtacatggttatatcatttctgtacgcagtagtgattttccatccactttgataacttgtatacggttactgaataataatggaacacgaccagttcatgtccatgcatatcttcatgtttccatgttgggatctgccagatcgtcgaaatgaaaaaaactggcaaggattt

SEQ ID NO: 108739 - protein, 300 aa, Zea mays subsp. mays
  misc_feature (1)..(300): Ceres Seq. ID no. 12635497
  misc_feature (70)..(292): Pfam Name: Eukaryotic-type carbonic anhydrase Pfam Description: Eukaryotic-type carbonic anhydrase
  misc_feature (25)..(292): Homolog of NCBI NO: 1364059 NR Description: dioscorin class A precursor - Dioscorea
  misc_feature (56)..(257): Homolog of NCBI NO: 30683808 NR Description: carbonic anhydrase -related [Arabidopsis thaliana]
  misc_feature (48)..(294): Homolog of NCBI NO: 15233471 NR Description: carbonic anhydrase -like protein; protein id:
  misc_feature (25)..(295): Homolog of NCBI NO: 29468280 NR Description: nectarin III [Nicotiana langsdorffii x Nicotiana
  misc_feature (24)..(294): Homolog of NCBI NO: 25407021 NR Description: protein T6D22.16 [imported] - Arabidopsis
  misc_feature (52)..(294): Homolog of NCBI NO: 15223097 NR Description: carbonic anhydrase, putative; protein id:
  misc_feature (56)..(294): Homolog of NCBI NO: 25291473 NR Description: probable carbonic anhydrase [imported] -
  misc_feature (24)..(294): Homolog of NCBI NO: 15223122 NR Description: storage protein, putative; protein id:
  misc_feature (34)..(294): Homolog of NCBI NO: 34904986 NR Description: putative carbonic anhydrase precursor
  misc_feature (32)..(294): Homolog of NCBI NO: 37806288 NR Description: putative dioscorin [Oryza sativa (japonica
NTKTHQLHEQRSRHPTQPGQERDNMRSSRDLRLAVLLLLFSASVLLPVARAQQETEEEEEFSYSLDAENGPAHWGDIKEEWSACGKGNMQSPIDLASPRVSLVRGLGYLNHSYHPANATIVNRGHDIMLKFEGDAGSVSIGGTPYFLRQLHWHSPTEHSVNGRRYDMELHMFHESAQGKAAVIGVFYEIGAHDAFLHKLEPYLEMIADRKDREEKMGMMDPRGARGKASVYYRYVGSLTTPPCAEGVIWTIVKRVRTVSRHQLELLREAVHDDMEKNARPRQEVNSRDISMFRPFEQNRH

SEQ ID NO: 108740 - protein, 276 aa, Zea mays subsp. mays
  misc_feature (1)..(276): Ceres Seq. ID no. 12635498
  misc_feature (46)..(268): Pfam Name: Eukaryotic-type carbonic anhydrase Pfam Description: Eukaryotic-type carbonic anhydrase
  misc_feature (1)..(268): Homolog of NCBI NO: 1364059 NR Description: dioscorin class A precursor - Dioscorea
  misc_feature (32)..(233): Homolog of NCBI NO: 30683808 NR Description: carbonic anhydrase -related [Arabidopsis thaliana]
  misc_feature (24)..(270): Homolog of NCBI NO: 15233471 NR Description: carbonic anhydrase -like protein; protein id:
  misc_feature (1)..(271): Homolog of NCBI NO: 29468280 NR Description: nectarin III [Nicotiana langsdorffii x Nicotiana
  misc_feature (1)..(270): Homolog of NCBI NO: 25407021 NR Description: protein T6D22.16 [imported] - Arabidopsis
  misc_feature (28)..(270): Homolog of NCBI NO: 15223097 NR Description: carbonic anhydrase, putative; protein id:
  misc_feature (32)..(270): Homolog of NCBI NO: 25291473 NR Description: probable carbonic anhydrase [imported] -
  misc_feature (1)..(270): Homolog of NCBI NO: 15223122 NR Description: storage protein, putative; protein id:
  misc_feature (10)..(270): Homolog of NCBI NO: 34904986 NR Description: putative carbonic anhydrase precursor
  misc_feature (8)..(270): Homolog of NCBI NO: 37806288 NR Description: putative dioscorin [Oryza sativa (japonica
MRSSRDLRLAVLLLLFSASVLLPVARAQQETEEEEEFSYSLDAENGPAHWGDIKEEWSACGKGNMQSPIDLASPRVSLVRGLGYLNHSYHPANATIVNRGHDIMLKFEGDAGSVSIGGTPYFLRQLHWHSPTEHSVNGRRYDMELHMFHESAQGKAAVIGVFYEIGAHDAFLHKLEPYLEMIADRKDREEKMGMMDPRGARGKASVYYRYVGSLTTPPCAEGVIWTIVKRVRTVSRHQLELLREAVHDDMEKNARPRQEVNSRDISMFRPFEQNRH

SEQ ID NO: 108741 - protein, 212 aa, Zea mays subsp. mays
  misc_feature (1)..(212): Ceres Seq. ID no. 12635499
  misc_feature (1)..(204): Pfam Name: Eukaryotic-type carbonic anhydrase Pfam Description: Eukaryotic-type carbonic anhydrase
  misc_feature (1)..(204): Homolog of NCBI NO: 1364059 NR Description: dioscorin class A precursor - Dioscorea
  misc_feature (1)..(169): Homolog of NCBI NO: 30683808 NR Description: carbonic anhydrase -related [Arabidopsis thaliana]
  misc_feature (1)..(206): Homolog of NCBI NO: 15233471 NR Description: carbonic anhydrase -like protein; protein id:
  misc_feature (1)..(207): Homolog of NCBI NO: 29468280 NR Description: nectarin III [Nicotiana langsdorffii x Nicotiana
  misc_feature (1)..(206): Homolog of NCBI NO: 25407021 NR Description: protein T6D22.16 [imported] - Arabidopsis
  misc_feature (1)..(206): Homolog of NCBI NO: 15223097 NR Description: carbonic anhydrase, putative; protein id:
  misc_feature (1)..(206): Homolog of NCBI NO: 25291473 NR Description: probable carbonic anhydrase [imported] -
  misc_feature (1)..(206): Homolog of NCBI NO: 15223122 NR Description: storage protein, putative; protein id:
  misc_feature (1)..(206): Homolog of NCBI NO: 34904986 NR Description: putative carbonic anhydrase precursor
  misc_feature (1)..(206): Homolog of NCBI NO: 37806288 NR Description: putative dioscorin [Oryza sativa (japonica
MQSPIDLASPRVSLVRGLGYLNHSYHPANATIVNRGHDIMLKFEGDAGSVSIGGTPYFLRQLHWHSPTEHSVNGRRYDMELHMFHESAQGKAAVIGVFYEIGAHDAFLHKLEPYLEMIADRKDREEKMGMMDPRGARGKASVYYRYVGSLTTPPCAEGVIWTIVKRVRTVSRHQLELLREAVHDDMEKNARPRQEVNSRDISMFRPFEQNRH

SEQ ID NO: 108742 - DNA, 995 bp, Zea mays subsp. mays
  misc_feature (1)..(995): Ceres Seq. ID no. 12635077
acaacagcaaagcatccagcatcgccaacttccaaaatcaacctacgttgtacacttttcgagccctatccagtttttgtttctatacacttcttgcgaagacatggcttctcgtcaggatcaggctagctaccacgccggggaggccaaggcccgcgccgaggagaagacggggtacgtcgtgggcgcggcgcaggacaaggcgagggaggccaaggacacggcgtccgacgccgcgggccgcgccatgggcaggggcggcgacgccaaggaggcgaccaaggagaaggcgtacgaggccaaggacgcggcgtcggacgccactggccgcgccatggacaagggccgcggcgccgcggaggccaccaaggagaagggctacgaggccaaggacaacgcggccgacaccgcgcagcagaccgggagctacatcgcccagacggccgaggccgccaagcagaaggcggccggcgccgcccagtacaccatcgacacggcccgtgccggcaccgagcagaccgggagctacatcgggcagacggccgaggccgccaagcagaaggccggcgccgcagcgcagtatgccatggacaccgccgtggccggcaaggacaagaccggcagcctcctcgtacaggcaggggagacggtgaagggcgcggcggtgggggcgaaggacgcggtgatgaacacgatcggaatgggcggcggcaccaacggcagcaccgacgtcaccgccaaggacaccagcacgtacaagcccgggaccagggattactaatcgtgccattgtcaaggcgaccctgatgtatctttctaagctgtagtttaatttctacgtggccatctgccgccactttggtttctaaattagctcacctcgtggaggttgtaacttgtcaggacctagacaaatgcccaatgaggcatcctgactcctccctcccatacttgtttccgtgtttcagaatctaataaagttggaatcctagtgc

SEQ ID NO: 108743 - protein, 259 aa, Zea mays subsp. mays
  misc_feature (1)..(259): Ceres Seq. ID no. 12635078
  misc_feature (154)..(226): Pfam Name: Late embryogenesis abundant protein Pfam Description: Late embryogenesis abundant protein
  misc_feature (35)..(208): Homolog of NCBI NO: 7489569 NR Description: protein LEA type 1 - rice
  misc_feature (35)..(208): Homolog of NCBI NO: 4105441 NR Description: group 3 LEA protein [Oryza sativa]
  misc_feature (35)..(208): Homolog of NCBI NO: 7489493 NR Description: LEA protein - rice
  misc_feature (35)..(251): Homolog of NCBI NO: 25989707 NR Description: LEA3 protein [Triticum aestivum]
  misc_feature (35)..(251): Homolog of NCBI NO: 126081 NR Description: ABA-inducible protein PHV A1
  misc_feature (35)..(251): Homolog of NCBI NO: 7387828 NR Description: Late embryogenesis abundant protein, group 3
  misc_feature (35)..(251): Homolog of NCBI NO: 25989705 NR Description: LEA1 protein [Triticum aestivum]
  misc_feature (35)..(259): Homolog of NCBI NO: 7387829 NR Description: Late embryogenesis abundant protein, group 3
  misc_feature (35)..(259): Homolog of NCBI NO: 34910364 NR Description: WSI18 protein [Oryza sativa (japonica
  misc_feature (35)..(259): Homolog of NCBI NO: 1076757 NR Description: WSI18 protein - rice
QQQSIQHRQLPKSTYVVHFSSPIQFLFLYTSCEDMASRQDQASYHAGEAKARAEEKTGYVVGAAQDKAREAKDTASDAAGRAMGRGGDAKEATKEKAYEAKDAASDATGRAMDKGRGAAEATKEKGYEAKDNAADTAQQTGSYIAQTAEAAKQKAAGAAQYTIDTARAGTEQTGSYIGQTAEAAKQKAGAAAQYAMDTAVAGKDKTGSLLVQAGETVKGAAVGAKDAVMNTIGMGGGTNGSTDVTAKDTSTYKPGTRDY

SEQ ID NO: 108744 - protein, 225 aa, Zea mays subsp. mays
  misc_feature (1)..(225): Ceres Seq. ID no. 12635079
  misc_feature (120)..(192): Pfam Name: Late embryogenesis abundant protein Pfam Description: Late embryogenesis abundant protein
  misc_feature (1)..(174): Homolog of NCBI NO: 7489569 NR Description: protein LEA type 1 - rice
  misc_feature (1)..(174): Homolog of NCBI NO: 4105441 NR Description: group 3 LEA protein [Oryza sativa]
  misc_feature (1)..(174): Homolog of NCBI NO: 7489493 NR Description: LEA protein - rice
  misc_feature (1)..(217): Homolog of NCBI NO: 25989707 NR Description: LEA3 protein [Triticum aestivum]
  misc_feature (1)..(217): Homolog of NCBI NO: 126081 NR Description: ABA-inducible protein PHV A1
  misc_feature (1)..(217): Homolog of NCBI NO: 7387828 NR Description: Late embryogenesis abundant protein, group 3
  misc_feature (1)..(217): Homolog of NCBI NO: 25989705 NR Description: LEA1 protein [Triticum aestivum]
  misc_feature (1)..(225): Homolog of NCBI NO: 7387829 NR Description: Late embryogenesis abundant protein, group 3
  misc_feature (1)..(225): Homolog of NCBI NO: 34910364 NR Description: WSI18 protein [Oryza sativa (japonica
  misc_feature (1)..(225): Homolog of NCBI NO: 1076757 NR Description: WSI18 protein - rice
MASRQDQASYHAGEAKARAEEKTGYVVGAAQDKAREAKDTASDAAGRAMGRGGDAKEATKEKAYEAKDAASDATGRAMDKGRGAAEATKEKGYEAKDNAADTAQQTGSYIAQTAEAAKQKAAGAAQYTIDTARAGTEQTGSYIGQTAEAAKQKAGAAAQYAMDTAVAGKDKTGSLLVQAGETVKGAAVGAKDAVMNTIGMGGGTNGSTDVTAKDTSTYKPGTRDY

SEQ ID NO: 108745 - protein, 216 aa, Zea mays subsp. mays
  misc_feature (1)..(216): Ceres Seq. ID no. 12635080
  misc_feature (46)..(199): Pfam Name: Extensin-like region Pfam Description: Extensin-like region
  misc_feature (46)..(193): Homolog of NCBI NO: 7507924 NR Description: hypothetical protein T18H9.1 - Caenorhabditis
  misc_feature (39)..(216): Homolog of NCBI NO: 5821145 NR Description: RNA binding protein [Homo sapiens]
  misc_feature (42)..(216): Homolog of NCBI NO: 25143299 NR Description: pre-mRNA splicing SR protein related RSR-1 (68.2
  misc_feature (63)..(216): Homolog of NCBI NO: 23274133 NR Description: Similar to serine/arginine repetitive matrix 1
  misc_feature (63)..(216): Homolog of NCBI NO: 5032119 NR Description: Ser/Arg-related nuclear matrix protein (plenty of
  misc_feature (49)..(216): Homolog of NCBI NO: 228938 NR Description: Hyp-rich glycoprotein
  misc_feature (55)..(216): Homolog of NCBI NO: 7949115 NR Description: Ser/Arg-related nuclear matrix protein
  misc_feature (69)..(209): Homolog of NCBI NO: 11095327 NR Description: unknown [Paracoccus pantotrophus]
  misc_feature (43)..(206): Homolog of NCBI NO: 25989119 NR Description: unknown [Streptomyces aureofaciens]
  misc_feature (47)..(216): Homolog of NCBI NO: 29247944 NR Description: GLP_26_54603_52153 [Giardia lamblia ATCC 50803]
NSKASSIANFQNQPTLYTFRALSSFCFYTLLAKTWLLVRIRLATTPGRPRPAPRRRRGTSWARRRTRRGRPRTRRPTPRAAPWAGAATPRRRPRRRRTRPRTRRRTPLAAPWTRAAAPRRPPRRRATRPRTTRPTPRSRPGATSPRRPRPPSRRRPAPPSTPSTRPVPAPSRPGATSGRRPRPPSRRPAPQRSMPWTPPWPARTRPAASSYRQGRR

SEQ ID NO: 108746 - DNA, 761 bp, Zea mays subsp. mays
  misc_feature (1)..(761): Ceres Seq. ID no. 12635509
aggtagaaagcgaaactctctctccagcttcagaggcttcagctatggcggccgagaatccttcaaacggtgtagacgtcgacacgagtctcgcttccgattcaaacgataaccgcaaagccagtgatttgaccaatcatgactcttccatggcattgacagtcccttccaccgccgtttgtctcggccgtttcgccggagatgcagcaggcggcgccgtcatggggtctatattcggctatggttctggattgtttaagaaaaaagggtttaagggatcatttgcggatgcgggtcagtctgcaaagaattttgcgattttatctggagtgcacagtttggttgtttgccttctgaagaaactgcgagggaaagatgatgccattaacgttggaattgctggatgctgcactggccttgctcttagttacccaggtgcaccacaagcaatgctacaaagctgtgtcacttttggtgccttttctttcatcctcgaaggactcaacaagaggcaaacagctttggctcactctgtctcctcgagacatgatcaaaccagaagtctgaaagatgatttaccactctccttggctctcccaatccatgaagagatcaaaggagctttctcatccttctgcaaatctttaacaaaacccaagaagctcgcgttccctagctcacgttgatcgaagttttttttgtatcctactacttccttttgtagatgttaaaagaacagatgaaaacaagaatcatgtttc

SEQ ID NO: 108747 - protein, 227 aa, Zea mays subsp. mays
  misc_feature (1)..(227): Ceres Seq. ID no. 12635510
  misc_feature (53)..(171): Pfam Name: Tim17/Tim22/Tim23 family Pfam Description: Tim17/Tim22/Tim23 family
  misc_feature (48)..(165): Homolog of NCBI NO: 13447155 NR Description: TIM22 [Neurospora crassa]
  misc_feature (87)..(165): Homolog of NCBI NO: 40740491 NR Description: hypothetical protein AN8059.2 [Aspergillus
  misc_feature (2)..(172): Homolog of NCBI NO: 18398755 NR Description: expressed protein
  misc_feature (58)..(219): Homolog of NCBI NO: 24414272 NR Description: Unknown protein [Oryza sativa (japonica
  misc_feature (59)..(219): Homolog of NCBI NO: 37533490 NR Description: unknown protein [Oryza sativa (japonica
  misc_feature (15)..(220): Homolog of NCBI NO: 7485327 NR Description: hypothetical protein F10M23.10 - Arabidopsis
  misc_feature (15)..(220): Homolog of NCBI NO: 18416798 NR Description: putative protein
  misc_feature (15)..(227): Homolog of NCBI NO: 9758183 NR Description: contains similarity to unknown
  misc_feature (15)..(227): Homolog of NCBI NO: 15240525 NR Description: putative protein; protein id: At5g55510.1
VESETLSPASEASAMAAENPSNGVDVDTSLASDSNDNRKASDLTNHDSSMALTVPSTAVCLGRFAGDAAGGAVMGSIFGYGSGLFKKKGFKGSFADAGQSAKNFAILSGVHSLVVCLLKKLRGKDDAINVGIAGCCTGLALSYPGAPQAMLQSCVTFGAFSFILEGLNKRQTALAHSVSSRHDQTRSLKDDLPLSLALPIHEEIKGAFSSFCKSLTKPKKLAFPSSR

SEQ ID NO: 108748 - protein, 213 aa, Zea mays subsp. mays
  misc_feature (1)..(213): Ceres Seq. ID no. 12635511
  misc_feature (39)..(157): Pfam Name: Tim17/Tim22/Tim23 family Pfam Description: Tim17/Tim22/Tim23 family
  misc_feature (45)..(205): Homolog of NCBI NO: 37533490 NR Description: unknown protein [Oryza sativa (japonica
  misc_feature (1)..(206): Homolog of NCBI NO: 7485327 NR Description: hypothetical protein F10M23.10 - Arabidopsis
  misc_feature (1)..(206): Homolog of NCBI NO: 18416798 NR Description: putative protein
  misc_feature (73)..(151): Homolog of NCBI NO: 40740491 NR Description: hypothetical protein AN8059.2 [Aspergillus
  misc_feature (44)..(205): Homolog of NCBI NO: 24414272 NR Description: Unknown protein [Oryza sativa (japonica
  misc_feature (1)..(158): Homolog of NCBI NO: 18398755 NR Description: expressed protein
  misc_feature (34)..(151): Homolog of NCBI NO: 13447155 NR Description: TIM22 [Neurospora crassa]
  misc_feature (1)..(213): Homolog of NCBI NO: 9758183 NR Description: contains similarity to unknown
  misc_feature (1)..(213): Homolog of NCBI NO: 15240525 NR Description: putative protein; protein id: At5g55510.1
MAAENPSNGVDVDTSLASDSNDNRKASDLTNHDSSMALTVPSTAVCLGRFAGDAAGGAVMGSIFGYGSGLFKKKGFKGSFADAGQSAKNFAILSGVHSLVVCLLKKLRGKDDAINVGIAGCCTGLALSYPGAPQAMLQSCVTFGAFSFILEGLNKRQTALAHSVSSRHDQTRSLKDDLPLSLALPIHEEIKGAFSSFCKSLTKPKKLAFPSSR

SEQ ID NO: 108749 - protein, 178 aa, Zea mays subsp. mays
  misc_feature (1)..(178): Ceres Seq. ID no. 12635512
  misc_feature (4)..(122): Pfam Name: Tim17/Tim22/Tim23 family Pfam Description: Tim17/Tim22/Tim23 family
  misc_feature (1)..(116): Homolog of NCBI NO: 13447155 NR Description: TIM22 [Neurospora crassa]
  misc_feature (38)..(116): Homolog of NCBI NO: 40740491 NR Description: hypothetical protein AN8059.2 [Aspergillus
  misc_feature (1)..(123): Homolog of NCBI NO: 18398755 NR Description: expressed protein
  misc_feature (9)..(170): Homolog of NCBI NO: 24414272 NR Description: Unknown protein [Oryza sativa (japonica
  misc_feature (10)..(170): Homolog of NCBI NO: 37533490 NR Description: unknown protein [Oryza sativa (japonica
  misc_feature (1)..(171): Homolog of NCBI NO: 7485327 NR Description: hypothetical protein F10M23.10 - Arabidopsis
  misc_feature (1)..(171): Homolog of NCBI NO: 18416798 NR Description: putative protein
  misc_feature (1)..(178): Homolog of NCBI NO: 9758183 NR Description: contains similarity to unknown
  misc_feature (1)..(178): Homolog of NCBI NO: 15240525 NR Description: putative protein; protein id: At5g55510.1
MALTVPSTAVCLGRFAGDAAGGAVMGSIFGYGSGLFKKKGFKGSFADAGQSAKNFAILSGVHSLVVCLLKKLRGKDDAINVGIAGCCTGLALSYPGAPQAMLQSCVTFGAFSFILEGLNKRQTALAHSVSSRHDQTRSLKDDLPLSLALPIHEEIKGAFSSFCKSLTKPKKLAFPSSR

SEQ ID NO: 108750 - DNA, 976 bp, Zea mays subsp. mays
  misc_feature (1)..(976): Ceres Seq. ID no. 12635513
  misc_feature: MA Experiment ID: 20000535 Result: Up-regulated in Transcription
  misc_feature: MA Experiment 20000535 PARAMETER Experiment Name: Zm_Hybrid_Seed_Dev_P Parameter: DAP Value: 30 vs. 12
  misc_feature: MA Experiment 20000535 PARAMETER Experiment Name: Zm_Hybrid_Seed_Dev_P Parameter: Organism Value: Zea mays
  misc_feature: MA Experiment 20000535 PARAMETER Experiment Name: Zm_Hybrid_Seed_Dev_P Parameter: Plant Line Value: 35A19
  misc_feature: MA Experiment 20000535 PARAMETER Experiment Name: Zm_Hybrid_Seed_Dev_P Parameter: Tissue Value: Embryo vs. Unfert Floret
aacactaccactttgagtcttgaagaaggtcaacaacttcgagaataatggcttctctttgtgcttcttctgccatcgccgctatttcttctccaggtttcttgggagggaagaaactgaggctgaacaagaagttgaatgttccaactgtttctaggtccggtacgtcggtgcgcgctgtcgcagcggatccagatagaccaatttggttccctggaagcacacctccagagtggcttgacggtagcctccctggtgacttcgggtttgatcctcttggtctttcatctgacccggatagtctaaagtggaacgcacaagcagagctagtccactgccggtgggcaatgctcggcgccgccgggatttttatcccggagtttctaaccaagataggaatcctcaacacgccgtcgtggtacacggcgggagagcaagagtatttcaccgacaaaaccacactcttcgtcgttgagctcatcttaataggatgggccgagggacgtagatgggctgatatcattaagccaggtagtgtcaacactgacccaatcttcccaaacaacaaactgacggggacagacgttggatacccgggtgggttatggtttgacccgttgggttggggatccggtagcccggctaaaatcaaggagctgaggactaaggagataaaaaatggaaggttggctatgttggcagtgatgggtgcatggttccaacacatatacactgggaatggtcctattgataacctttttgcacatcttgctgatcctggccacgccactatcttcgctgctttcacacccaagtgagacgtcaaaaacgtcgaaaaaggatgggcttgtgtgatcatgtttgtacaaatattgtttttgaacttaaaactattatgtacttatataaactgtggtcgaatgcaaattagagtaacactgctcttttcttgactaaatgcgcatatctttctttt

SEQ ID NO: 108751 - protein, 256 aa, Zea mays subsp. mays
  misc_feature (1)..(256): Ceres Seq. ID no. 12635514
  misc_feature (59)..(227): Pfam Name: Chlorophyll A-B binding protein Pfam Description: Chlorophyll A-B binding protein
  misc_feature (1)..(256): Homolog of NCBI NO: 99486 NR Description: chlorophyll a/b-binding protein (clone pINEab 31)
  misc_feature (1)..(256): Homolog of NCBI NO: 18376587 NR Description: putative chlorophyll A-B binding protein of LHCI
  misc_feature (1)..(256): Homolog of NCBI NO: 7443233 NR Description: chlorophyll a/b-binding protein type II,
  misc_feature (1)..(256): Homolog of NCBI NO: 1076724 NR Description: LHCI-680, photosystem I antenna protein - barley
  misc_feature (1)..(256): Homolog of NCBI NO: 34393511 NR Description: putative photosystem I antenna protein
  misc_feature (1)..(256): Homolog of NCBI NO: 2129879 NR Description: chlorophyll a/b-binding protein type II
  misc_feature (1)..(256): Homolog of NCBI NO: 115765 NR Description: Chlorophyll A-B binding protein 7, chloroplast
  misc_feature (1)..(256): Homolog of NCBI NO: 115766 NR Description: Chlorophyll A-B binding protein, chloroplast
  misc_feature (2)..(256): Homolog of NCBI NO: 11277627 NR Description: PS I antenna protein Lhca2 [imported] -
  misc_feature (2)..(256): Homolog of NCBI NO: 15233120 NR Description: light-harvesting chlorophyll a/b binding protein
MASLCASSAIAAISSPGFLGGKKLRLNKKLNVPTVSRSGTSVRAVAADPDRPIWFPGSTPPEWLDGSLPGDFGFDPLGLSSDPDSLKWNAQAELVHCRWAMLGAAGIFIPEFLTKIGILNTPSWYTAGEQEYFTDKTTLFVVELILIGWAEGRRWADIIKPGSVNTDPIFPNNKLTGTDVGYPGGLWFDPLGWGSGSPAKIKELRTKEIKNGRLAMLAVMGAWFQHIYTGNGPIDNLFAHLADPGHATIFAAFTPK

SEQ ID NO: 108752 - protein, 156 aa, Zea mays subsp. mays
  misc_feature (1)..(156): Ceres Seq. ID no. 12635515
  misc_feature (1)..(127): Pfam Name: Chlorophyll A-B binding protein Pfam Description: Chlorophyll A-B binding protein
  misc_feature (1)..(156): Homolog of NCBI NO: 99486 NR Description: chlorophyll a/b-binding protein (clone pINEab 31)
  misc_feature (1)..(156): Homolog of NCBI NO: 18376587 NR Description: putative chlorophyll A-B binding protein of LHCI
  misc_feature (1)..(156): Homolog of NCBI NO: 7443233 NR Description: chlorophyll a/b-binding protein type II,
  misc_feature (1)..(156): Homolog of NCBI NO: 1076724 NR Description: LHCI-680, photosystem I antenna protein - barley
  misc_feature (1)..(156): Homolog of NCBI NO: 34393511 NR Description: putative photosystem I antenna protein
  misc_feature (1)..(156): Homolog of NCBI NO: 2129879 NR Description: chlorophyll a/b-binding protein type II
  misc_feature (1)..(156): Homolog of NCBI NO: 115765 NR Description: Chlorophyll A-B binding protein 7, chloroplast
  misc_feature (1)..(156): Homolog of NCBI NO: 115766 NR Description: Chlorophyll A-B binding protein, chloroplast
  misc_feature (1)..(156): Homolog of NCBI NO: 11277627 NR Description: PS I antenna protein Lhca2 [imported] -
  misc_feature (1)..(156): Homolog of NCBI NO: 15233120 NR Description: light-harvesting chlorophyll a/b binding protein
MLGAAGIFIPEFLTKIGILNTPSWYTAGEQEYFTDKTTLFVVELILIGWAEGRRWADIIKPGSVNTDPIFPNNKLTGTDVGYPGGLWFDPLGWGSGSPAKIKELRTKEIKNGRLAMLAVMGAWFQHIYTGNGPIDNLFAHLADPGHATIFAAFTPK

SEQ ID NO: 108753 - DNA, 678 bp, Zea mays subsp. mays
  misc_feature (1)..(678): Ceres Seq. ID no. 12635516
aagctaatcttctcacaatctctctccaaaaagacctgaaaaaaaacatcacaagtttgatcaagaaaaccaagaaagatgccgaaagacaggaagattggaatcgccatggacttctcggagagcagcaagaacgcactgagatgggctatcgacaacttagctgataaaggagacacgttttacatcatccatgcgttaccaacatctgaagctggaccacgtaactccctctggctcaaatccggttctcctctcataccattggtggagtttagggaaccagagactatggagaaatacggtgtccaaatcgatataccagttcttgatatgctcgacactggttcgaggcagaaagagattcatgtagtgacgaaactatactggggagatgcaagagagaagttggttgatgctgttaaatctctcaaacttgattctattgtcatgggaagcagaggactcagtgcccttcaaaggataataatgggaagcgtgagcagctttgtgattcaacacgccccttgcccggtcaccgttgtcaaggactaaataaaaggctgttatctcatgtgttcgatcaaaaataattatcgcaatttatgcctttaataaaaagaacttctttctttcttggttgtatttgtatttgaaatcataaatatattaagttcc

SEQ ID NO: 108754 - protein, 158 aa, Zea mays subsp. mays
  misc_feature (1)..(158): Ceres Seq. ID no. 12635517
  misc_feature (4)..(157): Pfam Name: Universal stress protein family Pfam Description: Universal stress protein family
  misc_feature (5)..(158): Homolog of NCBI NO: 15528707 NR Description: P0583G08.8 [Oryza sativa (japonica
  misc_feature (5)..(157): Homolog of NCBI NO: 18401345 NR Description: expressed protein
  misc_feature (1)..(135): Homolog of NCBI NO: 18396497 NR Description: expressed protein
  misc_feature (1)..(98): Homolog of NCBI NO: 21555070 NR Description: unknown [Arabidopsis thaliana]
  misc_feature (4)..(157): Homolog of NCBI NO: 20160561 NR Description: P0414E03.3 [Oryza sativa (japonica
  misc_feature (1)..(157): Homolog of NCBI NO: 30678807 NR Description: expressed protein [Arabidopsis thaliana]
  misc_feature (1)..(158): Homolog of NCBI NO: 11602749 NR Description: early nodulin ENOD18 [Vicia faba]
  misc_feature (1)..(158): Homolog of NCBI NO: 11602747 NR Description: early nodulin ENOD18 [Vicia faba]
  misc_feature (3)..(158): Homolog of NCBI NO: 11602751 NR Description: ENOD18 protein [Vicia faba]
  misc_feature (1)..(158): Homolog of NCBI NO: 30693971 NR Description: expressed protein [Arabidopsis thaliana]
MPKDRKIGIAMDFSESSKNALRWAIDNLADKGDTFYIIHALPTSEAGPRNSLWLKSGSPLIPLVEFREPETMEKYGVQIDIPVLDMLDTGSRQKEIHVVTKLYWGDAREKLVDAVKSLKLDSIVMGSRGLSALQRIIMGSVSSFVIQHAPCPVTVVKD

SEQ ID NO: 108755 - protein, 148 aa, Zea mays subsp. mays
  misc_feature (1)..(148): Ceres Seq. ID no. 12635518
  misc_feature (1)..(147): Pfam Name: Universal stress protein family Pfam Description: Universal stress protein family
  misc_feature (1)..(148): Homolog of NCBI NO: 15528707 NR Description: P0583G08.8 [Oryza sativa (japonica
  misc_feature (1)..(147): Homolog of NCBI NO: 18401345 NR Description: expressed protein
  misc_feature (1)..(125): Homolog of NCBI NO: 18396497 NR Description: expressed protein
  misc_feature (1)..(88): Homolog of NCBI NO: 21555070 NR Description: unknown [Arabidopsis thaliana]
  misc_feature (1)..(147): Homolog of NCBI NO: 20160561 NR Description: P0414E03.3 [Oryza sativa (japonica
  misc_feature (1)..(147): Homolog of NCBI NO: 30678807 NR Description: expressed protein [Arabidopsis thaliana]
  misc_feature (1)..(148): Homolog of NCBI NO: 11602749 NR Description: early nodulin ENOD18 [Vicia faba]
  misc_feature (1)..(148): Homolog of NCBI NO: 11602747 NR Description: early nodulin ENOD18 [Vicia faba]
  misc_feature (1)..(148): Homolog of NCBI NO: 11602751 NR Description: ENOD18 protein [Vicia faba]
  misc_feature (1)..(148): Homolog of NCBI NO: 30693971 NR Description: expressed protein [Arabidopsis thaliana]
MDFSESSKNALRWAIDNLADKGDTFYIIHALPTSEAGPRNSLWLKSGSPLIPLVEFREPETMEKYGVQIDIPVLDMLDTGSRQKEIHVVTKLYWGDAREKLVDAVKSLKLDSIVMGSRGLSALQRIIMGSVSSFVIQHAPCPVTVVKD

SEQ ID NO: 108756 - protein, 87 aa, Zea mays subsp. mays
  misc_feature (1)..(87): Ceres Seq. ID no. 12635519
  misc_feature (1)..(86): Pfam Name: Universal stress protein family Pfam Description: Universal stress protein family
  misc_feature (1)..(87): Homolog of NCBI NO: 15528707 NR Description: P0583G08.8 [Oryza sativa (japonica
  misc_feature (1)..(86): Homolog of NCBI NO: 18401345 NR Description: expressed protein
  misc_feature (1)..(64): Homolog of NCBI NO: 18396497 NR Description: expressed protein
  misc_feature (1)..(27): Homolog of NCBI NO: 21555070 NR Description: unknown [Arabidopsis thaliana]
  misc_feature (1)..(86): Homolog of NCBI NO: 20160561 NR Description: P0414E03.3 [Oryza sativa (japonica
  misc_feature (1)..(86): Homolog of NCBI NO: 30678807 NR Description: expressed protein [Arabidopsis thaliana]
  misc_feature (1)..(87): Homolog of NCBI NO: 11602749 NR Description: early nodulin ENOD18 [Vicia faba]
  misc_feature (1)..(87): Homolog of NCBI NO: 11602747 NR Description: early nodulin ENOD18 [Vicia faba]
  misc_feature (1)..(87): Homolog of NCBI NO: 11602751 NR Description: ENOD18 protein [Vicia faba]
  misc_feature (1)..(87): Homolog of NCBI NO: 30693971 NR Description: expressed protein [Arabidopsis thaliana]
MEKYGVQIDIPVLDMLDTGSRQKEIHVVTKLYWGDAREKLVDAVKSLKLDSIVMGSRGLSALQRIIMGSVSSFVIQHAPCPVTVVKD

SEQ ID NO: 108757 - DNA, 1078 bp, Zea mays subsp. mays
  misc_feature (1)..(1078): Ceres Seq. ID no. 14301982
gctgtcttgtccctccttatccctatctctctcccactcctcttcctctgcaatggcttcttcaatagtaacctcaagcttcaagcccttagccatggcagactcttcctcttccaccatcttctcccacccttcactctccaccatctcccctcgctgctccttcctcactaacctcccgctctcgttctcccgcgtctccctatctctcaaagccaaaaccaacctaaagaagtcgcctttcgtctccttcgttgctcagacttctgattgggagggggaagaaggtggggacgtgagcgcttccgtcgccgttgaggagaacgagccagaggcgacgttttccgaagaggaaggagatgtgagcgaaggaggtgacttcccggagccaccggaagaagcgaagctcttcgtcggaaacttggcgtacgacgttgatagccaagccttggctatgctctttgagcaagctggtaccgttgaaatcgctgaggttatctacaacagagagacagaccagagtcgtgggtttggatttgtgacaatgagtacggtggaggaagccgagactgctgttgagaagttcaaccgttatgatttgaacggacggcttctgacagtaaacaaggcagcaccaagaggatcacgtccagaacgccaacctcgggtatacgaacctgcattcagagtctatgttggaaacctaccatgggatgtggacaacggtcgtctagaacaagttttcagcgagcatggcaaagttgtggaagctcgtgtggtctacgaccgtgagacaggtcgttcacgtgggttcggttttgtgacaatgtctaacgagactgaactcaatgacgctatcgctgctcttgatggacagaacatggaaggtagagcaatcagagtgaatgtcgcggaggaacgtccaaggcgtggattttaaggattgagattttctcttgtgcctctctttatctctttccattttgtttagacgagattcttacactctttggtgatttttttttttgttctgtctgaactcttgcttcttctatagcacatcattgccttcagtagc

SEQ ID NO: 108758 - protein, 312 aa, Zea mays subsp. mays
  misc_feature (1)..(312): Ceres Seq. ID no. 14301983
  misc_feature (136)..(207): Pfam Name: RNA recognition motif. (a.k.a. RRM, RBD, or RNP domain) Pfam Description: RNA recognition motif. (a.k.a. RRM, RBD, or RNP
  misc_feature (18)..(312): Homolog of NCBI NO: 1076251 NR Description: RNA-binding protein - common ice plant
  misc_feature (19)..(310): Homolog of NCBI NO: 19032260 NR Description: RNA-binding protein precursor [Persea americana]
  misc_feature (92)..(312): Homolog of NCBI NO: 629557 NR Description: RNA-binding protein RNP-D precursor - Arabidopsis
  misc_feature (92)..(312): Homolog of NCBI NO: 99684 NR Description: DNA-binding protein - Arabidopsis thaliana
  misc_feature (2)..(312): Homolog of NCBI NO: 15294254 NR Description: AT4g24770/F22K18_30 [Arabidopsis thaliana]
  misc_feature (2)..(312): Homolog of NCBI NO: 15233980 NR Description: 31 kDa ribonucleoprotein, chloroplast protein RNP-T / RNA-binding protein 1/2/3 / RNA-binding protein
  misc_feature (2)..(312): Homolog of NCBI NO: 475719 NR Description: RNA-binding protein 2
  misc_feature (18)..(310): Homolog of NCBI NO: 15240641 NR Description: 31 kDa ribonucleoprotein, chloroplast protein RNP-T / RNA-binding protein 1/2/3 / RNA-binding protein
  misc_feature (17)..(312): Homolog of NCBI NO: 681908 NR Description: cp31 [Arabidopsis thaliana]
  misc_feature (7)..(312): Homolog of NCBI NO: 1076305 NR Description: RNA-binding protein cp31 precursor - Arabidopsis
LSCPSLSLSLSHSSSSAMASSIVTSSFKPLAMADSSSSTIFSHPSLSTISPRCSFLTNLPLSFSRVSLSLKAKTNLKKSPFVSFVAQTSDWEGEEGGDVSASVAVEENEPEATFSEEEGDVSEGGDFPEPPEEAKLFVGNLAYDVDSQALAMLFEQAGTVEIAEVIYNRETDQSRGFGFVTMSTVEEAETAVEKFNRYDLNGRLLTVNKAAPRGSRPERQPRVYEPAFRVYVGNLPWDVDNGRLEQVFSEHGKVVEARVVYDRETGRSRGFGFVTMSNETELNDAIAALDGQNMEGRAIRVNVAEERPRRGF

SEQ ID NO: 108759 - protein, 295 aa, Zea mays subsp. mays
  misc_feature (1)..(295): Ceres Seq. ID no. 14301984
  misc_feature (119)..(190): Pfam Name: RNA recognition motif. (a.k.a. RRM, RBD, or RNP domain) Pfam Description: RNA recognition motif. (a.k.a. RRM, RBD, or RNP
  misc_feature (1)..(295): Homolog of NCBI NO: 1076251 NR Description: RNA-binding protein - common ice plant
  misc_feature (2)..(293): Homolog of NCBI NO: 19032260 NR Description: RNA-binding protein precursor [Persea americana]
  misc_feature (75)..(295): Homolog of NCBI NO: 629557 NR Description: RNA-binding protein RNP-D precursor - Arabidopsis
  misc_feature (75)..(295): Homolog of NCBI NO: 99684 NR Description: DNA-binding protein - Arabidopsis thaliana
  misc_feature (1)..(295): Homolog of NCBI NO: 15294254 NR Description: AT4g24770/F22K18_30 [Arabidopsis thaliana]
  misc_feature (1)..(295): Homolog of NCBI NO: 15233980 NR Description: 31 kDa ribonucleoprotein, chloroplast protein RNP-T / RNA-binding protein 1/2/3 / RNA-binding protein
  misc_feature (1)..(295): Homolog of NCBI NO: 475719 NR Description: RNA-binding protein 2
  misc_feature (1)..(293): Homolog of NCBI NO: 15240641 NR Description: 31 kDa ribonucleoprotein, chloroplast protein RNP-T / RNA-binding protein 1/2/3 / RNA-binding protein
  misc_feature (1)..(295): Homolog of NCBI NO: 681908 NR Description: cp31 [Arabidopsis thaliana]
  misc_feature (1)..(295): Homolog of NCBI NO: 1076305 NR Description: RNA-binding protein cp31 precursor - Arabidopsis
MASSIVTSSFKPLAMADSSSSTIFSHPSLSTISPRCSFLTNLPLSFSRVSLSLKAKTNLKKSPFVSFVAQTSDWEGEEGGDVSASVAVEENEPEATFSEEEGDVSEGGDFPEPPEEAKLFVGNLAYDVDSQALAMLFEQAGTVEIAEVIYNRETDQSRGFGFVTMSTVEEAETAVEKFNRYDLNGRLLTVNKAAPRGSRPERQPRVYEPAFRVYVGNLPWDVDNGRLEQVFSEHGKVVEARVVYDRETGRSRGFGFVTMSNETELNDAIAALDGQNMEGRAIRVNVAEERPRRGF

SEQ ID NO: 108760 - protein, 281 aa, Zea mays subsp. mays
  misc_feature (1)..(281): Ceres Seq. ID no. 14301985
  misc_feature (105)..(176): Pfam Name: RNA recognition motif. (a.k.a. RRM, RBD, or RNP domain) Pfam Description: RNA recognition motif. (a.k.a. RRM, RBD, or RNP
  misc_feature (1)..(281): Homolog of NCBI NO: 15233980 NR Description: 31 kDa ribonucleoprotein, chloroplast protein RNP-T / RNA-binding protein 1/2/3 / RNA-binding protein
  misc_feature (1)..(281): Homolog of NCBI NO: 475719 NR Description: RNA-binding protein 2
  misc_feature (1)..(279): Homolog of NCBI NO: 15240641 NR Description: 31 kDa ribonucleoprotein, chloroplast protein RNP-T / RNA-binding protein 1/2/3 / RNA-binding protein
  misc_feature (1)..(279): Homolog of NCBI NO: 19032260 NR Description: RNA-binding protein precursor [Persea americana]
  misc_feature (61)..(281): Homolog of NCBI NO: 99684 NR Description: DNA-binding protein - Arabidopsis thaliana
  misc_feature (1)..(281): Homolog of NCBI NO: 15294254 NR Description: AT4g24770/F22K18_30 [Arabidopsis thaliana]
  misc_feature (61)..(281): Homolog of NCBI NO: 629557 NR Description: RNA-binding protein RNP-D precursor - Arabidopsis
  misc_feature (1)..(281): Homolog of NCBI NO: 1076251 NR Description: RNA-binding protein - common ice plant
  misc_feature (1)..(281): Homolog of NCBI NO: 681908 NR Description: cp31 [Arabidopsis thaliana]
  misc_feature (1)..(281): Homolog of NCBI NO: 1076305 NR Description: RNA-binding protein cp31 precursor - Arabidopsis
MADSSSSTIFSHPSLSTISPRCSFLTNLPLSFSRVSLSLKAKTNLKKSPFVSFVAQTSDWEGEEGGDVSASVAVEENEPEATFSEEEGDVSEGGDFPEPPEEAKLFVGNLAYDVDSQALAMLFEQAGTVEIAEVIYNRETDQSRGFGFVTMSTVEEAETAVEKFNRYDLNGRLLTVNKAAPRGSRPERQPRVYEPAFRVYVGNLPWDVDNGRLEQVFSEHGKVVEARVVYDRETGRSRGFGFVTMSNETELNDAIAALDGQNMEGRAIRVNVAEERPRRGF

SEQ ID NO: 108761 - DNA, 737 bp, Zea mays subsp. mays
  misc_feature (1)..(737): Ceres Seq. ID no. 13599262
aggatggctcgataccttgcaaacaaatgttccattgcttcacgtattgactgctattcagatatgagtagctccatttttggtgagaagctgcgtgaacaagttgaggagaggctagatttctacgataagggtgttgcaccccgcaagaaccttgatgtgatgaaagctgctattgatggcttgacaaacacagaggatgatgacggcaaagagaatggtgacgcatctgtgaagaaaagcaagaagtccaaagctgaggctaacagtgacgcgatggacgttgagaatgccgcaacagaagctgaaactggaaccgagaagaagaagaaaaagaagcacaagcttgaggagccgcaggatgtggagatgcaagccaatggcgatgatgagacccctaagaagaagaaaaagaagaaccgcgacgccgagtctgttgatcctaagacgggcaccgaggggaaatccaagaaaaagaagaagaaatccaaggctgatgacgacgagtagtagattagtacctaagtacctagcagcgagtgttcaagtcgattgaggatgaaattttttgtaccgactgtttatgtgtgtactgtttgagcctctttgagcccttgacgaggtctgtaatgtagcttcatggactgaagcggcgtatctgtaatacatttgatgttgcagtatgtcgtttcttggggatggcttagctttcctatataaatggaatggcattgttg

SEQ ID NO: 108762 - protein, 169 aa, Zea mays subsp. mays
  misc_feature (1)..(169): Ceres Seq. ID no. 13599263
  misc_feature (1)..(167): Homolog of NCBI NO: 30923357 NR Description: Nucleolar protein Nop56 (Nucleolar protein 5A)
  misc_feature (1)..(167): Homolog of NCBI NO: 26346733 NR Description: unnamed protein product [Mus musculus]
  misc_feature (1)..(167): Homolog of NCBI NO: 12844818 NR Description: unnamed protein product [Mus musculus]
  misc_feature (1)..(167): Homolog of NCBI NO: 23956150 NR Description: nucleolar protein 5A; 56kDa with KKE/D repeat
  misc_feature (1)..(167): Homolog of NCBI NO: 12805509 NR Description: Nol5a protein [Mus musculus]
  misc_feature (1)..(168): Homolog of NCBI NO: 14799394 NR Description: XNop56 protein [Xenopus laevis]
  misc_feature (1)..(144): Homolog of NCBI NO: 11994428 NR Description: nucleolar protein [Arabidopsis thaliana]
  misc_feature (1)..(163): Homolog of NCBI NO: 15223458 NR Description: nucleolar protein Nop56, putative [Arabidopsis
  misc_feature (1)..(144): Homolog of NCBI NO: 3860319 NR Description: nucleolar protein [Cicer arietinum]
  misc_feature (1)..(164): Homolog of NCBI NO: 34899158 NR Description: putative nucleolar protein
RMARYLANKCSIASRIDCYSDMSSSIFGEKLREQVEERLDFYDKGVAPRKNLDVMKAAIDGLTNTEDDDGKENGDASVKKSKKSKAEANSDAMDVENAATEAETGTEKKKKKKHKLEEPQDVEMQANGDDETPKKKKKKNRDAESVDPKTGTEGKSKKKKKKSKADDDE

SEQ ID NO: 108763 - protein, 168 aa, Zea mays subsp. mays
  misc_feature (1)..(168): Ceres Seq. ID no. 13599264
  misc_feature (1)..(166): Homolog of NCBI NO: 26346733 NR Description: unnamed protein product [Mus musculus]
  misc_feature (1)..(166): Homolog of NCBI NO: 30923357 NR Description: Nucleolar protein Nop56 (Nucleolar protein 5A)
  misc_feature (1)..(166): Homolog of NCBI NO: 12844818 NR Description: unnamed protein product [Mus musculus]
  misc_feature (1)..(166): Homolog of NCBI NO: 23956150 NR Description: nucleolar protein 5A; 56kDa with KKE/D repeat
  misc_feature (1)..(166): Homolog of NCBI NO: 12805509 NR Description: Nol5a protein [Mus musculus]
  misc_feature (1)..(167): Homolog of NCBI NO: 14799394 NR Description: XNop56 protein [Xenopus laevis]
  misc_feature (1)..(143): Homolog of NCBI NO: 11994428 NR Description: nucleolar protein [Arabidopsis thaliana]
  misc_feature (1)..(162): Homolog of NCBI NO: 15223458 NR Description: nucleolar protein Nop56, putative [Arabidopsis
  misc_feature (1)..(143): Homolog of NCBI NO: 3860319 NR Description: nucleolar protein [Cicer arietinum]
  misc_feature (1)..(163): Homolog of NCBI NO: 34899158 NR Description: putative nucleolar protein
MARYLANKCSIASRIDCYSDMSSSIFGEKLREQVEERLDFYDKGVAPRKNLDVMKAAIDGLTNTEDDDGKENGDASVKKSKKSKAEANSDAMDVENAATEAETGTEKKKKKKHKLEEPQDVEMQANGDDETPKKKKKKNRDAESVDPKTGTEGKSKKKKKKSKADDDE

SEQ ID NO: 108764 - protein, 148 aa, Zea mays subsp. mays
  misc_feature (1)..(148): Ceres Seq. ID no. 13599265
  misc_feature (1)..(146): Homolog of NCBI NO: 26346733 NR Description: unnamed protein product [Mus musculus]
  misc_feature (1)..(146): Homolog of NCBI NO: 30923357 NR Description: Nucleolar protein Nop56 (Nucleolar protein 5A)
  misc_feature (1)..(146): Homolog of NCBI NO: 12844818 NR Description: unnamed protein product [Mus musculus]
  misc_feature (1)..(146): Homolog of NCBI NO: 23956150 NR Description: nucleolar protein 5A; 56kDa with KKE/D repeat
  misc_feature (1)..(146): Homolog of NCBI NO: 12805509 NR Description: Nol5a protein [Mus musculus]
  misc_feature (1)..(147): Homolog of NCBI NO: 14799394 NR Description: XNop56 protein [Xenopus laevis]
  misc_feature (1)..(123): Homolog of NCBI NO: 11994428 NR Description: nucleolar protein [Arabidopsis thaliana]
  misc_feature (1)..(142): Homolog of NCBI NO: 15223458 NR Description: nucleolar protein Nop56, putative [Arabidopsis
  misc_feature (1)..(123): Homolog of NCBI NO: 3860319 NR Description: nucleolar protein [Cicer arietinum]
  misc_feature (1)..(143): Homolog of NCBI NO: 34899158 NR Description: putative nucleolar protein
MSSSIFGEKLREQVEERLDFYDKGVAPRKNLDVMKAAIDGLTNTEDDDGKENGDASVKKSKKSKAEANSDAMDVENAATEAETGTEKKKKKKHKLEEPQDVEMQANGDDETPKKKKKKNRDAESVDPKTGTEGKSKKKKKKSKADDDE

SEQ ID NO: 108765 - DNA, 877 bp, Zea mays subsp. mays
  misc_feature (1)..(877): Ceres Seq. ID no. 12635572
gtttcttcttcttcttcccttggctcgccgtctcaccgatcgaatcattttctctgtttgttcgtttactcgcgcgcttcgaagctctgattttgacagagaaaaagaagtaagagatgggctcacgacagggaccaccgaagcatcagaacaaattcgcatgggtacccaacgccggcgtgaagatcaacgaaaccgaagtgggcgggaggttccgaccgctgtcggagataaccggagtttgccatcgctgtcgggagcagatcgcttggaagcgaaaatacggcaaatacaaaaagctaaccgaacccgccaaatgtcagaagtgtttaaagcgtaatgttcgtcaagcatatcacaagttatgcactggttgtgccaaagagcagaaagtgtgtgcaaagtgttactcttcttctgagcaaatcatgggaagggatatatatgaagtagaacctgaacagaagctgctcgatgagactatcaagaatgctagggaaagagatcgaaggacacttttgcgtgctatgaacaaagatagcaacccaaagaagtcagatgaagaagcaacgaggagcgatagcagcaaggttggtgatgtgtttccatcaacatcccttgaagaatatgcaaacaagtctggaagagttagcgggattgttggtcatggccatgtcgttgacgatgaagaagatgatgatgatgttgctagtgaacctgaactagatgaggaccacagtggtgatgatgatgacgaactgcaaaagtaatcgtagtttcggttgtagtagttctgtcaattttgataggcttgtgagattttgcaaaactcgttatgcttttaatgttttgataaagttttactttgttacctgct

SEQ ID NO: 108766 - protein, 217 aa, Zea mays subsp. mays
  misc_feature (1)..(217): Ceres Seq. ID no. 12635573
  misc_feature (3)..(105): Homolog of NCBI NO: 16552651 NR Description: unnamed protein product [Homo sapiens]
  misc_feature (7)..(161): Homolog of NCBI NO: 34869598 NR Description: similar to RIKEN cDNA 1110059E24 [Rattus
  misc_feature (3)..(156): Homolog of NCBI NO: 13384816 NR Description: RIKEN cDNA 1110059E24 [Mus musculus]
  misc_feature (3)..(156): Homolog of NCBI NO: 34862080 NR Description: similar to RIKEN cDNA 1110059E24 [Rattus
  misc_feature (3)..(214): Homolog of NCBI NO: 24642765 NR Description: CG8675-PA [Drosophila melanogaster]
  misc_feature (9)..(175): Homolog of NCBI NO: 34909774 NR Description: P0512C01.29 [Oryza sativa (japonica
  misc_feature (1)..(217): Homolog of NCBI NO: 26453098 NR Description: unknown protein [Arabidopsis thaliana]
  misc_feature (1)..(217): Homolog of NCBI NO: 15232864 NR Description: unknown protein; protein id: At3g02220.1
MGSRQGPPKHQNKFAWVPNAGVKINETEVGGRFRPLSEITGVCHRCREQIAWKRKYGKYKKLTEPAKCQKCLKRNVRQAYHKLCTGCAKEQKVCAKCYSSSEQIMGRDIYEVEPEQKLLDETIKNARERDRRTLLRAMNKDSNPKKSDEEATRSDSSKVGDVFPSTSLEEYANKSGRVSGIVGHGHVVDDEEDDDDVASEPELDEDHSGDDDDELQK

SEQ ID NO: 108767 - protein, 113 aa, Zea mays subsp. mays
  misc_feature (1)..(113): Ceres Seq. ID no. 12635574
  misc_feature (1)..(57): Homolog of NCBI NO: 34869598 NR Description: similar to RIKEN cDNA 1110059E24 [Rattus
  misc_feature (1)..(52): Homolog of NCBI NO: 13384816 NR Description: RIKEN cDNA 1110059E24 [Mus musculus]
  misc_feature (1)..(52): Homolog of NCBI NO: 34862080 NR Description: similar to RIKEN cDNA 1110059E24 [Rattus
  misc_feature (1)..(110): Homolog of NCBI NO: 24642765 NR Description: CG8675-PA [Drosophila melanogaster]
  misc_feature (1)..(71): Homolog of NCBI NO: 34909774 NR Description: P0512C01.29 [Oryza sativa (japonica
  misc_feature (1)..(113): Homolog of NCBI NO: 26453098 NR Description: unknown protein [Arabidopsis thaliana]
  misc_feature (1)..(113): Homolog of NCBI NO: 15232864 NR Description: unknown protein; protein id: At3g02220.1
MGRDIYEVEPEQKLLDETIKNARERDRRTLLRAMNKDSNPKKSDEEATRSDSSKVGDVFPSTSLEEYANKSGRVSGIVGHGHVVDDEEDDDDVASEPELDEDHSGDDDDELQK

SEQ ID NO: 108768 - protein, 112 aa, Zea mays subsp. mays
  misc_feature (1)..(112): Ceres Seq. ID no. 12635575
FLLLLPLARRLTDRIIFSVCSFTRALRSSDFDREKEVRDGLTTGTTEASEQIRMGTQRRREDQRNRSGREVPTAVGDNRSLPSLSGADRLEAKIRQIQKANRTRQMSEVFKA

SEQ ID NO: 108769 - DNA, 1140 bp, Zea mays subsp. mays
  misc_feature (1)..(1140): Ceres Seq. ID no. 13599496
  misc_feature: MA Experiment ID: 108547 Result: Up-regulated in Transcription
  misc_feature: MA Experiment 108547 PARAMETER Experiment Name: Zm_Imbibed_Seeds_P Parameter: Age (day) Value: 4 vs. 2
  misc_feature: MA Experiment 108547 PARAMETER Experiment Name: Zm_Imbibed_Seeds_P Parameter: Organism Value: Zea mays
  misc_feature: MA Experiment 108547 PARAMETER Experiment Name: Zm_Imbibed_Seeds_P Parameter: Plant Line Value: 35A19
  misc_feature: MA Experiment 108547 PARAMETER Experiment Name: Zm_Imbibed_Seeds_P Parameter: Tissue Value: Aerial vs. Embryo
aataagcatttcacgcttcaccaatggcttctctcatgctcaacggggccatcaccttccccaagggattaggcttccccgcttccaatctacacgccagaccaagtcctccgctgagtctcgtctcaaacacagccacgcggagactctccgtggcgacaagatgcagcagcagcagcagcgtgtcggcgtcaaggccatctgcgcagcctaggttcatccagcacaagaaagaggcctactggttctacaggttcctgtccatcgtgtacgaccacatcatcaatcccggccactggacggaggatatgagggacgacgctctcgagcctgcggatctgagccatccggacatgcgagttgtcgacgtcggaggcggaacgggtttcaccacgctgggaatcgtcaagacggtgaaggctaagaacgtgacgattctggaccagtcgccgcatcagctggcaaaggcgaagcagaaggagccgttgaaggagtgcaagatcgtggaaggagatgcggaggatctcccttttcctactgattatgctgacagatacgtctctgctggaagcattgagtactggcccgacccgcagaggggtataagggaagcgtacagagttctcaagatcggtgggaaagcatgtctcattggccctgtccacccgacgttttggctttcacgcttctttgcagatgtgtggatgcttttccccaaggaggaggagtacattgagtggttcaagaatgctggtttcaaggacgttcagcttaagaggattggccccaagtggtaccgtggtgttcgcaggcacggacttatcatgggatgctctgttactggtgtcaaacctgcctctggagactctcctctccagcttggaccaaaggaagaggacgtggagaagcctgtaaacaatcctttctccttcttgggacgcttcctcttgggtaccctagcggctgcctggtttgtgttaatcccaatctacatgtggatcaaggatcagatcgttcccaaagaccaacccatctgataacaacttgtgatttgtaatacactcctatgttagacgcttttttttttgtcctcgtgactatgttgagcccttttcaaaaatatatctatcactctattcc

SEQ ID NO: 108770 - protein, 337 aa, Zea mays subsp. mays
  misc_feature (1)..(337): Ceres Seq. ID no. 13599497
  misc_feature (66)..(256): Pfam Name: ubiE/COQ5 methyltransferase family Pfam Description: ubiE/COQ5 methyltransferase family
  misc_feature (66)..(249): Homolog of NCBI NO: 15790980 NR Description: membrane protein; Hmp [Halobacterium sp. NRC-1]
  misc_feature (66)..(259): Homolog of NCBI NO: 11498123 NR Description: chloroplast inner envelope membrane protein
  misc_feature (1)..(185): Homolog of NCBI NO: 25458195 NR Description: membrane protein, 37K, chloroplast inner envelope
  misc_feature (20)..(334): Homolog of NCBI NO: 37265798 NR Description: MPBQ/MSBQ methyltransferase [Chlamydomonas
  misc_feature (1)..(337): Homolog of NCBI NO: 34393472 NR Description: putative 37kDa chloroplast inner envelope
  misc_feature (1)..(337): Homolog of NCBI NO: 124429 NR Description: 37 KD INNER ENVELOPE MEMBRANE PROTEIN,
  misc_feature (1)..(337): Homolog of NCBI NO: 7489166 NR Description: membrane protein, 37K, precursor, chloroplast
  misc_feature (1)..(337): Homolog of NCBI NO: 21553996 NR Description: putative chloroplast inner envelope protein
  misc_feature (1)..(337): Homolog of NCBI NO: 15005009 NR Description: APG1 [Arabidopsis thaliana]
  misc_feature (1)..(337): Homolog of NCBI NO: 15229430 NR Description: chloroplast inner envelope membrane protein,
MASLMLNGAITFPKGLGFPASNLHARPSPPLSLVSNTATRRLSVATRCSSSSSVSASRPSAQPRFIQHKKEAYWFYRFLSIVYDHIINPGHWTEDMRDDALEPADLSHPDMRVVDVGGGTGFTTLGIVKTVKAKNVTILDQSPHQLAKAKQKEPLKECKIVEGDAEDLPFPTDYADRYVSAGSIEYWPDPQRGIREAYRVLKIGGKACLIGPVHPTFWLSRFFADVWMLFPKEEEYIEWFKNAGFKDVQLKRIGPKWYRGVRRHGLIMGCSVTGVKPASGDSPLQLGPKEEDVEKPVNNPFSFLGRFLLGTLAAAWFVLIPIYMWIKDQIVPKDQPI

SEQ ID NO: 108771 - protein, 333 aa, Zea mays subsp. mays
  misc_feature (1)..(333): Ceres Seq. ID no. 13599498
  misc_feature (62)..(252): Pfam Name: ubiE/COQ5 methyltransferase family Pfam Description: ubiE/COQ5 methyltransferase family
  misc_feature (62)..(245): Homolog of NCBI NO: 15790980 NR Description: membrane protein; Hmp [Halobacterium sp. NRC-1]
  misc_feature (62)..(255): Homolog of NCBI NO: 11498123 NR Description: chloroplast inner envelope membrane protein
  misc_feature (1)..(181): Homolog of NCBI NO: 25458195 NR Description: membrane protein, 37K, chloroplast inner envelope
  misc_feature (16)..(330): Homolog of NCBI NO: 37265798 NR Description: MPBQ/MSBQ methyltransferase [Chlamydomonas
  misc_feature (1)..(333): Homolog of NCBI NO: 34393472 NR Description: putative 37kDa chloroplast inner envelope
  misc_feature (1)..(333): Homolog of NCBI NO: 124429 NR Description: 37 KD INNER ENVELOPE MEMBRANE PROTEIN,
  misc_feature (1)..(333): Homolog of NCBI NO: 7489166 NR Description: membrane protein, 37K, precursor, chloroplast
  misc_feature (1)..(333): Homolog of NCBI NO: 21553996 NR Description: putative chloroplast inner envelope protein
  misc_feature (1)..(333): Homolog of NCBI NO: 15005009 NR Description: APG1 [Arabidopsis thaliana]
  misc_feature (1)..(333): Homolog of NCBI NO: 15229430 NR Description: chloroplast inner envelope membrane protein,
MLNGAITFPKGLGFPASNLHARPSPPLSLVSNTATRRLSVATRCSSSSSVSASRPSAQPRFIQHKKEAYWFYRFLSIVYDHIINPGHWTEDMRDDALEPADLSHPDMRVVDVGGGTGFTTLGIVKTVKAKNVTILDQSPHQLAKAKQKEPLKECKIVEGDAEDLPFPTDYADRYVSAGSIEYWPDPQRGIREAYRVLKIGGKACLIGPVHPTFWLSRFFADVWMLFPKEEEYIEWFKNAGFKDVQLKRIGPKWYRGVRRHGLIMGCSVTGVKPASGDSPLQLGPKEEDVEKPVNNPFSFLGRFLLGTLAAAWFVLIPIYMWIKDQIVPKDQPI

SEQ ID NO: 108772 - protein, 242 aa, Zea mays subsp. mays
  misc_feature (1)..(242): Ceres Seq. ID no. 13599499
  misc_feature (1)..(161): Pfam Name: ubiE/COQ5 methyltransferase family Pfam Description: ubiE/COQ5 methyltransferase family
  misc_feature (1)..(154): Homolog of NCBI NO: 15790980 NR Description: membrane protein; Hmp [Halobacterium sp. NRC-1]
  misc_feature (1)..(164): Homolog of NCBI NO: 11498123 NR Description: chloroplast inner envelope membrane protein
  misc_feature (1)..(90): Homolog of NCBI NO: 25458195 NR Description: membrane protein, 37K, chloroplast inner envelope
  misc_feature (1)..(239): Homolog of NCBI NO: 37265798 NR Description: MPBQ/MSBQ methyltransferase [Chlamydomonas
  misc_feature (1)..(242): Homolog of NCBI NO: 34393472 NR Description: putative 37kDa chloroplast inner envelope
  misc_feature (1)..(242): Homolog of NCBI NO: 124429 NR Description: 37 KD INNER ENVELOPE MEMBRANE PROTEIN,
  misc_feature (1)..(242): Homolog of NCBI NO: 7489166 NR Description: membrane protein, 37K, precursor, chloroplast
  misc_feature (1)..(242): Homolog of NCBI NO: 21553996 NR Description: putative chloroplast inner envelope protein
  misc_feature (1)..(242): Homolog of NCBI NO: 15005009 NR Description: APG1 [Arabidopsis thaliana]
  misc_feature (1)..(242): Homolog of NCBI NO: 15229430 NR Description: chloroplast inner envelope membrane protein,
MRDDALEPADLSHPDMRVVDVGGGTGFTTLGIVKTVKAKNVTILDQSPHQLAKAKQKEPLKECKIVEGDAEDLPFPTDYADRYVSAGSIEYWPDPQRGIREAYRVLKIGGKACLIGPVHPTFWLSRFFADVWMLFPKEEEYIEWFKNAGFKDVQLKRIGPKWYRGVRRHGLIMGCSVTGVKPASGDSPLQLGPKEEDVEKPVNNPFSFLGRFLLGTLAAAWFVLIPIYMWIKDQIVPKDQPI

SEQ ID NO: 108773 - DNA, 1329 bp, Zea mays subsp. mays
  misc_feature (1)..(1329): Ceres Seq. ID no. 13623086
aatcaaacacaaacaaaacccaaagaagatctaagttcatcatgtctacgaccggacaaatcattcgatgcaaagctgccgtttgctgggaagctggaaagccactagtgatggaggaagtggaggttgctccaccgcagaagcatgaagtccgtatcaagattctcttcacttctctctgtcacaccgatgtttacttctgggaagctaagggacaaacgcctttgtttccacgtatcttcggacatgaagctggagggattgtggagagtgttggagaaggagtgactgatctccaaccaggagaccacgtcctccccatcttcaccggagaatgcggagactgccctcactgccactctgaggagtccaacatgtgcgaccttctcaggatcaacaccgagagaggagggatgatacacgacggcgaatcgagattctccatcaacggcaaaccgatctaccatttccttgggacctcaacgttcagcgagtacaccgtggttcactctggtcaagtcgctaagatcaaccctgaagctcctcttgacaaagtctgcatcgtcagctgtggcttgtccactgggctgggagctactttgaatgttgctaaacccaagaaaggtcagagcgttgctatctttggtcttggtgctgttgggttggctgctgcggaaggtgctaggattgctggtgctggtaggatcattggtgttgatcttaaccccaagagattcgaggaagctaagaagttcggtgtgacggagtttgtgaaccctaaggaacatgacaagccagttcagcaagtcatcgctgagatgactaacggcggtgtggacaggagtgtggagtgcactggaagcattcaagccatgattcaagcctttgaatgtgttcacgatggctggggtgttgcggtgctggttggtgtgccgagcaaagacgacgctttcaagactcatccgatgaacctcctgaacgagaggacactcaagggtactttctttggcaactacaaacccaaaaccgacattcccggggtggtcgaaaagtacatgaacaaggagctggagcttgagaagttcatcactcacacagtgccgttctctgagatcaacaaggcctttgattacatgttgttggagagagtatccgttgcatcatcaccatgggtgcttgaagaaactacatttctcctttaccaataaatgtctacttcgagtgtttttagtagacaaactcttattgcttttgtgttttttaagttcctactctattttaccatatcgttgtaatagttttcattctatcaaggttttaatataaact

SEQ ID NO: 108774 - protein, 401 aa, Zea mays subsp. mays
  misc_feature (1)..(401): Ceres Seq. ID no. 13623087
  misc_feature (14)..(379): Homolog of NCBI NO: 6684369 NR Description: alcohol dehydrogenase [Arabidopsis lyrata subsp.
  misc_feature (14)..(379): Homolog of NCBI NO: 2570186 NR Description: alcohol dehydrogenase [Arabis gemmifera]
  misc_feature (14)..(379): Homolog of NCBI NO: 6684359 NR Description: alcohol dehydrogenase [Arabis hirsuta]
  misc_feature (14)..(379): Homolog of NCBI NO: 6684367 NR Description: alcohol dehydrogenase [Arabis pauciflora]
  misc_feature (14)..(379): Homolog of NCBI NO: 6684351 NR Description: alcohol dehydrogenase [Capsella rubella]
  misc_feature (14)..(379): Homolog of NCBI NO: 6684374 NR Description: alcohol dehydrogenase [Barbarea vulgaris]
  misc_feature (14)..(379): Homolog of NCBI NO: 6684342 NR Description: alcohol dehydrogenase [Arabis alpina]
  misc_feature (14)..(379): Homolog of NCBI NO: 6684341 NR Description: alcohol dehydrogenase [Aubrieta deltoidea]
  misc_feature (14)..(379): Homolog of NCBI NO: 2570176 NR Description: alcohol dehydrogenase [Arabis gemmifera]
  misc_feature (14)..(379): Homolog of NCBI NO: 6684350 NR Description: alcohol dehydrogenase [Brassica oleracea]
SNTNKTQRRSKFIMSTTGQIIRCKAAVCWEAGKPLVMEEVEVAPPQKHEVRIKILFTSLCHTDVYFWEAKGQTPLFPRIFGHEAGGIVESVGEGVTDLQPGDHVLPIFTGECGDCPHCHSEESNMCDLLRINTERGGMIHDGESRFSINGKPIYHFLGTSTFSEYTVVHSGQVAKINPEAPLDKVCIVSCGLSTGLGATLNVAKPKKGQSVAIFGLGAVGLAAAEGARIAGAGRIIGVDLNPKRFEEAKKFGVTEFVNPKEHDKPVQQVIAEMTNGGVDRSVECTGSIQAMIQAFECVHDGWGVAVLVGVPSKDDAFKTHPMNLLNERTLKGTFFGNYKPKTDIPGVVEKYMNKELELEKFITHTVPFSEINKAFDYMLLERVSVASSPWVLEETTFLLYQ

SEQ ID NO: 108775 - protein, 388 aa, Zea mays subsp. mays
  misc_feature (1)..(388): Ceres Seq. ID no. 13623088
  misc_feature (1)..(366): Homolog of NCBI NO: 6684369 NR Description: alcohol dehydrogenase [Arabidopsis lyrata subsp.
  misc_feature (1)..(366): Homolog of NCBI NO: 2570186 NR Description: alcohol dehydrogenase [Arabis gemmifera]
  misc_feature (1)..(366): Homolog of NCBI NO: 6684367 NR Description: alcohol dehydrogenase [Arabis pauciflora]
  misc_feature (1)..(366): Homolog of NCBI NO: 6684359 NR Description: alcohol dehydrogenase [Arabis hirsuta]
  misc_feature (1)..(366): Homolog of NCBI NO: 6684351 NR Description: alcohol dehydrogenase [Capsella rubella]
  misc_feature (1)..(366): Homolog of NCBI NO: 6684374 NR Description: alcohol dehydrogenase [Barbarea vulgaris]
  misc_feature (1)..(366): Homolog of NCBI NO: 6684342 NR Description: alcohol dehydrogenase [Arabis alpina]
  misc_feature (1)..(366): Homolog of NCBI NO: 6684341 NR Description: alcohol dehydrogenase [Aubrieta deltoidea]
  misc_feature (1)..(366): Homolog of NCBI NO: 2570176 NR Description: alcohol dehydrogenase [Arabis gemmifera]
  misc_feature (1)..(366): Homolog of NCBI NO: 6684350 NR Description: alcohol dehydrogenase [Brassica oleracea]
MSTTGQIIRCKAAVCWEAGKPLVMEEVEVAPPQKHEVRIKILFTSLCHTDVYFWEAKGQTPLFPRIFGHEAGGIVESVGEGVTDLQPGDHVLPIFTGECGDCPHCHSEESNMCDLLRINTERGGMIHDGESRFSINGKPIYHFLGTSTFSEYTVVHSGQVAKINPEAPLDKVCIVSCGLSTGLGATLNVAKPKKGQSVAIFGLGAVGLAAAEGARIAGAGRIIGVDLNPKRFEEAKKFGVTEFVNPKEHDKPVQQVIAEMTNGGVDRSVECTGSIQAMIQAFECVHDGWGVAVLVGVPSKDDAFKTHPMNLLNERTLKGTFFGNYKPKTDIPGVVEKYMNKELELEKFITHTVPFSEINKAFDYMLLERVSVASSPWVLEETTFLLYQ

SEQ ID NO: 108776 - protein, 365 aa, Zea mays subsp. mays
  misc_feature (1)..(365): Ceres Seq. ID no. 13623089
  misc_feature (1)..(343): Homolog of NCBI NO: 6684369 NR Description: alcohol dehydrogenase [Arabidopsis lyrata subsp.
  misc_feature (1)..(343): Homolog of NCBI NO: 2570186 NR Description: alcohol dehydrogenase [Arabis gemmifera]
  misc_feature (1)..(343): Homolog of NCBI NO: 6684359 NR Description: alcohol dehydrogenase [Arabis hirsuta]
  misc_feature (1)..(343): Homolog of NCBI NO: 6684367 NR Description: alcohol dehydrogenase [Arabis pauciflora]
  misc_feature (1)..(343): Homolog of NCBI NO: 6684351 NR Description: alcohol dehydrogenase [Capsella rubella]
  misc_feature (1)..(343): Homolog of NCBI NO: 6684374 NR Description: alcohol dehydrogenase [Barbarea vulgaris]
  misc_feature (1)..(343): Homolog of NCBI NO: 6684342 NR Description: alcohol dehydrogenase [Arabis alpina]
  misc_feature (1)..(343): Homolog of NCBI NO: 6684341 NR Description: alcohol dehydrogenase [Aubrieta deltoidea]
  misc_feature (1)..(343): Homolog of NCBI NO: 2570176 NR Description: alcohol dehydrogenase [Arabis gemmifera]
  misc_feature (1)..(343): Homolog of NCBI NO: 6684350 NR Description: alcohol dehydrogenase [Brassica oleracea]
MEEVEVAPPQKHEVRIKILFTSLCHTDVYFWEAKGQTPLFPRIFGHEAGGIVESVGEGVTDLQPGDHVLPIFTGECGDCPHCHSEESNMCDLLRINTERGGMIHDGESRFSINGKPIYHFLGTSTFSEYTVVHSGQVAKINPEAPLDKVCIVSCGLSTGLGATLNVAKPKKGQSVAIFGLGAVGLAAAEGARIAGAGRIIGVDLNPKRFEEAKKFGVTEFVNPKEHDKPVQQVIAEMTNGGVDRSVECTGSIQAMIQAFECVHDGWGVAVLVGVPSKDDAFKTHPMNLLNERTLKGTFFGNYKPKTDIPGVVEKYMNKELELEKFITHTVPFSEINKAFDYMLLERVSVASSPWVLEETTFLLYQ

SEQ ID NO: 108777 - DNA, 873 bp, Zea mays subsp. mays
  misc_feature (1)..(873): Ceres Seq. ID no. 13586970
  misc_feature: MA Experiment ID: 20000487 Result: Up-regulated in Transcription
  misc_feature: MA Experiment 20000487 PARAMETER Experiment Name: Zm_50mM_NH4NO3_L_to_H_P Parameter: Organism Value: Zea mays
  misc_feature: MA Experiment 20000487 PARAMETER Experiment Name: Zm_50mM_NH4NO3_L_to_H_P Parameter: Timepoint (hr) Value: 4
  misc_feature: MA Experiment 20000487 PARAMETER Experiment Name: Zm_50mM_NH4NO3_L_to_H_P Parameter: Tissue Value: Leaves
  misc_feature: MA Experiment 20000487 PARAMETER Experiment Name: Zm_50mM_NH4NO3_L_to_H_P Parameter: Treatment Value: 50mM NH4NO3 vs. 100mM Mannitol
  misc_feature: MA Experiment ID: 20000492 Result: Up-regulated in Transcription
  misc_feature: MA Experiment 20000492 PARAMETER Experiment Name: Zm_Hybrid_Seed_Dev_P Parameter: DAP Value: 12
  misc_feature: MA Experiment 20000492 PARAMETER Experiment Name: Zm_Hybrid_Seed_Dev_P Parameter: Organism Value: Zea mays
  misc_feature: MA Experiment 20000492 PARAMETER Experiment Name: Zm_Hybrid_Seed_Dev_P Parameter: Plant Line Value: 35A19
  misc_feature: MA Experiment 20000492 PARAMETER Experiment Name: Zm_Hybrid_Seed_Dev_P Parameter: Tissue Value: Fert Kernel vs. Unfert Floret
atcctaatcgaaaatcgcagaaaagctttgtgatggtcctctttcaaatgctgcaaatttgtggagcctgagatttactatggagataaattcaattgcaactgctcctggcagttcttccttgagcaaggagaacctgagctctctgcttgatctatttagcactgtactctccaagttgtctgtaactgaggctgagagactgtggcatatggccatgaagttgttttcccatgataaggtctgtttcgagaagctggtgaagtgtgcgatgctatcattaagtctggcaggtggcagtgattcaggagcatcagtttcttctgctatcgttggatggtatttgcaaagagatggtgtgaagcatgctaggaagatgtataagagattgcttgctttacctcggccaagcctcaagttcatgcaatactgcatagcgctggaggcgaaccttgcatcgctcggagacaacggcgccctcaaagatgctcggcggctatatgattcagcgctcgacctgtatccccaggaaagagaagtgtggcggagctactacgacctggagctgaagatgggaacatcggagtctgccaacgccgtgtactcgcgctctcgtaaggtgctgggtgactccactgccttgactgctccccggggctaggtcgcagcatgcaatgtattccaagatgcaatgtgatttttttgtttggatctgtgttttccaatcctctctgagtctgggtcagcaagcaattaagctgatgcatcgaaattttggctctaaatgggagacctacaatgtgctgctggggaacactgtatatcttgttcaaaaaacaagagtactgcagctgctggtggctgtctcctttg

SEQ ID NO: 108778 - protein, 193 aa, Zea mays subsp. mays
  misc_feature (1)..(193): Ceres Seq. ID no. 13586971
  misc_feature (1)..(191): Homolog of NCBI NO: 40363761 NR Description: putative hepatocellular carcinoma-associated
  misc_feature (1)..(185): Homolog of NCBI NO: 15234413 NR Description: expressed protein [Arabidopsis thaliana]
MEINSIATAPGSSSLSKENLSSLLDLFSTVLSKLSVTEAERLWHMAMKLFSHDKVCFEKLVKCAMLSLSLAGGSDSGASVSSAIVGWYLQRDGVKHARKMYKRLLALPRPSLKFMQYCIALEANLASLGDNGALKDARRLYDSALDLYPQEREVWRSYYDLELKMGTSESANAVYSRSRKVLGDSTALTAPRG

SEQ ID NO: 108779 - protein, 149 aa, Zea mays subsp. mays
  misc_feature (1)..(149): Ceres Seq. ID no. 13586972
  misc_feature (1)..(141): Homolog of NCBI NO: 15234413 NR Description: expressed protein [Arabidopsis thaliana]
  misc_feature (1)..(147): Homolog of NCBI NO: 40363761 NR Description: putative hepatocellular carcinoma-associated
MAMKLFSHDKVCFEKLVKCAMLSLSLAGGSDSGASVSSAIVGWYLQRDGVKHARKMYKRLLALPRPSLKFMQYCIALEANLASLGDNGALKDARRLYDSALDLYPQEREVWRSYYDLELKMGTSESANAVYSRSRKVLGDSTALTAPRG

SEQ ID NO: 108780 - protein, 147 aa, Zea mays subsp. mays
  misc_feature (1)..(147): Ceres Seq. ID no. 13586973
  misc_feature (1)..(139): Homolog of NCBI NO: 15234413 NR Description: expressed protein [Arabidopsis thaliana]
  misc_feature (1)..(145): Homolog of NCBI NO: 40363761 NR Description: putative hepatocellular carcinoma-associated
MKLFSHDKVCFEKLVKCAMLSLSLAGGSDSGASVSSAIVGWYLQRDGVKHARKMYKRLLALPRPSLKFMQYCIALEANLASLGDNGALKDARRLYDSALDLYPQEREVWRSYYDLELKMGTSESANAVYSRSRKVLGDSTALTAPRG

SEQ ID NO: 108781 - DNA, 881 bp, Zea mays subsp. mays
  misc_feature (1)..(881): Ceres Seq. ID no. 12590014
  misc_feature: MA Experiment ID: 108523 Result: Up-regulated in Transcription
  misc_feature: MA Experiment 108523 PARAMETER Experiment Name: Zm_42deg_Heat_P Parameter: Age (day) Value: 8
  misc_feature: MA Experiment 108523 PARAMETER Experiment Name: Zm_42deg_Heat_P Parameter: Organism Value: Zea mays
  misc_feature: MA Experiment 108523 PARAMETER Experiment Name: Zm_42deg_Heat_P Parameter: Plant Line Value: 35A19
  misc_feature: MA Experiment 108523 PARAMETER Experiment Name: Zm_42deg_Heat_P Parameter: Temperature (deg C) Value: 42 vs. 22
  misc_feature: MA Experiment 108523 PARAMETER Experiment Name: Zm_42deg_Heat_P Parameter: Timepoint (hr) Value: 6
  misc_feature: MA Experiment 108523 PARAMETER Experiment Name: Zm_42deg_Heat_P Parameter: Tissue Value: Aerial
atcctaatcaaaaaaaccagaggtggttggtgcatcagcacacagcgcagcagcaaagataattgattgcaagcagttcatcaaacattatgatgagcatgctctgcggactccttcaaacccattcctgctctgtgtgaggtgctccattgaactgcttgatcacccaaaagattacacgacacctccagaagaacttgtacttctaccagcaagtgctaccctaggtgacctgaaagtacaggcttcaaaggctttccaagaaacgtacctgatgttccaaagcttccagactgaacagctccctgactttccaaacttcagtgatacaacccccgtgaagcatgtgcttggatcaggccagttgcttcgagtaaggggacgttgcactggggattacaggagaattgtacagttcaggatggagaggggtttggagaactggacggtggactgctcatgtggggccaaggatgatgatggggaacggatgctagcttgtgacatatgtggagtctggcagcataccaggtgctcgggaataagtgattttgaggaagtccctgaaaatttcatctgcagaaagtgtgctagtccacgcaagggagacggacgtgggggtggaggtagcaacggtggtggaacaatggaggttactgcgtctgggaggtgcaaggatgaaattggagcatcagttggtggagcaggcaagtatgggcgcatggcaacagttggatgactgtacataatgtagtgaaacgtaaatagtgagatggagagtagtaaggtgcacctaaaggcttttgtggaccttgagtggtgttaaatggatcttgtcgctgaccactgatgtgatgttaatctgttctccttgcagttgc

SEQ ID NO: 108782 - protein, 154 aa, Zea mays subsp. mays
  misc_feature (1)..(154): Ceres Seq. ID no. 12590015
  misc_feature (60)..(108): Pfam Name: PHD-finger Pfam Description: PHD-finger
  misc_feature (57)..(107): Homolog of NCBI NO: 15223306 NR Description: hypothetical protein; protein id: At1g32800.1
  misc_feature (59)..(105): Homolog of NCBI NO: 15554513 NR Description: male sterility 1 protein [Arabidopsis thaliana]
  misc_feature (59)..(105): Homolog of NCBI NO: 15242181 NR Description: putative protein; protein id: At5g22260.1
  misc_feature (57)..(107): Homolog of NCBI NO: 8778206 NR Description: F6N18.18 [Arabidopsis thaliana]
  misc_feature (1)..(105): Homolog of NCBI NO: 18071367 NR Description: putative collagen [Oryza sativa (japonica
  misc_feature (1)..(105): Homolog of NCBI NO: 31442870 NR Description: male meiotic MMD1 [Arabidopsis thaliana]
  misc_feature (1)..(105): Homolog of NCBI NO: 15218943 NR Description: PHD-finger protein, putative; protein id:
  misc_feature (1)..(105): Homolog of NCBI NO: 15226359 NR Description: hypothetical protein; protein id: At2g01810.1
  misc_feature (1)..(105): Homolog of NCBI NO: 18398841 NR Description: expressed protein
  misc_feature (1)..(154): Homolog of NCBI NO: 34907348 NR Description: putative male sterility 1 protein
MFQSFQTEQLPDFPNFSDTTPVKHVLGSGQLLRVRGRCTGDYRRIVQFRMERGLENWTVDCSCGAKDDDGERMLACDICGVWQHTRCSGISDFEEVPENFICRKCASPRKGDGRGGGGSNGGGTMEVTASGRCKDEIGASVGGAGKYGRMATVG

SEQ ID NO: 108783 - protein, 105 aa, Zea mays subsp. mays
  misc_feature (1)..(105): Ceres Seq. ID no. 12590016
  misc_feature (11)..(59): Pfam Name: PHD-finger Pfam Description: PHD-finger
  misc_feature (8)..(58): Homolog of NCBI NO: 15223306 NR Description: hypothetical protein; protein id: At1g32800.1
  misc_feature (10)..(56): Homolog of NCBI NO: 15554513 NR Description: male sterility 1 protein [Arabidopsis thaliana]
  misc_feature (10)..(56): Homolog of NCBI NO: 15242181 NR Description: putative protein; protein id: At5g22260.1
  misc_feature (8)..(58): Homolog of NCBI NO: 8778206 NR Description: F6N18.18 [Arabidopsis thaliana]
  misc_feature (1)..(56): Homolog of NCBI NO: 18071367 NR Description: putative collagen [Oryza sativa (japonica
  misc_feature (1)..(56): Homolog of NCBI NO: 31442870 NR Description: male meiotic MMD1 [Arabidopsis thaliana]
  misc_feature (1)..(56): Homolog of NCBI NO: 15218943 NR Description: PHD-finger protein, putative; protein id:
  misc_feature (1)..(56): Homolog of NCBI NO: 15226359 NR Description: hypothetical protein; protein id: At2g01810.1
  misc_feature (1)..(56): Homolog of NCBI NO: 18398841 NR Description: expressed protein
  misc_feature (1)..(105): Homolog of NCBI NO: 34907348 NR Description: putative male sterility 1 protein
MERGLENWTVDCSCGAKDDDGERMLACDICGVWQHTRCSGISDFEEVPENFICRKCASPRKGDGRGGGGSNGGGTMEVTASGRCKDEIGASVGGAGKYGRMATVG

SEQ ID NO: 108784 - protein, 82 aa, Zea mays subsp. mays
  misc_feature (1)..(82): Ceres Seq. ID no. 12590017
  misc_feature (1)..(36): Pfam Name: PHD-finger Pfam Description: PHD-finger
  misc_feature (1)..(35): Homolog of NCBI NO: 15223306 NR Description: hypothetical protein; protein id: At1g32800.1
  misc_feature (1)..(33): Homolog of NCBI NO: 15554513 NR Description: male sterility 1 protein [Arabidopsis thaliana]
  misc_feature (1)..(33): Homolog of NCBI NO: 15242181 NR Description: putative protein; protein id: At5g22260.1
  misc_feature (1)..(35): Homolog of NCBI NO: 8778206 NR Description: F6N18.18 [Arabidopsis thaliana]
  misc_feature (1)..(33): Homolog of NCBI NO: 18071367 NR Description: putative collagen [Oryza sativa (japonica
  misc_feature (1)..(33): Homolog of NCBI NO: 31442870 NR Description: male meiotic MMD1 [Arabidopsis thaliana]
  misc_feature (1)..(33): Homolog of NCBI NO: 15218943 NR Description: PHD-finger protein, putative; protein id:
  misc_feature (1)..(33): Homolog of NCBI NO: 15226359 NR Description: hypothetical protein; protein id: At2g01810.1
  misc_feature (1)..(33): Homolog of NCBI NO: 18398841 NR Description: expressed protein
  misc_feature (1)..(82): Homolog of NCBI NO: 34907348 NR Description: putative male sterility 1 protein
MLACDICGVWQHTRCSGISDFEEVPENFICRKCASPRKGDGRGGGGSNGGGTMEVTASGRCKDEIGASVGGAGKYGRMATVG

SEQ ID NO: 108785 - DNA, 902 bp, Zea mays subsp. mays
  misc_feature (1)..(902): Ceres Seq. ID no. 13587149
aacctactcacaaagcaaccagacaacacatacatctctcatctctctattctctctcactgtaaacttcaaataatgatgggataccaaacaaacgctaatttctccatgttgtacgaccaagaccaccctcataattatgattatgatgacctctcttcatcaacttctgttgattgcactctctcccttggaacaccatctactcgtctcgacaaacaccgtagattttcttctgccaattctaacaacatctccggcgacttcttctttcacggaggaagcgcaaaaacgacgtcttacaaaaagagcggtagtgagcacaacctgcctcgccgttgtgctagctgcgacacttcttctactcctctatggagaaacggaccaaaagggcctaagtcgttatgcaatgcgtgtggaatcagattcaagaaggaagagaagcgtgcagctgccagaaactcaataacgtccggtggtggttcatcagtggcagaagttccggcagagaacccgtacaacggaggtggaaactattacactcatcatcaccatgcttcctcgtcaccgtcgtgggctcatcagaacacacaaagagttcagtatttctcgccggcaccggagatggaatatccgttcgttgatgacgtcacggctgcctcgtttatgtcttggaattaacgtcacggaaaccactggccttctccaccatttttgacgagatgaatgaagaaacgttacctatggaaggtcttgtcatagattctcacccaaagtaaatcagtcctggtcaaattcattataaagtttctttttatttatttatttcttacatcgacactatctccttgtgttttctttttatgtctttttgaaagatatatatacgtactgtagtgttt

SEQ ID NO: 108786 - protein, 226 aa, Zea mays subsp. mays
  misc_feature (1)..(226): Ceres Seq. ID no. 13587150
  misc_feature (94)..(133): Homolog of NCBI NO: 5091599 NR Description: 10A19I.2 [Oryza sativa]
  misc_feature (48)..(165): Homolog of NCBI NO: 34912080 NR Description: P0671D01.19 [Oryza sativa (japonica
  misc_feature (31)..(115): Homolog of NCBI NO: 18409199 NR Description: GATA zinc finger protein [Arabidopsis thaliana]
  misc_feature (31)..(115): Homolog of NCBI NO: 7488381 NR Description: transcription factor homolog F18B3.150 -
  misc_feature (105)..(216): Homolog of NCBI NO: 18409199 NR Description: GATA zinc finger protein [Arabidopsis thaliana]
  misc_feature (105)..(216): Homolog of NCBI NO: 7488381 NR Description: transcription factor homolog F18B3.150 -
  misc_feature (31)..(115): Homolog of NCBI NO: 21555178 NR Description: transcription factor-like protein [Arabidopsis
  misc_feature (105)..(216): Homolog of NCBI NO: 21555178 NR Description: transcription factor-like protein [Arabidopsis
  misc_feature (35)..(225): Homolog of NCBI NO: 15234463 NR Description: GATA zinc finger protein [Arabidopsis thaliana]
  misc_feature (27)..(226): Homolog of NCBI NO: 15224164 NR Description: GATA zinc finger protein [Arabidopsis thaliana]
NLLTKQPDNTYISHLSILSHCKLQIMMGYQTNANFSMLYDQDHPHNYDYDDLSSSTSVDCTLSLGTPSTRLDKHRRFSSANSNNISGDFFFHGGSAKTTSYKKSGSEHNLPRRCASCDTSSTPLWRNGPKGPKSLCNACGIRFKKEEKRAAARNSITSGGGSSVAEVPAENPYNGGGNYYTHHHHASSSPSWAHQNTQRVQYFSPAPEMEYPFVDDVTAASFMSWN

SEQ ID NO: 108787 - protein, 201 aa, Zea mays subsp. mays
  misc_feature (1)..(201): Ceres Seq. ID no. 13587151
  misc_feature (69)..(108): Homolog of NCBI NO: 5091599 NR Description: 10A19I.2 [Oryza sativa]
  misc_feature (23)..(140): Homolog of NCBI NO: 34912080 NR Description: P0671D01.19 [Oryza sativa (japonica
  misc_feature (6)..(90): Homolog of NCBI NO: 18409199 NR Description: GATA zinc finger protein [Arabidopsis thaliana]
  misc_feature (6)..(90): Homolog of NCBI NO: 7488381 NR Description: transcription factor homolog F18B3.150 -
  misc_feature (80)..(191): Homolog of NCBI NO: 18409199 NR Description: GATA zinc finger protein [Arabidopsis thaliana]
  misc_feature (80)..(191): Homolog of NCBI NO: 7488381 NR Description: transcription factor homolog F18B3.150 -
  misc_feature (6)..(90): Homolog of NCBI NO: 21555178 NR Description: transcription factor-like protein [Arabidopsis
  misc_feature (80)..(191): Homolog of NCBI NO: 21555178 NR Description: transcription factor-like protein [Arabidopsis
  misc_feature (10)..(200): Homolog of NCBI NO: 15234463 NR Description: GATA zinc finger protein [Arabidopsis thaliana]
  misc_feature (2)..(201): Homolog of NCBI NO: 15224164 NR Description: GATA zinc finger protein [Arabidopsis thaliana]
MMGYQTNANFSMLYDQDHPHNYDYDDLSSSTSVDCTLSLGTPSTRLDKHRRFSSANSNNISGDFFFHGGSAKTTSYKKSGSEHNLPRRCASCDTSSTPLWRNGPKGPKSLCNACGIRFKKEEKRAAARNSITSGGGSSVAEVPAENPYNGGGNYYTHHHHASSSPSWAHQNTQRVQYFSPAPEMEYPFVDDVTAASFMSWN

SEQ ID NO: 108788 - protein, 200 aa, Zea mays subsp. mays
  misc_feature (1)..(200): Ceres Seq. ID no. 13587152
  misc_feature (68)..(107): Homolog of NCBI NO: 5091599 NR Description: 10A19I.2 [Oryza sativa]
  misc_feature (22)..(139): Homolog of NCBI NO: 34912080 NR Description: P0671D01.19 [Oryza sativa (japonica
  misc_feature (5)..(89): Homolog of NCBI NO: 18409199 NR Description: GATA zinc finger protein [Arabidopsis thaliana]
  misc_feature (5)..(89): Homolog of NCBI NO: 7488381 NR Description: transcription factor homolog F18B3.150 -
  misc_feature (79)..(190): Homolog of NCBI NO: 18409199 NR Description: GATA zinc finger protein [Arabidopsis thaliana]
  misc_feature (79)..(190): Homolog of NCBI NO: 7488381 NR Description: transcription factor homolog F18B3.150 -
  misc_feature (5)..(89): Homolog of NCBI NO: 21555178 NR Description: transcription factor-like protein [Arabidopsis
  misc_feature (79)..(190): Homolog of NCBI NO: 21555178 NR Description: transcription factor-like protein [Arabidopsis
  misc_feature (9)..(199): Homolog of NCBI NO: 15234463 NR Description: GATA zinc finger protein [Arabidopsis thaliana]
  misc_feature (1)..(200): Homolog of NCBI NO: 15224164 NR Description: GATA zinc finger protein [Arabidopsis thaliana]
MGYQTNANFSMLYDQDHPHNYDYDDLSSSTSVDCTLSLGTPSTRLDKHRRFSSANSNNISGDFFFHGGSAKTTSYKKSGSEHNLPRRCASCDTSSTPLWRNGPKGPKSLCNACGIRFKKEEKRAAARNSITSGGGSSVAEVPAENPYNGGGNYYTHHHHASSSPSWAHQNTQRVQYFSPAPEMEYPFVDDVTAASFMSWN

SEQ ID NO: 108789 - DNA, 1020 bp, Zea mays subsp. mays
  misc_feature (1)..(1020): Ceres Seq. ID no. 13599278
gtacagatgcttctccctcctcctcctctagaaacttctcccatggcggcttcttctgctctctcctcaccagcgcttctctccaacaaccgctctcctccgtcatgcggctccgtcagacgctcgatctcctcctccccggtgctcatcgctactcccagatcgtctcgtttgagcttcacaatacctgagaggagaagcctcgtcgtgaaatcaaccgtcggcgaggtctcctttcgcgaaccggcaacatcgggagataaggagggaatcgaatcgctgaaactcaaattactgagggtggtttcgggtttgaacagaggacttgtggcgagtgtagatgatctacaaagtgctgaggccgctgctaaattacttgaagccgctggtgggcctgtggatctaaccaatgatcttgacaaactccaagggaaatggaggctgctgtatagcagcgccttctcttctcgctctttaggtggtagccgtcctggtctacccactggtcgcttgattcccgtcactcttggccaggtgtttcagaggattgatgtgtttagcaaagatttcgataacattgccgaagtggagttaggagctccttggccgtttcctcctctggaagccactgcaacactggcacacaaattcgaactcttaggtacttgcaagatcaagatcacatttgagaaaacaactgtgaagacatcgggaaacttagcgcagattcctccgtttgagatcccgaggcttcccgatagtttcaggccaccgtctaaccctggaactggagattttgaagtcacctatgttgatgagaacatgcgcataactcgtggggatagaggtgaacttagggtctttgtcattgcttaagtcaaaaggaggtttgacatgtaaagatcaagtactttctgcttgttgcagcagccttatgacccctatgagttttgtacacatcgtttgaacgttgattatagatgtattttataatgaagtgaatgtcagttatgcttagtg

SEQ ID NO: 108790 - protein, 291 aa, Zea mays subsp. mays
  misc_feature (1)..(291): Ceres Seq. ID no. 13599279
  misc_feature (94)..(289): Pfam Name: PAP_fibrillin Pfam Description: PAP_fibrillin
  misc_feature (95)..(289): Homolog of NCBI NO: 23041005 NR Description: hypothetical protein [Trichodesmium erythraeum
  misc_feature (95)..(291): Homolog of NCBI NO: 23126201 NR Description: hypothetical protein [Nostoc punctiforme]
  misc_feature (95)..(291): Homolog of NCBI NO: 5020103 NR Description: fibrillin [Nostoc sp. PCC 8009]
  misc_feature (95)..(291): Homolog of NCBI NO: 17231810 NR Description: fibrillin [Nostoc sp. PCC 7120]
  misc_feature (95)..(291): Homolog of NCBI NO: 16329838 NR Description: fibrillin [Synechocystis sp. PCC 6803]
  misc_feature (95)..(287): Homolog of NCBI NO: 22297962 NR Description: fibrillin [Thermosynechococcus elongatus BP-1]
  misc_feature (15)..(291): Homolog of NCBI NO: 21592536 NR Description: unknown [Arabidopsis thaliana]
  misc_feature (15)..(291): Homolog of NCBI NO: 18403751 NR Description: plastid-lipid associated protein PAP/fibrillin
VQMLLPPPPLETSPMAASSALSSPALLSNNRSPPSCGSVRRSISSSPVLIATPRSSRLSFTIPERRSLVVKSTVGEVSFREPATSGDKEGIESLKLKLLRVVSGLNRGLVASVDDLQSAEAAAKLLEAAGGPVDLTNDLDKLQGKWRLLYSSAFSSRSLGGSRPGLPTGRLIPVTLGQVFQRIDVFSKDFDNIAEVELGAPWPFPPLEATATLAHKFELLGTCKIKITFEKTTVKTSGNLAQIPPFEIPRLPDSFRPPSNPGTGDFEVTYVDENMRITRGDRGELRVFVIA

SEQ ID NO: 108791 - protein, 289 aa, Zea mays subsp. mays
  misc_feature (1)..(289): Ceres Seq. ID no. 13599280
  misc_feature (92)..(287): Pfam Name: PAP_fibrillin Pfam Description: PAP_fibrillin
  misc_feature (93)..(287): Homolog of NCBI NO: 23041005 NR Description: hypothetical protein [Trichodesmium erythraeum
  misc_feature (93)..(289): Homolog of NCBI NO: 23126201 NR Description: hypothetical protein [Nostoc punctiforme]
  misc_feature (93)..(289): Homolog of NCBI NO: 5020103 NR Description: fibrillin [Nostoc sp. PCC 8009]
  misc_feature (93)..(289): Homolog of NCBI NO: 17231810 NR Description: fibrillin [Nostoc sp. PCC 7120]
  misc_feature (93)..(289): Homolog of NCBI NO: 16329838 NR Description: fibrillin [Synechocystis sp. PCC 6803]
  misc_feature (93)..(285): Homolog of NCBI NO: 22297962 NR Description: fibrillin [Thermosynechococcus elongatus BP-1]
  misc_feature (13)..(289): Homolog of NCBI NO: 21592536 NR Description: unknown [Arabidopsis thaliana]
  misc_feature (13)..(289): Homolog of NCBI NO: 18403751 NR Description: plastid-lipid associated protein PAP/fibrillin
MLLPPPPLETSPMAASSALSSPALLSNNRSPPSCGSVRRSISSSPVLIATPRSSRLSFTIPERRSLVVKSTVGEVSFREPATSGDKEGIESLKLKLLRVVSGLNRGLVASVDDLQSAEAAAKLLEAAGGPVDLTNDLDKLQGKWRLLYSSAFSSRSLGGSRPGLPTGRLIPVTLGQVFQRIDVFSKDFDNIAEVELGAPWPFPPLEATATLAHKFELLGTCKIKITFEKTTVKTSGNLAQIPPFEIPRLPDSFRPPSNPGTGDFEVTYVDENMRITRGDRGELRVFVIA

SEQ ID NO: 108792 - protein, 277 aa, Zea mays subsp. mays
  misc_feature (1)..(277): Ceres Seq. ID no. 13599281
  misc_feature (80)..(275): Pfam Name: PAP_fibrillin Pfam Description: PAP_fibrillin
  misc_feature (81)..(277): Homolog of NCBI NO: 16329838 NR Description: fibrillin [Synechocystis sp. PCC 6803]
  misc_feature (81)..(273): Homolog of NCBI NO: 22297962 NR Description: fibrillin [Thermosynechococcus elongatus BP-1]
  misc_feature (81)..(275): Homolog of NCBI NO: 23041005 NR Description: hypothetical protein [Trichodesmium erythraeum
  misc_feature (81)..(277): Homolog of NCBI NO: 5020103 NR Description: fibrillin [Nostoc sp. PCC 8009]
  misc_feature (81)..(277): Homolog of NCBI NO: 17231810 NR Description: fibrillin [Nostoc sp. PCC 7120]
  misc_feature (81)..(277): Homolog of NCBI NO: 23126201 NR Description: hypothetical protein [Nostoc punctiforme]
  misc_feature (1)..(277): Homolog of NCBI NO: 21592536 NR Description: unknown [Arabidopsis thaliana]
  misc_feature (1)..(277): Homolog of NCBI NO: 18403751 NR Description: plastid-lipid associated protein PAP/fibrillin
MAASSALSSPALLSNNRSPPSCGSVRRSISSSPVLIATPRSSRLSFTIPERRSLVVKSTVGEVSFREPATSGDKEGIESLKLKLLRVVSGLNRGLVASVDDLQSAEAAAKLLEAAGGPVDLTNDLDKLQGKWRLLYSSAFSSRSLGGSRPGLPTGRLIPVTLGQVFQRIDVFSKDFDNIAEVELGAPWPFPPLEATATLAHKFELLGTCKIKITFEKTTVKTSGNLAQIPPFEIPRLPDSFRPPSNPGTGDFEVTYVDENMRITRGDRGELRVFVIA

SEQ ID NO: 108793 - DNA, 842 bp, Zea mays subsp. mays
  misc_feature (1)..(842): Ceres Seq. ID no. 13599510
atatcaagctactgagttctgactatccaacttaaaattatattatcttttcgacttcagattctcctctatttcactcaaacactaaagcttcagaaaatggcaatggcgtcgtttaacatgcagtcagtcttcgccggtggactgaccactcgcaagatcaacacgaacaagctttgctttgccggaaacttccataatctcaagaggaattgtcccgtgggagtgagatgtatggctgagggagaaccaatgaaagatgagtctgcaccttcgacctcggcgtctcagcctttgcccaagtcatcgtcgccaccaccacctcctcctactaaacctaaggtgagcacaaagtttagcgacttgctagcgttcagcggtccagcaccggaaagaataaacggtcgtttagctatggttggattcgtggctgcgttggcggttgaactttccaagggtgaaaacgttttagctcagatctccgacggtggtgtctcgtggttcctcggtacggcggcgatcttgacgcttgcgtcgcttgtgccccttttcaagggcataacagccgagtccaagtccaaaggttttatgacgtcagacgctgagctttggaatgggcgttttgcgatgcttggtttgttcgcgctggcgttcactgagtttgtcaagggtgggactctcgtttgagaaagaagagattgtgtattgcaaaatttgcccctgaatcctgtatagtattctggcttgttttaggcctactctgtgtcttttacatatggattagtgacatttgaaactttgggttaaaacactttgagtttagttaaagcagtggtaatggt

SEQ ID NO: 108794 - protein, 195 aa, Zea mays subsp. mays
  misc_feature (1)..(195): Ceres Seq. ID no. 13599511
  misc_feature (1)..(192): Homolog of NCBI NO: 28194659 NR Description: putative early light induced protein [Arachis
  misc_feature (8)..(195): Homolog of NCBI NO: 25315849 NR Description: early light-inducable protein [imported] -
  misc_feature (1)..(195): Homolog of NCBI NO: 7488128 NR Description: probable light induced protein - Arabidopsis
  misc_feature (1)..(195): Homolog of NCBI NO: 18414282 NR Description: expressed protein [Arabidopsis thaliana]
  misc_feature (1)..(195): Homolog of NCBI NO: 21618071 NR Description: light-induced protein-like protein [Arabidopsis
  misc_feature (1)..(195): Homolog of NCBI NO: 15228866 NR Description: early light-induced protein [Arabidopsis
  misc_feature (1)..(195): Homolog of NCBI NO: 38123375 NR Description: ELIP [Brassica rapa subsp. pekinensis]
MAMASFNMQSVFAGGLTTRKINTNKLCFAGNFHNLKRNCPVGVRCMAEGEPMKDESAPSTSASQPLPKSSSPPPPPPTKPKVSTKFSDLLAFSGPAPERINGRLAMVGFVAALAVELSKGENVLAQISDGGVSWFLGTAAILTLASLVPLFKGITAESKSKGFMTSDAELWNGRFAMLGLFALAFTEFVKGGTLV

SEQ ID NO: 108795 - protein, 193 aa, Zea mays subsp. mays
  misc_feature (1)..(193): Ceres Seq. ID no. 13599512
  misc_feature (1)..(190): Homolog of NCBI NO: 28194659 NR Description: putative early light induced protein [Arachis
  misc_feature (6)..(193): Homolog of NCBI NO: 25315849 NR Description: early light-inducable protein [imported] -
  misc_feature (1)..(193): Homolog of NCBI NO: 7488128 NR Description: probable light induced protein - Arabidopsis
  misc_feature (1)..(193): Homolog of NCBI NO: 18414282 NR Description: expressed protein [Arabidopsis thaliana]
  misc_feature (1)..(193): Homolog of NCBI NO: 21618071 NR Description: light-induced protein-like protein [Arabidopsis
  misc_feature (1)..(193): Homolog of NCBI NO: 15228866 NR Description: early light-induced protein [Arabidopsis
  misc_feature (1)..(193): Homolog of NCBI NO: 38123375 NR Description: ELIP [Brassica rapa subsp. pekinensis]
MASFNMQSVFAGGLTTRKINTNKLCFAGNFHNLKRNCPVGVRCMAEGEPMKDESAPSTSASQPLPKSSSPPPPPPTKPKVSTKFSDLLAFSGPAPERINGRLAMVGFVAALAVELSKGENVLAQISDGGVSWFLGTAAILTLASLVPLFKGITAESKSKGFMTSDAELWNGRFAMLGLFALAFTEFVKGGTLV

SEQ ID NO: 108796 - protein, 188 aa, Zea mays subsp. mays
  misc_feature (1)..(188): Ceres Seq. ID no. 13599513
  misc_feature (1)..(185): Homolog of NCBI NO: 28194659 NR Description: putative early light induced protein [Arachis
  misc_feature (1)..(188): Homolog of NCBI NO: 25315849 NR Description: early light-inducable protein [imported] -
  misc_feature (1)..(188): Homolog of NCBI NO: 7488128 NR Description: probable light induced protein - Arabidopsis
  misc_feature (1)..(188): Homolog of NCBI NO: 18414282 NR Description: expressed protein [Arabidopsis thaliana]
  misc_feature (1)..(188): Homolog of NCBI NO: 21618071 NR Description: light-induced protein-like protein [Arabidopsis
  misc_feature (1)..(188): Homolog of NCBI NO: 15228866 NR Description: early light-induced protein [Arabidopsis
  misc_feature (1)..(188): Homolog of NCBI NO: 38123375 NR Description: ELIP [Brassica rapa subsp. pekinensis]
MQSVFAGGLTTRKINTNKLCFAGNFHNLKRNCPVGVRCMAEGEPMKDESAPSTSASQPLPKSSSPPPPPPTKPKVSTKFSDLLAFSGPAPERINGRLAMVGFVAALAVELSKGENVLAQISDGGVSWFLGTAAILTLASLVPLFKGITAESKSKGFMTSDAELWNGRFAMLGLFALAFTEFVKGGTLV

SEQ ID NO: 108797 - DNA, 753 bp, Zea mays subsp. mays
  misc_feature (1)..(753): Ceres Seq. ID no. 13599514
cttcttcctctccgcattccatcagtgtttgtttttgggtgaaactgacaaagagtgcgagaaaaatgagcggagccgggaagaaagtggcggatgtggcgttcaaagcgtcgaggacaatagattgggaagggatggcaaaggtccttgtcaccgatgaggctcgaagagagttctctaacctccgtcgcgctttcgacgaggtcaacactcagctccaaaccaagttcagccaggagcctgaacccattgattgggatttttacagaaagggtattggctctggcattgttgacatgtacaaggaagcttacgacagcgttgagattcccaagtacgtggacaatgttacccctgaatacaagccaaagtttgatgctttgttggtggaactgaaagaagcagaacagaaatctctcaaggagtctgaacggctagagaaagaaattattgatgtccaggagataagcaaaaagctcagcaccatgactgcagatgagtactttgagaagcaccccgaactcaagaagaagtttgatgacgagatccggaacgactactggggatactgattcatcatatttcttgtatctccggtctggaaatgaaactctctcttctctttttcttttgatgtgattttgtgagtgtcaaccataacataataaggaccactccatttacttaagcagtgtgttgagatattcattggagatccaatgagacaatgacgataaaaacccatttggttcc

SEQ ID NO: 108798 - protein, 189 aa, Zea mays subsp. mays
  misc_feature (1)..(189): Ceres Seq. ID no. 13599515
  misc_feature (22)..(189): Homolog of NCBI NO: 32352148 NR Description: hypothetical protein [Oryza sativa (japonica
  misc_feature (45)..(189): Homolog of NCBI NO: 17939851 NR Description: mitochondrial F0 ATP synthase D chain
  misc_feature (22)..(189): Homolog of NCBI NO: 15231176 NR Description: expressed protein [Arabidopsis thaliana]
SSSPHSISVCFWVKLTKSARKMSGAGKKVADVAFKASRTIDWEGMAKVLVTDEARREFSNLRRAFDEVNTQLQTKFSQEPEPIDWDFYRKGIGSGIVDMYKEAYDSVEIPKYVDNVTPEYKPKFDALLVELKEAEQKSLKESERLEKEIIDVQEISKKLSTMTADEYFEKHPELKKKFDDEIRNDYWGY

SEQ ID NO: 108799 - protein, 168 aa, Zea mays subsp. mays
  misc_feature (1)..(168): Ceres Seq. ID no. 13599516
  misc_feature (1)..(168): Homolog of NCBI NO: 32352148 NR Description: hypothetical protein [Oryza sativa (japonica
  misc_feature (24)..(168): Homolog of NCBI NO: 17939851 NR Description: mitochondrial F0 ATP synthase D chain
  misc_feature (1)..(168): Homolog of NCBI NO: 15231176 NR Description: expressed protein [Arabidopsis thaliana]
MSGAGKKVADVAFKASRTIDWEGMAKVLVTDEARREFSNLRRAFDEVNTQLQTKFSQEPEPIDWDFYRKGIGSGIVDMYKEAYDSVEIPKYVDNVTPEYKPKFDALLVELKEAEQKSLKESERLEKEIIDVQEISKKLSTMTADEYFEKHPELKKKFDDEIRNDYWGY

SEQ ID NO: 108800 - protein, 145 aa, Zea mays subsp. mays
  misc_feature (1)..(145): Ceres Seq. ID no. 13599517
  misc_feature (1)..(145): Homolog of NCBI NO: 32352148 NR Description: hypothetical protein [Oryza sativa (japonica
  misc_feature (1)..(145): Homolog of NCBI NO: 17939851 NR Description: mitochondrial F0 ATP synthase D chain
  misc_feature (1)..(145): Homolog of NCBI NO: 15231176 NR Description: expressed protein [Arabidopsis thaliana]
MAKVLVTDEARREFSNLRRAFDEVNTQLQTKFSQEPEPIDWDFYRKGIGSGIVDMYKEAYDSVEIPKYVDNVTPEYKPKFDALLVELKEAEQKSLKESERLEKEIIDVQEISKKLSTMTADEYFEKHPELKKKFDDEIRNDYWGY

SEQ ID NO: 108801 - DNA, 743 bp, Zea mays subsp. mays
  misc_feature (1)..(743): Ceres Seq. ID no. 12635134
accatcttcccacttccctttgagaaagaaaacagaacaaagaaaaagaaagaaagcaaacagaaacaaatggcactgagaatgtgggcttcctctacagcaaacgctctcaagctctcttcttctgcatccagatctcatctccttccagctttctccatctccagatgcttctcctcagtgttggaaggacttaagtatgcaaattcacatgagtgggtgaaacatgaaggctcagtggctactattggcatcagtgaccatgcccaggatcatttaggagaagttgtgtttgtggagctgcctgaagaaaaaagttcagtgaccaaagaaaaaaactttggagcagtggagagtgtgaaggcaacaagtgagattatatctccaatctctggtgaagtcatcgaggttaacacaaagctcgctgattcacctggcttgattaactcaagcccttacgaagatggttggatgataaaggtgaaaccaagcaaccccgcagagctggaatccttgatgggtccaaaggaatacaccaagttctgcgaagaggaagatgctgctcactagggtttcttcgtctttcccagtatgtcctaaacaaaaagcaaaacaagagagaacccatgctaaatgtttcaatcttttcactacttctcaatgtttcctacctctgtatcaaatttgtatctctgtaatactgttttggttaaaaatcattcgatgagtctcaagagagcttt

SEQ ID NO: 108802 - protein, 189 aa, Zea mays subsp. mays
  misc_feature (1)..(189): Ceres Seq. ID no. 12635135
  misc_feature (65)..(185): Pfam Name: Glycine cleavage H-protein Pfam Description: Glycine cleavage H-protein
  misc_feature (24)..(188): Homolog of NCBI NO: 1362140 NR Description: H-protein precursor - Flaveria trinervia
  misc_feature (25)..(189): Homolog of NCBI NO: 2119600 NR Description: glycine cleavage system protein H precursor
  misc_feature (24)..(189): Homolog of NCBI NO: 3688309 NR Description: H-Protein precursor [Flaveria pringlei]
  misc_feature (24)..(189): Homolog of NCBI NO: 1346118 NR Description: Glycine cleavage system H protein, mitochondrial
  misc_feature (24)..(189): Homolog of NCBI NO: 2887286 NR Description: H protein [Flaveria anomala]
  misc_feature (24)..(189): Homolog of NCBI NO: 2499417 NR Description: Glycine cleavage system H protein, mitochondrial
  misc_feature (24)..(189): Homolog of NCBI NO: 2147453 NR Description: glycine cleavage system protein H precursor
  misc_feature (24)..(189): Homolog of NCBI NO: 121080 NR Description: Glycine cleavage system H protein, mitochondrial
  misc_feature (24)..(189): Homolog of NCBI NO: 15226973 NR Description: glycine decarboxylase complex H-protein
  misc_feature (24)..(189): Homolog of NCBI NO: 15223217 NR Description: glycine cleavage system H protein precursor,
TIFPLPFEKENRTKKKKESKQKQMALRMWASSTANALKLSSSASRSHLLPAFSISRCFSSVLEGLKYANSHEWVKHEGSVATIGISDHAQDHLGEVVFVELPEEKSSVTKEKNFGAVESVKATSEIISPISGEVIEVNTKLADSPGLINSSPYEDGWMIKVKPSNPAELESLMGPKEYTKFCEEEDAAH

SEQ ID NO: 108803 - protein, 166 aa, Zea mays subsp. mays; identical to SEQ ID NO: 51896
  misc_feature (1)..(166): Ceres Seq. ID no. 12635136
  misc_feature (42)..(162): Pfam Name: Glycine cleavage H-protein Pfam Description: Glycine cleavage H-protein
  misc_feature (1)..(165): Homolog of NCBI NO: 1362140 NR Description: H-protein precursor - Flaveria trinervia
  misc_feature (2)..(166): Homolog of NCBI NO: 2119600 NR Description: glycine cleavage system protein H precursor
  misc_feature (1)..(166): Homolog of NCBI NO: 3688309 NR Description: H-Protein precursor [Flaveria pringlei]
  misc_feature (1)..(166): Homolog of NCBI NO: 1346118 NR Description: Glycine cleavage system H protein, mitochondrial
  misc_feature (1)..(166): Homolog of NCBI NO: 2887286 NR Description: H protein [Flaveria anomala]
  misc_feature (1)..(166): Homolog of NCBI NO: 2499417 NR Description: Glycine cleavage system H protein, mitochondrial
  misc_feature (1)..(166): Homolog of NCBI NO: 2147453 NR Description: glycine cleavage system protein H precursor
  misc_feature (1)..(166): Homolog of NCBI NO: 121080 NR Description: Glycine cleavage system H protein, mitochondrial
  misc_feature (1)..(166): Homolog of NCBI NO: 15226973 NR Description: glycine decarboxylase complex H-protein
  misc_feature (1)..(166): Homolog of NCBI NO: 15223217 NR Description: glycine cleavage system H protein precursor,

SEQ ID NO: 108804 - protein, 162 aa, Zea mays subsp. mays; identical to SEQ ID NO: 51897
  misc_feature (1)..(162): Ceres Seq. ID no. 12635137
  misc_feature (38)..(158): Pfam Name: Glycine cleavage H-protein Pfam Description: Glycine cleavage H-protein
  misc_feature (1)..(161): Homolog of NCBI NO: 1362140 NR Description: H-protein precursor - Flaveria trinervia
  misc_feature (1)..(162): Homolog of NCBI NO: 2119600 NR Description: glycine cleavage system protein H precursor
  misc_feature (1)..(162): Homolog of NCBI NO: 3688309 NR Description: H-Protein precursor [Flaveria pringlei]
  misc_feature (1)..(162): Homolog of NCBI NO: 1346118 NR Description: Glycine cleavage system H protein, mitochondrial
  misc_feature (1)..(162): Homolog of NCBI NO: 2887286 NR Description: H protein [Flaveria anomala]
  misc_feature (1)..(162): Homolog of NCBI NO: 2499417 NR Description: Glycine cleavage system H protein, mitochondrial
  misc_feature (1)..(162): Homolog of NCBI NO: 2147453 NR Description: glycine cleavage system protein H precursor
  misc_feature (1)..(162): Homolog of NCBI NO: 121080 NR Description: Glycine cleavage system H protein, mitochondrial
  misc_feature (1)..(162): Homolog of NCBI NO: 15226973 NR Description: glycine decarboxylase complex H-protein
  misc_feature (1)..(162): Homolog of NCBI NO: 15223217 NR Description: glycine cleavage system H protein precursor,

SEQ ID NO: 108805 - DNA, 796 bp, Zea mays subsp. mays
  misc_feature (1)..(796): Ceres Seq. ID no. 12635141
cacgctcgcccctcctatcccgtcatctctttcctcccccctcggcgcagcaacagagagatggcggcgctggcgacggcgacggcggtccacgggagccaggcggcgggcgcgctggccgtcgccgcgcagaggctgctggtcctcctcgctctcgcgatggaagctgtaaacaatggagccgatatcttcactgaagaccagcaagaaattatcaagcaatttggcagaatcaaatccgagactgtgcctgagaacaaggatgcagggtctgatgacgatgacgacgatgatgaagatgaggatgatgaaactggtgatgctgatgatgatgatgccgatgctggggaagacttctcaggtgaagaaggcgaggacgatgacgaggacgacgaccctgaggcgaatggcgacgacgctggtgcggggagcgacgatgatgatggtgatgacgatgatgatgatggtgaagatggcgaggatgacgacgatgatgatgaggacgaggatgaggaggacgaggaagatgaggaccagccgccggccaagaagaagaaatgatctgccttcctgctgtcagtgtttcagtccgttagtttgtctgctgtctagatgatgattgagcgggtctggtacacaccgacctatgtagcttctgtgtcgtggtggtttggtgtctcatagggtagaacattgaacttctaatgttgtttcctgcgttgtgcaagtagtcttaacatttcggtgttgatgtgctgtgtttattggagctgtgataccattcaatctaattctt

SEQ ID NO: 108806 - protein, 186 aa, Zea mays subsp. mays
  misc_feature (1)..(186): Ceres Seq. ID no. 12635142
  misc_feature (57)..(185): Pfam Name: Mpp10 protein Pfam Description: Mpp10 protein
  misc_feature (85)..(178): Homolog of NCBI NO: 35210494 NR Description: aspartic acid-rich protein aspolin2 [Theragra
  misc_feature (85)..(178): Homolog of NCBI NO: 35210494 NR Description: aspartic acid-rich protein aspolin2 [Theragra
  misc_feature (85)..(178): Homolog of NCBI NO: 35210494 NR Description: aspartic acid-rich protein aspolin2 [Theragra
  misc_feature (85)..(178): Homolog of NCBI NO: 35210494 NR Description: aspartic acid-rich protein aspolin2 [Theragra
  misc_feature (85)..(178): Homolog of NCBI NO: 35210492 NR Description: aspartic acid-rich protein aspolin1 [Theragra
  misc_feature (81)..(178): Homolog of NCBI NO: 33284873 NR Description: SI:bZ1G18.2 (novel protein similar to human
  misc_feature (85)..(178): Homolog of NCBI NO: 35210494 NR Description: aspartic acid-rich protein aspolin2 [Theragra
  misc_feature (72)..(178): Homolog of NCBI NO: 35210494 NR Description: aspartic acid-rich protein aspolin2 [Theragra
  misc_feature (72)..(178): Homolog of NCBI NO: 35210492 NR Description: aspartic acid-rich protein aspolin1 [Theragra
  misc_feature (39)..(186): Homolog of NCBI NO: 18397066 NR Description: expressed protein
HARPSYPVISFLPPRRSNREMAALATATAVHGSQAAGALAVAAQRLLVLLALAMEAVNNGADIFTEDQQEIIKQFGRIKSETVPENKDAGSDDDDDDDEDEDDETGDADDDDADAGEDFSGEEGEDDDEDDDPEANGDDAGAGSDDDDGDDDDDDGEDGEDDDDDDEDEDEEDEEDEDQPPAKKKK

SEQ ID NO: 108807 - protein, 166 aa, Zea mays subsp. mays
  misc_feature (1)..(166): Ceres Seq. ID no. 12635143
  misc_feature (37)..(165): Pfam Name: Mpp10 protein Pfam Description: Mpp10 protein
  misc_feature (65)..(158): Homolog of NCBI NO: 35210494 NR Description: aspartic acid-rich protein aspolin2 [Theragra
  misc_feature (65)..(158): Homolog of NCBI NO: 35210494 NR Description: aspartic acid-rich protein aspolin2 [Theragra
  misc_feature (65)..(158): Homolog of NCBI NO: 35210494 NR Description: aspartic acid-rich protein aspolin2 [Theragra
  misc_feature (65)..(158): Homolog of NCBI NO: 35210492 NR Description: aspartic acid-rich protein aspolin1 [Theragra
  misc_feature (65)..(158): Homolog of NCBI NO: 35210492 NR Description: aspartic acid-rich protein aspolin1 [Theragra
  misc_feature (61)..(158): Homolog of NCBI NO: 33284873 NR Description: SI:bZ1G18.2 (novel protein similar to human
  misc_feature (65)..(158): Homolog of NCBI NO: 35210494 NR Description: aspartic acid-rich protein aspolin2 [Theragra
  misc_feature (52)..(158): Homolog of NCBI NO: 35210494 NR Description: aspartic acid-rich protein aspolin2 [Theragra
  misc_feature (52)..(158): Homolog of NCBI NO: 35210492 NR Description: aspartic acid-rich protein aspolin1 [Theragra
  misc_feature (19)..(166): Homolog of NCBI NO: 18397066 NR Description: expressed protein
MAALATATAVHGSQAAGALAVAAQRLLVLLALAMEAVNNGADIFTEDQQEIIKQFGRIKSETVPENKDAGSDDDDDDDEDEDDETGDADDDDADAGEDFSGEEGEDDDEDDDPEANGDDAGAGSDDDDGDDDDDDGEDGEDDDDDDEDEDEEDEEDEDQPPAKKKK

SEQ ID NO: 108808 - protein, 146 aa, Zea mays subsp. mays
  misc_feature (1)..(146): Ceres Seq. ID no. 12635144
MEPISSLKTSKKLSSNLAESNPRLCLRTRMQGLMTMTTMMKMRMMKLVMLMMMMPMLGKTSQVKKARTMTRTTTLRRMATTLVRGATMMMVMTMMMMVKMARMTTMMMRTRMRRTRKMRTSRRPRRRNDLPSCCQCFSPLVCLLSR

SEQ ID NO: 108809 - DNA, 750 bp, Zea mays subsp. mays
  misc_feature (1)..(750): Ceres Seq. ID no. 13587164
ggcttcattcataaggggagatcattacaaacttgagaccaactcatcttgagtcggcctcgtcacccctgggtcattacatcacagtacactacactgctactcacactacactacgatactaactaacactaccttattctactactactactattgttacctatactaatatttacaccaacggcgttatgtcgctggccatgccgtcgccgccgtcgccctcgccgccatcgcccttgctgctgtcatcgcccttgccgtcgcccttgctactgtcgtcgtcgtcgcccttgctatctccgtcgccatcaccctcgccatcttcgccgtcaccatcgccgccgcccttgccgtcgtcgttgttgccgctgccgtcgtcctcgtcgccgttgcttttgccgctgctccactcctcagagttggaggagtcttccacctagggttgaaaacggtttcggaatttttcggtttttcggataccgttttcgattttttccgaccagattcaacaataacggtatttttcggaatcgaaatcggttatcggaattttataccggaatcggtatcgaaatcggtacagccttttaccgaccgtttccttcgattaccgaatttaatcggaatttaccgattttaaatttcgaaattttccgaagatactaaaaaacaaaagtatttcaaaaataaaaaataaagtaggcagtcaggcccacacttaagtcaggcctagctattcagaaaaat

SEQ ID NO: 108810 - protein, 83 aa, Zea mays subsp. mays
  misc_feature (1)..(83): Ceres Seq. ID no. 13587165
  misc_feature (6)..(67): Pfam Name: Extensin-like region Pfam Description: Extensin-like region
  misc_feature (6)..(67): Homolog of NCBI NO: 37651399 NR Description: unknown [Choristoneura fumiferana defective
  misc_feature (6)..(72): Homolog of NCBI NO: 20138131 NR Description: Vegetative cell wall protein gp1 precursor
  misc_feature (4)..(67): Homolog of NCBI NO: 1076211 NR Description: hypothetical protein VSP-3 - Chlamydomonas
  misc_feature (6)..(71): Homolog of NCBI NO: 1076211 NR Description: hypothetical protein VSP-3 - Chlamydomonas
  misc_feature (6)..(78): Homolog of NCBI NO: 37651399 NR Description: unknown [Choristoneura fumiferana defective
  misc_feature (1)..(62): Homolog of NCBI NO: 16331063 NR Description: unknown protein [Synechocystis sp. PCC 6803]
  misc_feature (2)..(78): Homolog of NCBI NO: 30387315 NR Description: unknown [Choristoneura fumiferana MNPV]
  misc_feature (6)..(67): Homolog of NCBI NO: 28912428 NR Description: serine-proline rich repeat protein [Lupinus
  misc_feature (6)..(82): Homolog of NCBI NO: 1076211 NR Description: hypothetical protein VSP-3 - Chlamydomonas
  misc_feature (6)..(77): Homolog of NCBI NO: 20138131 NR Description: Vegetative cell wall protein gp1 precursor
MSLAMPSPPSPSPPSPLLLSSPLPSPLLLSSSSPLLSPSPSPSPSSPSPSPPPLPSSLLPLPSSSSPLLLPLLHSSELEESST

SEQ ID NO: 108811 - protein, 79 aa, Zea mays subsp. mays
  misc_feature (1)..(79): Ceres Seq. ID no. 13587166
  misc_feature (2)..(63): Pfam Name: Extensin-like region Pfam Description: Extensin-like region
  misc_feature (2)..(68): Homolog of NCBI NO: 20138131 NR Description: Vegetative cell wall protein gp1 precursor
  misc_feature (1)..(63): Homolog of NCBI NO: 1076211 NR Description: hypothetical protein VSP-3 - Chlamydomonas
  misc_feature (2)..(67): Homolog of NCBI NO: 1076211 NR Description: hypothetical protein VSP-3 - Chlamydomonas
  misc_feature (2)..(74): Homolog of NCBI NO: 37651399 NR Description: unknown [Choristoneura fumiferana defective
  misc_feature (1)..(58): Homolog of NCBI NO: 16331063 NR Description: unknown protein [Synechocystis sp. PCC 6803]
  misc_feature (1)..(74): Homolog of NCBI NO: 30387315 NR Description: unknown [Choristoneura fumiferana MNPV]
  misc_feature (2)..(63): Homolog of NCBI NO: 28912428 NR Description: serine-proline rich repeat protein [Lupinus
  misc_feature (2)..(78): Homolog of NCBI NO: 1076211 NR Description: hypothetical protein VSP-3 - Chlamydomonas
  misc_feature (2)..(73): Homolog of NCBI NO: 20138131 NR Description: Vegetative cell wall protein gp1 precursor
  misc_feature (2)..(63): Homolog of NCBI NO: 37651399 NR Description: unknown [Choristoneura fumiferana defective
MPSPPSPSPPSPLLLSSPLPSPLLLSSSSPLLSPSPSPSPSSPSPSPPPLPSSLLPLPSSSSPLLLPLLHSSELEESST

SEQ ID NO: 108812 - DNA, 1113 bp, Zea mays subsp. mays
  misc_feature (1)..(1113): Ceres Seq. ID no. 12589816
acacaccagtaccactgcacaaaagcacactctgttcggcttgccttgtcctttttccttgccatatggctaccaagatggtcctgtgtcgctttgtagccctcgcggctgtcgcctgcctcctccgccctggcgcgcccgtcgagctccaccgcaagctctccgggtggtccgacgacgcgggcgcgacgtggtacggcgcagccaccggcgctgggagcgacggtggtgcatgcgggtaccagaacgccgtcgaccagccgccgttctcgtccatgatcgccgccggcagtccatccatcttccagaacggcaagggctgcggcgcctgctatcaggtgaaatgcaccgggcacgcgtcgtgctccggcagcccggtgaccgtggtcctcaccgacgagtgccccggcggcgcgtgcctggacgagcccgtgcacttcgacctgagcggcacggcgttcggagccatggcgaaggacggccaggcggaccagctccgcggcgccggacacctcaagatccagtacactcgggtgccgtgcaactggcgagggctggacatcgcgttcaaggtggacgccggctcgaacccgaactacttcgcggtgctcatcgagtacgagtccggggacggcgagctggagtccgtggagctcatgcagcgcggcggcggcggcgggggggcgtgggcgccgatgcagcagtcgtggggcgcggtgtggcggtacaactccggcgacaccctgcaggcgcccttctccgtccgcctcacctccggctccggcaggacggtcgtcgccagcaacgtcatccccgcggggtggacgcccggcgccacgtaccgctcggtcgtcaacttcgacaactaacgaggacggacggacggaccgaaataacggcacgcccgcccgcccgcccgccggccggccgccgggatggccgtgaaaggcgtggcgctatagcttttagtttatgattcgagctgtgcgcgggtgcctactatgccgacgacgctactgtactgttgcgtgcgtgacatgtgcaaatccgcgcagtcaccgtgtaccgccgggaatggcgtgtgtttctttgaataaaataaaggctggaccg

SEQ ID NO: 108813 - protein, 324 aa, Zea mays subsp. mays
  misc_feature (1)..(324): Ceres Seq. ID no. 12589817
  misc_feature (58)..(242): Pfam Name: HlyD family secretion protein Pfam Description: HlyD family secretion protein
  misc_feature (21)..(316): Homolog of NCBI NO: 23335597 NR Description: hypothetical protein [Bifidobacterium longum
HTSTTAQKHTLFGLPCPFSLPYGYQDGPVSLCSPRGCRLPPPPWRARRAPPQALRVVRRRGRDVVRRSHRRWERRWCMRVPERRRPAAVLVHDRRRQSIHLPERQGLRRLLSGEMHRARVVLRQPGDRGPHRRVPRRRVPGRARALRPERHGVRSHGEGRPGGPAPRRRTPQDPVHSGAVQLARAGHRVQGGRRLEPELLRGAHRVRVRGRRAGVRGAHAARRRRRGGVGADAAVVGRGVAVQLRRHPAGALLRPPHLRLRQDGRRQQRHPRGVDARRHVPLGRQLRQLTRTDGRTEITARPPARPPAGRRDGRERRGAIAFSL

SEQ ID NO: 108814 - protein, 288 aa, Zea mays subsp. mays
  misc_feature (1)..(288): Ceres Seq. ID no. 12589818
  misc_feature (187)..(271): Pfam Name: Pollen allergen Pfam Description: Pollen allergen
  misc_feature (55)..(286): Homolog of NCBI NO: 40363749 NR Description: putative beta-expansin [Triticum aestivum]
  misc_feature (55)..(286): Homolog of NCBI NO: 14193767 NR Description: beta-expansin 4 [Zea mays]
  misc_feature (54)..(286): Homolog of NCBI NO: 1076486 NR Description: cim1 protein - soybean
  misc_feature (56)..(286): Homolog of NCBI NO: 34101047 NR Description: beta-expansin 1 precursor [Hordeum vulgare]
  misc_feature (54)..(286): Homolog of NCBI NO: 16517013 NR Description: beta-expansin [Oryza sativa]
  misc_feature (55)..(286): Homolog of NCBI NO: 8118428 NR Description: beta-expansin [Oryza sativa]
  misc_feature (55)..(286): Homolog of NCBI NO: 16303229 NR Description: beta-expansin 5 [Oryza sativa]
  misc_feature (28)..(288): Homolog of NCBI NO: 16517017 NR Description: beta-expansin [Oryza sativa]
  misc_feature (25)..(288): Homolog of NCBI NO: 16303233 NR Description: beta-expansin [Oryza sativa]
  misc_feature (25)..(286): Homolog of NCBI NO: 21666630 NR Description: beta-expansin [Oryza sativa]
TPVPLHKSTLCSACLVLFPCHMATKMVLCRFVALAAVACLLRPGAPVELHRKLSGWSDDAGATWYGAATGAGSDGGACGYQNAVDQPPFSSMIAAGSPSIFQNGKGCGACYQVKCTGHASCSGSPVTVVLTDECPGGACLDEPVHFDLSGTAFGAMAKDGQADQLRGAGHLKIQYTRVPCNWRGLDIAFKVDAGSNPNYFAVLIEYESGDGELESVELMQRGGGGGGAWAPMQQSWGAVWRYNSGDTLQAPFSVRLTSGSGRTVVASNVIPAGWTPGATYRSVVNFDN

SEQ ID NO: 108815 - protein, 267 aa, Zea mays subsp. mays
  misc_feature (1)..(267): Ceres Seq. ID no. 12589819
  misc_feature (166)..(250): Pfam Name: Pollen allergen Pfam Description: Pollen allergen
  misc_feature (34)..(265): Homolog of NCBI NO: 40363749 NR Description: putative beta-expansin [Triticum aestivum]
  misc_feature (34)..(265): Homolog of NCBI NO: 14193767 NR Description: beta-expansin 4 [Zea mays]
  misc_feature (33)..(265): Homolog of NCBI NO: 1076486 NR Description: cim1 protein - soybean
  misc_feature (35)..(265): Homolog of NCBI NO: 34101047 NR Description: beta-expansin 1 precursor [Hordeum vulgare]
  misc_feature (33)..(265): Homolog of NCBI NO: 16517013 NR Description: beta-expansin [Oryza sativa]
  misc_feature (34)..(265): Homolog of NCBI NO: 8118428 NR Description: beta-expansin [Oryza sativa]
  misc_feature (34)..(265): Homolog of NCBI NO: 16303229 NR Description: beta-expansin 5 [Oryza sativa]
  misc_feature (7)..(267): Homolog of NCBI NO: 16517017 NR Description: beta-expansin [Oryza sativa]
  misc_feature (4)..(267): Homolog of NCBI NO: 16303233 NR Description: beta-expansin [Oryza sativa]
  misc_feature (4)..(265): Homolog of NCBI NO: 21666630 NR Description: beta-expansin [Oryza sativa]
MATKMVLCRFVALAAVACLLRPGAPVELHRKLSGWSDDAGATWYGAATGAGSDGGACGYQNAVDQPPFSSMIAAGSPSIFQNGKGCGACYQVKCTGHASCSGSPVTVVLTDECPGGACLDEPVHFDLSGTAFGAMAKDGQADQLRGAGHLKIQYTRVPCNWRGLDIAFKVDAGSNPNYFAVLIEYESGDGELESVELMQRGGGGGGAWAPMQQSWGAVWRYNSGDTLQAPFSVRLTSGSGRTVVASNVIPAGWTPGATYRSVVNFDN

SEQ ID NO: 108816 - DNA, 664 bp, Zea mays subsp. mays
  misc_feature (1)..(664): Ceres Seq. ID no. 12635152
agattgaaagacccatgtctctgttcccgatcttaaccgcctcgtttctcttcctcttctgcgttccgttcaccaccgcagctgcagacggcgatttgccgacggcgtacaccctcctccaaagctacaacttccccgtcgggattctccccaaaggagtcttgtcgtacgatctggacgaacccacggggaagttccacgcgtatttcgacaagtcgtgtagcttcgccctccaaggctcttaccagttggattacaaatcgaccatctccggcgtcatatcggagaacaagctcacgaagctcaccggcgtgaaggtgaaagttctcttcttgtggctcaacatcgtggaggttatcagggacggagacgagctcgagttctccgtcgggatcacgtcggcgaacttcgcgatcgaggagttttacgagtcgccgcggtgtgggtgcgggttcgattgcaatggattgaagtcgaaaacagataatttgcaaatgatgggactttcttacaaaacctgaactctttggatgcttttttttgttcttgctccaatcattggacaagttctttgtttcaacaattggtttattgttcatctcttcttaggatcgttctatcaatcaacgtatgtattgtacttacaatcaataaaagtacatcg

SEQ ID NO: 108817 - protein, 172 aa, Zea mays subsp. mays
  misc_feature (1)..(172): Ceres Seq. ID no. 12635153
  misc_feature (15)..(153): Pfam Name: Protein of unknown function, DUF538 Pfam Description: Protein of unknown function, DUF538
  misc_feature (7)..(159): Homolog of NCBI NO: 18417957 NR Description: putative protein
  misc_feature (5)..(147): Homolog of NCBI NO: 18420052 NR Description: unknown protein; protein id: At5g19860.1
  misc_feature (4)..(155): Homolog of NCBI NO: 28273408 NR Description: unknown protein [Oryza sativa (japonica
  misc_feature (10)..(147): Homolog of NCBI NO: 34912320 NR Description: P0451D05.23 [Oryza sativa (japonica
  misc_feature (16)..(153): Homolog of NCBI NO: 21553750 NR Description: unknown [Arabidopsis thaliana]
  misc_feature (16)..(153): Homolog of NCBI NO: 18379012 NR Description: Expressed protein
  misc_feature (15)..(156): Homolog of NCBI NO: 15235335 NR Description: putative protein; protein id: At4g02360.1
  misc_feature (5)..(164): Homolog of NCBI NO: 21554037 NR Description: unknown [Arabidopsis thaliana]
  misc_feature (5)..(164): Homolog of NCBI NO: 18411923 NR Description: coded for by A. thaliana cDNA R64991
  misc_feature (5)..(160): Homolog of NCBI NO: 18379014 NR Description: Expressed protein
IERPMSLFPILTASFLFLFCVPFTTAAADGDLPTAYTLLQSYNFPVGILPKGVLSYDLDEPTGKFHAYFDKSCSFALQGSYQLDYKSTISGVISENKLTKLTGVKVKVLFLWLNIVEVIRDGDELEFSVGITSANFAIEEFYESPRCGCGFDCNGLKSKTDNLQMMGLSYKT

SEQ ID NO: 108818 - protein, 168 aa, Zea mays subsp. mays
  misc_feature (1)..(168): Ceres Seq. ID no. 12635154
  misc_feature (11)..(149): Pfam Name: Protein of unknown function, DUF538 Pfam Description: Protein of unknown function, DUF538
  misc_feature (3)..(155): Homolog of NCBI NO: 18417957 NR Description: putative protein
  misc_feature (1)..(143): Homolog of NCBI NO: 18420052 NR Description: unknown protein; protein id: At5g19860.1
  misc_feature (1)..(151): Homolog of NCBI NO: 28273408 NR Description: unknown protein [Oryza sativa (japonica
  misc_feature (6)..(143): Homolog of NCBI NO: 34912320 NR Description: P0451D05.23 [Oryza sativa (japonica
  misc_feature (12)..(149): Homolog of NCBI NO: 21553750 NR Description: unknown [Arabidopsis thaliana]
  misc_feature (12)..(149): Homolog of NCBI NO: 18379012 NR Description: Expressed protein
  misc_feature (11)..(152): Homolog of NCBI NO: 15235335 NR Description: putative protein; protein id: At4g02360.1
  misc_feature (1)..(160): Homolog of NCBI NO: 21554037 NR Description: unknown [Arabidopsis thaliana]
  misc_feature (1)..(160): Homolog of NCBI NO: 18411923 NR Description: coded for by A. thaliana cDNA R64991
  misc_feature (1)..(156): Homolog of NCBI NO: 18379014 NR Description: Expressed protein
MSLFPILTASFLFLFCVPFTTAAADGDLPTAYTLLQSYNFPVGILPKGVLSYDLDEPTGKFHAYFDKSCSFALQGSYQLDYKSTISGVISENKLTKLTGVKVKVLFLWLNIVEVIRDGDELEFSVGITSANFAIEEFYESPRCGCGFDCNGLKSKTDNLQMMGLSYKT

SEQ ID NO: 108819 - DNA, 1152 bp, Zea mays subsp. mays
  misc_feature (1)..(1152): Ceres Seq. ID no. 13587174
aaattcccacgttgctctcccgtcttccctcctcccctccccaaacccccaccccaacgcccagatctaccctccccatttacagctttctctccggccctgcgccccagggcaccgcgccgcccgaaaccgtcggcgccggcgcgatgcgcgtgccatgctgctcgttatgcaacgtcagatatgacgaggaggagcggacgccgctgctcctccactgcggccatggattctgccgcgcgtgcctctcccgcatgctagcggcagcccccggagccacgctgccgtgcccgcgatgtcgccatccgaccgccgtaggcaactcagtctctgcgctgcggaagaacttccccattctatcgctcctctccgcatccccctcatccccgtctttcctccactccgactcggggtcatcctccgacggctccgaagatgaggatgacttcttcgcacggcccactcgccgccccgcgcccgcgcccgccgccgcgtcgcccggatgcagctccttcgacctcgcctcgcacccggacctcaagctcgcccgtcgcatcgggagcggcccgcctgggcccgccgggcaggacgtgtgggtcggcacgctgtctcgtggcggcggcggggtcaagcggtgcaagcaccaggtggcagtgaagagggtgccccaaaccgcgggggatgggctcgaggttgttcaagaggaggtggagcggctgaggcgtgcctccacatggtgtcggaacgtgtgcaccttccatggtgctgtgagggtcggcggccacctctgtttcgtgatggatcattatgtcgggtctgtgcaggcggagatgcggcagaatggtggacgcctcacgctggagcagattctcaggtgtggcattgcatcaaaatgtcggtacttagtaatattgtgcggctattctttctgctgctgtcttaccaataatcgctgcaaacatattacattgcaacatagctgctctcttttattattactcagtagtcagcaagaagcatgcctagctagaaccttcactaaatgtggcaaattgtgtacgtgtagtgtatgatagcttgctttgtgacatgtaaagtggttgccttgttaatggcgttatgcagtttgaactttgatttcattggttctgc

SEQ ID NO: 108820 - protein, 356 aa, Zea mays subsp. mays
  misc_feature (1)..(356): Ceres Seq. ID no. 13587175
  misc_feature (54)..(99): Pfam Name: Zinc finger, C3HC4 type (RING finger) Pfam Description: Zinc finger, C3HC4 type (RING finger)
  misc_feature (179)..(294): Homolog of NCBI NO: 22329080 NR Description: protein kinase family [Arabidopsis thaliana]
  misc_feature (47)..(293): Homolog of NCBI NO: 15240646 NR Description: ankyrin-repeat containing protein [Arabidopsis
IPTLLSRLPSSPPQTPTPTPRSTLPIYSFLSGPAPQGTAPPETVGAGAMRVPCCSLCNVRYDEEERTPLLLHCGHGFCRACLSRMLAAAPGATLPCPRCRHPTAVGNSVSALRKNFPILSLLSASPSSPSFLHSDSGSSSDGSEDEDDFFARPTRRPAPAPAAASPGCSSFDLASHPDLKLARRIGSGPPGPAGQDVWVGTLSRGGGGVKRCKHQVAVKRVPQTAGDGLEVVQEEVERLRRASTWCRNVCTFHGAVRVGGHLCFVMDHYVGSVQAEMRQNGGRLTLEQILRCGIASKCRYLVILCGYSFCCCLTNNRCKHITLQHSCSLLLLLSSQQEACLARTFTKCGKLCTCSV

SEQ ID NO: 108821 - protein, 308 aa, Zea mays subsp. mays
  misc_feature (1)..(308): Ceres Seq. ID no. 13587176
  misc_feature (6)..(51): Pfam Name: Zinc finger, C3HC4 type (RING finger) Pfam Description: Zinc finger, C3HC4 type (RING finger)
  misc_feature (131)..(246): Homolog of NCBI NO: 22329080 NR Description: protein kinase family [Arabidopsis thaliana]
  misc_feature (1)..(245): Homolog of NCBI NO: 15240646 NR Description: ankyrin-repeat containing protein [Arabidopsis
MRVPCCSLCNVRYDEEERTPLLLHCGHGFCRACLSRMLAAAPGATLPCPRCRHPTAVGNSVSALRKNFPILSLLSASPSSPSFLHSDSGSSSDGSEDEDDFFARPTRRPAPAPAAASPGCSSFDLASHPDLKLARRIGSGPPGPAGQDVWVGTLSRGGGGVKRCKHQVAVKRVPQTAGDGLEVVQEEVERLRRASTWCRNVCTFHGAVRVGGHLCFVMDHYVGSVQAEMRQNGGRLTLEQILRCGIASKCRYLVILCGYSFCCCLTNNRCKHITLQHSCSLLLLLSSQQEACLARTFTKCGKLCTCSV

SEQ ID NO: 108822 - protein, 272 aa, Zea mays subsp. mays
  misc_feature (1)..(272): Ceres Seq. ID no. 13587177
  misc_feature (95)..(210): Homolog of NCBI NO: 22329080 NR Description: protein kinase family [Arabidopsis thaliana]
  misc_feature (1)..(209): Homolog of NCBI NO: 15240646 NR Description: ankyrin-repeat containing protein [Arabidopsis
MLAAAPGATLPCPRCRHPTAVGNSVSALRKNFPILSLLSASPSSPSFLHSDSGSSSDGSEDEDDFFARPTRRPAPAPAAASPGCSSFDLASHPDLKLARRIGSGPPGPAGQDVWVGTLSRGGGGVKRCKHQVAVKRVPQTAGDGLEVVQEEVERLRRASTWCRNVCTFHGAVRVGGHLCFVMDHYVGSVQAEMRQNGGRLTLEQILRCGIASKCRYLVILCGYSFCCCLTNNRCKHITLQHSCSLLLLLSSQQEACLARTFTKCGKLCTCSV

SEQ ID NO: 108823 - DNA, 879 bp, Zea mays subsp. mays
  misc_feature (1)..(879): Ceres Seq. ID no. 12635608
actacaccagtcggcatggaggaggagctgacgctggtgggatactggtcgagcccgttcgcgctgcgcgcgcgcttcgccctcaacctcaagggcctcccctacgcgtacgtggaggaggtgggcctcttcgacggcaagagcccgctcctcctcgcctccaaccccgtgcacaagagggtgccggtgctcatccacaacggcaagcccgtccccgagtcgcagctcatcgtgcagtacgtcgaagaggctttcccggccagctccccgcgcttcctccctcccgacccgcacgagcgcgccgtcgctcgcttctgggcctcctacgtcgacggcgagctgctcagcgcgtggctgcccgtctacggcggacgcaccggcgaggagagggcagaggcggcggggcgggtcggcgccgccctggagacgctggagcgagcgttcggggagtgctccaaggggaagggcttcttcggcggggacacggtggggctcgtggacgtcgtgctcggcggcttcgtcgggtggctgcagacgtccgaggccatgtgcggcgtgaggctgctcgacgccgccgcgacgccgctgctggcggcctgggcggagcggtttcgcgcgctcgacggcgtcaaggaggtgatgccggatgcgcagaggctgctcgagtacaacctgatgaggcgagctcgcctcgggctgccgctgacccagccgccgccgccacagcatcaatagaatcagggctggctaatacaccacgtgcaaatagcctgtaccaataactgagcacgtatacctaccctgtgtatgtatttctaccttctgtaatgcactttctctaccgtaaaacgtgaaatttagtgaataccttttgcccct

SEQ ID NO: 108824 - protein, 259 aa, Zea mays subsp. mays
  misc_feature (1)..(259): Ceres Seq. ID no. 12635609
  misc_feature (43)..(247): Homolog of NCBI NO: 25989121 NR Description: putative PHA synthase [Streptomyces aureofaciens]
  misc_feature (70)..(191): Homolog of NCBI NO: 729206 NR Description: PROBABLE GLUTATHIONE S-TRANSFERASE (28 KD
  misc_feature (142)..(211): Homolog of NCBI NO: 15430719 NR Description: putative glutathione S-transferase OsGSTU11
YTSRHGGGADAGGILVEPVRAARALRPQPQGPPLRVRGGGGPLRRQEPAPPRLQPRAQEGAGAHPQRQARPRVAAHRAVRRRGFPGQLPALPPSRPARARRRSLLGLLRRRRAAQRVAARLRRTHRRGEGRGGGAGRRRPGDAGASVRGVLQGEGLLRRGHGGARGRRARRLRRVAADVRGHVRREAARRRRDAAAGGLGGAVSRARRRQGGDAGCAEAARVQPDEASSPRAAADPAAAATASIESGLANTPRANSLYQ

SEQ ID NO: 108825 - protein, 244 aa, Zea mays subsp. mays
  misc_feature (1)..(244): Ceres Seq. ID no. 12635610
  misc_feature (5)..(239): Homolog of NCBI NO: 2982262 NR Description: probable glutathione S-transferase [Picea mariana]
  misc_feature (2)..(230): Homolog of NCBI NO: 11385505 NR Description: glutathione S-transferase GST 27 [Zea mays]
  misc_feature (9)..(223): Homolog of NCBI NO: 20067421 NR Description: glutathione transferase [Triticum aestivum]
  misc_feature (5)..(229): Homolog of NCBI NO: 33304612 NR Description: tau class GST protein 3 [Oryza sativa (indica
  misc_feature (7)..(231): Homolog of NCBI NO: 37536340 NR Description: putative glutathione S-transferase
  misc_feature (9)..(223): Homolog of NCBI NO: 37536360 NR Description: putative glutathione S-transferase
  misc_feature (5)..(230): Homolog of NCBI NO: 37536280 NR Description: putative glutathione S-transferase
  misc_feature (5)..(230): Homolog of NCBI NO: 37536250 NR Description: putative glutathione S-transferase
  misc_feature (7)..(234): Homolog of NCBI NO: 11385525 NR Description: glutathione S-transferase GST 37 [Zea mays]
  misc_feature (8)..(238): Homolog of NCBI NO: 11385495 NR Description: glutathione S-transferase GST 22 [Zea mays]
TTPVGMEEELTLVGYWSSPFALRARFALNLKGLPYAYVEEVGLFDGKSPLLLASNPVHKRVPVLIHNGKPVPESQLIVQYVEEAFPASSPRFLPPDPHERAVARFWASYVDGELLSAWLPVYGGRTGEERAEAAGRVGAALETLERAFGECSKGKGFFGGDTVGLVDVVLGGFVGWLQTSEAMCGVRLLDAAATPLLAAWAERFRALDGVKEVMPDAQRLLEYNLMRRARLGLPLTQPPPPQHQ

SEQ ID NO: 108826 - protein, 239 aa, Zea mays subsp. mays
  misc_feature (1)..(239): Ceres Seq. ID no. 12635611
  misc_feature (1)..(224): Homolog of NCBI NO: 33304612 NR Description: tau class GST protein 3 [Oryza sativa (indica
  misc_feature (2)..(226): Homolog of NCBI NO: 37536340 NR Description: putative glutathione S-transferase
  misc_feature (4)..(218): Homolog of NCBI NO: 37536360 NR Description: putative glutathione S-transferase
  misc_feature (1)..(225): Homolog of NCBI NO: 37536280 NR Description: putative glutathione S-transferase
  misc_feature (1)..(225): Homolog of NCBI NO: 37536250 NR Description: putative glutathione S-transferase
  misc_feature (2)..(229): Homolog of NCBI NO: 11385525 NR Description: glutathione S-transferase GST 37 [Zea mays]
  misc_feature (3)..(233): Homolog of NCBI NO: 11385495 NR Description: glutathione S-transferase GST 22 [Zea mays]
  misc_feature (1)..(234): Homolog of NCBI NO: 2982262 NR Description: probable glutathione S-transferase [Picea mariana]
  misc_feature (1)..(225): Homolog of NCBI NO: 11385505 NR Description: glutathione S-transferase GST 27 [Zea mays]
  misc_feature (4)..(218): Homolog of NCBI NO: 20067421 NR Description: glutathione transferase [Triticum aestivum]
MEEELTLVGYWSSPFALRARFALNLKGLPYAYVEEVGLFDGKSPLLLASNPVHKRVPVLIHNGKPVPESQLIVQYVEEAFPASSPRFLPPDPHERAVARFWASYVDGELLSAWLPVYGGRTGEERAEAAGRVGAALETLERAFGECSKGKGFFGGDTVGLVDVVLGGFVGWLQTSEAMCGVRLLDAAATPLLAAWAERFRALDGVKEVMPDAQRLLEYNLMRRARLGLPLTQPPPPQHQ

SEQ ID NO: 108827 - DNA, 797 bp, Zea mays subsp. mays
  misc_feature (1)..(797): Ceres Seq. ID no. 12635162
aatgctctaaacttctctacatcttctctctctaaagccatcatcttggttttggtgtgtgccttgctgtctattttggtgcttcccctagataagtgaccttaagactaatcatcatgagaatgtttctaggtgtcttgcttctcttggccttgaccacatcttcaagtgctatttactgtctctgcaaagatgggataggagacaaccagcttcaaacatcgatagactatgcttgtggaaccttagcagattgtaacccaatccatgacaagggtgcttgttatcaaccaaacaccataaaaaaccactgcgattgggctgttaacagctacttccagaaagcagctcaggcccctggaagctgtaatttctctggaactgccactaccagtcaaaacccaccttcaaatttggttactggatgtatatatccttcaagcgctagctctgcagggtcgcctccttcaactacaccaccaacgggaacaactccaacaacaaacggaaccggaggctttactccatttccgggaactccacctgcgtttggtccaactggaaccggaggctttagcccaagcaaagctgcttcaagtttggtcatttcctctgttttcacgctctgtttctcatcactagcgcttctgatgtaaggttcgtgtagagacaaaagacatccacatgggtccgtcttttgattcccttttgggtagaaaaggaagcttcagtggtcattgtggtttatatttctgttttttcccatttatgtgaaagatgctctaattagaatcttg

SEQ ID NO: 108828 - protein, 179 aa, Zea mays subsp. mays
  misc_feature (1)..(179): Ceres Seq. ID no. 12635163
  misc_feature (1)..(153): Homolog of NCBI NO: 25404810 NR Description: unknown protein, 45065-49536 [imported] -
  misc_feature (1)..(153): Homolog of NCBI NO: 21553768 NR Description: unknown [Arabidopsis thaliana]
  misc_feature (1)..(153): Homolog of NCBI NO: 18409239 NR Description: unknown protein
  misc_feature (8)..(179): Homolog of NCBI NO: 15241485 NR Description: glycosyl hydrolase family 17
  misc_feature (8)..(179): Homolog of NCBI NO: 21592859 NR Description: unknown [Arabidopsis thaliana]
  misc_feature (1)..(149): Homolog of NCBI NO: 18394637 NR Description: glycosyl hydrolase family 17
  misc_feature (8)..(174): Homolog of NCBI NO: 30697478 NR Description: glycosyl hydrolase family 17 [Arabidopsis
  misc_feature (1)..(173): Homolog of NCBI NO: 22325443 NR Description: similar to glycosyl hydrolase family 17; protein
  misc_feature (12)..(179): Homolog of NCBI NO: 8778409 NR Description: F16A14.5 [Arabidopsis thaliana]
  misc_feature (1)..(178): Homolog of NCBI NO: 30683485 NR Description: expressed protein [Arabidopsis thaliana]
MRMFLGVLLLLALTTSSSAIYCLCKDGIGDNQLQTSIDYACGTLADCNPIHDKGACYQPNTIKNHCDWAVNSYFQKAAQAPGSCNFSGTATTSQNPPSNLVTGCIYPSSASSAGSPPSTTPPTGTTPTTNGTGGFTPFPGTPPAFGPTGTGGFSPSKAASSLVISSVFTLCFSSLALLM

SEQ ID NO: 108829 - protein, 177 aa, Zea mays subsp. mays
  misc_feature (1)..(177): Ceres Seq. ID no. 12635164
  misc_feature (1)..(151): Homolog of NCBI NO: 25404810 NR Description: unknown protein, 45065-49536 [imported] -
  misc_feature (1)..(151): Homolog of NCBI NO: 21553768 NR Description: unknown [Arabidopsis thaliana]
  misc_feature (1)..(151): Homolog of NCBI NO: 18409239 NR Description: unknown protein
  misc_feature (6)..(177): Homolog of NCBI NO: 15241485 NR Description: glycosyl hydrolase family 17
  misc_feature (6)..(177): Homolog of NCBI NO: 21592859 NR Description: unknown [Arabidopsis thaliana]
  misc_feature (1)..(147): Homolog of NCBI NO: 18394637 NR Description: glycosyl hydrolase family 17
  misc_feature (6)..(172): Homolog of NCBI NO: 30697478 NR Description: glycosyl hydrolase family 17 [Arabidopsis
  misc_feature (1)..(171): Homolog of NCBI NO: 22325443 NR Description: similar to glycosyl hydrolase family 17; protein
  misc_feature (10)..(177): Homolog of NCBI NO: 8778409 NR Description: F16A14.5 [Arabidopsis thaliana]
  misc_feature (1)..(176): Homolog of NCBI NO: 30683485 NR Description: expressed protein [Arabidopsis thaliana]
MFLGVLLLLALTTSSSAIYCLCKDGIGDNQLQTSIDYACGTLADCNPIHDKGACYQPNTIKNHCDWAVNSYFQKAAQAPGSCNFSGTATTSQNPPSNLVTGCIYPSSASSAGSPPSTTPPTGTTPTTNGTGGFTPFPGTPPAFGPTGTGGFSPSKAASSLVISSVFTLCFSSLALLM

SEQ ID NO: 108830 - DNA, 675 bp, Zea mays subsp. mays
  misc_feature (1)..(675): Ceres Seq. ID no. 13599519
ccaattccgatcacaagctccaatcaaaccaatccagagtaccatcggctatcaatcagcaggaggaagaaaccgctgctcgaccggggaagaaccaagaggctcggcgaagatgcaggcggcgaaggagaaggtgaaggacggcgtgagcgcggtgaaggccaaggccaagatcacgcaggccaaggcgtcggagaaggcggaggcggccacggcgaggtcgcacgcggagcgggagctggcgcacgagcgcggcaaggccaaggtggccgcggccaagatggagctgcaccaggacaaggcgctccaccgggaggaggccatggagcaccgcatccacaagcacggcggcggccacggccgccaccaccacaagcacggcgtcggcatcgtggccgcgcccccgccggcgaccggtgccggggcttaccaccctcctcctgccgccggtggccactactactgatcagctacgcagctggatcgccagctagatgggcacatgcgtcgcgtttgtgtgatgtgttctcgatagctaataagtctgtactttgtgatgtttatgtttgacttacccacgcgtggtttttcattttgcacttggcttggatatgagagctgtacttgatatttatgcacatatgaatgcatgcgaccttgttggcttgtcccgcg

SEQ ID NO: 108831 - protein, 189 aa, Zea mays subsp. mays
  misc_feature (1)..(189): Ceres Seq. ID no. 15218850
  misc_feature (52)..(140): Pfam Name: Protein of unknown function (DUF390) Pfam Description: Protein of unknown function (DUF390)
  misc_feature (36)..(107): Homolog of NCBI NO: 30348579 NR Description: hypothetical protein [Saimiriine herpesvirus 2]
  misc_feature (29)..(114): Homolog of NCBI NO: 10954052 NR Description: ovarian fibroin-like substance-3 [Cyprinus carpio]
  misc_feature (36)..(107): Homolog of NCBI NO: 30526291 NR Description: latency associated nuclear antigen [Saimiriine
  misc_feature (30)..(142): Homolog of NCBI NO: 10954052 NR Description: ovarian fibroin-like substance-3 [Cyprinus carpio]
  misc_feature (21)..(109): Homolog of NCBI NO: 30348579 NR Description: hypothetical protein [Saimiriine herpesvirus 2]
  misc_feature (21)..(109): Homolog of NCBI NO: 30526291 NR Description: latency associated nuclear antigen [Saimiriine
  misc_feature (13)..(109): Homolog of NCBI NO: 30526291 NR Description: latency associated nuclear antigen [Saimiriine
  misc_feature (36)..(109): Homolog of NCBI NO: 30348579 NR Description: hypothetical protein [Saimiriine herpesvirus 2]
  misc_feature (36)..(109): Homolog of NCBI NO: 30526291 NR Description: latency associated nuclear antigen [Saimiriine
  misc_feature (21)..(109): Homolog of NCBI NO: 30348579 NR Description: hypothetical protein [Saimiriine herpesvirus 2]
PIPITSSNQTNPEYHRLSISRRKKPLLDRGRTKRLGEDAGGEGEGEGRRERGEGQGQDHAGQGVGEGGGGHGEVARGAGAGARARQGQGGRGQDGAAPGQGAPPGGGHGAPHPQARRRPRPPPPQARRRHRGRAPAGDRCRGLPPSSCRRWPLLLISYAAGSPARWAHASRLCDVFSIANKSVLCDVYV

SEQ ID NO: 108832 - protein, 154 aa, Zea mays subsp. mays
  misc_feature (1)..(154): Ceres Seq. ID no. 15218851
  misc_feature (38)..(110): Pfam Name: Late embryogenesis abundant (LEA) group 1 Pfam Description: Late embryogenesis abundant (LEA) group 1
  misc_feature (38)..(146): Homolog of NCBI NO: 15223243 NR Description: late-embryogenesis abundant protein -related
  misc_feature (38)..(100): Homolog of NCBI NO: 18652403 NR Description: unknown [Hordeum vulgare]
  misc_feature (38)..(133): Homolog of NCBI NO: 18652404 NR Description: unknown [Hordeum vulgare]
  misc_feature (38)..(154): Homolog of NCBI NO: 34897842 NR Description: P0514G12.41 [Oryza sativa (japonica
QFRSQAPIKPIQSTIGYQSAGGRNRCSTGEEPRGSAKMQAAKEKVKDGVSAVKAKAKITQAKASEKAEAATARSHAERELAHERGKAKVAAAKMELHQDKALHREEAMEHRIHKHGGGHGRHHHKHGVGIVAAPPPATGAGAYHPPPAAGGHYY

SEQ ID NO: 108833 - protein, 117 aa, Zea mays subsp. mays
  misc_feature (1)..(117): Ceres Seq. ID no. 15218852
  misc_feature (1)..(73): Pfam Name: Late embryogenesis abundant (LEA) group 1 Pfam Description: Late embryogenesis abundant (LEA) group 1
  misc_feature (1)..(109): Homolog of NCBI NO: 15223243 NR Description: late-embryogenesis abundant protein -related
  misc_feature (1)..(63): Homolog of NCBI NO: 18652403 NR Description: unknown [Hordeum vulgare]
  misc_feature (1)..(96): Homolog of NCBI NO: 18652404 NR Description: unknown [Hordeum vulgare]
  misc_feature (1)..(117): Homolog of NCBI NO: 34897842 NR Description: P0514G12.41 [Oryza sativa (japonica
MQAAKEKVKDGVSAVKAKAKITQAKASEKAEAATARSHAERELAHERGKAKVAAAKMELHQDKALHREEAMEHRIHKHGGGHGRHHHKHGVGIVAAPPPATGAGAYHPPPAAGGHYY

SEQ ID NO: 108834 - DNA, 1220 bp, Zea mays subsp. mays
  misc_feature (1)..(1220): Ceres Seq. ID no. 13599293
acacaccgatcgcgaaactgcttcctagcttcgttccggttccggagcgccagagagagaaagaaagggaaaagaagcgcctttgcccaccgcgcgatcgatcgatccggggtccggcggcctgccatggtgaagctggcgacggccagggaggcgcggctgtacgggccggcgctggcggcgaggcggtgggagtacatcaacgcggggacatacgtgttcgcggcgctgctcctggtcctggcggcggcgctgtccatgtccgtgtccgcggccaggctggggctcgccgtaggcgccgtggcgctggcggccgtggcggccgtcaacgcacacgacctcgccgcgcacctggctggcgtcgactgccgcgtgggactggcgaggtacgatgcccagctcgggctcgtggagttcctcgtgccggccgtgcacgcagccgggtgcgcgctcgccgccgccggcctggcgctgctggcctccccccactcccactcccagtcccagcagcggcacgcggcgaccatgctgctcgtcgcggcgctgctgtgggtgctgggctccgtgctcaactcctgccaggtgtacgagcgcgccgacggccgcgcgcagctgctgcagtcgggcgtgcaggtgcctcagctgctggggagccttctgttcctggtcgccgcggcgctgaaccgcccccgcagcggcggcgagccggcgtggctgtgcctggtcgggagcgtgctgtggctggcggcagcgctgctcaacgtgctgaaggtgttcgccatgcaccagagcgacgcgctgcggctggagaagctccgcggcggcgcgcaggagtggctcagccgcgaccgcgagggccgcgtgccgctcaactgggaggaggccgccaggagacgggcgctgcccaccgagctccggtgatcatcgcccgcgccaggcgccacccatcatttcccgtgccgtaaaatgaggggaaaagggtagataaataaattgtttcagcgccacccttttgggccgttgcttgggctcaatggaggcccgaagccccggattgtagggcccattagctgctggagcttatcgcattccatttcctatgtccgagtcccttgcggctcctttggaaggaaaaggaatgagagaattaagagatggattgaagagggttggaaggattaaatttctttacaawaaarwaaaaaaaagctggagggggg

SEQ ID NO: 108835 - protein, 320 aa, Zea mays subsp. mays
  misc_feature (1)..(320): Ceres Seq. ID no. 15222553
  misc_feature (91)..(179): Pfam Name: Sperm histone P2 Pfam Description: Sperm histone P2
  misc_feature (9)..(313): Homolog of NCBI NO: 97774 NR Description: probable endoglucanase - Ruminococcus
  misc_feature (22)..(290): Homolog of NCBI NO: 23105951 NR Description: hypothetical protein [Azotobacter vinelandii]
  misc_feature (31)..(235): Homolog of NCBI NO: 22960369 NR Description: hypothetical protein [Rhodobacter sphaeroides]
  misc_feature (65)..(287): Homolog of NCBI NO: 79833 NR Description: hypothetical 119.5K protein (uvrA region) -
  misc_feature (8)..(206): Homolog of NCBI NO: 29830954 NR Description: putative GntR-family transcriptional regulator
  misc_feature (33)..(315): Homolog of NCBI NO: 23106243 NR Description: hypothetical protein [Azotobacter vinelandii]
  misc_feature (18)..(313): Homolog of NCBI NO: 23106243 NR Description: hypothetical protein [Azotobacter vinelandii]
  misc_feature (7)..(316): Homolog of NCBI NO: 22957039 NR Description: hypothetical protein [Rhodobacter sphaeroides]
  misc_feature (30)..(280): Homolog of NCBI NO: 25989121 NR Description: putative PHA synthase [Streptomyces aureofaciens]
  misc_feature (24)..(320): Homolog of NCBI NO: 29247944 NR Description: GLP_26_54603_52153 [Giardia lamblia ATCC 50803]
TPIAKLLPSFVPVPERQREKEREKKRLCPPRDRSIRGPAACHGEAGDGQGGAAVRAGAGGEAVGVHQRGDIRVRGAAPGPGGGAVHVRVRGQAGARRRRRGAGGRGGRQRTRPRRAPGWRRLPRGTGEVRCPARARGVPRAGRARSRVRARRRRPGAAGLPPLPLPVPAAARGDHAARRGAAVGAGLRAQLLPGVRARRRPRAAAAVGRAGASAAGEPSVPGRRGAEPPPQRRRAGVAVPGRERAVAGGSAAQRAEGVRHAPERRAAAGEAPRRRAGVAQPRPRGPRAAQLGGGRQETGAAHRAPVIIARARRHPSFPVP

SEQ ID NO: 108836 - protein, 306 aa, Zea mays subsp. mays
  misc_feature (1)..(306): Ceres Seq. ID no. 15222554
  misc_feature (100)..(166): Homolog of NCBI NO: 34905164 NR Description: P0700D12.27 [Oryza sativa (japonica
  misc_feature (68)..(162): Homolog of NCBI NO: 34394289 NR Description: hypothetical protein [Oryza sativa (japonica
  misc_feature (43)..(306): Homolog of NCBI NO: 15237898 NR Description: expressed protein [Arabidopsis thaliana]
THRSRNCFLASFRFRSARERKKGKRSAFAHRAIDRSGVRRPAMVKLATAREARLYGPALAARRWEYINAGTYVFAALLLVLAAALSMSVSAARLGLAVGAVALAAVAAVNAHDLAAHLAGVDCRVGLARYDAQLGLVEFLVPAVHAAGCALAAAGLALLASPHSHSQSQQRHAATMLLVAALLWVLGSVLNSCQVYERADGRAQLLQSGVQVPQLLGSLLFLVAAALNRPRSGGEPAWLCLVGSVLWLAAALLNVLKVFAMHQSDALRLEKLRGGAQEWLSRDREGRVPLNWEEAARRRALPTELR

SEQ ID NO: 108837 - protein, 264 aa, Zea mays subsp. mays
  misc_feature (1)..(264): Ceres Seq. ID no. 15222555
  misc_feature (58)..(124): Homolog of NCBI NO: 34905164 NR Description: P0700D12.27 [Oryza sativa (japonica
  misc_feature (26)..(120): Homolog of NCBI NO: 34394289 NR Description: hypothetical protein [Oryza sativa (japonica
  misc_feature (1)..(264): Homolog of NCBI NO: 15237898 NR Description: expressed protein [Arabidopsis thaliana]
MVKLATAREARLYGPALAARRWEYINAGTYVFAALLLVLAAALSMSVSAARLGLAVGAVALAAVAAVNAHDLAAHLAGVDCRVGLARYDAQLGLVEFLVPAVHAAGCALAAAGLALLASPHSHSQSQQRHAATMLLVAALLWVLGSVLNSCQVYERADGRAQLLQSGVQVPQLLGSLLFLVAAALNRPRSGGEPAWLCLVGSVLWLAAALLNVLKVFAMHQSDALRLEKLRGGAQEWLSRDREGRVPLNWEEAARRRALPTELR

SEQ ID NO: 108838 - DNA, 1180 bp, Zea mays subsp. mays
  misc_feature (1)..(1180): Ceres Seq. ID no. 12635167
atgtcccaacgaaagcattagcagagaagatgatgacgacgagcttctcttctcatcctcctcctcctcctacatcatcaacttccagatccctactcctcttcccttcatctcacctcaaactccctcctcgtcttctcttacatggccgctctacactctcctgctccgccgccggcaccaacaacggacctcctcccgccggcgactctgttccaaataacttctgtatcattgagggatcagagacggtccaagacttcgtgcagatgcagcttcaggagatacaagacaacattaggagcagacgcaacaagatctttctcctcatggaggaagtcaggaggctacgcgttcagcaacggatcaagagtgttaaatccatcagcgaggatgagaacactgtcctcgaggcgacggagatgcctgagatcccttcttccattccttttctccctaacgtgacgccaaagactttgaaacaactctacttgaccagtgtggctttgatctctggaatcattttctttggtggtttgattgcgcctaagcttgagcttaaggtaggactaggtggaacctcgtatgaagatttcataaggagcttgcatttacccttgcaattaagccaagtagatcccattgtggcatcattttctgggggagcggttggtgttatttcaaccttgatgctaattgaagttaacaatgttaaacaacaagagaagaagaggtgcaagtactgccttgggactggatacttgccatgcgctaaatgttctgctagtggtgtgtgcttaagcattgatccaataaaacgaactagagcttcgagcctgcttttgcaagctccgacaacggaaaggtgtctgaactgttccggcgcaggaaaggtgatgtgtccgacatgtctatgcactgggatggtcacagctagtgagcacgacccacgatttgaccctttcgactagaaaacgatctcagtttacttttcgaattaagggtttttgtatgtacatttgttcttcaaaagcctaagccaagactctgtactgaagaaagccatataaatgtttacatagtcaagaaaaataggatttatagctttttgccaaagcatagttacatagtgaagttcagaaatcccttgacacattatttgataaagcgaatttctttc

SEQ ID NO: 108839 - protein, 322 aa, Zea mays subsp. mays
  misc_feature (1)..(322): Ceres Seq. ID no. 12635168
  misc_feature (17)..(322): Homolog of NCBI NO: 15240312 NR Description: putative protein
  misc_feature (65)..(322): Homolog of NCBI NO: 30681288 NR Description: expressed protein [Arabidopsis thaliana]
  misc_feature (26)..(322): Homolog of NCBI NO: 8978349 NR Description: gene_id:K16F4.10~pir||T00468~similar to unknown
  misc_feature (26)..(322): Homolog of NCBI NO: 22326624 NR Description: putative protein
VPTKALAEKMMTTSFSSHPPPPPTSSTSRSLLLFPSSHLKLPPRLLLHGRSTLSCSAAGTNNGPPPAGDSVPNNFCIIEGSETVQDFVQMQLQEIQDNIRSRRNKIFLLMEEVRRLRVQQRIKSVKSISEDENTVLEATEMPEIPSSIPFLPNVTPKTLKQLYLTSVALISGIIFFGGLIAPKLELKVGLGGTSYEDFIRSLHLPLQLSQVDPIVASFSGGAVGVISTLMLIEVNNVKQQEKKRCKYCLGTGYLPCAKCSASGVCLSIDPIKRTRASSLLLQAPTTERCLNCSGAGKVMCPTCLCTGMVTASEHDPRFDPFD

SEQ ID NO: 108840 - protein, 313 aa, Zea mays subsp. mays
  misc_feature (1)..(313): Ceres Seq. ID no. 12635169
  misc_feature (8)..(313): Homolog of NCBI NO: 15240312 NR Description: putative protein
  misc_feature (56)..(313): Homolog of NCBI NO: 30681288 NR Description: expressed protein [Arabidopsis thaliana]
  misc_feature (17)..(313): Homolog of NCBI NO: 8978349 NR Description: gene_id:K16F4.10~pir||T00468~similar to unknown
  misc_feature (17)..(313): Homolog of NCBI NO: 22326624 NR Description: putative protein
MMTTSFSSHPPPPPTSSTSRSLLLFPSSHLKLPPRLLLHGRSTLSCSAAGTNNGPPPAGDSVPNNFCIIEGSETVQDFVQMQLQEIQDNIRSRRNKIFLLMEEVRRLRVQQRIKSVKSISEDENTVLEATEMPEIPSSIPFLPNVTPKTLKQLYLTSVALISGIIFFGGLIAPKLELKVGLGGTSYEDFIRSLHLPLQLSQVDPIVASFSGGAVGVISTLMLIEVNNVKQQEKKRCKYCLGTGYLPCAKCSASGVCLSIDPIKRTRASSLLLQAPTTERCLNCSGAGKVMCPTCLCTGMVTASEHDPRFDPFD

SEQ ID NO: 108841 - protein, 312 aa, Zea mays subsp. mays
  misc_feature (1)..(312): Ceres Seq. ID no. 12635170
  misc_feature (7)..(312): Homolog of NCBI NO: 15240312 NR Description: putative protein
  misc_feature (55)..(312): Homolog of NCBI NO: 30681288 NR Description: expressed protein [Arabidopsis thaliana]
  misc_feature (16)..(312): Homolog of NCBI NO: 8978349 NR Description: gene_id:K16F4.10~pir||T00468~similar to unknown
  misc_feature (16)..(312): Homolog of NCBI NO: 22326624 NR Description: putative protein
MTTSFSSHPPPPPTSSTSRSLLLFPSSHLKLPPRLLLHGRSTLSCSAAGTNNGPPPAGDSVPNNFCIIEGSETVQDFVQMQLQEIQDNIRSRRNKIFLLMEEVRRLRVQQRIKSVKSISEDENTVLEATEMPEIPSSIPFLPNVTPKTLKQLYLTSVALISGIIFFGGLIAPKLELKVGLGGTSYEDFIRSLHLPLQLSQVDPIVASFSGGAVGVISTLMLIEVNNVKQQEKKRCKYCLGTGYLPCAKCSASGVCLSIDPIKRTRASSLLLQAPTTERCLNCSGAGKVMCPTCLCTGMVTASEHDPRFDPFD

SEQ ID NO: 108842 - DNA, 1324 bp, Zea mays subsp. mays
  misc_feature (1)..(1324): Ceres Seq. ID no. 15227018
aacaacctttcacctcgagatattttcttgaaaggaaacaaaaaaaaaatgggtctgcatccaatcgccgacgctgacgagagcaaccccttcggctctctctccgccgatgagttctacgcgaagcattccgtcacccattcctccgccttcaccaccaaccctcgcggcctcaagatcttcacacaatggtggtctccactccctccaactactcccgtcggtatcgtcgccgtcgttcacggcttcaccggcgaatccagctggttcctccagctcacgtccatcctcttcgctaaatccggttacatcacctgcgcgatcgatcaccaagggcatggattctccgatggcctcgtggctcatatccctgacatcaatcccgtcgtggatgactgtatctccttcttcgacgacttccgtaaccgtaaccgccaggagacgccggatttgccgtgttttctctactccgagtccttaggcggagccatcgcgctctacatctcgctccggcagagaggtgtatgggacggactcatcctcaacggagccatgtgtggaatcagcgcgaagttcaaaccgccgtggccgttggagcatttgctcttcgtcgtggcgaaccttatccccacctggcgcgtcatccccactcgcggatcgattcccgatgtttccttcaaggagccgtggaagaggaagctcgcgattgctagtcctaggaggacggtggcgaggccgcgcgccgcgacggcgtacgagctgatccgtgtatgtaacgagcttcaggggaggttcgaggaggtggaggtgccgcttctgatagtgcatggaggaggagacgttgtttgcgaccaagcgtgcgtagaggagcttcatcggagagcaagcagtggggataagacgatcaagatctatccggggatgtggcatcagatggttggtgaatcggaggaggacgttgatttggtgtacggtgacatcctgacatggctcaagacccgatcggaaagggccgctgagaggaaacgggagttgcgcgttggcggcggagctttagagtctttttgactctttgggtattgagttgtagcccaataggccagtgccatctggaagcaactatttatgggttatgcttaattgtttcgtagcacatggtttacagttaaaccgtcgacaaaaaaagagtttacagttaaaccaatgaatattccaatatactttttgggcaataaattattaaaaactatttttgtaaaattaaattttaagattctgtatcaatttgagaaaacaagaaaaactaaccattaatgatggatcc

SEQ ID NO: 108843 - protein, 355 aa, Zea mays subsp. mays
  misc_feature (1)..(355): Ceres Seq. ID no. 15227019
  misc_feature (107)..(323): Pfam Name: alpha/beta hydrolase fold Pfam Description: alpha/beta hydrolase fold
  misc_feature (42)..(339): Homolog of NCBI NO: 30695682 NR Description: esterase/lipase/thioesterase family [Arabidopsis
  misc_feature (44)..(346): Homolog of NCBI NO: 30687883 NR Description: esterase/lipase/thioesterase family [Arabidopsis
  misc_feature (44)..(346): Homolog of NCBI NO: 7487948 NR Description: lysophospholipase homolog F12L6.8 - Arabidopsis
  misc_feature (50)..(346): Homolog of NCBI NO: 7487947 NR Description: lysophospholipase homolog F12L6.7 - Arabidopsis
  misc_feature (45)..(346): Homolog of NCBI NO: 30687879 NR Description: hydrolase, alpha/beta fold family [Arabidopsis
  misc_feature (27)..(334): Homolog of NCBI NO: 15220284 NR Description: hydrolase, alpha/beta fold family [Arabidopsis
  misc_feature (24)..(334): Homolog of NCBI NO: 34899776 NR Description: putative lysophospholipase isolog
  misc_feature (20)..(344): Homolog of NCBI NO: 34894634 NR Description: P0028G04.16 [Oryza sativa (japonica
  misc_feature (17)..(336): Homolog of NCBI NO: 15242179 NR Description: esterase/lipase/thioesterase family [Arabidopsis
  misc_feature (17)..(351): Homolog of NCBI NO: 15239709 NR Description: esterase/lipase/thioesterase family [Arabidopsis
NNLSPRDIFLKGNKKKMGLHPIADADESNPFGSLSADEFYAKHSVTHSSAFTTNPRGLKIFTQWWSPLPPTTPVGIVAVVHGFTGESSWFLQLTSILFAKSGYITCAIDHQGHGFSDGLVAHIPDINPVVDDCISFFDDFRNRNRQETPDLPCFLYSESLGGAIALYISLRQRGVWDGLILNGAMCGISAKFKPPWPLEHLLFVVANLIPTWRVIPTRGSIPDVSFKEPWKRKLAIASPRRTVARPRAATAYELIRVCNELQGRFEEVEVPLLIVHGGGDVVCDQACVEELHRRASSGDKTIKIYPGMWHQMVGESEEDVDLVYGDILTWLKTRSERAAERKRELRVGGGALESF

SEQ ID NO: 108844 - protein, 339 aa, Zea mays subsp. mays
  misc_feature (1)..(339): Ceres Seq. ID no. 15227020
  misc_feature (91)..(307): Pfam Name: alpha/beta hydrolase fold Pfam Description: alpha/beta hydrolase fold
  misc_feature (29)..(330): Homolog of NCBI NO: 30687879 NR Description: hydrolase, alpha/beta fold family [Arabidopsis
  misc_feature (11)..(318): Homolog of NCBI NO: 15220284 NR Description: hydrolase, alpha/beta fold family [Arabidopsis
  misc_feature (8)..(318): Homolog of NCBI NO: 34899776 NR Description: putative lysophospholipase isolog
  misc_feature (28)..(330): Homolog of NCBI NO: 7487948 NR Description: lysophospholipase homolog F12L6.8 - Arabidopsis
  misc_feature (26)..(323): Homolog of NCBI NO: 30695682 NR Description: esterase/lipase/thioesterase family [Arabidopsis
  misc_feature (28)..(330): Homolog of NCBI NO: 30687883 NR Description: esterase/lipase/thioesterase family [Arabidopsis
  misc_feature (34)..(330): Homolog of NCBI NO: 7487947 NR Description: lysophospholipase homolog F12L6.7 - Arabidopsis
  misc_feature (4)..(328): Homolog of NCBI NO: 34894634 NR Description: P0028G04.16 [Oryza sativa (japonica
  misc_feature (1)..(320): Homolog of NCBI NO: 15242179 NR Description: esterase/lipase/thioesterase family [Arabidopsis
  misc_feature (1)..(335): Homolog of NCBI NO: 15239709 NR Description: esterase/lipase/thioesterase family [Arabidopsis
MGLHPIADADESNPFGSLSADEFYAKHSVTHSSAFTTNPRGLKIFTQWWSPLPPTTPVGIVAVVHGFTGESSWFLQLTSILFAKSGYITCAIDHQGHGFSDGLVAHIPDINPVVDDCISFFDDFRNRNRQETPDLPCFLYSESLGGAIALYISLRQRGVWDGLILNGAMCGISAKFKPPWPLEHLLFVVANLIPTWRVIPTRGSIPDVSFKEPWKRKLAIASPRRTVARPRAATAYELIRVCNELQGRFEEVEVPLLIVHGGGDVVCDQACVEELHRRASSGDKTIKIYPGMWHQMVGESEEDVDLVYGDILTWLKTRSERAAERKRELRVGGGALESF

SEQ ID NO: 108845 - DNA, 1096 bp, Zea mays subsp. mays
  misc_feature (1)..(1096): Ceres Seq. ID no. 12635175
atcgcatcccttgtaaatttttatctcagaaacgtgcagcagagaaaatacaaaatgggactctgccgctttctcttcttcgtcgttgttgtgctgcttttctcctcatcttcctcagttgacgcctgcgaccgatgtcctcaccactctaaggctgcttttttctcctccgcatccgccctatcctccggagcttgttcttatggttccatggctacggctttcttcgccggtcacatcgccgccgccgttccttccatctacaaagacggcgctggctgcggtgcttgctttcaggtcagatgccacaaccccactctttgcagcaccaaaggaaccacggtgatggtcaccgacctcaacatgagcaaccaaaccgatctcgtcctcagcagcagagccttcagggccatggccaaaccggttgtcggggctgacacagatcttctcagacaaggcatcgtcgacgttgaataccacagagttccttgcgattacggaaacaagaagatgttgaatgttagagttgaagaatcaagcaaaaaaccatactacttggctataaagctcttgtaccaaggaggccaaaccgaagtcgtagccatcgacattgctcaggctggttcctccaactggagttacatgacacgaagccacggcgccgtatgggtcactgacaatgtacccaccggacctcttcagttcaggttcgtggtgacagctggctacgacggaaaaatgctctggtctaagaaggttcttcctgccaactgggaagccggcaagacctacgacgccggcgttcagatcaccgacattgctcaggaaggttgtgatccatgcgacgatcacatctggaactgatttacttactctccttttttctttctttcttttcttagaagcatatgtataaataatcaagcatattcattattaagtgagtttgtaccagaactattactaaacaagagaactaagaaagatttttaaaagggtgatggacatatgtatgtgcaaaggaggtctacacatgaccaccattctttctaccgataaccaagttatatgacattacttctttcttttatgtttc

SEQ ID NO: 108846 - protein, 287 aa, Zea mays subsp. mays
  misc_feature (1)..(287): Ceres Seq. ID no. 12635176
  misc_feature (172)..(255): Pfam Name: Pollen allergen Pfam Description: Pollen allergen
  misc_feature (24)..(281): Homolog of NCBI NO: 30038051 NR Description: beta expansin EXPB2.1 [Mirabilis jalapa]
  misc_feature (25)..(286): Homolog of NCBI NO: 20502989 NR Description: Putative pollen allergen [Oryza sativa (japonica
  misc_feature (25)..(286): Homolog of NCBI NO: 21654743 NR Description: expansin-like protein 1 [Oryza sativa]
  misc_feature (25)..(286): Homolog of NCBI NO: 37536544 NR Description: putative pollen allergen [Oryza sativa (japonica
  misc_feature (26)..(286): Homolog of NCBI NO: 33111959 NR Description: expansin-like protein [Quercus robur]
  misc_feature (71)..(287): Homolog of NCBI NO: 30692657 NR Description: expansin protein family (EXPL3) [Arabidopsis
  misc_feature (24)..(287): Homolog of NCBI NO: 20138389 NR Description: Expansin-like 3 precursor (At-EXPL3)
  misc_feature (24)..(287): Homolog of NCBI NO: 21555265 NR Description: Expansin-like 1 precursor (At-EXPL1)
  misc_feature (24)..(287): Homolog of NCBI NO: 15231303 NR Description: putative protein
  misc_feature (24)..(287): Homolog of NCBI NO: 15233841 NR Description: putative pollen allergen
IASLVNFYLRNVQQRKYKMGLCRFLFFVVVVLLFSSSSSVDACDRCPHHSKAAFFSSASALSSGACSYGSMATAFFAGHIAAAVPSIYKDGAGCGACFQVRCHNPTLCSTKGTTVMVTDLNMSNQTDLVLSSRAFRAMAKPVVGADTDLLRQGIVDVEYHRVPCDYGNKKMLNVRVEESSKKPYYLAIKLLYQGGQTEVVAIDIAQAGSSNWSYMTRSHGAVWVTDNVPTGPLQFRFVVTAGYDGKMLWSKKVLPANWEAGKTYDAGVQITDIAQEGCDPCDDHIWN

SEQ ID NO: 108847 - protein, 269 aa, Zea mays subsp. mays
  misc_feature (1)..(269): Ceres Seq. ID no. 12635177
  misc_feature (154)..(237): Pfam Name: Pollen allergen Pfam Description: Pollen allergen
  misc_feature (6)..(263): Homolog of NCBI NO: 30038051 NR Description: beta expansin EXPB2.1 [Mirabilis jalapa]
  misc_feature (7)..(268): Homolog of NCBI NO: 20502989 NR Description: Putative pollen allergen [Oryza sativa (japonica
  misc_feature (7)..(268): Homolog of NCBI NO: 21654743 NR Description: expansin-like protein 1 [Oryza sativa]
  misc_feature (7)..(268): Homolog of NCBI NO: 37536544 NR Description: putative pollen allergen [Oryza sativa (japonica
  misc_feature (8)..(268): Homolog of NCBI NO: 33111959 NR Description: expansin-like protein [Quercus robur]
  misc_feature (53)..(269): Homolog of NCBI NO: 30692657 NR Description: expansin protein family (EXPL3) [Arabidopsis
  misc_feature (6)..(269): Homolog of NCBI NO: 20138389 NR Description: Expansin-like 3 precursor (At-EXPL3)
  misc_feature (6)..(269): Homolog of NCBI NO: 21555265 NR Description: Expansin-like 1 precursor (At-EXPL1)
  misc_feature (6)..(269): Homolog of NCBI NO: 15231303 NR Description: putative protein
  misc_feature (6)..(269): Homolog of NCBI NO: 15233841 NR Description: putative pollen allergen
MGLCRFLFFVVVVLLFSSSSSVDACDRCPHHSKAAFFSSASALSSGACSYGSMATAFFAGHIAAAVPSIYKDGAGCGACFQVRCHNPTLCSTKGTTVMVTDLNMSNQTDLVLSSRAFRAMAKPVVGADTDLLRQGIVDVEYHRVPCDYGNKKMLNVRVEESSKKPYYLAIKLLYQGGQTEVVAIDIAQAGSSNWSYMTRSHGAVWVTDNVPTGPLQFRFVVTAGYDGKMLWSKKVLPANWEAGKTYDAGVQITDIAQEGCDPCDDHIWN

SEQ ID NO: 108848 - protein, 217 aa, Zea mays subsp. mays
  misc_feature (1)..(217): Ceres Seq. ID no. 12635178
  misc_feature (102)..(185): Pfam Name: Pollen allergen Pfam Description: Pollen allergen
  misc_feature (1)..(211): Homolog of NCBI NO: 30038051 NR Description: beta expansin EXPB2.1 [Mirabilis jalapa]
  misc_feature (1)..(216): Homolog of NCBI NO: 20502989 NR Description: Putative pollen allergen [Oryza sativa (japonica
  misc_feature (1)..(216): Homolog of NCBI NO: 21654743 NR Description: expansin-like protein 1 [Oryza sativa]
  misc_feature (1)..(216): Homolog of NCBI NO: 37536544 NR Description: putative pollen allergen [Oryza sativa (japonica
  misc_feature (1)..(216): Homolog of NCBI NO: 33111959 NR Description: expansin-like protein [Quercus robur]
  misc_feature (1)..(217): Homolog of NCBI NO: 30692657 NR Description: expansin protein family (EXPL3) [Arabidopsis
  misc_feature (1)..(217): Homolog of NCBI NO: 20138389 NR Description: Expansin-like 3 precursor (At-EXPL3)
  misc_feature (1)..(217): Homolog of NCBI NO: 21555265 NR Description: Expansin-like 1 precursor (At-EXPL1)
  misc_feature (1)..(217): Homolog of NCBI NO: 15231303 NR Description: putative protein
  misc_feature (1)..(217): Homolog of NCBI NO: 15233841 NR Description: putative pollen allergen
MATAFFAGHIAAAVPSIYKDGAGCGACFQVRCHNPTLCSTKGTTVMVTDLNMSNQTDLVLSSRAFRAMAKPVVGADTDLLRQGIVDVEYHRVPCDYGNKKMLNVRVEESSKKPYYLAIKLLYQGGQTEVVAIDIAQAGSSNWSYMTRSHGAVWVTDNVPTGPLQFRFVVTAGYDGKMLWSKKVLPANWEAGKTYDAGVQITDIAQEGCDPCDDHIWN

SEQ ID NO: 108849 - DNA, 904 bp, Zea mays subsp. mays
  misc_feature (1)..(904): Ceres Seq. ID no. 12638221
agagaaaaatctggagacgaaaccctagctagctagcccgcttccccggcgccggagccggagccggagccaggccgggatgggcgccgaggaggacgctgccgcccgccgcgagcgcctcaaggcccttcgcgccgccaaggagctcctctccacccccgacgcccccgcccccgcgcccgacgcggaccagcagaatggtgaacatgggatgacagaagaacaggtggtccaaccagaattgccaggtcctgtggatgcacccgaggatgcttccagggagaacgttagccccactaaggaatctgatgaggttgaagacaatggggaggtaccactgaagttcaggaactaccttcctcatgatgagcggctccgaggtggcaaggtggctccgctgtctcttcccaagtttgaagatccgatagctgctgatgctgctgaaccaaagcagctggagaacccctttgggaacatcgccccaaagaacccgaactgggacctgaaacgagatgtgcagaagaggattgacaagctggagaagcgcactcagaaagctctggcggagattgcattggagcagcaaaaggagaaagaggcgctggaggagggaggcgatgcagctcaagagtgacgtggtactggtgctggtccaaatgtttgtgtagaactgaggaagcagctatacgaggtcaaacagtgatgtgtttgtaatgcacggtgtggactgaagactaatgtaaggaaattgtagtcgtgtgtttgtaatgcacggtgtggatgatgctttcagttcagtatccagaattttttagttctactgatggttagtgtcttggtgattactgaattaactatgattcatctcgcgaatctgaagggtatatatagccatggagttgtc

SEQ ID NO: 108850 - protein, 184 aa, Zea mays subsp. mays
  misc_feature (1)..(184): Ceres Seq. ID no. 12638222
  misc_feature (59)..(182): Homolog of NCBI NO: 39581407 NR Description: Hypothetical protein CBG22501 [Caenorhabditis
  misc_feature (67)..(170): Homolog of NCBI NO: 21430888 NR Description: SD23244p [Drosophila melanogaster]
  misc_feature (67)..(170): Homolog of NCBI NO: 24651238 NR Description: CG15525-PA [Drosophila melanogaster]
  misc_feature (67)..(181): Homolog of NCBI NO: 33469009 NR Description: RIKEN cDNA 2700094L05 [Mus musculus]
  misc_feature (67)..(181): Homolog of NCBI NO: 20874062 NR Description: similar to hypothetical protein MGC23918
  misc_feature (67)..(173): Homolog of NCBI NO: 34866382 NR Description: similar to hypothetical protein MGC23918 [Rattus
  misc_feature (67)..(181): Homolog of NCBI NO: 20072383 NR Description: Similar to RIKEN cDNA 2700094L05 gene [Mus
  misc_feature (67)..(184): Homolog of NCBI NO: 21756313 NR Description: unnamed protein product [Homo sapiens]
  misc_feature (67)..(184): Homolog of NCBI NO: 21389497 NR Description: hypothetical protein MGC23918 [Homo sapiens]
  misc_feature (68)..(183): Homolog of NCBI NO: 18397111 NR Description: expressed protein
MGAEEDAAARRERLKALRAAKELLSTPDAPAPAPDADQQNGEHGMTEEQVVQPELPGPVDAPEDASRENVSPTKESDEVEDNGEVPLKFRNYLPHDERLRGGKVAPLSLPKFEDPIAADAAEPKQLENPFGNIAPKNPNWDLKRDVQKRIDKLEKRTQKALAEIALEQQKEKEALEEGGDAAQE

SEQ ID NO: 108851 - protein, 140 aa, Zea mays subsp. mays
  misc_feature (1)..(140): Ceres Seq. ID no. 12638223
  misc_feature (15)..(138): Homolog of NCBI NO: 39581407 NR Description: Hypothetical protein CBG22501 [Caenorhabditis
  misc_feature (23)..(126): Homolog of NCBI NO: 21430888 NR Description: SD23244p [Drosophila melanogaster]
  misc_feature (23)..(126): Homolog of NCBI NO: 24651238 NR Description: CG15525-PA [Drosophila melanogaster]
  misc_feature (23)..(137): Homolog of NCBI NO: 33469009 NR Description: RIKEN cDNA 2700094L05 [Mus musculus]
  misc_feature (23)..(137): Homolog of NCBI NO: 20874062 NR Description: similar to hypothetical protein MGC23918
  misc_feature (23)..(129): Homolog of NCBI NO: 34866382 NR Description: similar to hypothetical protein MGC23918 [Rattus
  misc_feature (23)..(137): Homolog of NCBI NO: 20072383 NR Description: Similar to RIKEN cDNA 2700094L05 gene [Mus
  misc_feature (23)..(140): Homolog of NCBI NO: 21756313 NR Description: unnamed protein product [Homo sapiens]
  misc_feature (23)..(140): Homolog of NCBI NO: 21389497 NR Description: hypothetical protein MGC23918 [Homo sapiens]
  misc_feature (24)..(139): Homolog of NCBI NO: 18397111 NR Description: expressed protein
MTEEQVVQPELPGPVDAPEDASRENVSPTKESDEVEDNGEVPLKFRNYLPHDERLRGGKVAPLSLPKFEDPIAADAAEPKQLENPFGNIAPKNPNWDLKRDVQKRIDKLEKRTQKALAEIALEQQKEKEALEEGGDAAQE

SEQ ID NO: 108852 - DNA, 818 bp, Zea mays subsp. mays
  misc_feature (1)..(818): Ceres Seq. ID no. 12635635
  misc_feature: MA Experiment ID: 20000534 Result: Up-regulated in Transcription
  misc_feature: MA Experiment 20000534 PARAMETER Experiment Name: Zm_Hybrid_Pollen_P Parameter: Age (day) Value: 8
  misc_feature: MA Experiment 20000534 PARAMETER Experiment Name: Zm_Hybrid_Pollen_P Parameter: Organism Value: Zea mays
  misc_feature: MA Experiment 20000534 PARAMETER Experiment Name: Zm_Hybrid_Pollen_P Parameter: Plant Line Value: 35A19
  misc_feature: MA Experiment 20000534 PARAMETER Experiment Name: Zm_Hybrid_Pollen_P Parameter: Tissue Value: Pollen vs. Aerial
acaaagcgattgcggcggagagagagaggaagatcggggatttatctttttctcgatactgtagtaacttttgatctatggaagcggtagacaatccagaagaaaccatcccaggcaactcttcaagattagctgggaatccaaactggggaacagcaactgttgttgggatatttgctggaatgttatatggaggcagcaaagaggcttctgcttctgtgagcaaggatgcagaggtgatgttgaagatgggtagtacacaggacaagcgagagcaacacagattgatgcgagatgctatggagaaacgattcacccgggtcactcgtggctccctcattggagggatgcgtctcgggatgttcaccgcttcatacttcagtctacagaactttttagctgagacgcgaggagtgcatgatgttttcaatttcgtgggagctggttcagctactgctgccgtatttggcttaatcatgccggggtctcttgcttggcgtgcgcggaatgtgatgctcggttcagttcttggagctacagtctgcttccctcttggttggttacaactgaagctcatggagaaggcaaacgaaggcaacaaacaagacacgagccacattggcgaggtcacaagtggtgttggtgctgctattgagagactcgaacaacagttaagaaaataagaaagggaacgttcacagtttttttttgtatgctaaattttcaagccgatggagaataagataacgaacataaacactgttcttttgttgtttcgtacaattttgtgagtatacaatatgaaaacgttgatggtt

SEQ ID NO: 108853 - protein, 201 aa, Zea mays subsp. mays
  misc_feature (1)..(201): Ceres Seq. ID no. 12635636
  misc_feature (8)..(201): Homolog of NCBI NO: 34903198 NR Description: unnamed protein product [Oryza sativa (japonica
  misc_feature (1)..(186): Homolog of NCBI NO: 9758300 NR Description: contains similarity to unknown
  misc_feature (1)..(201): Homolog of NCBI NO: 15242587 NR Description: putative protein; protein id: At5g63000.1
MEAVDNPEETIPGNSSRLAGNPNWGTATVVGIFAGMLYGGSKEASASVSKDAEVMLKMGSTQDKREQHRLMRDAMEKRFTRVTRGSLIGGMRLGMFTASYFSLQNFLAETRGVHDVFNFVGAGSATAAVFGLIMPGSLAWRARNVMLGSVLGATVCFPLGWLQLKLMEKANEGNKQDTSHIGEVTSGVGAAIERLEQQLRK

SEQ ID NO: 108854 - protein, 166 aa, Zea mays subsp. mays
  misc_feature (1)..(166): Ceres Seq. ID no. 12635637
  misc_feature (1)..(166): Homolog of NCBI NO: 34903198 NR Description: unnamed protein product [Oryza sativa (japonica
  misc_feature (1)..(151): Homolog of NCBI NO: 9758300 NR Description: contains similarity to unknown
  misc_feature (1)..(166): Homolog of NCBI NO: 15242587 NR Description: putative protein; protein id: At5g63000.1
MLYGGSKEASASVSKDAEVMLKMGSTQDKREQHRLMRDAMEKRFTRVTRGSLIGGMRLGMFTASYFSLQNFLAETRGVHDVFNFVGAGSATAAVFGLIMPGSLAWRARNVMLGSVLGATVCFPLGWLQLKLMEKANEGNKQDTSHIGEVTSGVGAAIERLEQQLRK

SEQ ID NO: 108855 - protein, 147 aa, Zea mays subsp. mays
  misc_feature (1)..(147): Ceres Seq. ID no. 12635638
  misc_feature (1)..(147): Homolog of NCBI NO: 34903198 NR Description: unnamed protein product [Oryza sativa (japonica
  misc_feature (1)..(132): Homolog of NCBI NO: 9758300 NR Description: contains similarity to unknown
  misc_feature (1)..(147): Homolog of NCBI NO: 15242587 NR Description: putative protein; protein id: At5g63000.1
MLKMGSTQDKREQHRLMRDAMEKRFTRVTRGSLIGGMRLGMFTASYFSLQNFLAETRGVHDVFNFVGAGSATAAVFGLIMPGSLAWRARNVMLGSVLGATVCFPLGWLQLKLMEKANEGNKQDTSHIGEVTSGVGAAIERLEQQLRK

SEQ ID NO: 108856 - DNA, 1104 bp, Zea mays subsp. mays
  misc_feature (1)..(1104): Ceres Seq. ID no. 15225561
cttcctgtacctgtcctcaaggtcgcccccgcgctgcccatccccctccccctcctccttcctcggcagctcgtggcgctccagtccacagaggagaggacacgacacgacgaggggccgggcagcaagctctgctcagtccgttccgcgggccggtcggtcggcgatggcgcggcacgcgggcacggcgctcctggacctggtggcggggcaggtggacccgggcgcgccggggttctggcgcgacttcctggtcggcatgctcaagccggcggcggccacggccgtggtggccatggccgtcgggctcagcttctcgcagcgcctggggctcgagggcgagatgctctacgccatcgcacgcgccttcctccagctctccgccatcggcttcgtcctccagttcatcttcgcccagaagaacgcgctctggatcctcctcgcctacctcttcatggtgacggtcgccgggtacacggcggggcagcgcgccaggcaggtgccgcgcgggaagcgcatcgcctgcgtctccatcctcgtcggcaccgccgtcaccatgctcctgctcgtcctcctcgacgtcttccccttcaccccgcgctacatcatccccgtcgccggcatgatggtcggcaacgccatgaccgtcaccggcgtcaccatgaagaagctccgggaggacgtcaagatccagaggaacctggtggagacggcgctggcgctgggcgcgacgccgcggcaggcgacgctgcagcaggtgaagcggtcgctggtcatcgcgctgtccccggtgatcgacagcgccaagacggtggggctcatcgcgctgccgggcgccatgacggggctcatcatgggcggcgcgtcgccgctggaggccatccagctgcagatcgtcgtcatgaacatgctcatgggcgcctccaccgtcagcagcatcctctccacctacctctgctggccggccttcttcaccaaggccttccagctcgacgacagggtctttgcagactaagatacatgctggattgtaatgtaaccgagtcccagttgtttgagccttttgaggtagaaacagagctaagagctgtggctttcggtgcc

SEQ ID NO: 108857 - protein, 368 aa, Zea mays subsp. mays
  misc_feature (1)..(368): Ceres Seq. ID no. 15225562
  misc_feature (67)..(286): Pfam Name: HlyD family secretion protein Pfam Description: HlyD family secretion protein
  misc_feature (31)..(305): Homolog of NCBI NO: 23008548 NR Description: COG1530: Ribonucleases G and E [Magnetospirillum
  misc_feature (74)..(337): Homolog of NCBI NO: 31194331 NR Description: ENSANGP00000015546 [Anopheles gambiae]
  misc_feature (23)..(113): Homolog of NCBI NO: 124178 NR Description: IMMEDIATE-EARLY PROTEIN IE180
LPVPVLKVAPALPIPLPLLLPRQLVALQSTEERTRHDEGPGSKLCSVRSAGRSVGDGAARGHGAPGPGGGAGGPGRAGVLARLPGRHAQAGGGHGRGGHGRRAQLLAAPGARGRDALRHRTRLPPALRHRLRPPVHLRPEERALDPPRLPLHGDGRRVHGGAARQAGAAREAHRLRLHPRRHRRHHAPARPPRRLPLHPALHHPRRRHDGRQRHDRHRRHHEEAPGGRQDPEEPGGDGAGAGRDAAAGDAAAGEAVAGHRAVPGDRQRQDGGAHRAAGRHDGAHHGRRVAAGGHPAADRRHEHAHGRLHRQQHPLHLPLLAGLLHQGLPARRQGLCRLRYMLDCNVTESQLFEPFEVETELRAVAFGA

SEQ ID NO: 108858 - protein, 337 aa, Zea mays subsp. mays
  misc_feature (1)..(337): Ceres Seq. ID no. 15225563
  misc_feature (80)..(325): Pfam Name: Uncharacterised protein family (UPF0014) Pfam Description: Uncharacterised protein family (UPF0014)
  misc_feature (91)..(330): Homolog of NCBI NO: 29142747 NR Description: putative membrane protein
  misc_feature (91)..(330): Homolog of NCBI NO: 16759481 NR Description: putative membrane protein
  misc_feature (91)..(330): Homolog of NCBI NO: 33347459 NR Description: putative metal resistance protein [Escherichia
  misc_feature (91)..(330): Homolog of NCBI NO: 15800228 NR Description: putative metal resistance protein
  misc_feature (91)..(330): Homolog of NCBI NO: 24111874 NR Description: putative metal resistance protein [Shigella
  misc_feature (85)..(330): Homolog of NCBI NO: 25010719 NR Description: Unknown [Streptococcus agalactiae NEM316]
  misc_feature (85)..(330): Homolog of NCBI NO: 22536854 NR Description: membrane protein, putative [Streptococcus
  misc_feature (93)..(330): Homolog of NCBI NO: 20806838 NR Description: predicted permease [Thermoanaerobacter
  misc_feature (83)..(336): Homolog of NCBI NO: 15228120 NR Description: expressed protein [Arabidopsis thaliana]
  misc_feature (63)..(336): Homolog of NCBI NO: 8099122 NR Description: similar to an Arabidopsis thialiana chromosome
FLYLSSRSPPRCPSPSPSSFLGSSWRSSPQRRGHDTTRGRAASSAQSVPRAGRSAMARHAGTALLDLVAGQVDPGAPGFWRDFLVGMLKPAAATAVVAMAVGLSFSQRLGLEGEMLYAIARAFLQLSAIGFVLQFIFAQKNALWILLAYLFMVTVAGYTAGQRARQVPRGKRIACVSILVGTAVTMLLLVLLDVFPFTPRYIIPVAGMMVGNAMTVTGVTMKKLREDVKIQRNLVETALALGATPRQATLQQVKRSLVIALSPVIDSAKTVGLIALPGAMTGLIMGGASPLEAIQLQIVVMNMLMGASTVSSILSTYLCWPAFFTKAFQLDDRVFAD

SEQ ID NO: 108859 - protein, 282 aa, Zea mays subsp. mays
  misc_feature (1)..(282): Ceres Seq. ID no. 15225564
  misc_feature (25)..(270): Pfam Name: Uncharacterised protein family (UPF0014) Pfam Description: Uncharacterised protein family (UPF0014)
  misc_feature (36)..(275): Homolog of NCBI NO: 15800228 NR Description: putative metal resistance protein
  misc_feature (36)..(275): Homolog of NCBI NO: 24111874 NR Description: putative metal resistance protein [Shigella
  misc_feature (30)..(275): Homolog of NCBI NO: 25010719 NR Description: Unknown [Streptococcus agalactiae NEM316]
  misc_feature (30)..(275): Homolog of NCBI NO: 22536854 NR Description: membrane protein, putative [Streptococcus
  misc_feature (36)..(275): Homolog of NCBI NO: 16759481 NR Description: putative membrane protein
  misc_feature (36)..(275): Homolog of NCBI NO: 33347459 NR Description: putative metal resistance protein [Escherichia
  misc_feature (36)..(275): Homolog of NCBI NO: 29142747 NR Description: putative membrane protein
  misc_feature (38)..(275): Homolog of NCBI NO: 20806838 NR Description: predicted permease [Thermoanaerobacter
  misc_feature (28)..(281): Homolog of NCBI NO: 15228120 NR Description: expressed protein [Arabidopsis thaliana]
  misc_feature (8)..(281): Homolog of NCBI NO: 8099122 NR Description: similar to an Arabidopsis thialiana chromosome
MARHAGTALLDLVAGQVDPGAPGFWRDFLVGMLKPAAATAVVAMAVGLSFSQRLGLEGEMLYAIARAFLQLSAIGFVLQFIFAQKNALWILLAYLFMVTVAGYTAGQRARQVPRGKRIACVSILVGTAVTMLLLVLLDVFPFTPRYIIPVAGMMVGNAMTVTGVTMKKLREDVKIQRNLVETALALGATPRQATLQQVKRSLVIALSPVIDSAKTVGLIALPGAMTGLIMGGASPLEAIQLQIVVMNMLMGASTVSSILSTYLCWPAFFTKAFQLDDRVFAD

SEQ ID NO: 108860 - DNA, 1531 bp, Zea mays subsp. mays
  misc_feature (1)..(1531): Ceres Seq. ID no. 13587063
atcgcattcacgtccaaccgttcgcttgcgccctccgcaacaacgcaacgcatcgtgacgccgccgctttttgcttttccgactgctgtttccgccttttgagtaggcgttgggcgagcttcggtttcgacggacgtagccgtcaccgcctcaccggcccggccatgggcgccgccgccgcctgttctcttcgcctctgccacacgtcaccatccgctgcgacggtagggccgcgatgactccggcggttcgggtggggaaccctcgcgatcccggtccgggcgccgcggtggtggaggacgaggaggaggcggcggtcgcgtggcgggagctgcgcggcaaggccgcggaggtcgcggctgcgggcgaggaaagggcggtcctggcccgccgcatcgaggccgcgctccaggtaaggagggaggcgctgcggcaggcggaggagctggacgagttgacgcggatggtggacctccagcaagcgcgtttggaggcggccgtcgtcggcaggaggcgggcgctcgaggccgtggagcgggggaagaagcggctgcaggagcagatcgaccgggtgctgccgctgtcgaggtccctcaccgccgcgcaccatcgagtgcaggaagcgaaggaggcgttatccggagacaaattcagactcaaggatctgcagaggctgcttcggacgaggcagcagcgcatggttagccaggttgctggtttgtaccctgtgagagtcttccatgatcttccaagacatgcagaaaacccctgtgccgatactaatggggagcatgtgacacttccagaggaaaacagaacattttcaggtggagatggaacacatttacccaccattatcaaatctccagaagcacgtggctggacattttttggttgggacattatgaagcataaaatgaagcaaaaaagttacaggaacaaggtgctacagaggtccgcagctgttctgggatatgcagcgcatgcagtcttgttcatagcttgctatctagatattcccctccgatatcccttgcgctttggagggtcccgatcttatgtgagtgatcgcttgccttcagctgatacagcatcatcggctgctttagcaagtaccaggaacaccgaatcagaactaacagaataccctcttttcctggaatgccaagacgatgactccactagtgcctcctatgccatttatttattgcacaaggatacggagcagcttctgaactatgttggagctgagagttgtggaaggcacgtgtttggtaacctacgagaacttcttaggatcgtgcagtctgataagtttgtgtacagatgatggttccaatccatgtggttttggagtgcttatgctgtagatgtattatagagatgtaagtaggtgtttttcttttctcttcttattctttcgtgtgattcattccctctttccctgcgctaggttttttatatgtgcaggaaataggcaattgtgtttttctagagaaatgaaatgtactcacacgtatggcttttttcg

SEQ ID NO: 108861 - protein, 364 aa, Zea mays subsp. mays
  misc_feature (1)..(364): Ceres Seq. ID no. 13587064
  misc_feature (236)..(327): Homolog of NCBI NO: 7486092 NR Description: hypothetical protein At2g32760 [imported] -
  misc_feature (236)..(327): Homolog of NCBI NO: 20197059 NR Description: hypothetical protein [Arabidopsis thaliana]
  misc_feature (43)..(362): Homolog of NCBI NO: 30685426 NR Description: expressed protein [Arabidopsis thaliana]
MTPAVRVGNPRDPGPGAAVVEDEEEAAVAWRELRGKAAEVAAAGEERAVLARRIEAALQVRREALRQAEELDELTRMVDLQQARLEAAVVGRRRALEAVERGKKRLQEQIDRVLPLSRSLTAAHHRVQEAKEALSGDKFRLKDLQRLLRTRQQRMVSQVAGLYPVRVFHDLPRHAENPCADTNGEHVTLPEENRTFSGGDGTHLPTIIKSPEARGWTFFGWDIMKHKMKQKSYRNKVLQRSAAVLGYAAHAVLFIACYLDIPLRYPLRFGGSRSYVSDRLPSADTASSAALASTRNTESELTEYPLFLECQDDDSTSASYAIYLLHKDTEQLLNYVGAESCGRHVFGNLRELLRIVQSDKFVYR

SEQ ID NO: 108862 - protein, 288 aa, Zea mays subsp. mays
  misc_feature (1)..(288): Ceres Seq. ID no. 13587065
  misc_feature (160)..(251): Homolog of NCBI NO: 7486092 NR Description: hypothetical protein At2g32760 [imported] -
  misc_feature (160)..(251): Homolog of NCBI NO: 20197059 NR Description: hypothetical protein [Arabidopsis thaliana]
  misc_feature (1)..(286): Homolog of NCBI NO: 30685426 NR Description: expressed protein [Arabidopsis thaliana]
MVDLQQARLEAAVVGRRRALEAVERGKKRLQEQIDRVLPLSRSLTAAHHRVQEAKEALSGDKFRLKDLQRLLRTRQQRMVSQVAGLYPVRVFHDLPRHAENPCADTNGEHVTLPEENRTFSGGDGTHLPTIIKSPEARGWTFFGWDIMKHKMKQKSYRNKVLQRSAAVLGYAAHAVLFIACYLDIPLRYPLRFGGSRSYVSDRLPSADTASSAALASTRNTESELTEYPLFLECQDDDSTSASYAIYLLHKDTEQLLNYVGAESCGRHVFGNLRELLRIVQSDKFVYR

SEQ ID NO: 108863 - protein, 210 aa, Zea mays subsp. mays
  misc_feature (1)..(210): Ceres Seq. ID no. 13587066
  misc_feature (82)..(173): Homolog of NCBI NO: 7486092 NR Description: hypothetical protein At2g32760 [imported] -
  misc_feature (82)..(173): Homolog of NCBI NO: 20197059 NR Description: hypothetical protein [Arabidopsis thaliana]
  misc_feature (1)..(208): Homolog of NCBI NO: 30685426 NR Description: expressed protein [Arabidopsis thaliana]
MVSQVAGLYPVRVFHDLPRHAENPCADTNGEHVTLPEENRTFSGGDGTHLPTIIKSPEARGWTFFGWDIMKHKMKQKSYRNKVLQRSAAVLGYAAHAVLFIACYLDIPLRYPLRFGGSRSYVSDRLPSADTASSAALASTRNTESELTEYPLFLECQDDDSTSASYAIYLLHKDTEQLLNYVGAESCGRHVFGNLRELLRIVQSDKFVYR

SEQ ID NO: 108864 - DNA, 1109 bp, Zea mays subsp. mays
  misc_feature (1)..(1109): Ceres Seq. ID no. 12635180
aaaaacaaaaaaaactagaactatctgagagacactctgtggccatggcagcttctctccaatccgccgccacattcctccactccgcaaaaatctccaccgctccttctcgcggcagtgctcacctccgttcgactcagaccgtcggcaaatcattcggcctagagacttcttctgcacgcctcacttgttcctaccaatctgatatcaaggacttcgccggaaaatgctccgacgctgttaaaatcgccggattcgctcttgcaacctctgctctcgtcgtctcgggagcaagtgcagagggtgctccgaagagactcacatatgacgagatacagagcaagacatacatggaagtcaaaggaaccggaactgccaaccagtgtccaactattgacggtggctctgagactttctccttcaaacccggtaagtacgctggcaagaagttctgcttcgagcctacttccttcaccgtcaaagccgagagtgttagcaagaacgcacctcctgagtttcagaacaccaagctcatgacccgtctcacctacacccttgacgaaatcgaaggccccttcgaggtttcttcagacggaagcgtgaacttcaaggaagaagacggaatcgactacgctgcagtcactgttcagcttccaggaggcgagcgtgtgccgttcctcttcacagtcaagcagcttgacgcctcgggcaaaccagacaacttcactggcaaattcttggtcccgtcgtaccgtggctcgtccttcttggacccaaagggtcgtggtggatccacaggatatgacaacgccgttgcattgccagctggaggcagaggagacgaagaggagctttcgaaggagaacgtgaagaacacggcagcttcggtgggagagatcactctgaaagtgaccaagagcaaaccggagacaggagaagtgatcggagtgttcgagagtcttcagccgtctgatactgacttgggtgccaaggtaccaaaggatgtgaagatccaaggggtgtggtatggacaacttgagtgatcatgttattatatcaaaacattttcttctgttcattgtatttgatgataatgagaacatcttttc

SEQ ID NO: 108865 - protein, 346 aa, Zea mays subsp. mays
  misc_feature (1)..(346): Ceres Seq. ID no. 12635181
  misc_feature (110)..(346): Pfam Name: Manganese-stabilising protein / photosystem II Pfam Description: Manganese-stabilising protein / photosystem II
  misc_feature (15)..(346): Homolog of NCBI NO: 11134054 NR Description: Oxygen-evolving enhancer protein 1, chloroplast (OEE1) (33 kDa subunit of oxygen evolving system of photosystem (OEC 33 kDa subunit) (33 kDa thylakoid membrane protein) kDa
  misc_feature (15)..(346): Homolog of NCBI NO: 30013657 NR Description: oxygen evolving complex 33 kDa photosystem II
  misc_feature (15)..(346): Homolog of NCBI NO: 15230324 NR Description: photosystem II oxygen-evolving complex 33 (OEC33)
  misc_feature (15)..(346): Homolog of NCBI NO: 99745 NR Description: photosystem II oxygen-evolving complex protein 1
  misc_feature (15)..(346): Homolog of NCBI NO: 15451006 NR Description: 33 kDa polypeptide of oxygen-evolving complex
  misc_feature (15)..(346): Homolog of NCBI NO: 22530906 NR Description: 33 kDa polypeptide of oxygen-evolving complex
  misc_feature (15)..(346): Homolog of NCBI NO: 15912247 NR Description: AT5g66570/K1F13_25 [Arabidopsis thaliana]
  misc_feature (15)..(346): Homolog of NCBI NO: 13926291 NR Description: AT5g66570/K1F13_25 [Arabidopsis thaliana]
  misc_feature (15)..(346): Homolog of NCBI NO: 21593220 NR Description: 33 kDa polypeptide of oxygen-evolving complex
  misc_feature (15)..(346): Homolog of NCBI NO: 15240013 NR Description: photosystem II oxygen-evolving complex 33 (OEC33)
KQKKLELSERHSVAMAASLQSAATFLHSAKISTAPSRGSAHLRSTQTVGKSFGLETSSARLTCSYQSDIKDFAGKCSDAVKIAGFALATSALVVSGASAEGAPKRLTYDEIQSKTYMEVKGTGTANQCPTIDGGSETFSFKPGKYAGKKFCFEPTSFTVKAESVSKNAPPEFQNTKLMTRLTYTLDEIEGPFEVSSDGSVNFKEEDGIDYAAVTVQLPGGERVPFLFTVKQLDASGKPDNFTGKFLVPSYRGSSFLDPKGRGGSTGYDNAVALPAGGRGDEEELSKENVKNTAASVGEITLKVTKSKPETGEVIGVFESLQPSDTDLGAKVPKDVKIQGVWYGQLE

SEQ ID NO: 108866 - protein, 332 aa, Zea mays subsp. mays
  misc_feature (1)..(332): Ceres Seq. ID no. 12635182
  misc_feature (96)..(332): Pfam Name: Manganese-stabilising protein / photosystem II Pfam Description: Manganese-stabilising protein / photosystem II
  misc_feature (1)..(332): Homolog of NCBI NO: 11134054 NR Description: Oxygen-evolving enhancer protein 1, chloroplast (OEE1) (33 kDa subunit of oxygen evolving system of photosystem (OEC 33 kDa subunit) (33 kDa thylakoid membrane protein) kDa
  misc_feature (1)..(332): Homolog of NCBI NO: 30013657 NR Description: oxygen evolving complex 33 kDa photosystem II
  misc_feature (1)..(332): Homolog of NCBI NO: 15230324 NR Description: photosystem II oxygen-evolving complex 33 (OEC33)
  misc_feature (1)..(332): Homolog of NCBI NO: 99745 NR Description: photosystem II oxygen-evolving complex protein 1
  misc_feature (1)..(332): Homolog of NCBI NO: 15451006 NR Description: 33 kDa polypeptide of oxygen-evolving complex
  misc_feature (1)..(332): Homolog of NCBI NO: 22530906 NR Description: 33 kDa polypeptide of oxygen-evolving complex
  misc_feature (1)..(332): Homolog of NCBI NO: 15912247 NR Description: AT5g66570/K1F13_25 [Arabidopsis thaliana]
  misc_feature (1)..(332): Homolog of NCBI NO: 13926291 NR Description: AT5g66570/K1F13_25 [Arabidopsis thaliana]
  misc_feature (1)..(332): Homolog of NCBI NO: 21593220 NR Description: 33 kDa polypeptide of oxygen-evolving complex
  misc_feature (1)..(332): Homolog of NCBI NO: 15240013 NR Description: photosystem II oxygen-evolving complex 33 (OEC33)
MAASLQSAATFLHSAKISTAPSRGSAHLRSTQTVGKSFGLETSSARLTCSYQSDIKDFAGKCSDAVKIAGFALATSALVVSGASAEGAPKRLTYDEIQSKTYMEVKGTGTANQCPTIDGGSETFSFKPGKYAGKKFCFEPTSFTVKAESVSKNAPPEFQNTKLMTRLTYTLDEIEGPFEVSSDGSVNFKEEDGIDYAAVTVQLPGGERVPFLFTVKQLDASGKPDNFTGKFLVPSYRGSSFLDPKGRGGSTGYDNAVALPAGGRGDEEELSKENVKNTAASVGEITLKVTKSKPETGEVIGVFESLQPSDTDLGAKVPKDVKIQGVWYGQLE

SEQ ID NO: 108867 - protein, 230 aa, Zea mays subsp. mays
  misc_feature (1)..(230): Ceres Seq. ID no. 12635183
  misc_feature (1)..(230): Pfam Name: Manganese-stabilising protein / photosystem II Pfam Description: Manganese-stabilising protein / photosystem II
  misc_feature (1)..(230): Homolog of NCBI NO: 11134054 NR Description: Oxygen-evolving enhancer protein 1, chloroplast (OEE1) (33 kDa subunit of oxygen evolving system of photosystem (OEC 33 kDa subunit) (33 kDa thylakoid membrane protein) kDa
  misc_feature (1)..(230): Homolog of NCBI NO: 30013657 NR Description: oxygen evolving complex 33 kDa photosystem II
  misc_feature (1)..(230): Homolog of NCBI NO: 15230324 NR Description: photosystem II oxygen-evolving complex 33 (OEC33)
  misc_feature (1)..(230): Homolog of NCBI NO: 99745 NR Description: photosystem II oxygen-evolving complex protein 1
  misc_feature (1)..(230): Homolog of NCBI NO: 15451006 NR Description: 33 kDa polypeptide of oxygen-evolving complex
  misc_feature (1)..(230): Homolog of NCBI NO: 22530906 NR Description: 33 kDa polypeptide of oxygen-evolving complex
  misc_feature (1)..(230): Homolog of NCBI NO: 15912247 NR Description: AT5g66570/K1F13_25 [Arabidopsis thaliana]
  misc_feature (1)..(230): Homolog of NCBI NO: 13926291 NR Description: AT5g66570/K1F13_25 [Arabidopsis thaliana]
  misc_feature (1)..(230): Homolog of NCBI NO: 21593220 NR Description: 33 kDa polypeptide of oxygen-evolving complex
  misc_feature (1)..(230): Homolog of NCBI NO: 15240013 NR Description: photosystem II oxygen-evolving complex 33 (OEC33)
MEVKGTGTANQCPTIDGGSETFSFKPGKYAGKKFCFEPTSFTVKAESVSKNAPPEFQNTKLMTRLTYTLDEIEGPFEVSSDGSVNFKEEDGIDYAAVTVQLPGGERVPFLFTVKQLDASGKPDNFTGKFLVPSYRGSSFLDPKGRGGSTGYDNAVALPAGGRGDEEELSKENVKNTAASVGEITLKVTKSKPETGEVIGVFESLQPSDTDLGAKVPKDVKIQGVWYGQLE

SEQ ID NO: 108868 - DNA, 686 bp, Zea mays subsp. mays
  misc_feature (1)..(686): Ceres Seq. ID no. 13599181
atatattagagtagagagcagaaaagaagaagttaaaaaggtagatcgaatgaacagaaatggagaggaggaagtggccgagaagaagaggaggaggagggagggggtgcaggtgtccctcagaggaggctgcttggctgcttcagccactgctatagcggtaatgctgatggcaacagagaagggtgtggctgacatctatggcttgccgctccctctcaactccagctggtctttttctccctcctaccagtatgtggtgggggcatgcacggtgaccattctctactccctgttccacctctgtctaggaatttacaggctcctcactggatcacccatcacaccctcccgttcccaagcttggctttgtttcatcttcgatcagctcttcagctatttgataatgagcgctggatcagccggtattggagttacaaacctcaacaagaccggcatcaaacacactcctctccctgacttctgcaagaccctttcttatttctgcaatcacgtcgccctctccctcctcctagtcttgctctccttcatctttctcgcctcctcttccctctttaatgtccttgtgctctccactctctagtctcatggattctctattgttggtgctctatataatctaagacagactctaattattattatttatgatcacttgcattccc

SEQ ID NO: 108869 - protein, 200 aa, Zea mays subsp. mays
  misc_feature (1)..(200): Ceres Seq. ID no. 13599182
  misc_feature (33)..(185): Pfam Name: Domain of unknown function (DUF588) Pfam Description: Domain of unknown function (DUF588)
  misc_feature (17)..(194): Homolog of NCBI NO: 38344646 NR Description: OSJNBa0094P09.18 [Oryza sativa (japonica
  misc_feature (35)..(186): Homolog of NCBI NO: 21554768 NR Description: unknown [Arabidopsis thaliana]
  misc_feature (35)..(186): Homolog of NCBI NO: 15234870 NR Description: expressed integral membrane protein common family
  misc_feature (25)..(193): Homolog of NCBI NO: 15233256 NR Description: expressed integral membrane protein common family
  misc_feature (21)..(130): Homolog of NCBI NO: 34910750 NR Description: P0022F10.21 [Oryza sativa (japonica
  misc_feature (31)..(198): Homolog of NCBI NO: 15228175 NR Description: Arabidopsis hypothetical integral membrane
  misc_feature (132)..(199): Homolog of NCBI NO: 15219983 NR Description: hypothetical integral membrane protein common
  misc_feature (17)..(84): Homolog of NCBI NO: 15219983 NR Description: hypothetical integral membrane protein common
  misc_feature (6)..(199): Homolog of NCBI NO: 7715593 NR Description: F20B17.20 [Arabidopsis thaliana]
YIRVESRKEEVKKVDRMNRNGEEEVAEKKRRRREGVQVSLRGGCLAASATAIAVMLMATEKGVADIYGLPLPLNSSWSFSPSYQYVVGACTVTILYSLFHLCLGIYRLLTGSPITPSRSQAWLCFIFDQLFSYLIMSAGSAGIGVTNLNKTGIKHTPLPDFCKTLSYFCNHVALSLLLVLLSFIFLASSSLFNVLVLSTL

SEQ ID NO: 108870 - protein, 184 aa, Zea mays subsp. mays
  misc_feature (1)..(184): Ceres Seq. ID no. 13599183
  misc_feature (17)..(169): Pfam Name: Domain of unknown function (DUF588) Pfam Description: Domain of unknown function (DUF588)
  misc_feature (1)..(178): Homolog of NCBI NO: 38344646 NR Description: OSJNBa0094P09.18 [Oryza sativa (japonica
  misc_feature (19)..(170): Homolog of NCBI NO: 21554768 NR Description: unknown [Arabidopsis thaliana]
  misc_feature (19)..(170): Homolog of NCBI NO: 15234870 NR Description: expressed integral membrane protein common family
  misc_feature (9)..(177): Homolog of NCBI NO: 15233256 NR Description: expressed integral membrane protein common family
  misc_feature (5)..(114): Homolog of NCBI NO: 34910750 NR Description: P0022F10.21 [Oryza sativa (japonica
  misc_feature (15)..(182): Homolog of NCBI NO: 15228175 NR Description: Arabidopsis hypothetical integral membrane
  misc_feature (116)..(183): Homolog of NCBI NO: 15219983 NR Description: hypothetical integral membrane protein common
  misc_feature (1)..(68): Homolog of NCBI NO: 15219983 NR Description: hypothetical integral membrane protein common
  misc_feature (1)..(183): Homolog of NCBI NO: 7715593 NR Description: F20B17.20 [Arabidopsis thaliana]
MNRNGEEEVAEKKRRRREGVQVSLRGGCLAASATAIAVMLMATEKGVADIYGLPLPLNSSWSFSPSYQYVVGACTVTILYSLFHLCLGIYRLLTGSPITPSRSQAWLCFIFDQLFSYLIMSAGSAGIGVTNLNKTGIKHTPLPDFCKTLSYFCNHVALSLLLVLLSFIFLASSSLFNVLVLSTL

SEQ ID NO: 108871 - protein, 146 aa, Zea mays subsp. mays
  misc_feature (1)..(146): Ceres Seq. ID no. 13599184
  misc_feature (1)..(131): Pfam Name: Domain of unknown function (DUF588) Pfam Description: Domain of unknown function (DUF588)
  misc_feature (1)..(140): Homolog of NCBI NO: 38344646 NR Description: OSJNBa0094P09.18 [Oryza sativa (japonica
  misc_feature (1)..(132): Homolog of NCBI NO: 21554768 NR Description: unknown [Arabidopsis thaliana]
  misc_feature (1)..(132): Homolog of NCBI NO: 15234870 NR Description: expressed integral membrane protein common family
  misc_feature (1)..(139): Homolog of NCBI NO: 15233256 NR Description: expressed integral membrane protein common family
  misc_feature (1)..(76): Homolog of NCBI NO: 34910750 NR Description: P0022F10.21 [Oryza sativa (japonica
  misc_feature (1)..(144): Homolog of NCBI NO: 15228175 NR Description: Arabidopsis hypothetical integral membrane
  misc_feature (78)..(145): Homolog of NCBI NO: 15219983 NR Description: hypothetical integral membrane protein common
  misc_feature (1)..(30): Homolog of NCBI NO: 15219983 NR Description: hypothetical integral membrane protein common
  misc_feature (1)..(145): Homolog of NCBI NO: 7715593 NR Description: F20B17.20 [Arabidopsis thaliana]
MLMATEKGVADIYGLPLPLNSSWSFSPSYQYVVGACTVTILYSLFHLCLGIYRLLTGSPITPSRSQAWLCFIFDQLFSYLIMSAGSAGIGVTNLNKTGIKHTPLPDFCKTLSYFCNHVALSLLLVLLSFIFLASSSLFNVLVLSTL

SEQ ID NO: 108872 - DNA, 694 bp, Zea mays subsp. mays
  misc_feature (1)..(694): Ceres Seq. ID no. 13599185
acgaatcccctcctcacttcgcccctccccctctcctatttcttctctccgggccccgggccaaaattccatcctaagttccatcgaagagggcggcaaggggcgatccggatagcgcaagagcgaccatggcctacgtcgagagaggtgttgtgaaaggcaaacggacaatctggagactaagcataatccccgacttctttaaggctattgtgaacttcatcagaatgttcttcctcacaatgttttctatcgagaaaacagacagctataagaaaggatatggtagtggtaagaagtgggatggtggacctggtgggggaggtcctggtgggggtccatatggtggtgggggcggcggtggaggtggccctcgcggtcctcgcacactatctgacctccgatcaaacgatcagagttccctccctgcttgtggatcctgctgcggatgacatcttaacaaaagaacaacatattataatgacagaaaaacttccgtatttcatttcagcagagcaaaatcattgtgatgccgtgaagagtctagcatgtccagtatatattctgtagcttgtttctgatgtgatttgcatactgtattcatcatcgctttgccatgctgaattgtcctggatggagtcaaaatcttatccttaatactggcttcctgttgtgcaatgtgaatttactatgc

SEQ ID NO: 108873 - protein, 107 aa, Zea mays subsp. mays
  misc_feature (1)..(107): Ceres Seq. ID no. 13599186
  misc_feature (1)..(103): Homolog of NCBI NO: 28571165 NR Description: Selenoprotein G CG1844-PA [Drosophila
  misc_feature (1)..(103): Homolog of NCBI NO: 16767882 NR Description: GH03581p [Drosophila melanogaster]
  misc_feature (1)..(81): Homolog of NCBI NO: 23452032 NR Description: selenoprotein SelK1 [Chlamydomonas reinhardtii]
  misc_feature (1)..(107): Homolog of NCBI NO: 24641445 NR Description: CG1840-PA [Drosophila melanogaster]
  misc_feature (42)..(101): Homolog of NCBI NO: 7486876 NR Description: hypothetical protein T12G13.70 - Arabidopsis
  misc_feature (1)..(107): Homolog of NCBI NO: 22328481 NR Description: glycine-rich protein [Arabidopsis thaliana]
  misc_feature (1)..(97): Homolog of NCBI NO: 34902142 NR Description: hypothetical protein [Oryza sativa (japonica
MAYVERGVVKGKRTIWRLSIIPDFFKAIVNFIRMFFLTMFSIEKTDSYKKGYGSGKKWDGGPGGGGPGGGPYGGGGGGGGGPRGPRTLSDLRSNDQSSLPACGSCCG

SEQ ID NO: 108874 - protein, 95 aa, Zea mays subsp. mays
  misc_feature (1)..(95): Ceres Seq. ID no. 13599187
MVVVRSGMVDLVGEVLVGVHMVVGAAVEVALAVLAHYLTSDQTIRVPSLLVDPAADDILTKEQHIIMTEKLPYFISAEQNHCDAVKSLACPVYIL

SEQ ID NO: 108875 - protein, 88 aa, Zea mays subsp. mays; identical to SEQ ID NO: 59309
  misc_feature (1)..(88): Ceres Seq. ID no. 13599188

SEQ ID NO: 108876 - DNA, 968 bp, Zea mays subsp. mays
  misc_feature (1)..(968): Ceres Seq. ID no. 15226331
gaatcagcttctctccgataccttcttaaaaaaaaatcaaaaaaaatttcaatatgcaaagaaaaacaatggtgacgacgtcgtctcgtacaaagtctaacggccctgtgctccgttcccaatcgccgtcgggccgtttctgcggcgcttactctaatccaatcccgtcgtcgtcgtcttcctcagcgttcgcttcttctacgagctctagcttctcatctccttcctcagctttcttcagcaaccgtcacgataatcatcaccacagccaccaccgctccgcgtcaccgactcgcgtgaatctatacaaacaaccgcaaccgattgcgttttcgctagacaccagatccatctccccgacgacgacgaacagatccatctccgtcgcgaagaagcctcagcctagcaagatctcttccccgaggaggtgtatgtgctctccgacgacgcatcccggatccttccgatgcagtttgcataaaaacgtggcgaatccgcacgggcaaggaacggcgtcgtatccgacgaacagtttgaacatgcggagatccgcgatgacgaattcgctggtgaggatcggtggagttgagggagagtgggtgaggagagcgttgacgactttgataaggccttcgtcgcatcatctgagaaggagagctgcttatcagcctcgtcccagtaggctatcgatcatgtcgaaggccgccaccgagtgtaattgatatgatattttaggtttctggtttgttcttctctttaataaattaatagggctgcagatctgggaaggaaggatctgaatcgggcgagatctgcggcgattgtgggagagaatttcaaattcgaaatcgagttttgtaaaacgaagatcgaaagaagcactcaccatcatatattttttttttgttgttgggtgtagaaagatgcgaaatgcatttgtacatacttaattttactgttcttgcgtc

SEQ ID NO: 108877 - protein, 222 aa, Zea mays subsp. mays
  misc_feature (1)..(222): Ceres Seq. ID no. 15226332
  misc_feature (138)..(218): Homolog of NCBI NO: 30017516 NR Description: hypothetical protein [Oryza sativa (japonica
  misc_feature (45)..(210): Homolog of NCBI NO: 15241329 NR Description: hypothetical protein [Arabidopsis thaliana]
  misc_feature (22)..(217): Homolog of NCBI NO: 24461857 NR Description: CTV.15 [Poncirus trifoliata]
  misc_feature (6)..(217): Homolog of NCBI NO: 21618161 NR Description: serine-rich protein [Arabidopsis thaliana]
  misc_feature (6)..(217): Homolog of NCBI NO: 15238753 NR Description: serine-rich protein [Arabidopsis thaliana]
  misc_feature (6)..(217): Homolog of NCBI NO: 15238947 NR Description: expressed protein [Arabidopsis thaliana]
MQRKTMVTTSSRTKSNGPVLRSQSPSGRFCGAYSNPIPSSSSSSAFASSTSSSFSSPSSAFFSNRHDNHHHSHHRSASPTRVNLYKQPQPIAFSLDTRSISPTTTNRSISVAKKPQPSKISSPRRCMCSPTTHPGSFRCSLHKNVANPHGQGTASYPTNSLNMRRSAMTNSLVRIGGVEGEWVRRALTTLIRPSSHHLRRRAAYQPRPSRLSIMSKAATECN

SEQ ID NO: 108878 - protein, 217 aa, Zea mays subsp. mays
  misc_feature (1)..(217): Ceres Seq. ID no. 15226333
  misc_feature (1)..(212): Homolog of NCBI NO: 15238947 NR Description: expressed protein [Arabidopsis thaliana]
  misc_feature (133)..(213): Homolog of NCBI NO: 30017516 NR Description: hypothetical protein [Oryza sativa (japonica
  misc_feature (40)..(205): Homolog of NCBI NO: 15241329 NR Description: hypothetical protein [Arabidopsis thaliana]
  misc_feature (17)..(212): Homolog of NCBI NO: 24461857 NR Description: CTV.15 [Poncirus trifoliata]
  misc_feature (1)..(212): Homolog of NCBI NO: 21618161 NR Description: serine-rich protein [Arabidopsis thaliana]
  misc_feature (1)..(212): Homolog of NCBI NO: 15238753 NR Description: serine-rich protein [Arabidopsis thaliana]
MVTTSSRTKSNGPVLRSQSPSGRFCGAYSNPIPSSSSSSAFASSTSSSFSSPSSAFFSNRHDNHHHSHHRSASPTRVNLYKQPQPIAFSLDTRSISPTTTNRSISVAKKPQPSKISSPRRCMCSPTTHPGSFRCSLHKNVANPHGQGTASYPTNSLNMRRSAMTNSLVRIGGVEGEWVRRALTTLIRPSSHHLRRRAAYQPRPSRLSIMSKAATECN

SEQ ID NO: 108879 - DNA, 686 bp, Zea mays subsp. mays
  misc_feature (1)..(686): Ceres Seq. ID no. 13599195
agatctgatcatttggaagtaaaactagttgaaaggttaagaaaaaaaaaaagacagagaaagaatggcagaaacggagcaaaaggaggtagaagaaaagggatcgttgatctcaggcttgttggataaagccaaaggtttctttgccgagaagcttgctaatattccgacgccggaagccaccgtggacgacgtagacttcaaaggtgtgactcgtcaaggagttgattatcacgccaaggtctccgtcaagaacccttaccctcaggccatccctatttgccagatctcttacatcctcaagagtgacacaaggatgatagcgtctggtacaataccggatccgggttcgttgatcgcgaacgggtcgacggttctggacgtaccggtgaaggtgccttacagcatagcggtgagtttgatgaaggacatgtgtttggactgggacattgactatcaactcgacattggattgaccatcgacattcctattgttggtgacattaccattcctgtctctactcagggtgagatgaagctcccttcccttcgcgacttcttttaatcatctatataagttataatctgatttttcaataagtacgatccgtaaacgacatagacgatcgttggatgtttcagttgtggactcttgtgtttgttggttatatgtatttgttgctttg

SEQ ID NO: 108880 - protein, 166 aa, Zea mays subsp. mays
  misc_feature (1)..(166): Ceres Seq. ID no. 13599196
  misc_feature (17)..(166): Pfam Name: Late embryogenesis abundant protein Pfam Description: Late embryogenesis abundant protein
  misc_feature (19)..(166): Homolog of NCBI NO: 7489027 NR Description: late embryogenesis (Lea)-like protein - tomato
  misc_feature (16)..(166): Homolog of NCBI NO: 1170745 NR Description: Late embryogenesis abundant protein Lea14-A
  misc_feature (1)..(164): Homolog of NCBI NO: 34912834 NR Description: putative embryogenesis-abundant protein
  misc_feature (16)..(166): Homolog of NCBI NO: 1170746 NR Description: Desiccation protectant protein Lea14 homolog
  misc_feature (1)..(166): Homolog of NCBI NO: 3789986 NR Description: desiccation protein [Brassica napus]
  misc_feature (1)..(166): Homolog of NCBI NO: 21555248 NR Description: putative desiccation related protein [Arabidopsis
  misc_feature (1)..(166): Homolog of NCBI NO: 15225930 NR Description: desiccation related protein -related [Arabidopsis
MAETEQKEVEEKGSLISGLLDKAKGFFAEKLANIPTPEATVDDVDFKGVTRQGVDYHAKVSVKNPYPQAIPICQISYILKSDTRMIASGTIPDPGSLIANGSTVLDVPVKVPYSIAVSLMKDMCLDWDIDYQLDIGLTIDIPIVGDITIPVSTQGEMKLPSLRDFF

SEQ ID NO: 108881 - DNA, 1145 bp, Zea mays subsp. mays
  misc_feature (1)..(1145): Ceres Seq. ID no. 12635649
aggagaagtgaaacatttgttcacttgtgcagcccaggtgcatgttgtccagagataagcaggtgatggctgcgccgatggccgcggcggacggcgggcttaggcggctgttcgagaagccgctgccggagaacccgacgctgctggaggcgctctcggcgtggaaccgcaacgtgcaccaccccagcagcaagcccatcgacacggcgtccttcacggagatcttcggcgagctccacttccaggagaagcagcagcccgaccgaggcgccctcctgccgccgtcgccgtcgcccccgccgacgccgtcgcccccgccgacgccgctccctccttcccgcacgctgtcgtggctcgacatcgcggccgaggccgagaagagcaaggacgactcgtcgctggacgcgctgctgaggcccaagccagcgaccaccgtggccacggtgaagaggagcgcgagcttctgcaccaagaagggctcctccgcgtcgctgctgctctgcaccgaggggctcggctccgagagcaccgtggacgctgacgacatgttcaaggacggcgacgccgaggccgaggccgaggccgccgccgccgcgctcaagggcacggacacggcggacggcagcgacgccgaggaggcggtgaaggaggagaggcagcccaagacgttcccgccgccgataccgtccatcgggcgcggcggcaagccgtacgtgtgcttccggtcgttccgggaggacggccggttcgtgctgctggaggtggtgatccccgggaaggagctcctgcaggccacgcgcgagggcggccggctcaggctgcagttcgccaacgctgccgcaggtggtgtgggtgtcgtcgacgaggcggtgcacggaggtgacgacgatggcgacccccgtggcaagaacgcatgcatagacgacgacgaccacgatgacgagcgctaagtgatcgtcggggttcgttgatgtacttggcatactttatcacgatcgataattgtcctactactactgctacggatgatgatgatgcaatggtgaatcatgcggatgagaagcatcggctaactaattaattaatgtttctaaagtgttcttcagaaagtgatctgaaaagcgttgtgctcgtcctattcagtc

SEQ ID NO: 108882 - protein, 302 aa, Zea mays subsp. mays
  misc_feature (1)..(302): Ceres Seq. ID no. 12635650
  misc_feature (78)..(101): Homolog of NCBI NO: 29833843 NR Description: putative proline-rich protein [Streptomyces
  misc_feature (148)..(264): Homolog of NCBI NO: 15221889 NR Description: hypothetical protein; protein id: At1g54740.1
  misc_feature (188)..(284): Homolog of NCBI NO: 38346324 NR Description: OJ000126_13.6 [Oryza sativa (japonica
  misc_feature (139)..(261): Homolog of NCBI NO: 15242230 NR Description: unknown protein
MLSRDKQVMAAPMAAADGGLRRLFEKPLPENPTLLEALSAWNRNVHHPSSKPIDTASFTEIFGELHFQEKQQPDRGALLPPSPSPPPTPSPPPTPLPPSRTLSWLDIAAEAEKSKDDSSLDALLRPKPATTVATVKRSASFCTKKGSSASLLLCTEGLGSESTVDADDMFKDGDAEAEAEAAAAALKGTDTADGSDAEEAVKEERQPKTFPPPIPSIGRGGKPYVCFRSFREDGRFVLLEVVIPGKELLQATREGGRLRLQFANAAAGGVGVVDEAVHGGDDDGDPRGKNACIDDDDHDDER

SEQ ID NO: 108883 - protein, 294 aa, Zea mays subsp. mays
  misc_feature (1)..(294): Ceres Seq. ID no. 12635651
  misc_feature (70)..(93): Homolog of NCBI NO: 29833843 NR Description: putative proline-rich protein [Streptomyces
  misc_feature (140)..(256): Homolog of NCBI NO: 15221889 NR Description: hypothetical protein; protein id: At1g54740.1
  misc_feature (180)..(276): Homolog of NCBI NO: 38346324 NR Description: OJ000126_13.6 [Oryza sativa (japonica
  misc_feature (131)..(253): Homolog of NCBI NO: 15242230 NR Description: unknown protein
MAAPMAAADGGLRRLFEKPLPENPTLLEALSAWNRNVHHPSSKPIDTASFTEIFGELHFQEKQQPDRGALLPPSPSPPPTPSPPPTPLPPSRTLSWLDIAAEAEKSKDDSSLDALLRPKPATTVATVKRSASFCTKKGSSASLLLCTEGLGSESTVDADDMFKDGDAEAEAEAAAAALKGTDTADGSDAEEAVKEERQPKTFPPPIPSIGRGGKPYVCFRSFREDGRFVLLEVVIPGKELLQATREGGRLRLQFANAAAGGVGVVDEAVHGGDDDGDPRGKNACIDDDDHDDER

SEQ ID NO: 108884 - protein, 290 aa, Zea mays subsp. mays
  misc_feature (1)..(290): Ceres Seq. ID no. 12635652
  misc_feature (66)..(89): Homolog of NCBI NO: 29833843 NR Description: putative proline-rich protein [Streptomyces
  misc_feature (136)..(252): Homolog of NCBI NO: 15221889 NR Description: hypothetical protein; protein id: At1g54740.1
  misc_feature (176)..(272): Homolog of NCBI NO: 38346324 NR Description: OJ000126_13.6 [Oryza sativa (japonica
  misc_feature (127)..(249): Homolog of NCBI NO: 15242230 NR Description: unknown protein
MAAADGGLRRLFEKPLPENPTLLEALSAWNRNVHHPSSKPIDTASFTEIFGELHFQEKQQPDRGALLPPSPSPPPTPSPPPTPLPPSRTLSWLDIAAEAEKSKDDSSLDALLRPKPATTVATVKRSASFCTKKGSSASLLLCTEGLGSESTVDADDMFKDGDAEAEAEAAAAALKGTDTADGSDAEEAVKEERQPKTFPPPIPSIGRGGKPYVCFRSFREDGRFVLLEVVIPGKELLQATREGGRLRLQFANAAAGGVGVVDEAVHGGDDDGDPRGKNACIDDDDHDDER

SEQ ID NO: 108885 - DNA, 674 bp, Zea mays subsp. mays
  misc_feature (1)..(674): Ceres Seq. ID no. 13586951
acatcctaatcgaaaagcacacggttgcgagtttgcgaccgcattgcatcgtgcgcggctgcagcacgaagacgaagctctggtagatggcgagcagcgcggaggagcgcttcctgaggcagctgagcgcgagcaacggcggcgacgcaggggtctacggcggccagcagctgggccacaaggagtactgcgcggagaggaggggctcccggcggtggtccaggaagcgggccgccgccgcgaggggctactgcggcgccggcggcgggtacgactacgactacgacgtgaagcagcaggcagaggccgcctctgccgccgcgaggaagcgggtgatagtggtggtggacgagacctcgggctccaagcacgccatgatgtgggcgctcacccacgtcgccagcaagggggacttcctgacgctgctccacgtcctgctgccgcactccgcctccggcggcggctgtagcaggggcgaggaggcctcctccctcgccaactcgctcggcacgctctgcaaggcgtccaggccagaggtgcgcatctgcagacacacatgcacttgcgcatctgcagacacactcgctcggcacgctcggtaccttcttttggttagctgctcgttactagtgcacattcacaccaactttggctacagctaaccttcttttggt

SEQ ID NO: 108886 - protein, 191 aa, Zea mays subsp. mays
  misc_feature (1)..(191): Ceres Seq. ID no. 13586952
  misc_feature (80)..(153): Pfam Name: Universal stress protein family Pfam Description: Universal stress protein family
  misc_feature (27)..(153): Homolog of NCBI NO: 15219439 NR Description: expressed protein [Arabidopsis thaliana]
  misc_feature (1)..(153): Homolog of NCBI NO: 34907308 NR Description: hypothetical protein~similar to Arabidopsis
MASSAEERFLRQLSASNGGDAGVYGGQQLGHKEYCAERRGSRRWSRKRAAAARGYCGAGGGYDYDYDVKQQAEAASAAARKRVIVVVDETSGSKHAMMWALTHVASKGDFLTLLHVLLPHSASGGGCSRGEEASSLANSLGTLCKASRPEVRICRHTCTCASADTLARHARYLLLVSCSLLVHIHTNFGYS

SEQ ID NO: 108887 - protein, 155 aa, Zea mays subsp. mays
  misc_feature (1)..(155): Ceres Seq. ID no. 13586953
HPNRKAHGCEFATALHRARLQHEDEALVDGEQRGGALPEAAEREQRRRRRGLRRPAAGPQGVLRGEEGLPAVVQEAGRRREGLLRRRRRVRLRLRREAAGRGRLCRREEAGDSGGGRDLGLQARHDVGAHPRRQQGGLPDAAPRPAAALRLRRRL

SEQ ID NO: 108888 - protein, 95 aa, Zea mays subsp. mays
  misc_feature (1)..(95): Ceres Seq. ID no. 13586954
  misc_feature (1)..(57): Pfam Name: Universal stress protein family Pfam Description: Universal stress protein family
  misc_feature (1)..(57): Homolog of NCBI NO: 15219439 NR Description: expressed protein [Arabidopsis thaliana]
  misc_feature (1)..(57): Homolog of NCBI NO: 34907308 NR Description: hypothetical protein~similar to Arabidopsis
MMWALTHVASKGDFLTLLHVLLPHSASGGGCSRGEEASSLANSLGTLCKASRPEVRICRHTCTCASADTLARHARYLLLVSCSLLVHIHTNFGYS

SEQ ID NO: 108889 - DNA, 894 bp, Zea mays subsp. mays
  misc_feature (1)..(894): Ceres Seq. ID no. 13599595
aaaacacaaaaccagacctcaacttcaaacagcttctgaacaactcttgaaaccaaaaacttctctaatgccggaagaaatacgagagcacggtggtcacaccgatcctaaaccttctccaccaccgccaaaacgtggcctcatcagccgcaagagacagctcgtgtttctctccttcatgattctactagctgctaaaggactcgttggtatcggagaagtagcgtttgtaatactgtcttatatatacttgtacgagttcatctccaggtttgccttcccacgcaagcaaaacgagcagaggaggagactctcaaaccctaaaaacaaactctttcaagcttacttcctcgccactgccatcatcggcctactcttcccgatttgctacatcggagatggactataccggggagacatccacggtgttagagctgcagctccacatcttttcctcctctccggtcaagccttcaccgaaccaattggtttctccgaccggtttgcaacacccattggtattctcggaccggttttctacaacgctcgtcgtatcttcgctctgttggattgggttaaagccgagttcgcagatattcagcgtccaggtggtccaataagattgtacggaggaagagctatagcgtcggttaacaccgtcatgtggttttacaatctgtttggtctcttgttgcctgtgtttcttcctcggtcttgtgagatttacttctcagccgacgacaacaaagtagattaagtaacctcccgtctactttctactttagaatctcttatgttgtgtttgtgtcagtgcttggtaaagattattgttaataaaagcgacagtttatgactgcaaaaaaaaaaaaaaaaaagcttatcgataccgtcgac

SEQ ID NO: 108890 - protein, 251 aa, Zea mays subsp. mays
  misc_feature (1)..(251): Ceres Seq. ID no. 13599596
  misc_feature (46)..(247): Homolog of NCBI NO: 15217782 NR Description: expressed protein [Arabidopsis thaliana]
  misc_feature (33)..(251): Homolog of NCBI NO: 37536624 NR Description: unknown protein [Oryza sativa (japonica
  misc_feature (18)..(247): Homolog of NCBI NO: 38347228 NR Description: OSJNBa0044M19.10 [Oryza sativa (japonica
  misc_feature (21)..(246): Homolog of NCBI NO: 18423389 NR Description: expressed protein [Arabidopsis thaliana]
  misc_feature (21)..(246): Homolog of NCBI NO: 15146256 NR Description: AT5g52420/K24M7_17 [Arabidopsis thaliana]
  misc_feature (23)..(251): Homolog of NCBI NO: 15237854 NR Description: expressed protein [Arabidopsis thaliana]
KHKTRPQLQTASEQLLKPKTSLMPEEIREHGGHTDPKPSPPPPKRGLISRKRQLVFLSFMILLAAKGLVGIGEVAFVILSYIYLYEFISRFAFPRKQNEQRRRLSNPKNKLFQAYFLATAIIGLLFPICYIGDGLYRGDIHGVRAAAPHLFLLSGQAFTEPIGFSDRFATPIGILGPVFYNARRIFALLDWVKAEFADIQRPGGPIRLYGGRAIASVNTVMWFYNLFGLLLPVFLPRSCEIYFSADDNKVD

SEQ ID NO: 108891 - protein, 229 aa, Zea mays subsp. mays
  misc_feature (1)..(229): Ceres Seq. ID no. 13599597
  misc_feature (24)..(225): Homolog of NCBI NO: 15217782 NR Description: expressed protein [Arabidopsis thaliana]
  misc_feature (11)..(229): Homolog of NCBI NO: 37536624 NR Description: unknown protein [Oryza sativa (japonica
  misc_feature (1)..(225): Homolog of NCBI NO: 38347228 NR Description: OSJNBa0044M19.10 [Oryza sativa (japonica
  misc_feature (1)..(224): Homolog of NCBI NO: 18423389 NR Description: expressed protein [Arabidopsis thaliana]
  misc_feature (1)..(224): Homolog of NCBI NO: 15146256 NR Description: AT5g52420/K24M7_17 [Arabidopsis thaliana]
  misc_feature (1)..(229): Homolog of NCBI NO: 15237854 NR Description: expressed protein [Arabidopsis thaliana]
MPEEIREHGGHTDPKPSPPPPKRGLISRKRQLVFLSFMILLAAKGLVGIGEVAFVILSYIYLYEFISRFAFPRKQNEQRRRLSNPKNKLFQAYFLATAIIGLLFPICYIGDGLYRGDIHGVRAAAPHLFLLSGQAFTEPIGFSDRFATPIGILGPVFYNARRIFALLDWVKAEFADIQRPGGPIRLYGGRAIASVNTVMWFYNLFGLLLPVFLPRSCEIYFSADDNKVD

SEQ ID NO: 108892 - protein, 192 aa, Zea mays subsp. mays
  misc_feature (1)..(192): Ceres Seq. ID no. 13599598
  misc_feature (1)..(188): Homolog of NCBI NO: 15217782 NR Description: expressed protein [Arabidopsis thaliana]
  misc_feature (1)..(192): Homolog of NCBI NO: 37536624 NR Description: unknown protein [Oryza sativa (japonica
  misc_feature (1)..(188): Homolog of NCBI NO: 38347228 NR Description: OSJNBa0044M19.10 [Oryza sativa (japonica
  misc_feature (1)..(187): Homolog of NCBI NO: 18423389 NR Description: expressed protein [Arabidopsis thaliana]
  misc_feature (1)..(187): Homolog of NCBI NO: 15146256 NR Description: AT5g52420/K24M7_17 [Arabidopsis thaliana]
  misc_feature (1)..(192): Homolog of NCBI NO: 15237854 NR Description: expressed protein [Arabidopsis thaliana]
MILLAAKGLVGIGEVAFVILSYIYLYEFISRFAFPRKQNEQRRRLSNPKNKLFQAYFLATAIIGLLFPICYIGDGLYRGDIHGVRAAAPHLFLLSGQAFTEPIGFSDRFATPIGILGPVFYNARRIFALLDWVKAEFADIQRPGGPIRLYGGRAIASVNTVMWFYNLFGLLLPVFLPRSCEIYFSADDNKVD

SEQ ID NO: 108893 - DNA, 1074 bp, Zea mays subsp. mays
  misc_feature (1)..(1074): Ceres Seq. ID no. 13587648
aatcgaaaacagcgcaagtgttgtagtatactgaaccctcaaaaaaactaactagctagcttagctaaccccatggacatggaccccaggttcaacgtcgactggagtgccaacgagatcgagatggtgagatctctcatcgcttgtcacggcgccagcaacagcacgaacgacgacattctggatgagctccaggcaatgttcccagggaaggataagcgccaggtaactgacttgtacgttgagcttgtggtggagatgataaacagtggggcagagctgagcagcaaccagctcctgctcaactctggtggggtgcacagcaggacgatggatgggtatttagcagacgagatgaaggcgaagaggatgctgctggaggaacagcgccgtaggaaattagttgctgttcctcgacaggataaccaacaacgtgcagggaggttttggactctagaggagcacaggaatttcctgcgtggcctgcgtgtgtacgggcgcggcaattggaagaacatctccaaggacttcgtcaccactaagacgccggtgcaggtctccagccatgcacagaagtacttccggaggcaggagagcaccacaaggaagcagcgctacagcatcaacgacgtcggcctctacgatgctgagccatgggaggagcagcagcagcagcagcagaacagctcactgccggctttcactagcaccaacaataatgcttattacaacccatactgctatgcctttggtggtggccagcagcagctcgcatcatcccccttccagtgccatgccagtcaggcgagcagcagcagccagacagcagtcacctgggctgcaggaggtcagcagccaccgatttgctcttctgcagctccacccatgatggaggggggtggggctgaaatgtcatggaccacttattattagctagctactagcttcgagattttgttcctaagctgttaaatctcgttgttgaagacaacatgtatggtagtttaagtagtagtttcttcatttcaatgaactagtaacaattaatgtgttcccgaaaaaaaaaaaaaaaaa

SEQ ID NO: 108894 - protein, 286 aa, Zea mays subsp. mays
  misc_feature (1)..(286): Ceres Seq. ID no. 13587649
  misc_feature (124)..(170): Pfam Name: Myb-like DNA-binding domain Pfam Description: Myb-like DNA-binding domain
  misc_feature (119)..(207): Homolog of NCBI NO: 15237776 NR Description: I-box binding factor - like protein [Arabidopsis
  misc_feature (108)..(214): Homolog of NCBI NO: 12005328 NR Description: unknown [Hevea brasiliensis]
  misc_feature (81)..(198): Homolog of NCBI NO: 12406993 NR Description: MCB1 protein [Hordeum vulgare subsp. vulgare]
  misc_feature (117)..(207): Homolog of NCBI NO: 18874265 NR Description: MYB-like transcription factor DVL1 [Antirrhinum
  misc_feature (11)..(187): Homolog of NCBI NO: 15239231 NR Description: hypothetical protein [Arabidopsis thaliana]
  misc_feature (11)..(187): Homolog of NCBI NO: 30687381 NR Description: MYB family transcription factor -related
  misc_feature (11)..(187): Homolog of NCBI NO: 7446171 NR Description: probable MYB family transcription factor
  misc_feature (11)..(276): Homolog of NCBI NO: 15241652 NR Description: expressed protein [Arabidopsis thaliana]
  misc_feature (3)..(35): Homolog of NCBI NO: 20067661 NR Description: one repeat myb transcriptional factor [Zea mays]
  misc_feature (87)..(274): Homolog of NCBI NO: 20067661 NR Description: one repeat myb transcriptional factor [Zea mays]
MDMDPRFNVDWSANEIEMVRSLIACHGASNSTNDDILDELQAMFPGKDKRQVTDLYVELVVEMINSGAELSSNQLLLNSGGVHSRTMDGYLADEMKAKRMLLEEQRRRKLVAVPRQDNQQRAGRFWTLEEHRNFLRGLRVYGRGNWKNISKDFVTTKTPVQVSSHAQKYFRRQESTTRKQRYSINDVGLYDAEPWEEQQQQQQNSSLPAFTSTNNNAYYNPYCYAFGGGQQQLASSPFQCHASQASSSSQTAVTWAAGGQQPPICSSAAPPMMEGGGAEMSWTTYY

SEQ ID NO: 108895 - protein, 284 aa, Zea mays subsp. mays
  misc_feature (1)..(284): Ceres Seq. ID no. 13587650
  misc_feature (122)..(168): Pfam Name: Myb-like DNA-binding domain Pfam Description: Myb-like DNA-binding domain
  misc_feature (117)..(205): Homolog of NCBI NO: 15237776 NR Description: I-box binding factor - like protein [Arabidopsis
  misc_feature (106)..(212): Homolog of NCBI NO: 12005328 NR Description: unknown [Hevea brasiliensis]
  misc_feature (79)..(196): Homolog of NCBI NO: 12406993 NR Description: MCB1 protein [Hordeum vulgare subsp. vulgare]
  misc_feature (115)..(205): Homolog of NCBI NO: 18874265 NR Description: MYB-like transcription factor DVL1 [Antirrhinum
  misc_feature (9)..(185): Homolog of NCBI NO: 15239231 NR Description: hypothetical protein [Arabidopsis thaliana]
  misc_feature (9)..(185): Homolog of NCBI NO: 30687381 NR Description: MYB family transcription factor -related
  misc_feature (9)..(185): Homolog of NCBI NO: 7446171 NR Description: probable MYB family transcription factor
  misc_feature (9)..(274): Homolog of NCBI NO: 15241652 NR Description: expressed protein [Arabidopsis thaliana]
  misc_feature (1)..(33): Homolog of NCBI NO: 20067661 NR Description: one repeat myb transcriptional factor [Zea mays]
  misc_feature (85)..(272): Homolog of NCBI NO: 20067661 NR Description: one repeat myb transcriptional factor [Zea mays]
MDPRFNVDWSANEIEMVRSLIACHGASNSTNDDILDELQAMFPGKDKRQVTDLYVELVVEMINSGAELSSNQLLLNSGGVHSRTMDGYLADEMKAKRMLLEEQRRRKLVAVPRQDNQQRAGRFWTLEEHRNFLRGLRVYGRGNWKNISKDFVTTKTPVQVSSHAQKYFRRQESTTRKQRYSINDVGLYDAEPWEEQQQQQQNSSLPAFTSTNNNAYYNPYCYAFGGGQQQLASSPFQCHASQASSSSQTAVTWAAGGQQPPICSSAAPPMMEGGGAEMSWTTYY

SEQ ID NO: 108896 - protein, 269 aa, Zea mays subsp. mays
  misc_feature (1)..(269): Ceres Seq. ID no. 13587651
  misc_feature (107)..(153): Pfam Name: Myb-like DNA-binding domain Pfam Description: Myb-like DNA-binding domain
  misc_feature (102)..(190): Homolog of NCBI NO: 15237776 NR Description: I-box binding factor - like protein [Arabidopsis
  misc_feature (91)..(197): Homolog of NCBI NO: 12005328 NR Description: unknown [Hevea brasiliensis]
  misc_feature (64)..(181): Homolog of NCBI NO: 12406993 NR Description: MCB1 protein [Hordeum vulgare subsp. vulgare]
  misc_feature (100)..(190): Homolog of NCBI NO: 18874265 NR Description: MYB-like transcription factor DVL1 [Antirrhinum
  misc_feature (1)..(170): Homolog of NCBI NO: 15239231 NR Description: hypothetical protein [Arabidopsis thaliana]
  misc_feature (1)..(170): Homolog of NCBI NO: 30687381 NR Description: MYB family transcription factor -related
  misc_feature (1)..(170): Homolog of NCBI NO: 7446171 NR Description: probable MYB family transcription factor
  misc_feature (1)..(259): Homolog of NCBI NO: 15241652 NR Description: expressed protein [Arabidopsis thaliana]
  misc_feature (1)..(18): Homolog of NCBI NO: 20067661 NR Description: one repeat myb transcriptional factor [Zea mays]
  misc_feature (70)..(257): Homolog of NCBI NO: 20067661 NR Description: one repeat myb transcriptional factor [Zea mays]
MVRSLIACHGASNSTNDDILDELQAMFPGKDKRQVTDLYVELVVEMINSGAELSSNQLLLNSGGVHSRTMDGYLADEMKAKRMLLEEQRRRKLVAVPRQDNQQRAGRFWTLEEHRNFLRGLRVYGRGNWKNISKDFVTTKTPVQVSSHAQKYFRRQESTTRKQRYSINDVGLYDAEPWEEQQQQQQNSSLPAFTSTNNNAYYNPYCYAFGGGQQQLASSPFQCHASQASSSSQTAVTWAAGGQQPPICSSAAPPMMEGGGAEMSWTTYY

SEQ ID NO: 108897 - DNA, 716 bp, Zea mays subsp. mays
  misc_feature (1)..(716): Ceres Seq. ID no. 12589775
  misc_feature: MA Experiment ID: 108689 Result: Down-regulated in Transcription
  misc_feature: MA Experiment 108689 PARAMETER Experiment Name: Zm_Drought_Roots_P Parameter: Age (day) Value: 9
  misc_feature: MA Experiment 108689 PARAMETER Experiment Name: Zm_Drought_Roots_P Parameter: Organism Value: Zea mays
  misc_feature: MA Experiment 108689 PARAMETER Experiment Name: Zm_Drought_Roots_P Parameter: Plant Line Value: 35A19
  misc_feature: MA Experiment 108689 PARAMETER Experiment Name: Zm_Drought_Roots_P Parameter: Timepoint (hr) Value: 24
  misc_feature: MA Experiment 108689 PARAMETER Experiment Name: Zm_Drought_Roots_P Parameter: Tissue Value: Roots
  misc_feature: MA Experiment 108689 PARAMETER Experiment Name: Zm_Drought_Roots_P Parameter: Treatment Value: Drought vs. No Drought
aaataatctaacatcaccaattccatacattaaaaacctccaagcctccatctccagggcagaaacaaaacatcaacacagctaattaagagaagaacatggagaaagtgtgctgcatgtgcggcgacgtcggattttccgacaaactattccgctgcgggcactgccgcaaccgctttcaacactcctattgtagtaattactacagtgagtttgcggagccgaccgagatttgcgactggtgccagagcgacgacaaaaagctgagcagcgttgctaaacacggcggatcttcgttttcttcttcaaagaagaagaaggcttcttcctccgtaaattacgagagcggggtcacaaaccaatcggagtatccttccggtggcgggatcaagcatgacaataaccatcacgatcaagtggccaagagcgttgttgccggacctgcaggaggcggcgtgccgtcgccgaggacggccacgcgaaggtacaagcttctcaaggatgtcaggtgttagatcaatttctgaaagagagcttaataatataatatgctaaaataataataaaaatgcgcctttgagatatgattgagtggtttacaaaatattacgattatctatgtataattaattagatatagtgaatgtatatcttgttgagaagcttttcgtactaatgttgaaaaaataatgaatttatgtttgtcgtgagcttcc

SEQ ID NO: 108898 - protein, 138 aa, Zea mays subsp. mays
  misc_feature (1)..(138): Ceres Seq. ID no. 12589776
  misc_feature (4)..(93): Homolog of NCBI NO: 21740708 NR Description: OSJNBa0086B14.1 [Oryza sativa (japonica
  misc_feature (4)..(98): Homolog of NCBI NO: 38345466 NR Description: OSJNBa0010H02.4 [Oryza sativa (japonica
  misc_feature (4)..(98): Homolog of NCBI NO: 21742342 NR Description: OSJNBb0034G17.21 [Oryza sativa (japonica
  misc_feature (7)..(138): Homolog of NCBI NO: 21554245 NR Description: unknown [Arabidopsis thaliana]
  misc_feature (3)..(138): Homolog of NCBI NO: 15232353 NR Description: putative protein
  misc_feature (7)..(138): Homolog of NCBI NO: 21553800 NR Description: unknown [Arabidopsis thaliana]
  misc_feature (1)..(138): Homolog of NCBI NO: 18378917 NR Description: hypothetical protein    predicted by genefinder
MEKVCCMCGDVGFSDKLFRCGHCRNRFQHSYCSNYYSEFAEPTEICDWCQSDDKKLSSVAKHGGSSFSSSKKKKASSSVNYESGVTNQSEYPSGGGIKHDNNHHDQVAKSVVAGPAGGGVPSPRTATRRYKLLKDVRC

SEQ ID NO: 108899 - protein, 132 aa, Zea mays subsp. mays
  misc_feature (1)..(132): Ceres Seq. ID no. 12589777
  misc_feature (1)..(87): Homolog of NCBI NO: 21740708 NR Description: OSJNBa0086B14.1 [Oryza sativa (japonica
  misc_feature (1)..(92): Homolog of NCBI NO: 38345466 NR Description: OSJNBa0010H02.4 [Oryza sativa (japonica
  misc_feature (1)..(92): Homolog of NCBI NO: 21742342 NR Description: OSJNBb0034G17.21 [Oryza sativa (japonica
  misc_feature (1)..(132): Homolog of NCBI NO: 21554245 NR Description: unknown [Arabidopsis thaliana]
  misc_feature (1)..(132): Homolog of NCBI NO: 15232353 NR Description: putative protein
  misc_feature (1)..(132): Homolog of NCBI NO: 21553800 NR Description: unknown [Arabidopsis thaliana]
  misc_feature (1)..(132): Homolog of NCBI NO: 18378917 NR Description: hypothetical protein    predicted by genefinder
MCGDVGFSDKLFRCGHCRNRFQHSYCSNYYSEFAEPTEICDWCQSDDKKLSSVAKHGGSSFSSSKKKKASSSVNYESGVTNQSEYPSGGGIKHDNNHHDQVAKSVVAGPAGGGVPSPRTATRRYKLLKDVRC

SEQ ID NO: 108900 - DNA, 744 bp, Zea mays subsp. mays
  misc_feature (1)..(744): Ceres Seq. ID no. 13599587
atcgagagcagaaaacaaagatcgatccatcgagaccgaccgagagcaggattgaagttgaaaggaccgtccgtacgggttacttctccagtcagtctccggtgcgccttcttcgccgatcagcgcgactgctgcttgtacatggccacgagagcggcgctcgtcgccggccgccgtgcggccggtcaggacgggctcgcccttctctcctcgggctgcaggcgcgaaggagctcgtccgagctccccccacaagagcagcagcgccaccgagcgggagggccacggcgacgcgacggcggcgcaggtggaggcggcgctgaaccgcaagaacgcggacgtggtcgacgtcgaccgctccggctccgcgacgctggtcccggccgacgcgcggcgcggcgcgggcgacgagtgggtgcccgaccaggagacgggcgtctttgtcccggccgacgaggagtcgtccgggcccggcgacgggggcgtggccgacgtcggcggcgcgcgcgggcaagccccgtcggtgctggaccaggcggtgttcgtccgcgaggagcacatggaggacgtcgagaggcccgccgtcggcgtggacgatgccggcgccgcctgagcgcggggaccgtgtcctcgggcggcccgccgctgcgaccagcaggcagagtagctgtagcctgtagggcaagcaaagcaaggttttctttgttctagcttccggatcgatagaataatgaagtcagatctc

SEQ ID NO: 108901 - protein, 235 aa, Zea mays subsp. mays
  misc_feature (1)..(235): Ceres Seq. ID no. 13599588
  misc_feature (94)..(202): Pfam Name: Sperm histone P2 Pfam Description: Sperm histone P2
  misc_feature (9)..(211): Homolog of NCBI NO: 23104656 NR Description: hypothetical protein [Azotobacter vinelandii]
  misc_feature (61)..(217): Homolog of NCBI NO: 11362193 NR Description: hypothetical protein
  misc_feature (49)..(226): Homolog of NCBI NO: 34911576 NR Description: P0004A09.11 [Oryza sativa (japonica
REQKTKIDPSRPTESRIEVERTVRTGYFSSQSPVRLLRRSARLLLVHGHESGARRRPPCGRSGRARPSLLGLQARRSSSELPPQEQQRHRAGGPRRRDGGAGGGGAEPQERGRGRRRPLRLRDAGPGRRAARRGRRVGARPGDGRLCPGRRGVVRARRRGRGRRRRRARASPVGAGPGGVRPRGAHGGRREARRRRGRCRRRLSAGTVSSGGPPLRPAGRVAVACRASKARFSLF

SEQ ID NO: 108902 - protein, 203 aa, Zea mays subsp. mays
  misc_feature (1)..(203): Ceres Seq. ID no. 13599589
  misc_feature (30)..(177): Homolog of NCBI NO: 16924103 NR Description: hypothetical protein [Oryza sativa]
  misc_feature (48)..(195): Homolog of NCBI NO: 24413942 NR Description: contains ESTs
  misc_feature (52)..(195): Homolog of NCBI NO: 34897930 NR Description: ESTs AU082409(E30736),C74252(E30736) correspond
IESRKQRSIHRDRPRAGLKLKGPSVRVTSPVSLRCAFFADQRDCCLYMATRAALVAGRRAAGQDGLALLSSGCRREGARPSSPHKSSSATEREGHGDATAAQVEAALNRKNADVVDVDRSGSATLVPADARRGAGDEWVPDQETGVFVPADEESSGPGDGGVADVGGARGQAPSVLDQAVFVREEHMEDVERPAVGVDDAGAA

SEQ ID NO: 108903 - protein, 156 aa, Zea mays subsp. mays
  misc_feature (1)..(156): Ceres Seq. ID no. 13599590
  misc_feature (1)..(130): Homolog of NCBI NO: 16924103 NR Description: hypothetical protein [Oryza sativa]
  misc_feature (1)..(148): Homolog of NCBI NO: 24413942 NR Description: contains ESTs
  misc_feature (5)..(148): Homolog of NCBI NO: 34897930 NR Description: ESTs AU082409(E30736),C74252(E30736) correspond
MATRAALVAGRRAAGQDGLALLSSGCRREGARPSSPHKSSSATEREGHGDATAAQVEAALNRKNADVVDVDRSGSATLVPADARRGAGDEWVPDQETGVFVPADEESSGPGDGGVADVGGARGQAPSVLDQAVFVREEHMEDVERPAVGVDDAGAA

SEQ ID NO: 108904 - DNA, 1486 bp, Zea mays subsp. mays
  misc_feature (1)..(1486): Ceres Seq. ID no. 15225907
aggttatgtcagcctttttggtgcaaccctgaagaagtatgggtaccgatccatgtcgctggctgaaatccttgataaaactagggacaagtatcttgaacttcttctttctgactgccggaagcagctcaacgaggccttctctagggactcatatgagaggatggttataaagaaacaaaatgaatacgacgcaaacatagcggcattccaacttgaccccattgatggagtatcaaatttgccatacgtcgctccattttcctcctctgttcccaatgcttgtcgtattgtgcgttctttcatcgaggagttggtcagctacttgtcactcagtggtggcgtaaacgtctatgatgtggtgaaaagctacttggacaagttcttgattgagacgttgaatgatggttttctgaagctgatacatggtggatccctggaatttccacaggtggtgcagatcgcaggaaatatcgccgttctcgagcagtcctgtgacatgttcctttggcacgccgctcgactttgtggtgtccctaggtgcctcctcgagaagccccattctggattgagtgccagagctgtgctcaaagcctcccagaatgcggcatacaacggatcggttactttggtgaattccaagatcgacgagttcatgctgcagctgactagcatcaactggaccccggacgaagctccagagcacgccaacgactacatgaacgaggtcatcatctaccttcacgaggtggtgtcttccgggcagcaggccgtgccaagggacgcgctgttcaaggttgtatctggcgcgctgagccacatctcggactctatgacgacggtccttctcagtgaccgggtgaaaaggttcaacgcgaacgccgttgctagcatcgacgtcgatctgagggcgctggaggggttcgctgacgacacgtaccgcacggccgggtttctggacctgagaaagggaaccagtttcagagagtgtctagccgaagtaaggcagctcacaaaccttctgctgagcagccagcctgagagcttcgcgaaccctgcaaccagggagcagagctacggagccttagaccacaagaaggtggcgataatttgtgacaagttcaaggatgcccccgacagcctgttcgggagcctctcaggccggggcacggtgcagagcgcccggaagaagtccctggatgtgctgaagagaaggctaaaggattttagctagctggtgagctagatcatttagacaagctagtagcatagtacccctgttttagtgccagtcgtatccatttaaaatttcttttccgtctttctttattccctctttaatcgacttcccgtttcatgcgccgaagagaaggctgaaggattttagctggggtttgctggtgagctagatcgttaaataagctagtgctctgtttagggaagaagacaagtggttcggtgtgtaaagccatttcaaatttctttc

SEQ ID NO: 108905 - protein, 410 aa, Zea mays subsp. mays
  misc_feature (1)..(410): Ceres Seq. ID no. 15225908
  misc_feature (62)..(410): Pfam Name: Exocyst complex subunit Sec15-like Pfam Description: Exocyst complex subunit Sec15-like
  misc_feature (3)..(407): Homolog of NCBI NO: 28202021 NR Description: RIKEN cDNA 4833405E05; SEC15 homolog (S.
  misc_feature (9)..(410): Homolog of NCBI NO: 31218569 NR Description: ENSANGP00000011350 [Anopheles gambiae]
  misc_feature (5)..(376): Homolog of NCBI NO: 30410710 NR Description: SEC15 (S. cerevisiae)-like [Homo sapiens]
  misc_feature (5)..(376): Homolog of NCBI NO: 11360248 NR Description: hypothetical protein DKFZp761I2124.1 - human
  misc_feature (3)..(407): Homolog of NCBI NO: 24418671 NR Description: Exocyst complex component Sec15A
  misc_feature (28)..(410): Homolog of NCBI NO: 18411920 NR Description: expressed protein [Arabidopsis thaliana]
  misc_feature (2)..(410): Homolog of NCBI NO: 34895194 NR Description: B1051E10.38 [Oryza sativa (japonica
  misc_feature (2)..(410): Homolog of NCBI NO: 15228982 NR Description: hypothetical protein [Arabidopsis thaliana]
  misc_feature (2)..(410): Homolog of NCBI NO: 34902596 NR Description: Unknown protein [Oryza sativa (japonica
  misc_feature (2)..(410): Homolog of NCBI NO: 37534338 NR Description: unknown protein [Oryza sativa (japonica
GYVSLFGATLKKYGYRSMSLAEILDKTRDKYLELLLSDCRKQLNEAFSRDSYERMVIKKQNEYDANIAAFQLDPIDGVSNLPYVAPFSSSVPNACRIVRSFIEELVSYLSLSGGVNVYDVVKSYLDKFLIETLNDGFLKLIHGGSLEFPQVVQIAGNIAVLEQSCDMFLWHAARLCGVPRCLLEKPHSGLSARAVLKASQNAAYNGSVTLVNSKIDEFMLQLTSINWTPDEAPEHANDYMNEVIIYLHEVVSSGQQAVPRDALFKVVSGALSHISDSMTTVLLSDRVKRFNANAVASIDVDLRALEGFADDTYRTAGFLDLRKGTSFRECLAEVRQLTNLLLSSQPESFANPATREQSYGALDHKKVAIICDKFKDAPDSLFGSLSGRGTVQSARKKSLDVLKRRLKDFS

SEQ ID NO: 108906 - protein, 393 aa, Zea mays subsp. mays
  misc_feature (1)..(393): Ceres Seq. ID no. 15225909
  misc_feature (45)..(393): Pfam Name: Exocyst complex subunit Sec15-like Pfam Description: Exocyst complex subunit Sec15-like
  misc_feature (1)..(390): Homolog of NCBI NO: 28202021 NR Description: RIKEN cDNA 4833405E05; SEC15 homolog (S.
  misc_feature (1)..(393): Homolog of NCBI NO: 31218569 NR Description: ENSANGP00000011350 [Anopheles gambiae]
  misc_feature (1)..(359): Homolog of NCBI NO: 30410710 NR Description: SEC15 (S. cerevisiae)-like [Homo sapiens]
  misc_feature (1)..(359): Homolog of NCBI NO: 11360248 NR Description: hypothetical protein DKFZp761I2124.1 - human
  misc_feature (1)..(390): Homolog of NCBI NO: 24418671 NR Description: Exocyst complex component Sec15A
  misc_feature (11)..(393): Homolog of NCBI NO: 18411920 NR Description: expressed protein [Arabidopsis thaliana]
  misc_feature (1)..(393): Homolog of NCBI NO: 34895194 NR Description: B1051E10.38 [Oryza sativa (japonica
  misc_feature (1)..(393): Homolog of NCBI NO: 15228982 NR Description: hypothetical protein [Arabidopsis thaliana]
  misc_feature (1)..(393): Homolog of NCBI NO: 34902596 NR Description: Unknown protein [Oryza sativa (japonica
  misc_feature (1)..(393): Homolog of NCBI NO: 37534338 NR Description: unknown protein [Oryza sativa (japonica
MSLAEILDKTRDKYLELLLSDCRKQLNEAFSRDSYERMVIKKQNEYDANIAAFQLDPIDGVSNLPYVAPFSSSVPNACRIVRSFIEELVSYLSLSGGVNVYDVVKSYLDKFLIETLNDGFLKLIHGGSLEFPQVVQIAGNIAVLEQSCDMFLWHAARLCGVPRCLLEKPHSGLSARAVLKASQNAAYNGSVTLVNSKIDEFMLQLTSINWTPDEAPEHANDYMNEVIIYLHEVVSSGQQAVPRDALFKVVSGALSHISDSMTTVLLSDRVKRFNANAVASIDVDLRALEGFADDTYRTAGFLDLRKGTSFRECLAEVRQLTNLLLSSQPESFANPATREQSYGALDHKKVAIICDKFKDAPDSLFGSLSGRGTVQSARKKSLDVLKRRLKDFS

SEQ ID NO: 108907 - protein, 356 aa, Zea mays subsp. mays
  misc_feature (1)..(356): Ceres Seq. ID no. 15225910
  misc_feature (8)..(356): Pfam Name: Exocyst complex subunit Sec15-like Pfam Description: Exocyst complex subunit Sec15-like
  misc_feature (1)..(353): Homolog of NCBI NO: 28202021 NR Description: RIKEN cDNA 4833405E05; SEC15 homolog (S.
  misc_feature (1)..(356): Homolog of NCBI NO: 31218569 NR Description: ENSANGP00000011350 [Anopheles gambiae]
  misc_feature (1)..(322): Homolog of NCBI NO: 30410710 NR Description: SEC15 (S. cerevisiae)-like [Homo sapiens]
  misc_feature (1)..(322): Homolog of NCBI NO: 11360248 NR Description: hypothetical protein DKFZp761I2124.1 - human
  misc_feature (1)..(353): Homolog of NCBI NO: 24418671 NR Description: Exocyst complex component Sec15A
  misc_feature (1)..(356): Homolog of NCBI NO: 18411920 NR Description: expressed protein [Arabidopsis thaliana]
  misc_feature (1)..(356): Homolog of NCBI NO: 34895194 NR Description: B1051E10.38 [Oryza sativa (japonica
  misc_feature (1)..(356): Homolog of NCBI NO: 15228982 NR Description: hypothetical protein [Arabidopsis thaliana]
  misc_feature (1)..(356): Homolog of NCBI NO: 34902596 NR Description: Unknown protein [Oryza sativa (japonica
  misc_feature (1)..(356): Homolog of NCBI NO: 37534338 NR Description: unknown protein [Oryza sativa (japonica
MVIKKQNEYDANIAAFQLDPIDGVSNLPYVAPFSSSVPNACRIVRSFIEELVSYLSLSGGVNVYDVVKSYLDKFLIETLNDGFLKLIHGGSLEFPQVVQIAGNIAVLEQSCDMFLWHAARLCGVPRCLLEKPHSGLSARAVLKASQNAAYNGSVTLVNSKIDEFMLQLTSINWTPDEAPEHANDYMNEVIIYLHEVVSSGQQAVPRDALFKVVSGALSHISDSMTTVLLSDRVKRFNANAVASIDVDLRALEGFADDTYRTAGFLDLRKGTSFRECLAEVRQLTNLLLSSQPESFANPATREQSYGALDHKKVAIICDKFKDAPDSLFGSLSGRGTVQSARKKSLDVLKRRLKDFS

SEQ ID NO: 108908 - DNA, 1062 bp, Zea mays subsp. mays
  misc_feature (1)..(1062): Ceres Seq. ID no. 13599210
ctagaacatcctaatcgaaaatagaatatgattctgggtggtagatataaatgaaaattgcgtctggttccgacgacacctcttttaagttttggttttgtttcttttataccaccggacttttgcttttacaggttccaaaacgcatctcctccacctccgtctcctactcctcgcttcctcgtcacgcaaactttgatccaccggagcaatgaagatcaccgccttgcttgttctcaaggccgcccccgaaacctcggatcccgtgatcctcgcaaatgcttctgacgtctctcactttggctatttccagcgatctagcgtcaaggagttcgtcgtcttcgtgggccgcactgtcgctagccgaacccctccttctcagcgccagtccgtccagcacgaagagtacaaggttcacgcttacaataggaatggcctttgcgcggtgggattcatggacgatcattatcctgttcgaagtgccttttctcttctcaatcaggtcatagatgagtaccagaagagttttggtgaggcatggaggtctgctaaagaagactcctctcagccctggccttacttagccgaagctcttaccaaattccaggacccggcagaggctgataagctgttgaaaatccagagggagttggatgagaccaagattatcctccataagaccattgatagcgttctagcccgcggtgagaagctggacagcctagtggagaagagctctgatttgagcatggcatcgcagatgttctacaagcaagcaaagaaaacgaattcatgctgcactattctgtgagctgcgactctggatggatgtctttgggtatatatagtcaaccaaacttttgctgtggggcgagactgttttccattttatataatatatatttgattccgttctctcgtttgcatgcactcttgaaattccatataagactcatgtcgtgtggcgtgttatccaaatacagtttcaattgtctttgccagattatatgattgcttttgtttatgttaaaaaaaaaaaaaaaaaagcttatcgataccgtc

SEQ ID NO: 108909 - protein, 199 aa, Zea mays subsp. mays
  misc_feature (1)..(199): Ceres Seq. ID no. 13599211
  misc_feature (102)..(189): Pfam Name: Synaptobrevin Pfam Description: Synaptobrevin
  misc_feature (1)..(196): Homolog of NCBI NO: 39581395 NR Description: Hypothetical protein CBG15347 [Caenorhabditis
  misc_feature (1)..(199): Homolog of NCBI NO: 30585033 NR Description: Homo sapiens SNARE protein Ykt6 [synthetic
  misc_feature (1)..(199): Homolog of NCBI NO: 5730120 NR Description: SNARE protein Ykt6; YKT6, S. cerevisiae, homolog
  misc_feature (1)..(199): Homolog of NCBI NO: 25349719 NR Description: probable snare protein [imported] - yeast
  misc_feature (1)..(199): Homolog of NCBI NO: 6322652 NR Description: Synaptobrevin (v-SNARE) homolog with similarity Sec22p, Snc1p, and Snc2p, essential for endoplasmic
  misc_feature (1)..(198): Homolog of NCBI NO: 19113353 NR Description: Synaptobrevin-like V snare protein
  misc_feature (1)..(183): Homolog of NCBI NO: 34908586 NR Description: putative ATGP1 [Oryza sativa (japonica
  misc_feature (1)..(199): Homolog of NCBI NO: 15242973 NR Description: ATGP1-related protein [Arabidopsis thaliana]
  misc_feature (1)..(199): Homolog of NCBI NO: 4097579 NR Description: NTGP1 [Nicotiana tabacum]
  misc_feature (1)..(199): Homolog of NCBI NO: 15242933 NR Description: ATGP1 [Arabidopsis thaliana]
MKITALLVLKAAPETSDPVILANASDVSHFGYFQRSSVKEFVVFVGRTVASRTPPSQRQSVQHEEYKVHAYNRNGLCAVGFMDDHYPVRSAFSLLNQVIDEYQKSFGEAWRSAKEDSSQPWPYLAEALTKFQDPAEADKLLKIQRELDETKIILHKTIDSVLARGEKLDSLVEKSSDLSMASQMFYKQAKKTNSCCTIL

SEQ ID NO: 108910 - protein, 118 aa, Zea mays subsp. mays
  misc_feature (1)..(118): Ceres Seq. ID no. 13599212
  misc_feature (21)..(108): Pfam Name: Synaptobrevin Pfam Description: Synaptobrevin
  misc_feature (1)..(115): Homolog of NCBI NO: 39581395 NR Description: Hypothetical protein CBG15347 [Caenorhabditis
  misc_feature (1)..(118): Homolog of NCBI NO: 30585033 NR Description: Homo sapiens SNARE protein Ykt6 [synthetic
  misc_feature (1)..(118): Homolog of NCBI NO: 5730120 NR Description: SNARE protein Ykt6; YKT6, S. cerevisiae, homolog
  misc_feature (1)..(118): Homolog of NCBI NO: 25349719 NR Description: probable snare protein [imported] - yeast
  misc_feature (1)..(118): Homolog of NCBI NO: 6322652 NR Description: Synaptobrevin (v-SNARE) homolog with similarity Sec22p, Snc1p, and Snc2p, essential for endoplasmic
  misc_feature (1)..(117): Homolog of NCBI NO: 19113353 NR Description: Synaptobrevin-like V snare protein
  misc_feature (1)..(102): Homolog of NCBI NO: 34908586 NR Description: putative ATGP1 [Oryza sativa (japonica
  misc_feature (1)..(118): Homolog of NCBI NO: 15242973 NR Description: ATGP1-related protein [Arabidopsis thaliana]
  misc_feature (1)..(118): Homolog of NCBI NO: 4097579 NR Description: NTGP1 [Nicotiana tabacum]
  misc_feature (1)..(118): Homolog of NCBI NO: 15242933 NR Description: ATGP1 [Arabidopsis thaliana]
MDDHYPVRSAFSLLNQVIDEYQKSFGEAWRSAKEDSSQPWPYLAEALTKFQDPAEADKLLKIQRELDETKIILHKTIDSVLARGEKLDSLVEKSSDLSMASQMFYKQAKKTNSCCTIL

SEQ ID NO: 108911 - DNA, 1143 bp, Zea mays subsp. mays
  misc_feature (1)..(1143): Ceres Seq. ID no. 13624571
tttttcgacttttactactcgaagttgatgagatttcctggataatcaaagtctcatcccttctctgttccgctcgctgaaaaagctcataacctctaaagcatggagtctctatcctttcctattctaaatcctctgttagcttctggttctagtctttacagaaaacagagctcgaggatgacctcttcaatgtcatcttcagttagtttcgccacaggaagaacatctctgtccactgttcgccgctctagagtaggtgttgttaagatgcaagctgttgatgaagatattgatctgaagcaaatgagagacatggctgctgctaagaagcgttgggatggtttgttaagagaaggaaaggtgaagcttctgacaccaagagaagcaggctatgctattcagctttcaaacaaacctcttctcgatgtccgtccttctagcgagcgtaacaaggcatgggttaaaggctctgactgggttcctatcttcgacaatgaagacaaccttgacgctggaactctttccaaaaaggtcaccagttttgctatgggtggatggtggagtggtacacctattttgtctttcaataagctcttcttgtcaaaggttgaggagaaattcccaaaagaaacagagctgatcgttgcttgccaaaaaggattgagatccttagctgcttgtgagctacttattaatgctggatatcagaatattttctgggtgcaaggcggtttagagtctgctgaagacgaggatctagtcacagaaggttctcagccgttgaagcttgctgggattggggggttttctgagttcctcggttggacagaccaacaaagagctcaagctgcgaaagaaggttgggggtaccgtttagtatttactgctcgtctgtttagggtaattctggctgcggatgccttgttccttggtgctcagcaacttggtcattatattcaggagttaagaggtcactaggactctctctgtaaccaaagctccgtgtggttgtactgcttctcttcacaaaaaaaactgtaaatttctgttgaagattgtagtttttgagatagagtagttgaaattgagatactgaaaaagaaaaatctttaaattttggaaaatcttcagtttctgttg

SEQ ID NO: 108912 - protein, 292 aa, Zea mays subsp. mays
  misc_feature (1)..(292): Ceres Seq. ID no. 13624572
  misc_feature (94)..(212): Pfam Name: Rhodanese-like domain Pfam Description: Rhodanese-like domain
  misc_feature (87)..(241): Homolog of NCBI NO: 15010630 NR Description: At2g42220/T24P15.13 [Arabidopsis thaliana]
  misc_feature (82)..(240): Homolog of NCBI NO: 21592651 NR Description: rhodanese-like family protein [Arabidopsis
  misc_feature (82)..(240): Homolog of NCBI NO: 18491227 NR Description: putative rhodanese family protein [Arabidopsis
  misc_feature (87)..(241): Homolog of NCBI NO: 18405912 NR Description: rhodanese-like domain protein [Arabidopsis
  misc_feature (82)..(240): Homolog of NCBI NO: 18398296 NR Description: rhodanese-like domain protein [Arabidopsis
  misc_feature (202)..(292): Homolog of NCBI NO: 15233950 NR Description: expressed protein [Arabidopsis thaliana]
  misc_feature (1)..(174): Homolog of NCBI NO: 15233950 NR Description: expressed protein [Arabidopsis thaliana]
MESLSFPILNPLLASGSSLYRKQSSRMTSSMSSSVSFATGRTSLSTVRRSRVGVVKMQAVDEDIDLKQMRDMAAAKKRWDGLLREGKVKLLTPREAGYAIQLSNKPLLDVRPSSERNKAWVKGSDWVPIFDNEDNLDAGTLSKKVTSFAMGGWWSGTPILSFNKLFLSKVEEKFPKETELIVACQKGLRSLAACELLINAGYQNIFWVQGGLESAEDEDLVTEGSQPLKLAGIGGFSEFLGWTDQQRAQAAKEGWGYRLVFTARLFRVILAADALFLGAQQLGHYIQELRGH

SEQ ID NO: 108913 - protein, 266 aa, Zea mays subsp. mays
  misc_feature (1)..(266): Ceres Seq. ID no. 13624573
  misc_feature (68)..(186): Pfam Name: Rhodanese-like domain Pfam Description: Rhodanese-like domain
  misc_feature (61)..(215): Homolog of NCBI NO: 18405912 NR Description: rhodanese-like domain protein [Arabidopsis
  misc_feature (61)..(215): Homolog of NCBI NO: 15010630 NR Description: At2g42220/T24P15.13 [Arabidopsis thaliana]
  misc_feature (56)..(214): Homolog of NCBI NO: 21592651 NR Description: rhodanese-like family protein [Arabidopsis
  misc_feature (56)..(214): Homolog of NCBI NO: 18491227 NR Description: putative rhodanese family protein [Arabidopsis
  misc_feature (56)..(214): Homolog of NCBI NO: 18398296 NR Description: rhodanese-like domain protein [Arabidopsis
  misc_feature (176)..(266): Homolog of NCBI NO: 15233950 NR Description: expressed protein [Arabidopsis thaliana]
  misc_feature (1)..(148): Homolog of NCBI NO: 15233950 NR Description: expressed protein [Arabidopsis thaliana]
MTSSMSSSVSFATGRTSLSTVRRSRVGVVKMQAVDEDIDLKQMRDMAAAKKRWDGLLREGKVKLLTPREAGYAIQLSNKPLLDVRPSSERNKAWVKGSDWVPIFDNEDNLDAGTLSKKVTSFAMGGWWSGTPILSFNKLFLSKVEEKFPKETELIVACQKGLRSLAACELLINAGYQNIFWVQGGLESAEDEDLVTEGSQPLKLAGIGGFSEFLGWTDQQRAQAAKEGWGYRLVFTARLFRVILAADALFLGAQQLGHYIQELRGH

SEQ ID NO: 108914 - protein, 262 aa, Zea mays subsp. mays
  misc_feature (1)..(262): Ceres Seq. ID no. 13624574
  misc_feature (64)..(182): Pfam Name: Rhodanese-like domain Pfam Description: Rhodanese-like domain
  misc_feature (57)..(211): Homolog of NCBI NO: 18405912 NR Description: rhodanese-like domain protein [Arabidopsis
  misc_feature (57)..(211): Homolog of NCBI NO: 15010630 NR Description: At2g42220/T24P15.13 [Arabidopsis thaliana]
  misc_feature (52)..(210): Homolog of NCBI NO: 21592651 NR Description: rhodanese-like family protein [Arabidopsis
  misc_feature (52)..(210): Homolog of NCBI NO: 18491227 NR Description: putative rhodanese family protein [Arabidopsis
  misc_feature (52)..(210): Homolog of NCBI NO: 18398296 NR Description: rhodanese-like domain protein [Arabidopsis
  misc_feature (172)..(262): Homolog of NCBI NO: 15233950 NR Description: expressed protein [Arabidopsis thaliana]
  misc_feature (1)..(144): Homolog of NCBI NO: 15233950 NR Description: expressed protein [Arabidopsis thaliana]
MSSSVSFATGRTSLSTVRRSRVGVVKMQAVDEDIDLKQMRDMAAAKKRWDGLLREGKVKLLTPREAGYAIQLSNKPLLDVRPSSERNKAWVKGSDWVPIFDNEDNLDAGTLSKKVTSFAMGGWWSGTPILSFNKLFLSKVEEKFPKETELIVACQKGLRSLAACELLINAGYQNIFWVQGGLESAEDEDLVTEGSQPLKLAGIGGFSEFLGWTDQQRAQAAKEGWGYRLVFTARLFRVILAADALFLGAQQLGHYIQELRGH

SEQ ID NO: 108915 - DNA, 717 bp, Zea mays subsp. mays
  misc_feature (1)..(717): Ceres Seq. ID no. 13599545
attatcatccacttgctgaagattccccactagaaagaaagaagcatacgattctctccttaccatcctgcttcgattctcaccaaacatggaagccctgattcaccacttcactctcctctccgaccaagcccttgtcgacaaaacattcgaccctgccacgatcgaagacctcatgcgtctcttcgaagtcgattcctacaaggcttgggcagctctcgaagccgagcaacaacaagagctcgaagccgctgaagaatctatccgcgaagccgaagctgaactcgatcgggatatggagtgggggatggaggagtacaggcggacgttggaggagatggagaggatggaggcggcggagcttaaagagcttgaggagaaggcggagactgctcggagaacggggagtttattggagaaagctgctaccatcgccgcgaaaaggcatattgcggcggcgatgggatcagctgctgcgtcgatgagatctgcgtggaagactgcatctgggaacaaagttcatccttcttgatcggagaatatgttcggtgtgtagtgattctgatacatgataattattatcgataatgatcaatgcatgggtccatgtattaggaacgttaggtgatgggttatgtcgatggtgccaaagtggattatattgtattatataattatttcctttaataaacttatcgaaagagctctcttttcaat

SEQ ID NO: 108916 - protein, 147 aa, Zea mays subsp. mays
  misc_feature (1)..(147): Ceres Seq. ID no. 13599546
  misc_feature (30)..(147): Homolog of NCBI NO: 23306438 NR Description: Unknown protein [Arabidopsis thaliana]
  misc_feature (1)..(147): Homolog of NCBI NO: 21553414 NR Description: unknown [Arabidopsis thaliana]
  misc_feature (1)..(147): Homolog of NCBI NO: 18406916 NR Description: expressed protein [Arabidopsis thaliana]
MEALIHHFTLLSDQALVDKTFDPATIEDLMRLFEVDSYKAWAALEAEQQQELEAAEESIREAEAELDRDMEWGMEEYRRTLEEMERMEAAELKELEEKAETARRTGSLLEKAATIAAKRHIAAAMGSAAASMRSAWKTASGNKVHPS

SEQ ID NO: 108917 - protein, 118 aa, Zea mays subsp. mays
  misc_feature (1)..(118): Ceres Seq. ID no. 13599547
  misc_feature (1)..(118): Homolog of NCBI NO: 23306438 NR Description: Unknown protein [Arabidopsis thaliana]
  misc_feature (1)..(118): Homolog of NCBI NO: 21553414 NR Description: unknown [Arabidopsis thaliana]
  misc_feature (1)..(118): Homolog of NCBI NO: 18406916 NR Description: expressed protein [Arabidopsis thaliana]
MRLFEVDSYKAWAALEAEQQQELEAAEESIREAEAELDRDMEWGMEEYRRTLEEMERMEAAELKELEEKAETARRTGSLLEKAATIAAKRHIAAAMGSAAASMRSAWKTASGNKVHPS

SEQ ID NO: 108918 - protein, 78 aa, Zea mays subsp. mays
  misc_feature (1)..(78): Ceres Seq. ID no. 13599548
  misc_feature (1)..(78): Homolog of NCBI NO: 23306438 NR Description: Unknown protein [Arabidopsis thaliana]
  misc_feature (1)..(78): Homolog of NCBI NO: 21553414 NR Description: unknown [Arabidopsis thaliana]
  misc_feature (1)..(78): Homolog of NCBI NO: 18406916 NR Description: expressed protein [Arabidopsis thaliana]
MEWGMEEYRRTLEEMERMEAAELKELEEKAETARRTGSLLEKAATIAAKRHIAAAMGSAAASMRSAWKTASGNKVHPS

SEQ ID NO: 108919 - DNA, 872 bp, Zea mays subsp. mays
  misc_feature (1)..(872): Ceres Seq. ID no. 12590086
acacacacacacgcgagcctcacactctctgatcacagtaggactagcttcagctagcctgcagcgtctgccactccgggcattttcttgcatcaaccacggcaatggccaccgctgatgtccagaacccgacggccgcgctgacggaggaggcgcctgcggtggagacgcccgtcgccgccgaggaggttgctaagacagaggaggtccccgcgccggtggaggccgaagtcgaggcgcctgcccccgtcgaggttgaggcgaccaaggaggacgcaccggccgccgccgagacgaaggagaccaaggagcccgagccagcagctgctgccgagccggaggccgaggcgccgaaagagccagccgtggtcgagacagagaccaaggaggcggtggcagaggccgagccggcggtggcagaggaggtgaaggaggaggcggcgcctgctgccgagccggaggtggcggccgtcgccgaggaagcacctgctgctgcggaggaggagccggccgccgcggtggccagcgtcagcgtgtgaggcgcgcggtggagggcaactggctgggtcagcgtccacgacggcggccgtgtgctcctacgtggcaacggcgtgatgctgagtcagccagtggagtggactggagtgctactttttactacgagtactaggtgtggagtggagtggagtgctatgcgcggggtcgcgtgacgtggcctaaataaaagtgttgtcggtcagcatcgagcgagcgacgcagtgccactctagataatgtatgctttttattttgtcgacaagacatgattcattatttctacggaaaaaaaaaaaaaaaaaagcttatcgataccgtcgacctcgagggggggc

SEQ ID NO: 108920 - protein, 144 aa, Zea mays subsp. mays
  misc_feature (1)..(144): Ceres Seq. ID no. 12590087
  misc_feature (1)..(141): Pfam Name: Brain acid soluble protein 1 (BASP1 protein) Pfam Description: Brain acid soluble protein 1 (BASP1 protein)
  misc_feature (1)..(136): Homolog of NCBI NO: 21585695 NR Description: allergenic-related protein Pt2L4 [Manihot
  misc_feature (4)..(136): Homolog of NCBI NO: 7484697 NR Description: hypothetical protein - common buckwheat
  misc_feature (2)..(136): Homolog of NCBI NO: 40063301 NR Description: ribosomal protein S16, putative [uncultured
  misc_feature (12)..(144): Homolog of NCBI NO: 7484697 NR Description: hypothetical protein - common buckwheat
  misc_feature (1)..(139): Homolog of NCBI NO: 117761 NR Description: Cytochrome c1 precursor
  misc_feature (1)..(136): Homolog of NCBI NO: 40063301 NR Description: ribosomal protein S16, putative [uncultured
  misc_feature (1)..(144): Homolog of NCBI NO: 2961298 NR Description: hypothetical protein [Cicer arietinum]
  misc_feature (1)..(144): Homolog of NCBI NO: 40287520 NR Description: induced stolon tip protein [Capsicum annuum]
  misc_feature (1)..(137): Homolog of NCBI NO: 418139 NR Description: INDUCED STOLEN TIP PROTEIN TUB8
  misc_feature (1)..(144): Homolog of NCBI NO: 40287520 NR Description: induced stolon tip protein [Capsicum annuum]
MATADVQNPTAALTEEAPAVETPVAAEEVAKTEEVPAPVEAEVEAPAPVEVEATKEDAPAAAETKETKEPEPAAAAEPEAEAPKEPAVVETETKEAVAEAEPAVAEEVKEEAAPAAEPEVAAVAEEAPAAAEEEPAAAVASVSV

SEQ ID NO: 108921 - DNA, 1174 bp, Zea mays subsp. mays
  misc_feature (1)..(1174): Ceres Seq. ID no. 13599307
aagattagtcactcttcgcaagccaaaaaaaaaaaccccaaattgcggaaggataagcctcgccggcgacgaaatcagggtttcatcgaacaagaagatggctcacgcttgcgtctacacatcggcttcttcactcaggtttacagccggattcgtctccgcgagtcccaacgcctcctctttcgattctcagaagctttccctccctttcgagcctcttcgttcaagaaagacgaagaagttagttagcgtcagaaagaattggaagagctcgtctccgaaggctgtgtactccggcaatctctggacgccggagactccttcgcctcaaggagtttggtccatcagagatgatttacaagtcccttcttcgccgtattttcctgcgtacgctcaaggacaaggaccacctcctatggtgcaagagcgtttccagagtatcataagccagctcttccaatataggattattcgttgtggtggtgctgtggacgatgatatggccaacataatcgtagctcagcttctttaccttgatgctgttgatcctactaaggatattgtcatgtatgtgaactctcctggtggatcagttacagctggcatggctatattcgatactatgaggcatatccgacctgatgtctccactgtctgtgtcggtctagctgctagtatgggagcctttctgcttagtgctggaaccaaagggaaaagatacagtctgccaaactcaaggataatgatccatcagccgcttggtggagctcaaggtggccaaaccgatatcgacattcaggcaaatgaaatgctgcatcacaaggcaaacctaaacggttacctcgcttaccagactggtcaaagcctagagaagataaaccaggacacagaccgtgatttcttcatgagtgctaaagaagcaaaagattacgggcttatcgatggtgttatcatgaaccctcttaaggcccttcagccacttgcagcagcttgatcgcctgaaggtaatgtttcagcttgtcacttacattttggtgggccttttctgaacttagaatgaaaacaaatcagtagctgatacatacatgaacaagtaaagttttctttctctgctgtttgattgaataacaatgacattgtaatgttttgatcctttgtaatcgaattattggcc

SEQ ID NO: 108922 - protein, 330 aa, Zea mays subsp. mays
  misc_feature (1)..(330): Ceres Seq. ID no. 13599308
  misc_feature (139)..(320): Pfam Name: Clp protease Pfam Description: Clp protease
  misc_feature (142)..(324): Homolog of NCBI NO: 25019682 NR Description: ClpP2 [Synechococcus sp. PCC 7942]
  misc_feature (142)..(324): Homolog of NCBI NO: 3023500 NR Description: ATP-dependent Clp protease proteolytic subunit 2
  misc_feature (142)..(322): Homolog of NCBI NO: 34558484 NR Description: ATP-DEPENDENT CLP PROTEASE PROTEOLYTIC SUBUNIT
  misc_feature (142)..(317): Homolog of NCBI NO: 23041314 NR Description: hypothetical protein [Trichodesmium erythraeum
  misc_feature (142)..(327): Homolog of NCBI NO: 16332037 NR Description: ATP-dependent protease; ClpP [Synechocystis sp.
  misc_feature (142)..(328): Homolog of NCBI NO: 23042319 NR Description: hypothetical protein [Trichodesmium erythraeum
  misc_feature (142)..(328): Homolog of NCBI NO: 17228733 NR Description: ATP-dependent Clp protease proteolytic subunit
  misc_feature (142)..(330): Homolog of NCBI NO: 23126705 NR Description: hypothetical protein [Nostoc punctiforme]
  misc_feature (33)..(330): Homolog of NCBI NO: 15485610 NR Description: Clp protease 2 proteolytic subunit [Lycopersicon
  misc_feature (33)..(330): Homolog of NCBI NO: 18378982 NR Description: ATP-dependent Clp protease proteolytic subunit
RLVTLRKPKKKTPNCGRISLAGDEIRVSSNKKMAHACVYTSASSLRFTAGFVSASPNASSFDSQKLSLPFEPLRSRKTKKLVSVRKNWKSSSPKAVYSGNLWTPETPSPQGVWSIRDDLQVPSSPYFPAYAQGQGPPPMVQERFQSIISQLFQYRIIRCGGAVDDDMANIIVAQLLYLDAVDPTKDIVMYVNSPGGSVTAGMAIFDTMRHIRPDVSTVCVGLAASMGAFLLSAGTKGKRYSLPNSRIMIHQPLGGAQGGQTDIDIQANEMLHHKANLNGYLAYQTGQSLEKINQDTDRDFFMSAKEAKDYGLIDGVIMNPLKALQPLAAA

SEQ ID NO: 108923 - protein, 298 aa, Zea mays subsp. mays
  misc_feature (1)..(298): Ceres Seq. ID no. 13599309
  misc_feature (107)..(288): Pfam Name: Clp protease Pfam Description: Clp protease
  misc_feature (110)..(292): Homolog of NCBI NO: 25019682 NR Description: ClpP2 [Synechococcus sp. PCC 7942]
  misc_feature (110)..(292): Homolog of NCBI NO: 3023500 NR Description: ATP-dependent Clp protease proteolytic subunit 2
  misc_feature (110)..(290): Homolog of NCBI NO: 34558484 NR Description: ATP-DEPENDENT CLP PROTEASE PROTEOLYTIC SUBUNIT
  misc_feature (110)..(285): Homolog of NCBI NO: 23041314 NR Description: hypothetical protein [Trichodesmium erythraeum
  misc_feature (110)..(295): Homolog of NCBI NO: 16332037 NR Description: ATP-dependent protease; ClpP [Synechocystis sp.
  misc_feature (110)..(296): Homolog of NCBI NO: 23042319 NR Description: hypothetical protein [Trichodesmium erythraeum
  misc_feature (110)..(296): Homolog of NCBI NO: 17228733 NR Description: ATP-dependent Clp protease proteolytic subunit
  misc_feature (110)..(298): Homolog of NCBI NO: 23126705 NR Description: hypothetical protein [Nostoc punctiforme]
  misc_feature (1)..(298): Homolog of NCBI NO: 15485610 NR Description: Clp protease 2 proteolytic subunit [Lycopersicon
  misc_feature (1)..(298): Homolog of NCBI NO: 18378982 NR Description: ATP-dependent Clp protease proteolytic subunit
MAHACVYTSASSLRFTAGFVSASPNASSFDSQKLSLPFEPLRSRKTKKLVSVRKNWKSSSPKAVYSGNLWTPETPSPQGVWSIRDDLQVPSSPYFPAYAQGQGPPPMVQERFQSIISQLFQYRIIRCGGAVDDDMANIIVAQLLYLDAVDPTKDIVMYVNSPGGSVTAGMAIFDTMRHIRPDVSTVCVGLAASMGAFLLSAGTKGKRYSLPNSRIMIHQPLGGAQGGQTDIDIQANEMLHHKANLNGYLAYQTGQSLEKINQDTDRDFFMSAKEAKDYGLIDGVIMNPLKALQPLAAA

SEQ ID NO: 108924 - protein, 192 aa, Zea mays subsp. mays
  misc_feature (1)..(192): Ceres Seq. ID no. 13599310
  misc_feature (1)..(182): Pfam Name: Clp protease Pfam Description: Clp protease
  misc_feature (4)..(186): Homolog of NCBI NO: 25019682 NR Description: ClpP2 [Synechococcus sp. PCC 7942]
  misc_feature (4)..(186): Homolog of NCBI NO: 3023500 NR Description: ATP-dependent Clp protease proteolytic subunit 2
  misc_feature (4)..(184): Homolog of NCBI NO: 34558484 NR Description: ATP-DEPENDENT CLP PROTEASE PROTEOLYTIC SUBUNIT
  misc_feature (4)..(179): Homolog of NCBI NO: 23041314 NR Description: hypothetical protein [Trichodesmium erythraeum
  misc_feature (4)..(189): Homolog of NCBI NO: 16332037 NR Description: ATP-dependent protease; ClpP [Synechocystis sp.
  misc_feature (4)..(190): Homolog of NCBI NO: 23042319 NR Description: hypothetical protein [Trichodesmium erythraeum
  misc_feature (4)..(190): Homolog of NCBI NO: 17228733 NR Description: ATP-dependent Clp protease proteolytic subunit
  misc_feature (4)..(192): Homolog of NCBI NO: 23126705 NR Description: hypothetical protein [Nostoc punctiforme]
  misc_feature (1)..(192): Homolog of NCBI NO: 15485610 NR Description: Clp protease 2 proteolytic subunit [Lycopersicon
  misc_feature (1)..(192): Homolog of NCBI NO: 18378982 NR Description: ATP-dependent Clp protease proteolytic subunit
MVQERFQSIISQLFQYRIIRCGGAVDDDMANIIVAQLLYLDAVDPTKDIVMYVNSPGGSVTAGMAIFDTMRHIRPDVSTVCVGLAASMGAFLLSAGTKGKRYSLPNSRIMIHQPLGGAQGGQTDIDIQANEMLHHKANLNGYLAYQTGQSLEKINQDTDRDFFMSAKEAKDYGLIDGVIMNPLKALQPLAAA

SEQ ID NO: 108925 - DNA, 850 bp, Zea mays subsp. mays
  misc_feature (1)..(850): Ceres Seq. ID no. 13599311
aaagtttcccatcacttctcacttcacctcctcaaaagattcctcggatcatcatcatcaacaatggctatggctacgcgcgcgatccgctgccagctaccgtctcttgttaccagatgcgaatcctcggaacctattaagcagatccagatccagcagcgaccgagaggaggcgatctagccgagaacgggaagatcgtgcttcagccgaggctctgcacgctgagatcttacggatctgagatgattgtcgctaaaaaagacggcggcggaggcggagatgaaggatctgaggtcgagttagcgtcgccgttttttgagacgctcactgattacatcgagagctcgaagaagagtcaggactttgaaaccatctccggccgtctcgccatgatcgttttcgcggcgaccgtggcggaggaggttgttacggggaactcgctgttcaagaaacttgacgtggaagggttgagtgaagctattggagcgggacttggagctatgggatgcgcagcggtgttcgcgtggctaacgatttcgaggaagagagttgggcggatctttaccgtgagttgcaactcgtttattgactcgttggtcgatcagatcgttgatgggttgttctacgacaccaagcctagtgattggtccgacgaaatctaaatctgtttatagatttcgtctgagtaccactacaaatgtataattagtgtataaacgtcgtctataatagtatactatacgtactatagttgttgttgatcttccattataatttcttcatggtggttgatgaagatgatattgaaagtctgtgtaacttgttcttctatatcaaaatataagaaat

SEQ ID NO: 108926 - protein, 220 aa, Zea mays subsp. mays
  misc_feature (1)..(220): Ceres Seq. ID no. 13599312
  misc_feature (22)..(94): Homolog of NCBI NO: 38345615 NR Description: OSJNBb0003B01.7 [Oryza sativa (japonica
  misc_feature (51)..(220): Homolog of NCBI NO: 14423380 NR Description: Unknown protein [Arabidopsis thaliana]
  misc_feature (22)..(220): Homolog of NCBI NO: 18399845 NR Description: stress enhanced protein 2 (SEP2)
KVSHHFSLHLLKRFLGSSSSTMAMATRAIRCQLPSLVTRCESSEPIKQIQIQQRPRGGDLAENGKIVLQPRLCTLRSYGSEMIVAKKDGGGGGDEGSEVELASPFFETLTDYIESSKKSQDFETISGRLAMIVFAATVAEEVVTGNSLFKKLDVEGLSEAIGAGLGAMGCAAVFAWLTISRKRVGRIFTVSCNSFIDSLVDQIVDGLFYDTKPSDWSDEI

SEQ ID NO: 108927 - protein, 199 aa, Zea mays subsp. mays
  misc_feature (1)..(199): Ceres Seq. ID no. 13599313
  misc_feature (1)..(73): Homolog of NCBI NO: 38345615 NR Description: OSJNBb0003B01.7 [Oryza sativa (japonica
  misc_feature (30)..(199): Homolog of NCBI NO: 14423380 NR Description: Unknown protein [Arabidopsis thaliana]
  misc_feature (1)..(199): Homolog of NCBI NO: 18399845 NR Description: stress enhanced protein 2 (SEP2)
MAMATRAIRCQLPSLVTRCESSEPIKQIQIQQRPRGGDLAENGKIVLQPRLCTLRSYGSEMIVAKKDGGGGGDEGSEVELASPFFETLTDYIESSKKSQDFETISGRLAMIVFAATVAEEVVTGNSLFKKLDVEGLSEAIGAGLGAMGCAAVFAWLTISRKRVGRIFTVSCNSFIDSLVDQIVDGLFYDTKPSDWSDEI

SEQ ID NO: 108928 - protein, 197 aa, Zea mays subsp. mays
  misc_feature (1)..(197): Ceres Seq. ID no. 13599314
  misc_feature (1)..(71): Homolog of NCBI NO: 38345615 NR Description: OSJNBb0003B01.7 [Oryza sativa (japonica
  misc_feature (28)..(197): Homolog of NCBI NO: 14423380 NR Description: Unknown protein [Arabidopsis thaliana]
  misc_feature (1)..(197): Homolog of NCBI NO: 18399845 NR Description: stress enhanced protein 2 (SEP2)
MATRAIRCQLPSLVTRCESSEPIKQIQIQQRPRGGDLAENGKIVLQPRLCTLRSYGSEMIVAKKDGGGGGDEGSEVELASPFFETLTDYIESSKKSQDFETISGRLAMIVFAATVAEEVVTGNSLFKKLDVEGLSEAIGAGLGAMGCAAVFAWLTISRKRVGRIFTVSCNSFIDSLVDQIVDGLFYDTKPSDWSDEI

SEQ ID NO: 108929 - DNA, 1151 bp, Zea mays subsp. mays
  misc_feature (1)..(1151): Ceres Seq. ID no. 13599316
agtggatcccccgggctgcaggaattcgcacgagaccattacctagaacatcctaatcgaaaaataaaaatctcatcgaccgatcgagagagaatctttcgtcttctatcgaatgggcggaggaagagtcatggcgacggcggcgaaggtggctggaatcggagtcgccaaaggtggattcaggggaggattcggagtccccgcggcggcgaatgatcagtttatcgtgagaaacacctccgcgtctaagccggtttcggcttcgatttcatcggcggttcatccttccgtggaagaagacgcggtggtcatgcgtaaaccggtctgggaagacgagtgggaattcgcggaagtggagacgaagacgatccctagggttgttttcgacaagcctccgtctcttcaggaggctaaagaagccaccgatgatctcaaagatgccctcaacatggcgtgtatggaagggtcaaatgaagttggttctgtttcaagaatgttttcaagttttcaaccttctgagaacagagctgttgaatcagctgttccacaggttgctcttaaggcttttgcttttctcagtgaaaacaccgccgcgcagtctgttgttacttccattgcgtctgacccaaaggtgtgggatgctgtcatggaaaacaaggatctcatgaaatttcttgagaccaacactgcttcaactaaggatgaagctgacaatgacgacaaatctgaactttctagcgagactgaaagtgaagaagacagtgaagagaagccaatccagctcatggagattctgcgagacatgaagctgaaagctgttcaaatgatggaaaatgtatcttcctactttgggggtttgttcaggacagagactttcacagagggtggacaggagaggaagaggatgttgctcaacgaccctactactctctttggattagctgtttgcgttattttcatggtagttctgaaacgtgcttaacaagttccagtttccttttaaacttgccgatatagcttataactactgtgttctctttctgctacttcattatcgtttagagtttttttttttaaactgttctacttatgtttggaatgatttggaacttgcctttgatattttcataaataaaagtatgctttggttg

SEQ ID NO: 108930 - protein, 289 aa, Zea mays subsp. mays
  misc_feature (1)..(289): Ceres Seq. ID no. 13599317
  misc_feature (1)..(289): Homolog of NCBI NO: 15239670 NR Description: expressed protein [Arabidopsis thaliana]
MGGGRVMATAAKVAGIGVAKGGFRGGFGVPAAANDQFIVRNTSASKPVSASISSAVHPSVEEDAVVMRKPVWEDEWEFAEVETKTIPRVVFDKPPSLQEAKEATDDLKDALNMACMEGSNEVGSVSRMFSSFQPSENRAVESAVPQVALKAFAFLSENTAAQSVVTSIASDPKVWDAVMENKDLMKFLETNTASTKDEADNDDKSELSSETESEEDSEEKPIQLMEILRDMKLKAVQMMENVSSYFGGLFRTETFTEGGQERKRMLLNDPTTLFGLAVCVIFMVVLKRA

SEQ ID NO: 108931 - protein, 283 aa, Zea mays subsp. mays
  misc_feature (1)..(283): Ceres Seq. ID no. 13599318
  misc_feature (1)..(283): Homolog of NCBI NO: 15239670 NR Description: expressed protein [Arabidopsis thaliana]
MATAAKVAGIGVAKGGFRGGFGVPAAANDQFIVRNTSASKPVSASISSAVHPSVEEDAVVMRKPVWEDEWEFAEVETKTIPRVVFDKPPSLQEAKEATDDLKDALNMACMEGSNEVGSVSRMFSSFQPSENRAVESAVPQVALKAFAFLSENTAAQSVVTSIASDPKVWDAVMENKDLMKFLETNTASTKDEADNDDKSELSSETESEEDSEEKPIQLMEILRDMKLKAVQMMENVSSYFGGLFRTETFTEGGQERKRMLLNDPTTLFGLAVCVIFMVVLKRA

SEQ ID NO: 108932 - protein, 223 aa, Zea mays subsp. mays
  misc_feature (1)..(223): Ceres Seq. ID no. 13599319
  misc_feature (1)..(223): Homolog of NCBI NO: 15239670 NR Description: expressed protein [Arabidopsis thaliana]
MRKPVWEDEWEFAEVETKTIPRVVFDKPPSLQEAKEATDDLKDALNMACMEGSNEVGSVSRMFSSFQPSENRAVESAVPQVALKAFAFLSENTAAQSVVTSIASDPKVWDAVMENKDLMKFLETNTASTKDEADNDDKSELSSETESEEDSEEKPIQLMEILRDMKLKAVQMMENVSSYFGGLFRTETFTEGGQERKRMLLNDPTTLFGLAVCVIFMVVLKRA

SEQ ID NO: 108933 - DNA, 859 bp, Zea mays subsp. mays
  misc_feature (1)..(859): Ceres Seq. ID no. 13599586
ggaattaaaaacacttttgccttatcatctaaaacccatcgagagttgataagaaaaacctttcaaaatggctcttgttcaatccagaactcttcctcgcgtcaacgtcccgttctcgccgattctgtccacactccaagctccgtcgtctctctttctccggagggaaattcgaccggtagcctcgccgttctcgtcctctaccgccgggagcttttccctctcgccgctgacgcatccaaggaagattctctgccctccacctcgcggcaagtttgttagagaagattatcttgtgaggaaactgtcagctcaagaacttcaagaactggtgaaaggagagaggaaggtgccgctaattgtggatttttatgctacttggtgtggaccttgtattttaatggcccaggaactcgaaatgcttgcagtagagtatgagagcaatgcaatgattgtgaaagtcgatacagatgatgagtacgagtttgctcgcgacatgcaggttcggggattacctacgttgttcttcatcagccctgacccaagcaaagatgcaatcaggacagaagggcttatcccaatacagatgatgcgtgatatcattgacaacgatatgtgaagtcttgtattgatgaaacactttcttgcttaaggattgaatagaatcgcggaaatgtaggattgaagaatctcatctaggtttcatggatgaagaatgaaattatgaaacgagatgaatataacctaagtaagaatcttatttgtatgcactatgcagtgttggttttggtgctgcctttctttttaaaaaaatttatcaacaaaacaaaaaaaaaaaaagcttatcgataccgtcgac

SEQ ID NO: 108934 - protein, 183 aa, Zea mays subsp. mays
  misc_feature (1)..(183): Ceres Seq. ID no. 15218602
  misc_feature (90)..(180): Homolog of NCBI NO: 29346866 NR Description: thioredoxin (TRX) [Bacteroides thetaiotaomicron
  misc_feature (21)..(180): Homolog of NCBI NO: 21354 NR Description: thioredoxin M precursor (AA -67 to 114) [Spinacia
  misc_feature (65)..(183): Homolog of NCBI NO: 34904898 NR Description: similar to thioredoxin [Oryza sativa (japonica
  misc_feature (47)..(183): Homolog of NCBI NO: 8489792 NR Description: putative thioredoxin [Lycopersicon esculentum]
  misc_feature (1)..(183): Homolog of NCBI NO: 15230779 NR Description: thioredoxin family [Arabidopsis thaliana]
  misc_feature (1)..(183): Homolog of NCBI NO: 21537179 NR Description: thioredoxin, putative [Arabidopsis thaliana]
  misc_feature (92)..(180): Homolog of NCBI NO: 1093914 NR Description: thioredoxin
  misc_feature (92)..(180): Homolog of NCBI NO: 628902 NR Description: thioredoxin - Chloroflexus aurantiacus
  misc_feature (82)..(176): Homolog of NCBI NO: 21673615 NR Description: thioredoxin [Chlorobium tepidum TLS]
  misc_feature (21)..(180): Homolog of NCBI NO: 2507458 NR Description: Thioredoxin M-type, chloroplast precursor (TRX-M)
MALVQSRTLPRVNVPFSPILSTLQAPSSLFLRREIRPVASPFSSSTAGSFSLSPLTHPRKILCPPPRGKFVREDYLVRKLSAQELQELVKGERKVPLIVDFYATWCGPCILMAQELEMLAVEYESNAMIVKVDTDDEYEFARDMQVRGLPTLFFISPDPSKDAIRTEGLIPIQMMRDIIDNDM

SEQ ID NO: 108935 - protein, 93 aa, Zea mays subsp. mays
  misc_feature (1)..(93): Ceres Seq. ID no. 15218603
GIKNTFALSSKTHRELIRKTFQNGSCSIQNSSSRQRPVLADSVHTPSSVVSLSPEGNSTGSLAVLVLYRRELFPLAADASKEDSLPSTSRQVC

SEQ ID NO: 108936 - DNA, 705 bp, Zea mays subsp. mays
  misc_feature (1)..(705): Ceres Seq. ID no. 13599321
acatcctaatcgaaaaatcttcctcatcgcagcaatggcgtcttccttctcactcacgagtttcatctcctccatctccccattcaaacctcagaccaaacctgctcctcctcctccgagcctcgctctccctactccaacagtctctcacaggcggaagaacgatctcgccatcgagaaacctccttcttccaccgcttcgctctcctcggagctcgctcccgtgatatgcccgtcgcttgcgtactcgaacacgctcttcttcagcagctcggggtacaacgtgcaggtgtttgttgaagataacgagtctgaggagaggctggtgaatcgtttcagaagggaagtgatgagaaccggagttatacaggaatgtaagcgaaggagatacttcgagaacaaacaggatgagaagaagcgtaggactcgtgatgctgctaagcgtaacaagaaaaggcgtccttttgcaaagtttactcaagagactagagaagaagcagcagcggcagcatccaagagtaagaagaaggatgaagaagaagacaactgggagatgcctgatggagatgtaccttcttgaacactctttcagtatatagatcttcttccttttcggttataagttggtacattgtaacttcagatgagcatataacttgttttcggtgatgagttcttgccaatgttaaggcatctatctttgcc

SEQ ID NO: 108937 - protein, 192 aa, Zea mays subsp. mays
  misc_feature (1)..(192): Ceres Seq. ID no. 15222560
  misc_feature (95)..(148): Pfam Name: Ribosomal protein S21 Pfam Description: Ribosomal protein S21
  misc_feature (95)..(157): Homolog of NCBI NO: 24214929 NR Description: Ribosomal protein S21
  misc_feature (11)..(155): Homolog of NCBI NO: 15242698 NR Description: hypothetical protein [Arabidopsis thaliana]
  misc_feature (9)..(192): Homolog of NCBI NO: 17154781 NR Description: ribosome-like protein [Cucumis sativus]
  misc_feature (12)..(192): Homolog of NCBI NO: 14532554 NR Description: AT3g27160/MYF5_3 [Arabidopsis thaliana]
  misc_feature (12)..(192): Homolog of NCBI NO: 18405254 NR Description: expressed protein [Arabidopsis thaliana]
HPNRKIFLIAAMASSFSLTSFISSISPFKPQTKPAPPPPSLALPTPTVSHRRKNDLAIEKPPSSTASLSSELAPVICPSLAYSNTLFFSSSGYNVQVFVEDNESEERLVNRFRREVMRTGVIQECKRRRYFENKQDEKKRRTRDAAKRNKKRRPFAKFTQETREEAAAAASKSKKKDEEEDNWEMPDGDVPS

SEQ ID NO: 108938 - protein, 181 aa, Zea mays subsp. mays
  misc_feature (1)..(181): Ceres Seq. ID no. 15222561
  misc_feature (84)..(137): Pfam Name: Ribosomal protein S21 Pfam Description: Ribosomal protein S21
  misc_feature (84)..(146): Homolog of NCBI NO: 24214929 NR Description: Ribosomal protein S21
  misc_feature (1)..(144): Homolog of NCBI NO: 15242698 NR Description: hypothetical protein [Arabidopsis thaliana]
  misc_feature (1)..(181): Homolog of NCBI NO: 17154781 NR Description: ribosome-like protein [Cucumis sativus]
  misc_feature (1)..(181): Homolog of NCBI NO: 14532554 NR Description: AT3g27160/MYF5_3 [Arabidopsis thaliana]
  misc_feature (1)..(181): Homolog of NCBI NO: 18405254 NR Description: expressed protein [Arabidopsis thaliana]
MASSFSLTSFISSISPFKPQTKPAPPPPSLALPTPTVSHRRKNDLAIEKPPSSTASLSSELAPVICPSLAYSNTLFFSSSGYNVQVFVEDNESEERLVNRFRREVMRTGVIQECKRRRYFENKQDEKKRRTRDAAKRNKKRRPFAKFTQETREEAAAAASKSKKKDEEEDNWEMPDGDVPS

SEQ ID NO: 108939 - DNA, 1200 bp, Zea mays subsp. mays
  misc_feature (1)..(1200): Ceres Seq. ID no. 12635014
tcatctcccttgatcaaagatcagagctcaggagctcgcagcaatggagccgcaggccgagcccaagcccatcccgctgatgacgccgtacaagatgggcgcgtcgctagacctcgcccacagggtggtgctggcccctctcacgcggcagcgctcctacggcaacgtgccgcagccgcacgccgccgtctactacgggcagcgcgccacgcccggcggcatgctcatcacggaggccacgggggtctccgacacggcgcaggggtacaccgacacccctggcgtctggacggcggagcaggccgaggcgtggcggcccgtcgtcgacgccgtgcacgccaagggcgccctcttcttctgccagctctggcacgtcggccgcgtgtcgaagtacgggttccagcccggcggcgccgcgccggtgtcgagcacggagaggatggtcgggccgcaggtcaggcacgacggctccaccgaggagttctcgccgccgaggaggctggcggcggaggagatccccatgatcgtcgacgacttcaggaaagccgcacgcaacgccatcaacgccggattcgacggcgtcgagatccacggcggcaacgggtacctcatcgagcagttcctcaaggacagcgccaacgaccgggacgacggctacggcggcaacctggaaaaccggtgccgcttcgcgctcgaggtggtggacgccgtcgccaaggaggtgggtgcccaccgcgtgggcatccgcctctcgcccttcatggactacatggactgccacgactccgacccacacgcgctcggccttcacatggccacgaagctcaatgaccacggcatcctttatctccacatgattgagccccggatggccctcgtcgacggccggcgcgtggtcccgcaccgcctgctgccctacagggaggccttcaagggcacctttattgcgaatggcgggtacgaccgggaggagggggacaaggcggtcgcatcggggtatgccgacctcgtctcgtttgggcggctcttccttgcgaacccagacctgccgaagaggctagagctcaacgcgccgcttaacaagtataataggttgacgttttacatctccgatcccgtcgtcggctacaccgactacccgtttcttccttgatgtgtcattgaaccatgaataatgattgatccatatattgccatgtg

SEQ ID NO: 108940 - protein, 369 aa, Zea mays subsp. mays
  misc_feature (1)..(369): Ceres Seq. ID no. 12635015
  misc_feature (11)..(346): Pfam Name: NADH:flavin oxidoreductase / NADH oxidase family Pfam Description: NADH:flavin oxidoreductase / NADH oxidase family
  misc_feature (9)..(368): Homolog of NCBI NO: 40645349 NR Description: hypothetical protein [Pisum sativum]
  misc_feature (1)..(368): Homolog of NCBI NO: 7449902 NR Description: probable 12-oxophytodienoate reductase (EC
  misc_feature (2)..(368): Homolog of NCBI NO: 7449901 NR Description: probable 12-oxophytodienoate reductase (EC
  misc_feature (2)..(368): Homolog of NCBI NO: 40645459 NR Description: LEDI-5c protein [Lithospermum erythrorhizon]
  misc_feature (5)..(368): Homolog of NCBI NO: 26450549 NR Description: putative 12-oxophytodienoate reductase OPR2
  misc_feature (1)..(368): Homolog of NCBI NO: 2765083 NR Description: 12-oxophytodienoate reductase [Arabidopsis
  misc_feature (5)..(368): Homolog of NCBI NO: 15223140 NR Description: 12-oxophytodienoate reductase (OPR2); protein id:
  misc_feature (1)..(368): Homolog of NCBI NO: 21593388 NR Description: 12-oxophytodienoate reductase (OPR1) [Arabidopsis
  misc_feature (1)..(368): Homolog of NCBI NO: 15223138 NR Description: 12-oxophytodienoate reductase (OPR1)
  misc_feature (10)..(368): Homolog of NCBI NO: 23495288 NR Description: 12-oxophytodienoic acid reductase [Oryza sativa]
MEPQAEPKPIPLMTPYKMGASLDLAHRVVLAPLTRQRSYGNVPQPHAAVYYGQRATPGGMLITEATGVSDTAQGYTDTPGVWTAEQAEAWRPVVDAVHAKGALFFCQLWHVGRVSKYGFQPGGAAPVSSTERMVGPQVRHDGSTEEFSPPRRLAAEEIPMIVDDFRKAARNAINAGFDGVEIHGGNGYLIEQFLKDSANDRDDGYGGNLENRCRFALEVVDAVAKEVGAHRVGIRLSPFMDYMDCHDSDPHALGLHMATKLNDHGILYLHMIEPRMALVDGRRVVPHRLLPYREAFKGTFIANGGYDREEGDKAVASGYADLVSFGRLFLANPDLPKRLELNAPLNKYNRLTFYISDPVVGYTDYPFLP

SEQ ID NO: 108941 - protein, 357 aa, Zea mays subsp. mays
  misc_feature (1)..(357): Ceres Seq. ID no. 12635016
  misc_feature (1)..(334): Pfam Name: NADH:flavin oxidoreductase / NADH oxidase family Pfam Description: NADH:flavin oxidoreductase / NADH oxidase family
  misc_feature (1)..(356): Homolog of NCBI NO: 40645349 NR Description: hypothetical protein [Pisum sativum]
  misc_feature (1)..(356): Homolog of NCBI NO: 7449902 NR Description: probable 12-oxophytodienoate reductase (EC
  misc_feature (1)..(356): Homolog of NCBI NO: 7449901 NR Description: probable 12-oxophytodienoate reductase (EC
  misc_feature (1)..(356): Homolog of NCBI NO: 40645459 NR Description: LEDI-5c protein [Lithospermum erythrorhizon]
  misc_feature (1)..(356): Homolog of NCBI NO: 26450549 NR Description: putative 12-oxophytodienoate reductase OPR2
  misc_feature (1)..(356): Homolog of NCBI NO: 2765083 NR Description: 12-oxophytodienoate reductase [Arabidopsis
  misc_feature (1)..(356): Homolog of NCBI NO: 15223140 NR Description: 12-oxophytodienoate reductase (OPR2); protein id:
  misc_feature (1)..(356): Homolog of NCBI NO: 21593388 NR Description: 12-oxophytodienoate reductase (OPR1) [Arabidopsis
  misc_feature (1)..(356): Homolog of NCBI NO: 15223138 NR Description: 12-oxophytodienoate reductase (OPR1)
  misc_feature (1)..(356): Homolog of NCBI NO: 23495288 NR Description: 12-oxophytodienoic acid reductase [Oryza sativa]
MTPYKMGASLDLAHRVVLAPLTRQRSYGNVPQPHAAVYYGQRATPGGMLITEATGVSDTAQGYTDTPGVWTAEQAEAWRPVVDAVHAKGALFFCQLWHVGRVSKYGFQPGGAAPVSSTERMVGPQVRHDGSTEEFSPPRRLAAEEIPMIVDDFRKAARNAINAGFDGVEIHGGNGYLIEQFLKDSANDRDDGYGGNLENRCRFALEVVDAVAKEVGAHRVGIRLSPFMDYMDCHDSDPHALGLHMATKLNDHGILYLHMIEPRMALVDGRRVVPHRLLPYREAFKGTFIANGGYDREEGDKAVASGYADLVSFGRLFLANPDLPKRLELNAPLNKYNRLTFYISDPVVGYTDYPFLP

SEQ ID NO: 108942 - protein, 352 aa, Zea mays subsp. mays
  misc_feature (1)..(352): Ceres Seq. ID no. 12635017
  misc_feature (1)..(329): Pfam Name: NADH:flavin oxidoreductase / NADH oxidase family Pfam Description: NADH:flavin oxidoreductase / NADH oxidase family
  misc_feature (1)..(351): Homolog of NCBI NO: 40645349 NR Description: hypothetical protein [Pisum sativum]
  misc_feature (1)..(351): Homolog of NCBI NO: 7449902 NR Description: probable 12-oxophytodienoate reductase (EC
  misc_feature (1)..(351): Homolog of NCBI NO: 7449901 NR Description: probable 12-oxophytodienoate reductase (EC
  misc_feature (1)..(351): Homolog of NCBI NO: 40645459 NR Description: LEDI-5c protein [Lithospermum erythrorhizon]
  misc_feature (1)..(351): Homolog of NCBI NO: 26450549 NR Description: putative 12-oxophytodienoate reductase OPR2
  misc_feature (1)..(351): Homolog of NCBI NO: 2765083 NR Description: 12-oxophytodienoate reductase [Arabidopsis
  misc_feature (1)..(351): Homolog of NCBI NO: 15223140 NR Description: 12-oxophytodienoate reductase (OPR2); protein id:
  misc_feature (1)..(351): Homolog of NCBI NO: 21593388 NR Description: 12-oxophytodienoate reductase (OPR1) [Arabidopsis
  misc_feature (1)..(351): Homolog of NCBI NO: 15223138 NR Description: 12-oxophytodienoate reductase (OPR1)
  misc_feature (1)..(351): Homolog of NCBI NO: 23495288 NR Description: 12-oxophytodienoic acid reductase [Oryza sativa]
MGASLDLAHRVVLAPLTRQRSYGNVPQPHAAVYYGQRATPGGMLITEATGVSDTAQGYTDTPGVWTAEQAEAWRPVVDAVHAKGALFFCQLWHVGRVSKYGFQPGGAAPVSSTERMVGPQVRHDGSTEEFSPPRRLAAEEIPMIVDDFRKAARNAINAGFDGVEIHGGNGYLIEQFLKDSANDRDDGYGGNLENRCRFALEVVDAVAKEVGAHRVGIRLSPFMDYMDCHDSDPHALGLHMATKLNDHGILYLHMIEPRMALVDGRRVVPHRLLPYREAFKGTFIANGGYDREEGDKAVASGYADLVSFGRLFLANPDLPKRLELNAPLNKYNRLTFYISDPVVGYTDYPFLP

SEQ ID NO: 108943 - DNA, 852 bp, Zea mays subsp. mays
  misc_feature (1)..(852): Ceres Seq. ID no. 13599581
atctctcttcatttccctctctcgaacaagaagacaacaactcaaaacgcagagaagatctccagaacgacaccgtttcgtagcaaagatgctttcttcgtctccaacctccttcactcatccattcctctccacgtctccgcctctctcccccatatctccgccgtctcgctcacctcgcctcccgcctcctctcgtctccgcctcttgctcctacacctgcacggaggatccgccgaggctgcaccagatcccgcggcgaacgacgccggcgaacgcttcgctctacgagattctagaggttcctcgcggcgcgacgagccaggatatcaaatcggcttaccggaggttggctaggatctgccaccccgacgtggcggcgggaaccgatcggagtaactcttcggcggatgagttcatgaagatccacgcggcgtactgtacgctctctgatcctgacaaacgctctgtttacgatcggaggatgcttcgtcggagccgtccgttgaccgtcagcacctccgggatgggcagttacgttggacggaactgggaaaccgatcagtgctggtagcgagttgactcggtgaccgagttagctcgagttaattcgaattaataaaacacggttgtaaaaataggaagcgataaaagctggggttagcgatgtaattaacagtagtattagtgtgctaacatacgccaagagctaaacgtacgctccctctccctgcccacggccacgggcgatcagcgccgtttgcatcgtgttacgtaggatctacgtgtgttttttttttaccttctgaatcctgtaatacttatcaatgaaaacaaaataaacactgttat

SEQ ID NO: 108944 - protein, 190 aa, Zea mays subsp. mays
  misc_feature (1)..(190): Ceres Seq. ID no. 13599582
  misc_feature (94)..(162): Pfam Name: DnaJ domain Pfam Description: DnaJ domain
  misc_feature (79)..(160): Homolog of NCBI NO: 34863272 NR Description: similar to hypothetical protein FLJ40417 [Rattus
  misc_feature (41)..(190): Homolog of NCBI NO: 34894012 NR Description: P0672D08.16 [Oryza sativa (japonica
  misc_feature (32)..(160): Homolog of NCBI NO: 30682610 NR Description: DnaJ protein family [Arabidopsis thaliana]
  misc_feature (32)..(160): Homolog of NCBI NO: 15236355 NR Description: DnaJ protein family [Arabidopsis thaliana]
  misc_feature (32)..(160): Homolog of NCBI NO: 6691127 NR Description: DnaJ-like protein [Arabidopsis thaliana]
  misc_feature (56)..(190): Homolog of NCBI NO: 15231204 NR Description: DnaJ protein family [Arabidopsis thaliana]
  misc_feature (53)..(190): Homolog of NCBI NO: 7488763 NR Description: DnaJ protein homolog - kidney bean (fragment)
  misc_feature (30)..(190): Homolog of NCBI NO: 15227919 NR Description: J11 protein, putative [Arabidopsis thaliana]
  misc_feature (30)..(190): Homolog of NCBI NO: 9843641 NR Description: J11 protein [Arabidopsis thaliana]
  misc_feature (30)..(190): Homolog of NCBI NO: 15233446 NR Description: DnaJ protein family [Arabidopsis thaliana]
SLFISLSRTRRQQLKTQRRSPERHRFVAKMLSSSPTSFTHPFLSTSPPLSPISPPSRSPRLPPPLVSASCSYTCTEDPPRLHQIPRRTTPANASLYEILEVPRGATSQDIKSAYRRLARICHPDVAAGTDRSNSSADEFMKIHAAYCTLSDPDKRSVYDRRMLRRSRPLTVSTSGMGSYVGRNWETDQCW

SEQ ID NO: 108945 - protein, 161 aa, Zea mays subsp. mays
  misc_feature (1)..(161): Ceres Seq. ID no. 13599583
  misc_feature (65)..(133): Pfam Name: DnaJ domain Pfam Description: DnaJ domain
  misc_feature (50)..(131): Homolog of NCBI NO: 34863272 NR Description: similar to hypothetical protein FLJ40417 [Rattus
  misc_feature (12)..(161): Homolog of NCBI NO: 34894012 NR Description: P0672D08.16 [Oryza sativa (japonica
  misc_feature (3)..(131): Homolog of NCBI NO: 15236355 NR Description: DnaJ protein family [Arabidopsis thaliana]
  misc_feature (3)..(131): Homolog of NCBI NO: 30682610 NR Description: DnaJ protein family [Arabidopsis thaliana]
  misc_feature (3)..(131): Homolog of NCBI NO: 6691127 NR Description: DnaJ-like protein [Arabidopsis thaliana]
  misc_feature (27)..(161): Homolog of NCBI NO: 15231204 NR Description: DnaJ protein family [Arabidopsis thaliana]
  misc_feature (24)..(161): Homolog of NCBI NO: 7488763 NR Description: DnaJ protein homolog - kidney bean (fragment)
  misc_feature (1)..(161): Homolog of NCBI NO: 15227919 NR Description: J11 protein, putative [Arabidopsis thaliana]
  misc_feature (1)..(161): Homolog of NCBI NO: 9843641 NR Description: J11 protein [Arabidopsis thaliana]
  misc_feature (1)..(161): Homolog of NCBI NO: 15233446 NR Description: DnaJ protein family [Arabidopsis thaliana]
MLSSSPTSFTHPFLSTSPPLSPISPPSRSPRLPPPLVSASCSYTCTEDPPRLHQIPRRTTPANASLYEILEVPRGATSQDIKSAYRRLARICHPDVAAGTDRSNSSADEFMKIHAAYCTLSDPDKRSVYDRRMLRRSRPLTVSTSGMGSYVGRNWETDQCW

SEQ ID NO: 108946 - protein, 118 aa, Zea mays subsp. mays
  misc_feature (1)..(118): Ceres Seq. ID no. 13599584
ISLHFPLSNKKTTTQNAEKISRTTPFRSKDAFFVSNLLHSSIPLHVSASLPHISAVSLTSPPASSRLRLLLLHLHGGSAEAAPDPAANDAGERFALRDSRGSSRRDEPGYQIGLPEVG

SEQ ID NO: 108947 - DNA, 1912 bp, Zea mays subsp. mays
  misc_feature (1)..(1912): Ceres Seq. ID no. 13599322
aatcgccagcgagagccatgccgcctcctcccctgccctcgccgagcctgaccgactgaccccacctcgccactgttctttccctgccacctgggccccacagcgcccctttaccgtcaccaccaaatccccaaatcccggaggcacgaggagggaattcgtcgcctgaccgatcggccgatccactgccgtcggcaccccaatccgccgctgccgccatgttcaacaagatcatcaagaggggaaaccgcaagggcgcgcgcggggacaacgcggaggccgccgcgcgccccgcagcgccctcgtcgtcctccgggagcggcggcggcggcgcgggggcagccgcgcccgtcaccgtcaaccacgcctcccgggccacagcgccttcgccgtcctcgcccacttcgccgcacgtggcgccgtctgcgcttgcgaccaacccggcgggggcggcgtccccgccactcctcgagccgctcccgcttctccgcgacgtcgccgccgcggatcgcccgggcctcttcctccgcaagctccgcatcgtcgccgcgctctttgacctttcggactcgctcaagcacccacgggagaaggaggccaaacgccaggctctcctcgagctcgtcgattacgtgcaggctccagctcaggcagcgggcgccaacgcacccacgcgcctcccggaccacgtccaggtgttaaacacaggcgctcgtcgccgccatctctgccaacatcttccgcccgctaccacccgcgctgcacgaatccgccgccgcgatcgaccccggcgccgcgcccgacgaggaggaggagccatacctcgacccctcctggccacacctccagctcgtctatgagctccttctccgatacgttgtttcgcccgacaccgacaccaaggtcgccaagcggtatgtggaccacgccttcgtcctccgtctcctcgacctctttgactccgaggatccgcgtgagcgcgagtacctcaagaccgtgctccaccgcatctatggcaagttcatggtacaccgaccattcattcgcaaggccatcaacaatgtgttctaccggttcatctttgaaacgcagcgccacaatggcataggggagctccttgagatccttggaagcatcattaatggctttgccttgccaatgaaggaggagcacaaactattccttgcccgtgctctcatccccctgcataagcccaaatctgttgcgatctaccatcagcagctgtcctattgtattgttcagttcgttgagaaggactacaaattagcagatactgtgattaggggtctgctcaaatactggccagtcacaaactgccagaaagaggtgttgtttctgggggagcttgaagaagtgctcgaggcaacacagcctgcagagttccagcggtgcatggtgccactgttcaagcagattggacgatgccttaacagttctcacttccaggttgctgaacgtgctttgttcttgtggaacaatgatcatattgtaagcttgatagcacaaaatcgtgttgttatatttccaattatatttgaagctcttgagaggaatatacagagccactggaatcaagcagttcatggtctcactgcaaatgtgcgcaagatgtttttggacatggacagtgaactatttgaagagtgccagcagcagtacatggagaaacaagcgaaagccaaagagatacaggaacaacgagaatcagcatggagacaattggaagctgttgttgctgccaaggctgctggagatgacatggttttggtcaactaggtaatataacctttcgcttcatttatttgttagtgcttgtgttcgtaagtttttctagtcttgtaacctaaaaccgtactactctgtttatgtcctcttgttcttgctttgtttt

SEQ ID NO: 108948 - protein, 257 aa, Zea mays subsp. mays
  misc_feature (1)..(257): Ceres Seq. ID no. 15222562
  misc_feature (1)..(245): Pfam Name: Protein phosphatase 2A regulatory B subunit (B56 Pfam Description: Protein phosphatase 2A regulatory B subunit
  misc_feature (1)..(243): Homolog of NCBI NO: 21537284 NR Description: B regulatory subunit of protein phosphatase 2A,
  misc_feature (1)..(249): Homolog of NCBI NO: 15230961 NR Description: B regulatory subunit of protein phosphatase 2A
  misc_feature (1)..(257): Homolog of NCBI NO: 21530784 NR Description: putative protein phosphatase 2A B'zeta subunit
  misc_feature (1)..(252): Homolog of NCBI NO: 21530786 NR Description: putative protein phosphatase 2A B'teta subunit
  misc_feature (1)..(256): Homolog of NCBI NO: 20147343 NR Description: AT4g15410/dl3750w [Arabidopsis thaliana]
  misc_feature (1)..(256): Homolog of NCBI NO: 18414444 NR Description: B' regulatory subunit of PP2A (AtB'gamma)
  misc_feature (1)..(256): Homolog of NCBI NO: 7485149 NR Description: hypothetical protein - Arabidopsis thaliana
  misc_feature (1)..(248): Homolog of NCBI NO: 15233133 NR Description: protein phosphatase 2A regulatory subunit
  misc_feature (1)..(254): Homolog of NCBI NO: 15242766 NR Description: B' regulatory subunit of PP2A (AtB'alpha)
  misc_feature (1)..(250): Homolog of NCBI NO: 15232782 NR Description: B' regulatory subunit of PP2A (AtB'beta)
MVHRPFIRKAINNVFYRFIFETQRHNGIGELLEILGSIINGFALPMKEEHKLFLARALIPLHKPKSVAIYHQQLSYCIVQFVEKDYKLADTVIRGLLKYWPVTNCQKEVLFLGELEEVLEATQPAEFQRCMVPLFKQIGRCLNSSHFQVAERALFLWNNDHIVSLIAQNRVVIFPIIFEALERNIQSHWNQAVHGLTANVRKMFLDMDSELFEECQQQYMEKQAKAKEIQEQRESAWRQLEAVVAAKAAGDDMVLVN

SEQ ID NO: 108949 - protein, 213 aa, Zea mays subsp. mays
  misc_feature (1)..(213): Ceres Seq. ID no. 15222563
  misc_feature (86)..(141): Pfam Name: Protein phosphatase 2A regulatory B subunit (B56 Pfam Description: Protein phosphatase 2A regulatory B subunit
  misc_feature (77)..(167): Homolog of NCBI NO: 21530786 NR Description: putative protein phosphatase 2A B'teta subunit
  misc_feature (25)..(139): Homolog of NCBI NO: 20147343 NR Description: AT4g15410/dl3750w [Arabidopsis thaliana]
  misc_feature (25)..(139): Homolog of NCBI NO: 18414444 NR Description: B' regulatory subunit of PP2A (AtB'gamma)
  misc_feature (25)..(139): Homolog of NCBI NO: 7485149 NR Description: hypothetical protein - Arabidopsis thaliana
  misc_feature (1)..(139): Homolog of NCBI NO: 21530784 NR Description: putative protein phosphatase 2A B'zeta subunit
  misc_feature (4)..(142): Homolog of NCBI NO: 15230961 NR Description: B regulatory subunit of protein phosphatase 2A
  misc_feature (26)..(142): Homolog of NCBI NO: 21537284 NR Description: B regulatory subunit of protein phosphatase 2A,
  misc_feature (1)..(177): Homolog of NCBI NO: 15233133 NR Description: protein phosphatase 2A regulatory subunit
  misc_feature (1)..(178): Homolog of NCBI NO: 15242766 NR Description: B' regulatory subunit of PP2A (AtB'alpha)
  misc_feature (1)..(141): Homolog of NCBI NO: 15232782 NR Description: B' regulatory subunit of PP2A (AtB'beta)
MFNKIIKRGNRKGARGDNAEAAARPAAPSSSSGSGGGGAGAAAPVTVNHASRATAPSPSSPTSPHVAPSALATNPAGAASPPLLEPLPLLRDVAAADRPGLFLRKLRIVAALFDLSDSLKHPREKEAKRQALLELVDYVQAPAQAAGANAPTRLPDHVQVLNTGARRRHLCQHLPPATTRAARIRRRDRPRRRARRGGGAIPRPLLATPPARL

SEQ ID NO: 108950 - protein, 212 aa, Zea mays subsp. mays
  misc_feature (1)..(212): Ceres Seq. ID no. 15222564
  misc_feature (1)..(200): Pfam Name: Protein phosphatase 2A regulatory B subunit (B56 Pfam Description: Protein phosphatase 2A regulatory B subunit
  misc_feature (1)..(198): Homolog of NCBI NO: 21537284 NR Description: B regulatory subunit of protein phosphatase 2A,
  misc_feature (1)..(204): Homolog of NCBI NO: 15230961 NR Description: B regulatory subunit of protein phosphatase 2A
  misc_feature (1)..(212): Homolog of NCBI NO: 21530784 NR Description: putative protein phosphatase 2A B'zeta subunit
  misc_feature (1)..(207): Homolog of NCBI NO: 21530786 NR Description: putative protein phosphatase 2A B'teta subunit
  misc_feature (1)..(211): Homolog of NCBI NO: 20147343 NR Description: AT4g15410/dl3750w [Arabidopsis thaliana]
  misc_feature (1)..(211): Homolog of NCBI NO: 18414444 NR Description: B' regulatory subunit of PP2A (AtB'gamma)
  misc_feature (1)..(211): Homolog of NCBI NO: 7485149 NR Description: hypothetical protein - Arabidopsis thaliana
  misc_feature (1)..(203): Homolog of NCBI NO: 15233133 NR Description: protein phosphatase 2A regulatory subunit
  misc_feature (1)..(209): Homolog of NCBI NO: 15242766 NR Description: B' regulatory subunit of PP2A (AtB'alpha)
  misc_feature (1)..(205): Homolog of NCBI NO: 15232782 NR Description: B' regulatory subunit of PP2A (AtB'beta)
MKEEHKLFLARALIPLHKPKSVAIYHQQLSYCIVQFVEKDYKLADTVIRGLLKYWPVTNCQKEVLFLGELEEVLEATQPAEFQRCMVPLFKQIGRCLNSSHFQVAERALFLWNNDHIVSLIAQNRVVIFPIIFEALERNIQSHWNQAVHGLTANVRKMFLDMDSELFEECQQQYMEKQAKAKEIQEQRESAWRQLEAVVAAKAAGDDMVLVN

SEQ ID NO: 108951 - DNA, 1104 bp, Zea mays subsp. mays
  misc_feature (1)..(1104): Ceres Seq. ID no. 12635231
gaggggataacgaagagtggcgcagtggccatcgagactcgagagggagtggcagacgcgaggttgcaaggagatggcggacggcaagggaagggagaattcggccgtggcattgaagacctcgccgtcagtgccgatggctcggggattgcgcggcggtagtaaccctctggaggagtggagcggccgcgtaaaagcgattgaggccgggttccgtgcgtggatggcgaagcagcccatccacatcgaggccgcggtgtccacggccgttggggcggtgcagggcggggctctgggtgggctcatgggctcgctcacagccgacggagggtcgccgttccccatcccgcagccgccgtccaacgccaactcggatgccatggcgtcgttcaagcaggcccaggctctagctgctggacccttggtgcaagcccgaaactttgcagtcatgactggcgcaaatgcaggcatatcttgtgtcatgagaaggctacgaggacaagaggacatccagggcagcatgacagctgcttttggttctggtgctcttttctccatagtgagcggaatgggaactcctaatccagttttaaatgcaattacaactggtgttgcttttgcagtatttcaaggtggctttttcatgattgggcagaaattctcaaagccatcaagtgaagatacatactactctctgacaagaagcatgctgcacaaactgggtcttgaaaaatatgaaaagaatttcaggaagggtctcctcaacgatcaaacattaccactccttacggacagtgctctgagagatgtgaagatccctcctggacccagacttctcattctcgaccaaattaaaagggaccctggcctggttcgagcaaagtgaagtcacaattgtcaacaattggtcctttctgagctgcatagggtttgaaagcaatgccacctcttttttttaaataagctttctaggaaagtaagcaataatttagctgtgctgttgttaattgtttttggccgatcaatttgcatcactcattaaattttgaacatgtgtttacatgcatcttattcaaatttaaattggcattccgaacgatatgc

SEQ ID NO: 108952 - protein, 270 aa, Zea mays subsp. mays
  misc_feature (1)..(270): Ceres Seq. ID no. 12635232
  misc_feature (49)..(196): Pfam Name: Tim17/Tim22/Tim23 family Pfam Description: Tim17/Tim22/Tim23 family
  misc_feature (1)..(264): Homolog of NCBI NO: 15229167 NR Description: putative protein
  misc_feature (26)..(266): Homolog of NCBI NO: 21593899 NR Description: unknown [Arabidopsis thaliana]
  misc_feature (26)..(266): Homolog of NCBI NO: 15238598 NR Description: putative protein
  misc_feature (15)..(262): Homolog of NCBI NO: 32487911 NR Description: OJ000315_02.15 [Oryza sativa (japonica
MADGKGRENSAVALKTSPSVPMARGLRGGSNPLEEWSGRVKAIEAGFRAWMAKQPIHIEAAVSTAVGAVQGGALGGLMGSLTADGGSPFPIPQPPSNANSDAMASFKQAQALAAGPLVQARNFAVMTGANAGISCVMRRLRGQEDIQGSMTAAFGSGALFSIVSGMGTPNPVLNAITTGVAFAVFQGGFFMIGQKFSKPSSEDTYYSLTRSMLHKLGLEKYEKNFRKGLLNDQTLPLLTDSALRDVKIPPGPRLLILDQIKRDPGLVRAK

SEQ ID NO: 108953 - protein, 249 aa, Zea mays subsp. mays
  misc_feature (1)..(249): Ceres Seq. ID no. 12635233
  misc_feature (28)..(175): Pfam Name: Tim17/Tim22/Tim23 family Pfam Description: Tim17/Tim22/Tim23 family
  misc_feature (1)..(243): Homolog of NCBI NO: 15229167 NR Description: putative protein
  misc_feature (5)..(245): Homolog of NCBI NO: 21593899 NR Description: unknown [Arabidopsis thaliana]
  misc_feature (5)..(245): Homolog of NCBI NO: 15238598 NR Description: putative protein
  misc_feature (1)..(241): Homolog of NCBI NO: 32487911 NR Description: OJ000315_02.15 [Oryza sativa (japonica
MARGLRGGSNPLEEWSGRVKAIEAGFRAWMAKQPIHIEAAVSTAVGAVQGGALGGLMGSLTADGGSPFPIPQPPSNANSDAMASFKQAQALAAGPLVQARNFAVMTGANAGISCVMRRLRGQEDIQGSMTAAFGSGALFSIVSGMGTPNPVLNAITTGVAFAVFQGGFFMIGQKFSKPSSEDTYYSLTRSMLHKLGLEKYEKNFRKGLLNDQTLPLLTDSALRDVKIPPGPRLLILDQIKRDPGLVRAK

SEQ ID NO: 108954 - protein, 220 aa, Zea mays subsp. mays
  misc_feature (1)..(220): Ceres Seq. ID no. 12635234
  misc_feature (1)..(146): Pfam Name: Tim17/Tim22/Tim23 family Pfam Description: Tim17/Tim22/Tim23 family
  misc_feature (1)..(214): Homolog of NCBI NO: 15229167 NR Description: putative protein
  misc_feature (1)..(216): Homolog of NCBI NO: 21593899 NR Description: unknown [Arabidopsis thaliana]
  misc_feature (1)..(216): Homolog of NCBI NO: 15238598 NR Description: putative protein
  misc_feature (1)..(212): Homolog of NCBI NO: 32487911 NR Description: OJ000315_02.15 [Oryza sativa (japonica
MAKQPIHIEAAVSTAVGAVQGGALGGLMGSLTADGGSPFPIPQPPSNANSDAMASFKQAQALAAGPLVQARNFAVMTGANAGISCVMRRLRGQEDIQGSMTAAFGSGALFSIVSGMGTPNPVLNAITTGVAFAVFQGGFFMIGQKFSKPSSEDTYYSLTRSMLHKLGLEKYEKNFRKGLLNDQTLPLLTDSALRDVKIPPGPRLLILDQIKRDPGLVRAK

SEQ ID NO: 108955 - DNA, 712 bp, Zea mays subsp. mays
  misc_feature (1)..(712): Ceres Seq. ID no. 15225031
aagccttatcgttggaagagaagaagaaaaatgttggagagtataaaccttcctatctcctgcaacttctctagctttcctcatctaaaaccctccagaaaagcccaatccctaagccaaccccgaaacctcacccttgtacagtcaagagctcctttgccttttctgaaacccgatagaattctccttcgcaacaacaacaagagtcaattcttgaaacacgagaagaagggtctcttccatgtgtgcagaagctcactaaacaacccagatccagacaaaactgaaattcaagatgaaggaagagactggacgagctccgtattgcttttcgctctctggggtgcgcttctttactactgcttcaatcttgctcctgatcaaaccccaacacaagacttgtactttgtgaaaaagctgttgaatttgaaaggcgatgatggttttagaatgaaccagatccttgttgggttatggtatataatgggtttatggcctgttgtatacgctatgctcttacttcccactggtcgaagtaaaactcaggcatggcctttcgttgttttcctcatcctcccctgctttgtttcctagggagagagagtacaaaaatgtatagccttttttttttggaatattacaagtttgggtgttgagaattgggattgttcttatggtggacaaaagctatgaatcaattagcctttctact

SEQ ID NO: 108956 - protein, 197 aa, Zea mays subsp. mays
  misc_feature (1)..(197): Ceres Seq. ID no. 15225032
  misc_feature (71)..(118): Homolog of NCBI NO: 15228138 NR Description: expressed protein [Arabidopsis thaliana]
  misc_feature (103)..(194): Homolog of NCBI NO: 29647433 NR Description: unknown protein [Oryza sativa (japonica
KPYRWKRRRKMLESINLPISCNFSSFPHLKPSRKAQSLSQPRNLTLVQSRAPLPFLKPDRILLRNNNKSQFLKHEKKGLFHVCRSSLNNPDPDKTEIQDEGRDWTSSVLLFALWGALLYYCFNLAPDQTPTQDLYFVKKLLNLKGDDGFRMNQILVGLWYIMGLWPVVYAMLLLPTGRSKTQAWPFVVFLILPCFVS

SEQ ID NO: 108957 - protein, 187 aa, Zea mays subsp. mays
  misc_feature (1)..(187): Ceres Seq. ID no. 15225033
  misc_feature (61)..(108): Homolog of NCBI NO: 15228138 NR Description: expressed protein [Arabidopsis thaliana]
  misc_feature (93)..(184): Homolog of NCBI NO: 29647433 NR Description: unknown protein [Oryza sativa (japonica
MLESINLPISCNFSSFPHLKPSRKAQSLSQPRNLTLVQSRAPLPFLKPDRILLRNNNKSQFLKHEKKGLFHVCRSSLNNPDPDKTEIQDEGRDWTSSVLLFALWGALLYYCFNLAPDQTPTQDLYFVKKLLNLKGDDGFRMNQILVGLWYIMGLWPVVYAMLLLPTGRSKTQAWPFVVFLILPCFVS

SEQ ID NO: 108958 - DNA, 1094 bp, Zea mays subsp. mays
  misc_feature (1)..(1094): Ceres Seq. ID no. 13599323
aacatcgatcgtccctgtgagcatttgctcttgcgcttcttgacactccaatttgccagaaagaagcaaacatccatatttggtagcaatggcagcgtcgaggtgcagcaccgccttcgtcttgctcgtcgtggtcacggtggcggcggcggcggcggcggcgctgctgcagccggcggaggcggcagcggcggcacgccgcgccgacgcccacgtgctctggtacccgggaacaaggcagcgtagccccagcggcttcaggggtttccctcgctccaggctgtcgccaccgtccgcgggcaggctaacgccgccgtcgcccagcggcaggccgatgacgccgccgccgtcccaggcgcaggcgccgccggcgcccatctcgcccccgtgcaccgccgcgaacccgcagcccggcttccctggcatgccggtgggcggcaccggcggcttcggaggggcgtcgccctcgccgccgtcggcgccgacggactgcgtgacgccgctggcggggctgatgacgtgcgcgtcgttcctgacggggagcgaggcggagacgccgaccccgcagagcgagtgctgcggcgggctgggcatgttcctcaacagctcggcggcggcggacgaccggtcgctgcgttgcctgtgcccggtgatcctcggcgacgtgaaccgcatgctccccaagcccatcgaccccgtccgcatgatgtacctccccatcgcctgcggcgtcgtcctcccgcctcaagtcctcttcatctgcttcactgggcagccgacgccgccggtggtgaaccggattcctgactcctggaagacctcgtcttcttcagcattgtcgccttgagctggtgccgacgatcggatttggttactgctcatcacgcaggcacagtctatcccgggacgtatctatcaagtttaattattaagattacaaaaaaacgtgagaaactagctggttactaccaactttgcagccatgagagtggtcaacgcatcatgggccaattgtggtgtagtattactgatcgatgtaatagctagcatgttttcctttttcttattgagaatgtaaacaaaaatacaagagc

SEQ ID NO: 108959 - protein, 252 aa, Zea mays subsp. mays
  misc_feature (1)..(252): Ceres Seq. ID no. 15222565
  misc_feature (135)..(220): Pfam Name: Protease inhibitor/seed storage/LTP family Pfam Description: Protease inhibitor/seed storage/LTP family
  misc_feature (47)..(162): Homolog of NCBI NO: 1150834 NR Description: Wiscott-Aldrich Syndrome protein homolog
  misc_feature (47)..(162): Homolog of NCBI NO: 6678581 NR Description: Wiskott-Aldrich syndrome homolog
  misc_feature (122)..(233): Homolog of NCBI NO: 25553602 NR Description: OJ1656_E11.34 [Oryza sativa (japonica
  misc_feature (75)..(235): Homolog of NCBI NO: 38347146 NR Description: OSJNBa0039G19.6 [Oryza sativa (japonica
  misc_feature (76)..(235): Homolog of NCBI NO: 34901578 NR Description: P0571D04.3 [Oryza sativa (japonica
  misc_feature (69)..(231): Homolog of NCBI NO: 34901090 NR Description: hypothetical protein~predicted by GlimmerM etc.
MAASRCSTAFVLLVVVTVAAAAAAALLQPAEAAAAARRADAHVLWYPGTRQRSPSGFRGFPRSRLSPPSAGRLTPPSPSGRPMTPPPSQAQAPPAPISPPCTAANPQPGFPGMPVGGTGGFGGASPSPPSAPTDCVTPLAGLMTCASFLTGSEAETPTPQSECCGGLGMFLNSSAAADDRSLRCLCPVILGDVNRMLPKPIDPVRMMYLPIACGVVLPPQVLFICFTGQPTPPVVNRIPDSWKTSSSSALSP

SEQ ID NO: 108960 - protein, 170 aa, Zea mays subsp. mays
  misc_feature (1)..(170): Ceres Seq. ID no. 15222566
  misc_feature (53)..(138): Pfam Name: Protease inhibitor/seed storage/LTP family Pfam Description: Protease inhibitor/seed storage/LTP family
  misc_feature (1)..(80): Homolog of NCBI NO: 1150834 NR Description: Wiscott-Aldrich Syndrome protein homolog
  misc_feature (1)..(80): Homolog of NCBI NO: 6678581 NR Description: Wiskott-Aldrich syndrome homolog
  misc_feature (40)..(151): Homolog of NCBI NO: 25553602 NR Description: OJ1656_E11.34 [Oryza sativa (japonica
  misc_feature (1)..(153): Homolog of NCBI NO: 38347146 NR Description: OSJNBa0039G19.6 [Oryza sativa (japonica
  misc_feature (1)..(153): Homolog of NCBI NO: 34901578 NR Description: P0571D04.3 [Oryza sativa (japonica
  misc_feature (1)..(149): Homolog of NCBI NO: 34901090 NR Description: hypothetical protein~predicted by GlimmerM etc.
MTPPPSQAQAPPAPISPPCTAANPQPGFPGMPVGGTGGFGGASPSPPSAPTDCVTPLAGLMTCASFLTGSEAETPTPQSECCGGLGMFLNSSAAADDRSLRCLCPVILGDVNRMLPKPIDPVRMMYLPIACGVVLPPQVLFICFTGQPTPPVVNRIPDSWKTSSSSALSP

SEQ ID NO: 108961 - protein, 140 aa, Zea mays subsp. mays
  misc_feature (1)..(140): Ceres Seq. ID no. 15222567
  misc_feature (23)..(108): Pfam Name: Protease inhibitor/seed storage/LTP family Pfam Description: Protease inhibitor/seed storage/LTP family
  misc_feature (1)..(50): Homolog of NCBI NO: 1150834 NR Description: Wiscott-Aldrich Syndrome protein homolog
  misc_feature (1)..(50): Homolog of NCBI NO: 6678581 NR Description: Wiskott-Aldrich syndrome homolog
  misc_feature (10)..(121): Homolog of NCBI NO: 25553602 NR Description: OJ1656_E11.34 [Oryza sativa (japonica
  misc_feature (1)..(123): Homolog of NCBI NO: 38347146 NR Description: OSJNBa0039G19.6 [Oryza sativa (japonica
  misc_feature (1)..(123): Homolog of NCBI NO: 34901578 NR Description: P0571D04.3 [Oryza sativa (japonica
  misc_feature (1)..(119): Homolog of NCBI NO: 34901090 NR Description: hypothetical protein~predicted by GlimmerM etc.
MPVGGTGGFGGASPSPPSAPTDCVTPLAGLMTCASFLTGSEAETPTPQSECCGGLGMFLNSSAAADDRSLRCLCPVILGDVNRMLPKPIDPVRMMYLPIACGVVLPPQVLFICFTGQPTPPVVNRIPDSWKTSSSSALSP

SEQ ID NO: 108962 - DNA, 1706 bp, Zea mays subsp. mays
  misc_feature (1)..(1706): Ceres Seq. ID no. 13599324
actagatttttcttctttctgatcctcttaaggtttcagaatctgtactgccattttctcggtaaaatgggaacccgatttcaatccttcttgctcctgttcttgctttcttgtttaatctttatatcggcgacctcatccgagcaaaaaggtgatggaacccttagaattggattgaagaaaaggaaactaaaccgggccaacaggctagcttctcagctttttttgaaaaaccgagggtcttggtcgtccaaaggtttttttcacctgaacgatggcaattcggatactgttccccctaaaaattatttggatgctcaatattacggtgacattaccattggtactccacctcagaagtttactgccatctttgatactggaagctccaatctctggatgccatcttctaaatgctacctatcggttgcttgttattttcattcgaagtacacggctagcgagtcatcaacatacaaaaagaacggaaaacctgcgtcaatccgctatgggacaggtgctatatctggttacttcagcaatgatgatgttaaaattggtgatcttgttatcaaggatcaggagttcatagaggctactaatgagcctggtattacattcttggtagccaagtttgatggaatcctagggttgggattcaaagagatagctgttggaaattcaacaccggtttggtataacatggtagaaaaaggtctggttaaggaacagattttttcgttttggcttaaccgcaacccgcaagatcaagaaggtggtgagattgtctttggcggagtcgatcctaagcacttcaaaggagagcatacttatgttcccgtgacacgtaaaggttactggcaatttgacatgggtgatctccacattgctggcaaaccaacaggatactgttctaatggttgttctgccattgctgattctggaacttctctactcaccggtccaacgagtgtcatcacaatgatcaatcatgcgattggagcagtaggagtcgcaagcaaagagtgcaaaaccgtcataggtcaatatggaaaaaccatgttgaactcccttttatctcaggcggatcctaggaaggtatgctcacagataggactctgcggtttcaatgagagaatggggattaagtcagttctagacgatggaacatcagatcttataaacgaagcgatgtgcagcgtttgtgaaatggcaaccgtgtggatgcagagtgaattgaatcagaatgaaacacaagaacgtatactctcttatgctgctgagctatgtgaccatataccaagtccgaaccaacaatcagcagtgaactgcgagaaggtttcgtcgatgcctatagtcacattcaccattggtggcaaaccctttgatctctcacctcaagattatatattcaagattggggatggagttcagtctcagtgcaccagtggtttcactgccatggacatccctccacctcgtggacctctctggatcttgggtgatatattcatgggaccataccatactgtgttcgattatgggaaagcaagagttggattcgccaaatctgcttaaagaaagatcaaaaccctttgttaatatgatgtttgtgaatgtgtttaaatcttaaatggttgtaataacttaaaagcattgctatcctagaatggtgtatcatcttaaatacatattcttaagctttt

SEQ ID NO: 108963 - protein, 525 aa, Zea mays subsp. mays
  misc_feature (1)..(525): Ceres Seq. ID no. 13599325
  misc_feature (54)..(385): Pfam Name: Eukaryotic aspartyl protease Pfam Description: Eukaryotic aspartyl protease
  misc_feature (23)..(525): Homolog of NCBI NO: 7435838 NR Description: probable aspartic proteinase (EC 3.4.23.-) 1 -
  misc_feature (23)..(525): Homolog of NCBI NO: 21616053 NR Description: aspartic proteinase [Theobroma cacao]
  misc_feature (23)..(525): Homolog of NCBI NO: 15233518 NR Description: aspartic protease -related [Arabidopsis thaliana]
TRFFFFLILLRFQNLYCHFLGKMGTRFQSFLLLFLLSCLIFISATSSEQKGDGTLRIGLKKRKLNRANRLASQLFLKNRGSWSSKGFFHLNDGNSDTVPPKNYLDAQYYGDITIGTPPQKFTAIFDTGSSNLWMPSSKCYLSVACYFHSKYTASESSTYKKNGKPASIRYGTGAISGYFSNDDVKIGDLVIKDQEFIEATNEPGITFLVAKFDGILGLGFKEIAVGNSTPVWYNMVEKGLVKEQIFSFWLNRNPQDQEGGEIVFGGVDPKHFKGEHTYVPVTRKGYWQFDMGDLHIAGKPTGYCSNGCSAIADSGTSLLTGPTSVITMINHAIGAVGVASKECKTVIGQYGKTMLNSLLSQADPRKVCSQIGLCGFNERMGIKSVLDDGTSDLINEAMCSVCEMATVWMQSELNQNETQERILSYAAELCDHIPSPNQQSAVNCEKVSSMPIVTFTIGGKPFDLSPQDYIFKIGDGVQSQCTSGFTAMDIPPPRGPLWILGDIFMGPYHTVFDYGKARVGFAKSA

SEQ ID NO: 108964 - protein, 503 aa, Zea mays subsp. mays
  misc_feature (1)..(503): Ceres Seq. ID no. 13599326
  misc_feature (32)..(363): Pfam Name: Eukaryotic aspartyl protease Pfam Description: Eukaryotic aspartyl protease
  misc_feature (1)..(503): Homolog of NCBI NO: 7435838 NR Description: probable aspartic proteinase (EC 3.4.23.-) 1 -
  misc_feature (1)..(503): Homolog of NCBI NO: 21616053 NR Description: aspartic proteinase [Theobroma cacao]
  misc_feature (1)..(503): Homolog of NCBI NO: 15233518 NR Description: aspartic protease -related [Arabidopsis thaliana]
MGTRFQSFLLLFLLSCLIFISATSSEQKGDGTLRIGLKKRKLNRANRLASQLFLKNRGSWSSKGFFHLNDGNSDTVPPKNYLDAQYYGDITIGTPPQKFTAIFDTGSSNLWMPSSKCYLSVACYFHSKYTASESSTYKKNGKPASIRYGTGAISGYFSNDDVKIGDLVIKDQEFIEATNEPGITFLVAKFDGILGLGFKEIAVGNSTPVWYNMVEKGLVKEQIFSFWLNRNPQDQEGGEIVFGGVDPKHFKGEHTYVPVTRKGYWQFDMGDLHIAGKPTGYCSNGCSAIADSGTSLLTGPTSVITMINHAIGAVGVASKECKTVIGQYGKTMLNSLLSQADPRKVCSQIGLCGFNERMGIKSVLDDGTSDLINEAMCSVCEMATVWMQSELNQNETQERILSYAAELCDHIPSPNQQSAVNCEKVSSMPIVTFTIGGKPFDLSPQDYIFKIGDGVQSQCTSGFTAMDIPPPRGPLWILGDIFMGPYHTVFDYGKARVGFAKSA

SEQ ID NO: 108965 - protein, 392 aa, Zea mays subsp. mays
  misc_feature (1)..(392): Ceres Seq. ID no. 13599327
  misc_feature (1)..(252): Pfam Name: Eukaryotic aspartyl protease Pfam Description: Eukaryotic aspartyl protease
  misc_feature (1)..(392): Homolog of NCBI NO: 7435838 NR Description: probable aspartic proteinase (EC 3.4.23.-) 1 -
  misc_feature (1)..(392): Homolog of NCBI NO: 21616053 NR Description: aspartic proteinase [Theobroma cacao]
  misc_feature (1)..(392): Homolog of NCBI NO: 15233518 NR Description: aspartic protease -related [Arabidopsis thaliana]
MPSSKCYLSVACYFHSKYTASESSTYKKNGKPASIRYGTGAISGYFSNDDVKIGDLVIKDQEFIEATNEPGITFLVAKFDGILGLGFKEIAVGNSTPVWYNMVEKGLVKEQIFSFWLNRNPQDQEGGEIVFGGVDPKHFKGEHTYVPVTRKGYWQFDMGDLHIAGKPTGYCSNGCSAIADSGTSLLTGPTSVITMINHAIGAVGVASKECKTVIGQYGKTMLNSLLSQADPRKVCSQIGLCGFNERMGIKSVLDDGTSDLINEAMCSVCEMATVWMQSELNQNETQERILSYAAELCDHIPSPNQQSAVNCEKVSSMPIVTFTIGGKPFDLSPQDYIFKIGDGVQSQCTSGFTAMDIPPPRGPLWILGDIFMGPYHTVFDYGKARVGFAKSA

SEQ ID NO: 108966 - DNA, 619 bp, Zea mays subsp. mays
  misc_feature (1)..(619): Ceres Seq. ID no. 13599249
attgaaaattagattttgtccggtggagaagatgggagcagaaacggtcgtggaagctgagaaaattgacgacttgctcgaggcagctagatacaatgatatagatgatctcaaaagcttggcctttgatggtgtctctcttaactctcgcgattcccaaggccgaacagcgcttcatatggccgcggcgaatggacatatgagtatagtggagtatctgatcagtcaaggagtggatattaacgctctgaacgaggagaacaatgctcctctgcattgggcttgtttgaatggccatatcgaggttgtgaagaaaatgatcttggcaggagccagtcttagtcttttgaatcggtacgagcggactcccatggacgaagctattggtgcagggaagatggagattatagatgctatcaacacaactgttacacaaatggaacttgaaaacaccactgtagcctgactttaatggcgtcttcctaaatgcttgttgtctctctctctctctgtagtttacagcgtagtttttataatgtggaagttttgcgttgttatgtagactgatggttagaactggaatcatctgaaatcgaattctaccaaaaagattattgcc

SEQ ID NO: 108967 - protein, 154 aa, Zea mays subsp. mays
  misc_feature (1)..(154): Ceres Seq. ID no. 13599250
  misc_feature (86)..(118): Pfam Name: Ankyrin repeat Pfam Description: Ankyrin repeat
  misc_feature (25)..(139): Homolog of NCBI NO: 28274854 NR Description: ankyrin repeat protein E4_8 [synthetic construct]
  misc_feature (25)..(139): Homolog of NCBI NO: 28274852 NR Description: ankyrin repeat protein E4_2 [synthetic construct]
  misc_feature (25)..(139): Homolog of NCBI NO: 28274844 NR Description: ankyrin repeat protein E2_5 [synthetic construct]
  misc_feature (25)..(139): Homolog of NCBI NO: 28274850 NR Description: ankyrin repeat protein E3_19 [synthetic construct]
  misc_feature (25)..(139): Homolog of NCBI NO: 28373666 NR Description: Chain A, Sank E3_5: An Artificial Ankyrin Repeat
  misc_feature (25)..(139): Homolog of NCBI NO: 28274846 NR Description: ankyrin repeat protein E2_17 [synthetic construct]
  misc_feature (28)..(136): Homolog of NCBI NO: 28373837 NR Description: Chain A, 4ank: A Designed Ankyrin Repeat Protein
  misc_feature (11)..(154): Homolog of NCBI NO: 34899080 NR Description: contains ESTs
  misc_feature (11)..(153): Homolog of NCBI NO: 14586362 NR Description: putative protein [Arabidopsis thaliana]
  misc_feature (11)..(153): Homolog of NCBI NO: 30684047 NR Description: expressed protein [Arabidopsis thaliana]
LKIRFCPVEKMGAETVVEAEKIDDLLEAARYNDIDDLKSLAFDGVSLNSRDSQGRTALHMAAANGHMSIVEYLISQGVDINALNEENNAPLHWACLNGHIEVVKKMILAGASLSLLNRYERTPMDEAIGAGKMEIIDAINTTVTQMELENTTVA

SEQ ID NO: 108968 - protein, 144 aa, Zea mays subsp. mays
  misc_feature (1)..(144): Ceres Seq. ID no. 13599251
  misc_feature (76)..(108): Pfam Name: Ankyrin repeat Pfam Description: Ankyrin repeat
  misc_feature (15)..(129): Homolog of NCBI NO: 28274852 NR Description: ankyrin repeat protein E4_2 [synthetic construct]
  misc_feature (15)..(129): Homolog of NCBI NO: 28274854 NR Description: ankyrin repeat protein E4_8 [synthetic construct]
  misc_feature (15)..(129): Homolog of NCBI NO: 28274844 NR Description: ankyrin repeat protein E2_5 [synthetic construct]
  misc_feature (15)..(129): Homolog of NCBI NO: 28274850 NR Description: ankyrin repeat protein E3_19 [synthetic construct]
  misc_feature (15)..(129): Homolog of NCBI NO: 28373666 NR Description: Chain A, Sank E3_5: An Artificial Ankyrin Repeat
  misc_feature (15)..(129): Homolog of NCBI NO: 28274846 NR Description: ankyrin repeat protein E2_17 [synthetic construct]
  misc_feature (18)..(126): Homolog of NCBI NO: 28373837 NR Description: Chain A, 4ank: A Designed Ankyrin Repeat Protein
  misc_feature (1)..(144): Homolog of NCBI NO: 34899080 NR Description: contains ESTs
  misc_feature (1)..(143): Homolog of NCBI NO: 14586362 NR Description: putative protein [Arabidopsis thaliana]
  misc_feature (1)..(143): Homolog of NCBI NO: 30684047 NR Description: expressed protein [Arabidopsis thaliana]
MGAETVVEAEKIDDLLEAARYNDIDDLKSLAFDGVSLNSRDSQGRTALHMAAANGHMSIVEYLISQGVDINALNEENNAPLHWACLNGHIEVVKKMILAGASLSLLNRYERTPMDEAIGAGKMEIIDAINTTVTQMELENTTVA

SEQ ID NO: 108969 - protein, 95 aa, Zea mays subsp. mays
  misc_feature (1)..(95): Ceres Seq. ID no. 13599252
  misc_feature (27)..(59): Pfam Name: Ankyrin repeat Pfam Description: Ankyrin repeat
  misc_feature (1)..(80): Homolog of NCBI NO: 28274854 NR Description: ankyrin repeat protein E4_8 [synthetic construct]
  misc_feature (1)..(80): Homolog of NCBI NO: 28274852 NR Description: ankyrin repeat protein E4_2 [synthetic construct]
  misc_feature (1)..(80): Homolog of NCBI NO: 28274844 NR Description: ankyrin repeat protein E2_5 [synthetic construct]
  misc_feature (1)..(80): Homolog of NCBI NO: 28274850 NR Description: ankyrin repeat protein E3_19 [synthetic construct]
  misc_feature (1)..(80): Homolog of NCBI NO: 28373666 NR Description: Chain A, Sank E3_5: An Artificial Ankyrin Repeat
  misc_feature (1)..(80): Homolog of NCBI NO: 28274846 NR Description: ankyrin repeat protein E2_17 [synthetic construct]
  misc_feature (1)..(77): Homolog of NCBI NO: 28373837 NR Description: Chain A, 4ank: A Designed Ankyrin Repeat Protein
  misc_feature (1)..(95): Homolog of NCBI NO: 34899080 NR Description: contains ESTs
  misc_feature (1)..(94): Homolog of NCBI NO: 14586362 NR Description: putative protein [Arabidopsis thaliana]
  misc_feature (1)..(94): Homolog of NCBI NO: 30684047 NR Description: expressed protein [Arabidopsis thaliana]
MAAANGHMSIVEYLISQGVDINALNEENNAPLHWACLNGHIEVVKKMILAGASLSLLNRYERTPMDEAIGAGKMEIIDAINTTVTQMELENTTVA

SEQ ID NO: 108970 - DNA, 1267 bp, Zea mays subsp. mays
  misc_feature (1)..(1267): Ceres Seq. ID no. 13599575
tacctagaacatcctaatcgaaaactctctctctctctagcctctccattccgtgtggcgaccgagcgaaccctagccgagattagactaccatccccaatctaccggaggaggacgaggacgacgccgacgagatgctgagggttgcggggaggaggctctcgtcttcgctctcctggcgccccgtggcgaccgtcggagccaggggcccgctcgctggcgccggcggccctgggagagacgacgacgacggttcggcctaccagcggcggttcgccatcgagtcccccttcttcaccgccgcgagaggcttttcttcagctgaaacacttgttccacggaaccaagatgctgggttggctgaactcccagccactgttgctgcactgaagaaccccaactcaaaaatcctttatgaccagtacaaccatgaaagatatcctcctggagatcccagcaagcgtgcctttgcctactttgttctgagtggtgggagattcgtatatgcatcactgctgcgtctccttgtcttgaagtttgtcttgagcatgtcagcaagtaaggatgtgcttgcacttgcttcccttgaggttgatctatccagcattgaacccggtagcacagtgactgtcaagtggcgtggaaagccagtcttcatcaggcgacggacagacgatgacatcaagctggccaacagcgtggatgttgcatccctgcgccacccagagcaagacgctgagcgtgtgaagaacccagagtggctggtggttattggtgtctgcactcatcttggttgcattccccttcccaactctggagactttggtggctggttctgcccgtgccatggctcccactatgacatctctggcagaatccgcaagggccctgccccgtacaaccttgaggtgcccacctacagtttcttggaagataacaagatgctcataggctaagagcctaaaaccagtacctaccgacatatattatccacaggagtgaattcctgttgcgctgttattttgttttcaatgtggctaggagtttttgtttcaggactattgcaacggtgatccactgttacctactgaagttcatttgcagtgcgaaataattatttctcctatgttgctactggattgcaagttgttttgtactgattttctgagaccctatcggaaggatattgtatacctcttctggtccttgctacctatatatttgttaaataagcaaacatactattcttctaaaaaaaaaaaaaaaa

SEQ ID NO: 108971 - protein, 273 aa, Zea mays subsp. mays; identical to SEQ ID NO: 55884
  misc_feature (1)..(273): Ceres Seq. ID no. 13599576
  misc_feature (173)..(269): Pfam Name: Rieske [2Fe-2S] domain Pfam Description: Rieske [2Fe-2S] domain
  misc_feature (1)..(273): Homolog of NCBI NO: 1717957 NR Description: Ubiquinol-cytochrome C reductase iron-sulfur
  misc_feature (1)..(273): Homolog of NCBI NO: 21553507 NR Description: ubiquinol--cytochrome-c reductase-like protein
  misc_feature (1)..(273): Homolog of NCBI NO: 18417067 NR Description: ubiquinol--cytochrome C reductase (cytochrome bc1 III (mitochondrial electron transport)/ Rieske iron-sulfur
  misc_feature (36)..(273): Homolog of NCBI NO: 1717949 NR Description: Ubiquinol-cytochrome C reductase iron-sulfur
  misc_feature (1)..(273): Homolog of NCBI NO: 1717951 NR Description: Ubiquinol-cytochrome C reductase iron-sulfur
  misc_feature (1)..(273): Homolog of NCBI NO: 1717953 NR Description: Ubiquinol-cytochrome C reductase iron-sulfur
  misc_feature (1)..(273): Homolog of NCBI NO: 586145 NR Description: Ubiquinol-cytochrome C reductase iron-sulfur
  misc_feature (1)..(273): Homolog of NCBI NO: 1717950 NR Description: Ubiquinol-cytochrome C reductase iron-sulfur
  misc_feature (1)..(273): Homolog of NCBI NO: 1076675 NR Description: ubiquinol-cytochrome-c reductase (EC 1.10.2.2)
  misc_feature (1)..(273): Homolog of NCBI NO: 38347166 NR Description: OSJNBa0039C07.12 [Oryza sativa (japonica

SEQ ID NO: 108972 - DNA, 2270 bp, Zea mays subsp. mays
  misc_feature (1)..(2270): Ceres Seq. ID no. 13624495
  misc_feature: MA Experiment ID: 108536 Result: Up-regulated in Transcription
  misc_feature: MA Experiment 108536 PARAMETER Experiment Name: Zm_Meristem_P Parameter: Age (day) Value: 8
  misc_feature: MA Experiment 108536 PARAMETER Experiment Name: Zm_Meristem_P Parameter: Organism Value: Zea mays
  misc_feature: MA Experiment 108536 PARAMETER Experiment Name: Zm_Meristem_P Parameter: Plant Line Value: 35A19
  misc_feature: MA Experiment 108536 PARAMETER Experiment Name: Zm_Meristem_P Parameter: Tissue Value: Shoot Meristem vs. Above Shoot Meristem
  misc_feature: MA Experiment ID: 108543 Result: Up-regulated in Transcription
  misc_feature: MA Experiment ID: 108544 Result: Up-regulated in Transcription
  misc_feature: MA Experiment ID: 20000479 Result: Down-regulated in Transcription
  misc_feature: MA Experiment 20000479 PARAMETER Experiment Name: Zm_Drought_P Parameter: Age (day) Value: 10
  misc_feature: MA Experiment 20000479 PARAMETER Experiment Name: Zm_Drought_P Parameter: Organism Value: Zea mays
  misc_feature: MA Experiment 20000479 PARAMETER Experiment Name: Zm_Drought_P Parameter: Plant Line Value: 35A19
  misc_feature: MA Experiment 20000479 PARAMETER Experiment Name: Zm_Drought_P Parameter: Timepoint (hr) Value: 48
  misc_feature: MA Experiment 20000479 PARAMETER Experiment Name: Zm_Drought_P Parameter: Tissue Value: Aerial
  misc_feature: MA Experiment 20000479 PARAMETER Experiment Name: Zm_Drought_P Parameter: Treatment Value: Drought vs. No Drought
  misc_feature: MA Experiment ID: 20000492 Result: Up-regulated in Transcription
  misc_feature: MA Experiment 20000492 PARAMETER Experiment Name: Zm_Hybrid_Seed_Dev_P Parameter: DAP Value: 12
  misc_feature: MA Experiment 20000492 PARAMETER Experiment Name: Zm_Hybrid_Seed_Dev_P Parameter: Organism Value: Zea mays
  misc_feature: MA Experiment 20000492 PARAMETER Experiment Name: Zm_Hybrid_Seed_Dev_P Parameter: Plant Line Value: 35A19
  misc_feature: MA Experiment 20000492 PARAMETER Experiment Name: Zm_Hybrid_Seed_Dev_P Parameter: Tissue Value: Fert Kernel vs. Unfert Floret
  misc_feature: MA Experiment ID: 20000535 Result: Up-regulated in Transcription
  misc_feature: MA Experiment 20000535 PARAMETER Experiment Name: Zm_Hybrid_Seed_Dev_P Parameter: DAP Value: 30 vs. 12
  misc_feature: MA Experiment 20000535 PARAMETER Experiment Name: Zm_Hybrid_Seed_Dev_P Parameter: Organism Value: Zea mays
  misc_feature: MA Experiment 20000535 PARAMETER Experiment Name: Zm_Hybrid_Seed_Dev_P Parameter: Plant Line Value: 35A19
  misc_feature: MA Experiment 20000535 PARAMETER Experiment Name: Zm_Hybrid_Seed_Dev_P Parameter: Tissue Value: Embryo vs. Unfert Floret
gctcactagtccccccccccccccccccccattccgcgcagttccgcgtgcgaggaacaggaaccgctgctgctctctgcctccgctccgatcctgcttgcgctcgagaaccgcgacgccgacgcccttccttgacgcgttgttgatctgcgagctcagatctgcatattagagaagatttttcgtatattctggtgaacatgaagagaaaggcgcagtcaggaaaatctcgctcatggtggtgggacaatcatattagtccacaaaattctaagtgtctctctaaaaatctagaagaaatggagaagcaggtgaaacaaatgttggggctcattggcgaaggagagttttctgcagaaaaagcggaggtgttctatgagaagcggcctttacttattactcatgtggagaacttctattgcatgtatcgtgctcttgctgcacgatatgacgatgtaactggacaactacgcaaaaacattccatcatctcttcaatcatatggctcggttggtgtctctgaatcagattctgagacacaatgtttcacatctccagagtttgatatgccacagcaaaagcaaaagcctggaccagatttccttgatttttccattggctctggtgttagctctgatgtatcaaagaagggtagtgaaaggtcttcatcatcttcagattctgattcagagcttgatgaggccaaagaggaaaatggtagtattttttatgccttgagccaaaaaaatattgagctagaagatgagcttcaagaagtaaggggaaaacttgatgctttagaggaaaaacatgctcattgccaaagagatttgagtaccaactcaaaagttactgaacatgattctgctttagagagctcaacaaaagtcaacagcgaaaaggaagcattggaagctgtgctgtttgagcggaaaaatgagattgaaatgctgaaaggtgcaatggcctcagctgctaagcagtttgaagttgaattggcacatcgtgatcttgaaattggtaagtgcaagcatgaacttggagtactctcggagaagtatttgcatgataagtctactctcgaggatgagcttagaaggctccatggaataatcaagaatatggaaggtgacttagaaaaaatttcacaggagagattgcagctcaggtctcggattaaagagctcgagcaggcagctcacagcttagactattcagcttccgagatagttgagctacaagaagtaataaggaatacacaagcagaattagaaaaggtcacaaaggagaaagaagtgctcaaagaacacgctaacgaatttgagcaacttttaaagggccttgaggtctcaggtacagaggttgcaaagctaccagaaactatcaagaacctggaagcccagctagaaagatccttcgaagagaaatcagtactccaagaccagatcaagcagctggagcaggttatgtctgaatcttcggagaaacattcacatgagcagttctctcttactgcggatcttttgaagttatctgaagtgaacgcttctcttgaaggcaaattgtccgatgtggcggcagagcttatccaagtttatgctgacaaggaagaagaatctctcgataatgagaagcaaatttctgtcctcagtaaagatattgctgatctcaggagaaagcttgaattgttgtcatctgagaaaaccacagttgatgatgagttggccaaactgctagctgatattatgattcgtgacgaaaagatgaagcaaatggatgaccacctaaatcagcttcagttagagcatgccaagctgatggcagaatttgacaatgcacacaggtccttgtcagagctgcatgcgcaggtttctgagctggaagacgaggtagagaagcagaagcttgtgatatccgagagtgcagagggaaagcgggaggccatcaggcagctgtgcttctccattgaacactaccgcagcgggtatcagcagctgaggcagctgctgcaaggccacaggaggccgttggtgatggcaacctgataaatgaacaaagtccgtttgccaacaaattgcgcagttgcttgtctctgggcgtgttctatttgtagctctgttctttcacaacttgtgccgtgtagtttatgttataaagaattctgtgtggtatgtgtgtagaatgtaatgggatgggatatttatgttgttccttcatactcctatgrstgtttttthcwcttgctgttggaactggaggggggaaaggat

SEQ ID NO: 108973 - protein, 614 aa, Zea mays subsp. mays
  misc_feature (1)..(614): Ceres Seq. ID no. 15218761
  misc_feature (27)..(581): Pfam Name: Myosin tail Pfam Description: Myosin tail
  misc_feature (3)..(433): Homolog of NCBI NO: 28416683 NR Description: At2g30500 [Arabidopsis thaliana]
  misc_feature (3)..(433): Homolog of NCBI NO: 15224515 NR Description: expressed protein [Arabidopsis thaliana]
  misc_feature (3)..(452): Homolog of NCBI NO: 30697043 NR Description: contains similarity to unknown protein
  misc_feature (3)..(520): Homolog of NCBI NO: 30697046 NR Description: contains similarity to unknown protein
  misc_feature (3)..(520): Homolog of NCBI NO: 8777333 NR Description: contains similarity to unknown
  misc_feature (9)..(423): Homolog of NCBI NO: 34896152 NR Description: P0701D05.31 [Oryza sativa (japonica
  misc_feature (156)..(613): Homolog of NCBI NO: 22002966 NR Description: putative CENP-E like kinetochore protein
  misc_feature (1)..(546): Homolog of NCBI NO: 34896156 NR Description: P0701D05.33 [Oryza sativa (japonica
  misc_feature (159)..(613): Homolog of NCBI NO: 34896156 NR Description: P0701D05.33 [Oryza sativa (japonica
  misc_feature (5)..(526): Homolog of NCBI NO: 22002966 NR Description: putative CENP-E like kinetochore protein
MKRKAQSGKSRSWWWDNHISPQNSKCLSKNLEEMEKQVKQMLGLIGEGEFSAEKAEVFYEKRPLLITHVENFYCMYRALAARYDDVTGQLRKNIPSSLQSYGSVGVSESDSETQCFTSPEFDMPQQKQKPGPDFLDFSIGSGVSSDVSKKGSERSSSSSDSDSELDEAKEENGSIFYALSQKNIELEDELQEVRGKLDALEEKHAHCQRDLSTNSKVTEHDSALESSTKVNSEKEALEAVLFERKNEIEMLKGAMASAAKQFEVELAHRDLEIGKCKHELGVLSEKYLHDKSTLEDELRRLHGIIKNMEGDLEKISQERLQLRSRIKELEQAAHSLDYSASEIVELQEVIRNTQAELEKVTKEKEVLKEHANEFEQLLKGLEVSGTEVAKLPETIKNLEAQLERSFEEKSVLQDQIKQLEQVMSESSEKHSHEQFSLTADLLKLSEVNASLEGKLSDVAAELIQVYADKEEESLDNEKQISVLSKDIADLRRKLELLSSEKTTVDDELAKLLADIMIRDEKMKQMDDHLNQLQLEHAKLMAEFDNAHRSLSELHAQVSELEDEVEKQKLVISESAEGKREAIRQLCFSIEHYRSGYQQLRQLLQGHRRPLVMAT

SEQ ID NO: 108974 - protein, 581 aa, Zea mays subsp. mays
  misc_feature (1)..(581): Ceres Seq. ID no. 15218762
  misc_feature (1)..(548): Pfam Name: Myosin tail Pfam Description: Myosin tail
  misc_feature (1)..(400): Homolog of NCBI NO: 28416683 NR Description: At2g30500 [Arabidopsis thaliana]
  misc_feature (1)..(400): Homolog of NCBI NO: 15224515 NR Description: expressed protein [Arabidopsis thaliana]
  misc_feature (1)..(419): Homolog of NCBI NO: 30697043 NR Description: contains similarity to unknown protein
  misc_feature (1)..(487): Homolog of NCBI NO: 30697046 NR Description: contains similarity to unknown protein
  misc_feature (1)..(487): Homolog of NCBI NO: 8777333 NR Description: contains similarity to unknown
  misc_feature (1)..(390): Homolog of NCBI NO: 34896152 NR Description: P0701D05.31 [Oryza sativa (japonica
  misc_feature (123)..(580): Homolog of NCBI NO: 22002966 NR Description: putative CENP-E like kinetochore protein
  misc_feature (1)..(513): Homolog of NCBI NO: 34896156 NR Description: P0701D05.33 [Oryza sativa (japonica
  misc_feature (126)..(580): Homolog of NCBI NO: 34896156 NR Description: P0701D05.33 [Oryza sativa (japonica
  misc_feature (1)..(493): Homolog of NCBI NO: 22002966 NR Description: putative CENP-E like kinetochore protein
MEKQVKQMLGLIGEGEFSAEKAEVFYEKRPLLITHVENFYCMYRALAARYDDVTGQLRKNIPSSLQSYGSVGVSESDSETQCFTSPEFDMPQQKQKPGPDFLDFSIGSGVSSDVSKKGSERSSSSSDSDSELDEAKEENGSIFYALSQKNIELEDELQEVRGKLDALEEKHAHCQRDLSTNSKVTEHDSALESSTKVNSEKEALEAVLFERKNEIEMLKGAMASAAKQFEVELAHRDLEIGKCKHELGVLSEKYLHDKSTLEDELRRLHGIIKNMEGDLEKISQERLQLRSRIKELEQAAHSLDYSASEIVELQEVIRNTQAELEKVTKEKEVLKEHANEFEQLLKGLEVSGTEVAKLPETIKNLEAQLERSFEEKSVLQDQIKQLEQVMSESSEKHSHEQFSLTADLLKLSEVNASLEGKLSDVAAELIQVYADKEEESLDNEKQISVLSKDIADLRRKLELLSSEKTTVDDELAKLLADIMIRDEKMKQMDDHLNQLQLEHAKLMAEFDNAHRSLSELHAQVSELEDEVEKQKLVISESAEGKREAIRQLCFSIEHYRSGYQQLRQLLQGHRRPLVMAT

SEQ ID NO: 108975 - protein, 574 aa, Zea mays subsp. mays
  misc_feature (1)..(574): Ceres Seq. ID no. 15218763
  misc_feature (1)..(541): Pfam Name: Myosin tail Pfam Description: Myosin tail
  misc_feature (1)..(393): Homolog of NCBI NO: 28416683 NR Description: At2g30500 [Arabidopsis thaliana]
  misc_feature (1)..(393): Homolog of NCBI NO: 15224515 NR Description: expressed protein [Arabidopsis thaliana]
  misc_feature (1)..(412): Homolog of NCBI NO: 30697043 NR Description: contains similarity to unknown protein
  misc_feature (1)..(480): Homolog of NCBI NO: 30697046 NR Description: contains similarity to unknown protein
  misc_feature (1)..(480): Homolog of NCBI NO: 8777333 NR Description: contains similarity to unknown
  misc_feature (1)..(383): Homolog of NCBI NO: 34896152 NR Description: P0701D05.31 [Oryza sativa (japonica
  misc_feature (116)..(573): Homolog of NCBI NO: 22002966 NR Description: putative CENP-E like kinetochore protein
  misc_feature (1)..(506): Homolog of NCBI NO: 34896156 NR Description: P0701D05.33 [Oryza sativa (japonica
  misc_feature (119)..(573): Homolog of NCBI NO: 34896156 NR Description: P0701D05.33 [Oryza sativa (japonica
  misc_feature (1)..(486): Homolog of NCBI NO: 22002966 NR Description: putative CENP-E like kinetochore protein
MLGLIGEGEFSAEKAEVFYEKRPLLITHVENFYCMYRALAARYDDVTGQLRKNIPSSLQSYGSVGVSESDSETQCFTSPEFDMPQQKQKPGPDFLDFSIGSGVSSDVSKKGSERSSSSSDSDSELDEAKEENGSIFYALSQKNIELEDELQEVRGKLDALEEKHAHCQRDLSTNSKVTEHDSALESSTKVNSEKEALEAVLFERKNEIEMLKGAMASAAKQFEVELAHRDLEIGKCKHELGVLSEKYLHDKSTLEDELRRLHGIIKNMEGDLEKISQERLQLRSRIKELEQAAHSLDYSASEIVELQEVIRNTQAELEKVTKEKEVLKEHANEFEQLLKGLEVSGTEVAKLPETIKNLEAQLERSFEEKSVLQDQIKQLEQVMSESSEKHSHEQFSLTADLLKLSEVNASLEGKLSDVAAELIQVYADKEEESLDNEKQISVLSKDIADLRRKLELLSSEKTTVDDELAKLLADIMIRDEKMKQMDDHLNQLQLEHAKLMAEFDNAHRSLSELHAQVSELEDEVEKQKLVISESAEGKREAIRQLCFSIEHYRSGYQQLRQLLQGHRRPLVMAT

SEQ ID NO: 108976 - DNA, 1581 bp, Zea mays subsp. mays
  misc_feature (1)..(1581): Ceres Seq. ID no. 15224454
tagtcccccccccccccaaaaaatggagaaatgcttggtgtatcgcatctaagaaacagaagacttttgtccaatgggtttgtttcattagggaaggaggatcttcagctcatgtatagtgatggtgataaggcttttggtacatccactgatctttgcattgatgagagactaagaatcgcatctgatggcattatttttgtcagcatggagatctttcgacctcagaaggaacatggtttagcgtagactgggttgaaaggaaaatttaagattactacaagatgtctatggcttgataatggaagattgttggacgcactctacaaagcagctcatgctgcattgtcaagttgtcctgtgaattgtccacttagtcacatggagaggatggtagctgaaatcttgaggaaaatggtacggaagtatagtgggaagaggcctgacgtcattgcggttgctatggagaacaccacagcaagtttctcagaacacctcgatgctaaatcatctggaaattttgaaccttcctcagctactagccatctgagcaggagtccagctatgagtcttgaaggcagttataaaacacacccagacaacccagaggtggatgctgaagaaacccttcctgaggccacgagaacagcaccggatgatgcaactacaagttccaatggtgaagcattcttctcttcagatttacatcagcctaaaacattggagcacttatgggagtcattcaaatctcctacagttgttaaaattgcacggattgtcaatggggggaagaagcacaatctcggcaagattggcataatgggtaaggactcagcaatccagtcagctcccgctccagctaaatcttcaaaaaagaacaagtggaaacctgaggaaatcaagagcttaatacagatgcgtggcgagatgaatgggagatttcagagcgtgaaaggaagaatggtcctgtgggaggagattttcgacaacatgttgaagcaaggaataagtcgtactctggcacagtgcaaatcgctttggacatcgttagttcagaaatacgaggttagggacaaattctgtttcttccgagttctaaaaaaccaccaccggaaagcaagtacagaagaatgttttgctccatctgtagaacgaagcaagatagcttcagattgcggttgcaatgtctgacagcggtaatttctctgtcgttggcaggaaagcaagaaggacgtggagagcatgaagacgtggccatatttctcggccatggataggatcctatcgcagcaaggggaaagctgggaatgctttcaaactacagatgaacaggatatgaaggcagccttgttccaaaagcagtcttttggtgatgtacatggagcttttgcatagagtagtttatgtggcagttattcaataattttcatctggtggatgtatagggttcgtatagcaacatttccttgtagaaagttgaagttgtatatcgagggtggatttacctgtgtttatcttttcgaccccaagcctctggaagctgtgaaccatagcctcataaaatatgcctgttgttgattc

SEQ ID NO: 108977 - protein, 269 aa, Zea mays subsp. mays
  misc_feature (1)..(269): Ceres Seq. ID no. 15224455
  misc_feature (168)..(224): Pfam Name: Myb-like DNA-binding domain Pfam Description: Myb-like DNA-binding domain
  misc_feature (155)..(269): Homolog of NCBI NO: 15242756 NR Description: expressed protein [Arabidopsis thaliana]
  misc_feature (1)..(98): Homolog of NCBI NO: 15242756 NR Description: expressed protein [Arabidopsis thaliana]
  misc_feature (73)..(228): Homolog of NCBI NO: 15242756 NR Description: expressed protein [Arabidopsis thaliana]
  misc_feature (155)..(269): Homolog of NCBI NO: 28393617 NR Description: unknown protein [Arabidopsis thaliana]
  misc_feature (1)..(98): Homolog of NCBI NO: 28393617 NR Description: unknown protein [Arabidopsis thaliana]
MERMVAEILRKMVRKYSGKRPDVIAVAMENTTASFSEHLDAKSSGNFEPSSATSHLSRSPAMSLEGSYKTHPDNPEVDAEETLPEATRTAPDDATTSSNGEAFFSSDLHQPKTLEHLWESFKSPTVVKIARIVNGGKKHNLGKIGIMGKDSAIQSAPAPAKSSKKNKWKPEEIKSLIQMRGEMNGRFQSVKGRMVLWEEIFDNMLKQGISRTLAQCKSLWTSLVQKYEVRDKFCFFRVLKNHHRKASTEECFAPSVERSKIASDCGCNV

SEQ ID NO: 108978 - protein, 266 aa, Zea mays subsp. mays
  misc_feature (1)..(266): Ceres Seq. ID no. 15224456
  misc_feature (165)..(221): Pfam Name: Myb-like DNA-binding domain Pfam Description: Myb-like DNA-binding domain
  misc_feature (152)..(266): Homolog of NCBI NO: 15242756 NR Description: expressed protein [Arabidopsis thaliana]
  misc_feature (1)..(95): Homolog of NCBI NO: 15242756 NR Description: expressed protein [Arabidopsis thaliana]
  misc_feature (70)..(225): Homolog of NCBI NO: 15242756 NR Description: expressed protein [Arabidopsis thaliana]
  misc_feature (152)..(266): Homolog of NCBI NO: 28393617 NR Description: unknown protein [Arabidopsis thaliana]
  misc_feature (1)..(95): Homolog of NCBI NO: 28393617 NR Description: unknown protein [Arabidopsis thaliana]
MVAEILRKMVRKYSGKRPDVIAVAMENTTASFSEHLDAKSSGNFEPSSATSHLSRSPAMSLEGSYKTHPDNPEVDAEETLPEATRTAPDDATTSSNGEAFFSSDLHQPKTLEHLWESFKSPTVVKIARIVNGGKKHNLGKIGIMGKDSAIQSAPAPAKSSKKNKWKPEEIKSLIQMRGEMNGRFQSVKGRMVLWEEIFDNMLKQGISRTLAQCKSLWTSLVQKYEVRDKFCFFRVLKNHHRKASTEECFAPSVERSKIASDCGCNV

SEQ ID NO: 108979 - protein, 258 aa, Zea mays subsp. mays
  misc_feature (1)..(258): Ceres Seq. ID no. 15224457
  misc_feature (157)..(213): Pfam Name: Myb-like DNA-binding domain Pfam Description: Myb-like DNA-binding domain
  misc_feature (144)..(258): Homolog of NCBI NO: 15242756 NR Description: expressed protein [Arabidopsis thaliana]
  misc_feature (1)..(87): Homolog of NCBI NO: 15242756 NR Description: expressed protein [Arabidopsis thaliana]
  misc_feature (62)..(217): Homolog of NCBI NO: 15242756 NR Description: expressed protein [Arabidopsis thaliana]
  misc_feature (144)..(258): Homolog of NCBI NO: 28393617 NR Description: unknown protein [Arabidopsis thaliana]
  misc_feature (1)..(87): Homolog of NCBI NO: 28393617 NR Description: unknown protein [Arabidopsis thaliana]
MVRKYSGKRPDVIAVAMENTTASFSEHLDAKSSGNFEPSSATSHLSRSPAMSLEGSYKTHPDNPEVDAEETLPEATRTAPDDATTSSNGEAFFSSDLHQPKTLEHLWESFKSPTVVKIARIVNGGKKHNLGKIGIMGKDSAIQSAPAPAKSSKKNKWKPEEIKSLIQMRGEMNGRFQSVKGRMVLWEEIFDNMLKQGISRTLAQCKSLWTSLVQKYEVRDKFCFFRVLKNHHRKASTEECFAPSVERSKIASDCGCNV

SEQ ID NO: 108980 - DNA, 706 bp, Zea mays subsp. mays
  misc_feature (1)..(706): Ceres Seq. ID no. 13623650
aacaagcccctttccaggtcactgctgaccttgttcatatcgatttctttgttttgtagtcagttttgctgtgcagagttactctttcagtttgcctaatttaaaaggaaaaaaaactttacatgcaagaaataatggatgctgttaacaatagtggaaaatttgacacgaagtttggaggctttactggtactgacggtccattggggaagataatggagaattcaaaaactcgggctgagatcggttgggaaccaaagtatccaagcttcaccgaattccttggtatcagcagttaacatccttgcatagtgttcagttagtctgactcagctgagttgcaaccgtgattagattgtacatcgttaggggatggtacacagattcagttctgggaagataaatgggttggggtctgtcctttgaaagaccaatttccagatctgtacaacattgtgagaaagaaaaaggcaacagtagctaatgttcttcaacataatcaacttaatgtggcttttcgtcggtcacttaatgtaaataatctagctgctttgaataaggtagtagctagagtatttactattagtctatttgatcgaagagacacgtttgtttgggatcttctcccgcaaggtcagtttacggtcagctctatgtatagggctttagtcgccccgaacattgtttcgagaaaccaccccatctg

SEQ ID NO: 108981 - protein, 58 aa, Zea mays subsp. mays
  misc_feature (1)..(58): Ceres Seq. ID no. 13623651
  misc_feature (1)..(58): Homolog of NCBI NO: 17473602 NR Description: unknown protein [Arabidopsis thaliana]
  misc_feature (1)..(58): Homolog of NCBI NO: 15225016 NR Description: expressed protein [Arabidopsis thaliana]
  misc_feature (1)..(58): Homolog of NCBI NO: 34914690 NR Description: P0560B06.4 [Oryza sativa (japonica
MQEIMDAVNNSGKFDTKFGGFTGTDGPLGKIMENSKTRAEIGWEPKYPSFTEFLGISS

SEQ ID NO: 108982 - protein, 54 aa, Zea mays subsp. mays
  misc_feature (1)..(54): Ceres Seq. ID no. 13623652
  misc_feature (1)..(54): Homolog of NCBI NO: 17473602 NR Description: unknown protein [Arabidopsis thaliana]
  misc_feature (1)..(54): Homolog of NCBI NO: 15225016 NR Description: expressed protein [Arabidopsis thaliana]
  misc_feature (1)..(54): Homolog of NCBI NO: 34914690 NR Description: P0560B06.4 [Oryza sativa (japonica
MDAVNNSGKFDTKFGGFTGTDGPLGKIMENSKTRAEIGWEPKYPSFTEFLGISS

SEQ ID NO: 108983 - protein, 32 aa, Zea mays subsp. mays
  misc_feature (1)..(32): Ceres Seq. ID no. 13623653
NKPLSRSLLTLFISISLFCSQFCCAELLFQFA

SEQ ID NO: 108984 - DNA, 1864 bp, Zea mays subsp. mays; identical to SEQ ID NO: 20619
  misc_feature (1)..(1864): Ceres Seq. ID no. 14302150
  misc_feature: MA Experiment ID: 108522 Result: Down-regulated in Transcription
  misc_feature: MA Experiment 108522 PARAMETER Experiment Name: Zm_42deg_Heat_P Parameter: Age (day) Value: 8
  misc_feature: MA Experiment 108522 PARAMETER Experiment Name: Zm_42deg_Heat_P Parameter: Organism Value: Zea mays
  misc_feature: MA Experiment 108522 PARAMETER Experiment Name: Zm_42deg_Heat_P Parameter: Plant Line Value: 35A19
  misc_feature: MA Experiment 108522 PARAMETER Experiment Name: Zm_42deg_Heat_P Parameter: Temperature (deg C) Value: 42 vs. 22
  misc_feature: MA Experiment 108522 PARAMETER Experiment Name: Zm_42deg_Heat_P Parameter: Timepoint (hr) Value: 1
  misc_feature: MA Experiment 108522 PARAMETER Experiment Name: Zm_42deg_Heat_P Parameter: Tissue Value: Aerial
  misc_feature: MA Experiment ID: 108535 Result: Down-regulated in Transcription
  misc_feature: MA Experiment 108535 PARAMETER Experiment Name: Zm_Meristem_P Parameter: Age (day) Value: 8
  misc_feature: MA Experiment 108535 PARAMETER Experiment Name: Zm_Meristem_P Parameter: Organism Value: Zea mays
  misc_feature: MA Experiment 108535 PARAMETER Experiment Name: Zm_Meristem_P Parameter: Plant Line Value: 35A19
  misc_feature: MA Experiment 108535 PARAMETER Experiment Name: Zm_Meristem_P Parameter: Tissue Value: Root Meristem vs. Above Root Meristem
  misc_feature: MA Experiment ID: 20000535 Result: Down-regulated in Transcription
  misc_feature: MA Experiment 20000535 PARAMETER Experiment Name: Zm_Hybrid_Seed_Dev_P Parameter: DAP Value: 30 vs. 12
  misc_feature: MA Experiment 20000535 PARAMETER Experiment Name: Zm_Hybrid_Seed_Dev_P Parameter: Organism Value: Zea mays
  misc_feature: MA Experiment 20000535 PARAMETER Experiment Name: Zm_Hybrid_Seed_Dev_P Parameter: Plant Line Value: 35A19
  misc_feature: MA Experiment 20000535 PARAMETER Experiment Name: Zm_Hybrid_Seed_Dev_P Parameter: Tissue Value: Embryo vs. Unfert Floret

SEQ ID NO: 108985 - protein, 95 aa, Zea mays subsp. mays; identical to SEQ ID NO: 20620
  misc_feature (1)..(95): Ceres Seq. ID no. 14302151

SEQ ID NO: 108986 - protein, 93 aa, Zea mays subsp. mays; identical to SEQ ID NO: 20621
  misc_feature (1)..(93): Ceres Seq. ID no. 14302152

SEQ ID NO: 108987 - protein, 87 aa, Zea mays subsp. mays; identical to SEQ ID NO: 20622
  misc_feature (1)..(87): Ceres Seq. ID no. 14302153

SEQ ID NO: 108988 - DNA, 2297 bp, Zea mays subsp. mays
  misc_feature (1)..(2297): Ceres Seq. ID no. 13600419
gsaccttcggcttttgctccgacgccggcgagmgagaccgagagacgaggcgagccaccgcggcggcggttgcagcgatggggtccatgacgatcggtgccaagtacaagaccacgatcaaggaccccggcaccccgggcatcctccgcatgaacggtgataggttcaccttcacccctaatgatccacgatcggcaatgaagttcaatgttgatttccgaaccatcaaaggtcacaagttcaataaagtagagggtaacaaagcagcattattgaacctttcaaaagaagacaaggctggaggctacatatttgagtttgacaatgttggtaaccgtgaccaatgtcgagactttgtagctagggttttaggcaaacatcaagggatagtgcctcctagaccaactgtggctcctgaaaactcagttgcttccgctgctctggaacaactcagtgccgcagaagtggagagacgggttaaactgttgcgagaagacagcgaattgcagaaactacataagaagtttgttcttggaaatattctgcaagaatctgaattttgggcaacaagaaagaatttacttgatgatgaagcaaataagagatcaaaacaaaagccaggtttcaagagtgcacttgtagatattaggccaacaactgatggtcggacaaacaaggttactttccagatcacacctgagatgatacatcagatttttgcagaaaagcctgctgtccgtagagcatatttagattttgttccaaaaaagatgtcagaaacccgattttgggaaaaatactgtagagctgagtatctagtcaggacaaaaaacactgcagcagcaacagctgaggcagctggaaatgaggaattagctatcttcctgaagaatgatgatatactggccaaggaggcaaagttgaagataaaacgagtcgatccaacattagacatggaggcagacactggagatgattacattcatcttccggaccatgggattcaccgtgatggtagcaaagagacagtcgatgctgacagtgagttggcgaggaggacgctgtctcaggacctgaaccgtcatgcagctgttgttcttgaagggagatctcttgatgtcgagtcatctgatccaaagactttagctgaagcccttgcaagatccaagaaagaaccaccttctacttctaatgttgatgatgataatcatgagagactaatgaaggtggctagaatgacagagatagaggatctgcaagctccacgaagtcttctgtatgcaccactttgtataaaggatcctagagaatattttgattcccaacaagcaaatgctctgagatctctaggtggcagcaatggtggaagaaaagcccatagttgcagcttgagcactgaagaagtgttccatcatttaatggatcaaatgtcttctgttaaagttaataggcttaactgtccgattgttcagtctgatatggctcttaaggttcttaatgaattaaacgaagggatttctcgttcaaggagacttaacctcaagaatcctcaagaaggtctccttggtcagctgcctcaacatacacgggacgagcttatggatcattggacggctatccaggaattgctacgccatttttggtcatcgtatccaataacaagtgcagtactttataacaaggttcaaagagttaaagaagctatgacacagatatatcaaaagctgcagcttataaaggaattggcacagcctgatgtaagacatgaaatatctcggctagtaaagcccatgactcaggccttggatgccgccttcaaccatgatttggaacagcagcagaaatcgtccaaggccggaaacaggcacaacgggttttgagcctaggagattggtttgaccaacacatgaagcgagacggacggacgggctgtgcccgaatacacaagagctgctgcagaattcttgaggcttgtacgattttgttctttttcccctcgcttattaatagctgccggaggagcctgctgtttgcagccccggaatcttgatctatgcatcaattgtttgtaactgactgaatagtgaagactcgcaacgcatgatgctgccgacgcgttgtacttgtacatggcagtaatggctattcgagatagaaccaaagctttaccattttgttttatgcggtttttttcatggccgccgggcagaattatacacatgtatgtcatctacagcgttacaaacataccattatacaaaaaaaaaaaaaaaaaaaactcgaggggggggcccggt

SEQ ID NO: 108989 - protein, 625 aa, Zea mays subsp. mays
  misc_feature (1)..(625): Ceres Seq. ID no. 15218664
  misc_feature (224)..(270): Pfam Name: BSD domain Pfam Description: BSD domain
  misc_feature (154)..(602): Homolog of NCBI NO: 19922250 NR Description: CG8151-PB [Drosophila melanogaster]
  misc_feature (400)..(432): Homolog of NCBI NO: 8778495 NR Description: F20N2.15 [Arabidopsis thaliana]
  misc_feature (34)..(76): Homolog of NCBI NO: 8778495 NR Description: F20N2.15 [Arabidopsis thaliana]
  misc_feature (256)..(390): Homolog of NCBI NO: 8778495 NR Description: F20N2.15 [Arabidopsis thaliana]
  misc_feature (86)..(222): Homolog of NCBI NO: 8778495 NR Description: F20N2.15 [Arabidopsis thaliana]
  misc_feature (418)..(625): Homolog of NCBI NO: 8778495 NR Description: F20N2.15 [Arabidopsis thaliana]
  misc_feature (57)..(617): Homolog of NCBI NO: 15233107 NR Description: hypothetical protein [Arabidopsis thaliana]
  misc_feature (561)..(625): Homolog of NCBI NO: 30696007 NR Description: expressed protein [Arabidopsis thaliana]
  misc_feature (34)..(548): Homolog of NCBI NO: 30696007 NR Description: expressed protein [Arabidopsis thaliana]
  misc_feature (26)..(625): Homolog of NCBI NO: 38636938 NR Description: unknown protein [Oryza sativa (japonica
TFGFCSDAGEXDRETRRATAAAVAAMGSMTIGAKYKTTIKDPGTPGILRMNGDRFTFTPNDPRSAMKFNVDFRTIKGHKFNKVEGNKAALLNLSKEDKAGGYIFEFDNVGNRDQCRDFVARVLGKHQGIVPPRPTVAPENSVASAALEQLSAAEVERRVKLLREDSELQKLHKKFVLGNILQESEFWATRKNLLDDEANKRSKQKPGFKSALVDIRPTTDGRTNKVTFQITPEMIHQIFAEKPAVRRAYLDFVPKKMSETRFWEKYCRAEYLVRTKNTAAATAEAAGNEELAIFLKNDDILAKEAKLKIKRVDPTLDMEADTGDDYIHLPDHGIHRDGSKETVDADSELARRTLSQDLNRHAAVVLEGRSLDVESSDPKTLAEALARSKKEPPSTSNVDDDNHERLMKVARMTEIEDLQAPRSLLYAPLCIKDPREYFDSQQANALRSLGGSNGGRKAHSCSLSTEEVFHHLMDQMSSVKVNRLNCPIVQSDMALKVLNELNEGISRSRRLNLKNPQEGLLGQLPQHTRDELMDHWTAIQELLRHFWSSYPITSAVLYNKVQRVKEAMTQIYQKLQLIKELAQPDVRHEISRLVKPMTQALDAAFNHDLEQQQKSSKAGNRHNGF

SEQ ID NO: 108990 - protein, 600 aa, Zea mays subsp. mays
  misc_feature (1)..(600): Ceres Seq. ID no. 15218665
  misc_feature (199)..(245): Pfam Name: BSD domain Pfam Description: BSD domain
  misc_feature (129)..(577): Homolog of NCBI NO: 19922250 NR Description: CG8151-PB [Drosophila melanogaster]
  misc_feature (375)..(407): Homolog of NCBI NO: 8778495 NR Description: F20N2.15 [Arabidopsis thaliana]
  misc_feature (9)..(51): Homolog of NCBI NO: 8778495 NR Description: F20N2.15 [Arabidopsis thaliana]
  misc_feature (231)..(365): Homolog of NCBI NO: 8778495 NR Description: F20N2.15 [Arabidopsis thaliana]
  misc_feature (61)..(197): Homolog of NCBI NO: 8778495 NR Description: F20N2.15 [Arabidopsis thaliana]
  misc_feature (393)..(600): Homolog of NCBI NO: 8778495 NR Description: F20N2.15 [Arabidopsis thaliana]
  misc_feature (32)..(592): Homolog of NCBI NO: 15233107 NR Description: hypothetical protein [Arabidopsis thaliana]
  misc_feature (536)..(600): Homolog of NCBI NO: 30696007 NR Description: expressed protein [Arabidopsis thaliana]
  misc_feature (9)..(523): Homolog of NCBI NO: 30696007 NR Description: expressed protein [Arabidopsis thaliana]
  misc_feature (1)..(600): Homolog of NCBI NO: 38636938 NR Description: unknown protein [Oryza sativa (japonica
MGSMTIGAKYKTTIKDPGTPGILRMNGDRFTFTPNDPRSAMKFNVDFRTIKGHKFNKVEGNKAALLNLSKEDKAGGYIFEFDNVGNRDQCRDFVARVLGKHQGIVPPRPTVAPENSVASAALEQLSAAEVERRVKLLREDSELQKLHKKFVLGNILQESEFWATRKNLLDDEANKRSKQKPGFKSALVDIRPTTDGRTNKVTFQITPEMIHQIFAEKPAVRRAYLDFVPKKMSETRFWEKYCRAEYLVRTKNTAAATAEAAGNEELAIFLKNDDILAKEAKLKIKRVDPTLDMEADTGDDYIHLPDHGIHRDGSKETVDADSELARRTLSQDLNRHAAVVLEGRSLDVESSDPKTLAEALARSKKEPPSTSNVDDDNHERLMKVARMTEIEDLQAPRSLLYAPLCIKDPREYFDSQQANALRSLGGSNGGRKAHSCSLSTEEVFHHLMDQMSSVKVNRLNCPIVQSDMALKVLNELNEGISRSRRLNLKNPQEGLLGQLPQHTRDELMDHWTAIQELLRHFWSSYPITSAVLYNKVQRVKEAMTQIYQKLQLIKELAQPDVRHEISRLVKPMTQALDAAFNHDLEQQQKSSKAGNRHNGF

SEQ ID NO: 108991 - protein, 597 aa, Zea mays subsp. mays
  misc_feature (1)..(597): Ceres Seq. ID no. 15218666
  misc_feature (196)..(242): Pfam Name: BSD domain Pfam Description: BSD domain
  misc_feature (126)..(574): Homolog of NCBI NO: 19922250 NR Description: CG8151-PB [Drosophila melanogaster]
  misc_feature (372)..(404): Homolog of NCBI NO: 8778495 NR Description: F20N2.15 [Arabidopsis thaliana]
  misc_feature (6)..(48): Homolog of NCBI NO: 8778495 NR Description: F20N2.15 [Arabidopsis thaliana]
  misc_feature (228)..(362): Homolog of NCBI NO: 8778495 NR Description: F20N2.15 [Arabidopsis thaliana]
  misc_feature (58)..(194): Homolog of NCBI NO: 8778495 NR Description: F20N2.15 [Arabidopsis thaliana]
  misc_feature (390)..(597): Homolog of NCBI NO: 8778495 NR Description: F20N2.15 [Arabidopsis thaliana]
  misc_feature (29)..(589): Homolog of NCBI NO: 15233107 NR Description: hypothetical protein [Arabidopsis thaliana]
  misc_feature (533)..(597): Homolog of NCBI NO: 30696007 NR Description: expressed protein [Arabidopsis thaliana]
  misc_feature (6)..(520): Homolog of NCBI NO: 30696007 NR Description: expressed protein [Arabidopsis thaliana]
  misc_feature (1)..(597): Homolog of NCBI NO: 38636938 NR Description: unknown protein [Oryza sativa (japonica
MTIGAKYKTTIKDPGTPGILRMNGDRFTFTPNDPRSAMKFNVDFRTIKGHKFNKVEGNKAALLNLSKEDKAGGYIFEFDNVGNRDQCRDFVARVLGKHQGIVPPRPTVAPENSVASAALEQLSAAEVERRVKLLREDSELQKLHKKFVLGNILQESEFWATRKNLLDDEANKRSKQKPGFKSALVDIRPTTDGRTNKVTFQITPEMIHQIFAEKPAVRRAYLDFVPKKMSETRFWEKYCRAEYLVRTKNTAAATAEAAGNEELAIFLKNDDILAKEAKLKIKRVDPTLDMEADTGDDYIHLPDHGIHRDGSKETVDADSELARRTLSQDLNRHAAVVLEGRSLDVESSDPKTLAEALARSKKEPPSTSNVDDDNHERLMKVARMTEIEDLQAPRSLLYAPLCIKDPREYFDSQQANALRSLGGSNGGRKAHSCSLSTEEVFHHLMDQMSSVKVNRLNCPIVQSDMALKVLNELNEGISRSRRLNLKNPQEGLLGQLPQHTRDELMDHWTAIQELLRHFWSSYPITSAVLYNKVQRVKEAMTQIYQKLQLIKELAQPDVRHEISRLVKPMTQALDAAFNHDLEQQQKSSKAGNRHNGF

SEQ ID NO: 108992 - DNA, 1970 bp, Zea mays subsp. mays
  misc_feature (1)..(1970): Ceres Seq. ID no. 13599971
  misc_feature: MA Experiment ID: 108522 Result: Up-regulated in Transcription
  misc_feature: MA Experiment 108522 PARAMETER Experiment Name: Zm_42deg_Heat_P Parameter: Age (day) Value: 8
  misc_feature: MA Experiment 108522 PARAMETER Experiment Name: Zm_42deg_Heat_P Parameter: Organism Value: Zea mays
  misc_feature: MA Experiment 108522 PARAMETER Experiment Name: Zm_42deg_Heat_P Parameter: Plant Line Value: 35A19
  misc_feature: MA Experiment 108522 PARAMETER Experiment Name: Zm_42deg_Heat_P Parameter: Temperature (deg C) Value: 42 vs. 22
  misc_feature: MA Experiment 108522 PARAMETER Experiment Name: Zm_42deg_Heat_P Parameter: Timepoint (hr) Value: 1
  misc_feature: MA Experiment 108522 PARAMETER Experiment Name: Zm_42deg_Heat_P Parameter: Tissue Value: Aerial
  misc_feature: MA Experiment ID: 108543 Result: Up-regulated in Transcription
aaacaggtgtgcctcgctcagactgcaagctacgtcggctagccgtccgaaatcaacatgtgcagcgcttccctgaagaaaccatggacatgccagaggtgttgaggtcacttagcattacagattataatattgcggttatggccccaattgatagcttcagggtttgccgtgtgctgcatatagaaaacaactacgtacccatcaacctaaagcatctagggaagctgttgcatctcaagttcctacagatatctggcacgactattgatgagctccctagagaaattgggcatctgaggtctcttcagacactgatattagccgatactggactagacgagctgccaccggctgtttgctcacttacacggttgatgtgcctgatagccctggagttcgaaaggttaccagctgacaggatggggaacctaacgtccctggaggagctacgactacatagggtagttggccggagtgccacccaagccctagtggcagagcttggcaagctgacgaggttgagggtggtcagcatcgccttttcagagcagctagaggagagcttgcaagaagcattcgtgcaatctctgtccaatctgcggggactccaggaactagcgcttttgtttaaaatgccacagcgggtaagcgatatgtggggagactgggagccaccaaggcagctccggcgcctgattattaaaggcatcgacttctcacggcagcctcgatggatcagccgctcctgcctgccacgcctctgctccttatctctggtggtgtacgctcttgaagcacaggacctagataatctagcgaggttgccagagctccagtacctcacgctagatggtctcagctggcctccaaggtatactgttggcccagacgacttcaggaatctgaggttctgcgatgtgagcacaacgttcgagtttcgtaagggcgccatgccaaggcttgaagtgctgcactttggagtttatgcagggtactggagttgggaaaagaatggtgtgccgttcgagcagttcccaacgaaggatgtgatcgaagatcttgacttggacctggataacgtccttttacttcagcaagtgatggtcaaagtcgactgctcaggtgctactgccgcacaagtggaggaggtggaggccgtggtcatgcgtgccgtggaaaatcatgccaaccgtccaaccatagtaatggatcgagtatatgaacaaaatatcctatccgacgaagagcgggaggctctgctttggcgacacattgaagaggattgctgcgtgcgcacgatgaaggataaatctgatgctttcttcatcagccagctgtggttatatcgacatcttcaggaagccattattttcatcgactgttcgggtgccagcatgtgtgaggtgcagaaagtggaagcagcttatagacatgcagccgaggttcatcctaaccatccaagtattgaacttatcagaacaaacaccgacggaatggcctcctcctcatctgaccatcccaacacagagcccaggaattgatgactcggtttgtcagatccttccaacccagcagcaggtaaatgtgagttgcttaagtaccaagagagaggtcctgttcagcaagatgattagaagcattggcatggcttgttaattagattcgcggttcttagtctaaaatcacattgaagagggagacggacccaagtgatgcagttcatctgttatctgtatcagtctctatttttataagctgtcatatattttctcgaaactatcttgtgttgattttgtgtgatgtgtacttttaatggcacgggccatgtattttccttggaaacgaccatgtggacttaatttttcccccattttctttcctgagatgggctgtgtatttgcttgaaagataaggatggtattatctttgtattgaactctaaatgcttaaatgaaggatcatccgga

SEQ ID NO: 108993 - protein, 513 aa, Zea mays subsp. mays
  misc_feature (1)..(513): Ceres Seq. ID no. 13599972
  misc_feature (10)..(330): Homolog of NCBI NO: 34394780 NR Description: putative CC-NBS-LRR resistance protein MLA13
  misc_feature (5)..(404): Homolog of NCBI NO: 33943718 NR Description: MLA7 [Hordeum vulgare]
  misc_feature (453)..(489): Homolog of NCBI NO: 27464234 NR Description: CC-NBS-LRR resistance protein MLA13 [Hordeum
  misc_feature (5)..(404): Homolog of NCBI NO: 27464234 NR Description: CC-NBS-LRR resistance protein MLA13 [Hordeum
  misc_feature (41)..(400): Homolog of NCBI NO: 34394780 NR Description: putative CC-NBS-LRR resistance protein MLA13
  misc_feature (461)..(493): Homolog of NCBI NO: 40253763 NR Description: putative RGH1A [Oryza sativa (japonica
  misc_feature (9)..(413): Homolog of NCBI NO: 40253763 NR Description: putative RGH1A [Oryza sativa (japonica
  misc_feature (10)..(330): Homolog of NCBI NO: 34904708 NR Description: P0446G09.19 [Oryza sativa (japonica
  misc_feature (3)..(499): Homolog of NCBI NO: 40253772 NR Description: putative RGH1A [Oryza sativa (japonica
  misc_feature (452)..(495): Homolog of NCBI NO: 34394780 NR Description: putative CC-NBS-LRR resistance protein MLA13
TGVPRSDCKLRRLAVRNQHVQRFPEETMDMPEVLRSLSITDYNIAVMAPIDSFRVCRVLHIENNYVPINLKHLGKLLHLKFLQISGTTIDELPREIGHLRSLQTLILADTGLDELPPAVCSLTRLMCLIALEFERLPADRMGNLTSLEELRLHRVVGRSATQALVAELGKLTRLRVVSIAFSEQLEESLQEAFVQSLSNLRGLQELALLFKMPQRVSDMWGDWEPPRQLRRLIIKGIDFSRQPRWISRSCLPRLCSLSLVVYALEAQDLDNLARLPELQYLTLDGLSWPPRYTVGPDDFRNLRFCDVSTTFEFRKGAMPRLEVLHFGVYAGYWSWEKNGVPFEQFPTKDVIEDLDLDLDNVLLLQQVMVKVDCSGATAAQVEEVEAVVMRAVENHANRPTIVMDRVYEQNILSDEEREALLWRHIEEDCCVRTMKDKSDAFFISQLWLYRHLQEAIIFIDCSGASMCEVQKVEAAYRHAAEVHPNHPSIELIRTNTDGMASSSSDHPNTEPRN

SEQ ID NO: 108994 - protein, 486 aa, Zea mays subsp. mays
  misc_feature (1)..(486): Ceres Seq. ID no. 13599973
  misc_feature (1)..(377): Homolog of NCBI NO: 33943718 NR Description: MLA7 [Hordeum vulgare]
  misc_feature (426)..(462): Homolog of NCBI NO: 27464234 NR Description: CC-NBS-LRR resistance protein MLA13 [Hordeum
  misc_feature (1)..(377): Homolog of NCBI NO: 27464234 NR Description: CC-NBS-LRR resistance protein MLA13 [Hordeum
  misc_feature (14)..(373): Homolog of NCBI NO: 34394780 NR Description: putative CC-NBS-LRR resistance protein MLA13
  misc_feature (434)..(466): Homolog of NCBI NO: 40253763 NR Description: putative RGH1A [Oryza sativa (japonica
  misc_feature (1)..(386): Homolog of NCBI NO: 40253763 NR Description: putative RGH1A [Oryza sativa (japonica
  misc_feature (1)..(303): Homolog of NCBI NO: 34904708 NR Description: P0446G09.19 [Oryza sativa (japonica
  misc_feature (1)..(472): Homolog of NCBI NO: 40253772 NR Description: putative RGH1A [Oryza sativa (japonica
  misc_feature (425)..(468): Homolog of NCBI NO: 34394780 NR Description: putative CC-NBS-LRR resistance protein MLA13
  misc_feature (1)..(303): Homolog of NCBI NO: 34394780 NR Description: putative CC-NBS-LRR resistance protein MLA13
MDMPEVLRSLSITDYNIAVMAPIDSFRVCRVLHIENNYVPINLKHLGKLLHLKFLQISGTTIDELPREIGHLRSLQTLILADTGLDELPPAVCSLTRLMCLIALEFERLPADRMGNLTSLEELRLHRVVGRSATQALVAELGKLTRLRVVSIAFSEQLEESLQEAFVQSLSNLRGLQELALLFKMPQRVSDMWGDWEPPRQLRRLIIKGIDFSRQPRWISRSCLPRLCSLSLVVYALEAQDLDNLARLPELQYLTLDGLSWPPRYTVGPDDFRNLRFCDVSTTFEFRKGAMPRLEVLHFGVYAGYWSWEKNGVPFEQFPTKDVIEDLDLDLDNVLLLQQVMVKVDCSGATAAQVEEVEAVVMRAVENHANRPTIVMDRVYEQNILSDEEREALLWRHIEEDCCVRTMKDKSDAFFISQLWLYRHLQEAIIFIDCSGASMCEVQKVEAAYRHAAEVHPNHPSIELIRTNTDGMASSSSDHPNTEPRN

SEQ ID NO: 108995 - protein, 484 aa, Zea mays subsp. mays
  misc_feature (1)..(484): Ceres Seq. ID no. 13599974
  misc_feature (1)..(375): Homolog of NCBI NO: 33943718 NR Description: MLA7 [Hordeum vulgare]
  misc_feature (424)..(460): Homolog of NCBI NO: 27464234 NR Description: CC-NBS-LRR resistance protein MLA13 [Hordeum
  misc_feature (1)..(375): Homolog of NCBI NO: 27464234 NR Description: CC-NBS-LRR resistance protein MLA13 [Hordeum
  misc_feature (12)..(371): Homolog of NCBI NO: 34394780 NR Description: putative CC-NBS-LRR resistance protein MLA13
  misc_feature (432)..(464): Homolog of NCBI NO: 40253763 NR Description: putative RGH1A [Oryza sativa (japonica
  misc_feature (1)..(384): Homolog of NCBI NO: 40253763 NR Description: putative RGH1A [Oryza sativa (japonica
  misc_feature (1)..(301): Homolog of NCBI NO: 34904708 NR Description: P0446G09.19 [Oryza sativa (japonica
  misc_feature (1)..(470): Homolog of NCBI NO: 40253772 NR Description: putative RGH1A [Oryza sativa (japonica
  misc_feature (423)..(466): Homolog of NCBI NO: 34394780 NR Description: putative CC-NBS-LRR resistance protein MLA13
  misc_feature (1)..(301): Homolog of NCBI NO: 34394780 NR Description: putative CC-NBS-LRR resistance protein MLA13
MPEVLRSLSITDYNIAVMAPIDSFRVCRVLHIENNYVPINLKHLGKLLHLKFLQISGTTIDELPREIGHLRSLQTLILADTGLDELPPAVCSLTRLMCLIALEFERLPADRMGNLTSLEELRLHRVVGRSATQALVAELGKLTRLRVVSIAFSEQLEESLQEAFVQSLSNLRGLQELALLFKMPQRVSDMWGDWEPPRQLRRLIIKGIDFSRQPRWISRSCLPRLCSLSLVVYALEAQDLDNLARLPELQYLTLDGLSWPPRYTVGPDDFRNLRFCDVSTTFEFRKGAMPRLEVLHFGVYAGYWSWEKNGVPFEQFPTKDVIEDLDLDLDNVLLLQQVMVKVDCSGATAAQVEEVEAVVMRAVENHANRPTIVMDRVYEQNILSDEEREALLWRHIEEDCCVRTMKDKSDAFFISQLWLYRHLQEAIIFIDCSGASMCEVQKVEAAYRHAAEVHPNHPSIELIRTNTDGMASSSSDHPNTEPRN

SEQ ID NO: 108996 - DNA, 2275 bp, Zea mays subsp. mays
  misc_feature (1)..(2275): Ceres Seq. ID no. 15226371
cccccccccccccccccccagaagagcctgctgtagcggcgcaaacgcaggaggaacaacaactgcggccgtttgagcttgaggttgagaagggcgctgccttcactctgggcctcctagctgtaaagcctgaacatcaacaatttatagttgatgctggtgcactacctcccctagtgaaacttttgaaaaggcagagaagtactacaaattcaaggatggttaatagcgttatcaagagagcagctgatgcaattaccaaccttgcacatgagaatagcaacatcaaaactagagtcagaatggaaggtggaatcccaccacttgttgaattgcttgaatctcaggatcttaaggtgcagagggcagctgcaggggccttgcggactttagcctttaaaaatgatgaaaataaaactcagattgttcaatgcaatgctttgccaactttgatcttaatgctgcgatctgaagatgccgcaattcactatgaagcagttggtgtcattggaaatttggttcattcatcacctaacatcaagaaggaggtccttaatgcaggggcactgcaacctgtgattggattattaagctcatgttgtacagaaagccaaagagaggctgctttgttgctagggcaatttgcttcagccgactcagattgcaaggtccatattatgcaaaggggtgcagtccgtccactaattgaaatgctacagtcggctgatgtccaactccgggagatgtctgcttttgcactcggcaggcttgcccaggacacacataaccaagcaggtattgcatataatggtggcttggtgcctttgtttaaactccttgactcaaaaaatggatctctgcaacataatgctgcatttgccctttatggagttgcagataatgaggactatgtatctgacttcattaaagtaggaggtgtccaaaagttgcaagatggggaatttattgtgcaggcaacaaaggactgtgtggcaaaaacattgaaaaggttagaggagaagataaatggacgagtgttgaaacacttgctttatttgatgcgagtaggagagcaatctgtgcaaaggcgtgttgctctagctctcgcacacctttgtgctcctgaagatcaaagggcaatttttattgataataatggtctcgacttgcttcttgatcttctgatttccatgagcccaaaacatcaacaagatggctcagcagcattatacaaattggccaacaaagctgcagcactttctcccatggatgctgcccctccatctccaacacctcaggtttatcttggtgagcaatacgtgaatagttcaacactttcagatgttactttcttggtagaaggaaagcgcttttatgcacacagaattgctttgcttgcttcttcggatgcatttcgtgcaatgtttgatggcgggtatagggaaaaggatgcaagagacattgaaattccaaatatcagatgggaggtctttgaactcatgatgagatttatctatacagggtcagtgcagattaacagtgaaatttcacaggatcttcttagagctgctgatcagtatctcttagaaggactcaaacgcttatgtgaatatactattgcgaaggatgtgaatctagataatgtatctgacatgtatgacttgtccgaagcctttcatgccgtgtcactgagacatacatgcatcttgtacattctggaacattttaacaagatctgcaccagagccggttctgcacagctgatccagcgtgttattccagagatccgcaattttctaaccaaggcactgaattcatcaagaagtccaagtccaagcgacaggaactcgcagacttgatgagtcccaattcattggcaccgacgccgtcatctgaccaaagttgctggagatcctgtacagtaaaatttctggcgctgagcgttcaatggtatctattttgggtacatggtggcgcggtccttgaaattaacatcagcaatgtaacaaaattttctaagatctagttgaggataaggataaggagaacatgtctcgtactcatgcatcgaccagcttacactgggataggctatagttggatggtcctggccgtaattcgtcggtctcagctttgattgagtttagtgttgtttccaccttccagttcacagttcagtgtatgcccgcatctgtttatttaaagtattaagcgtgaacaagttagacattaggacatgtacaatgatgtttaatgtagaggctcttgaggtgtc

SEQ ID NO: 108997 - protein, 618 aa, Zea mays subsp. mays
  misc_feature (1)..(618): Ceres Seq. ID no. 15226372
  misc_feature (435)..(543): Pfam Name: BTB/POZ domain Pfam Description: BTB/POZ domain
  misc_feature (25)..(383): Homolog of NCBI NO: 7491624 NR Description: hypothetical protein SPBC354.14c - fission yeast
  misc_feature (25)..(383): Homolog of NCBI NO: 19112030 NR Description: putative vacuolar protein; beta-catenin family
  misc_feature (44)..(384): Homolog of NCBI NO: 32414859 NR Description: hypothetical protein [Neurospora crassa]
  misc_feature (27)..(373): Homolog of NCBI NO: 6320824 NR Description: An armadillo repeat-containing protein localized
  misc_feature (30)..(541): Homolog of NCBI NO: 15239713 NR Description: expressed protein [Arabidopsis thaliana]
  misc_feature (22)..(352): Homolog of NCBI NO: 15239713 NR Description: expressed protein [Arabidopsis thaliana]
  misc_feature (25)..(611): Homolog of NCBI NO: 9955550 NR Description: putative protein [Arabidopsis thaliana]
  misc_feature (25)..(611): Homolog of NCBI NO: 30684235 NR Description: expressed protein [Arabidopsis thaliana]
  misc_feature (25)..(611): Homolog of NCBI NO: 18491179 NR Description: unknown protein [Arabidopsis thaliana]
  misc_feature (22)..(606): Homolog of NCBI NO: 30687245 NR Description: expressed protein [Arabidopsis thaliana]
PPPPPPEEPAVAAQTQEEQQLRPFELEVEKGAAFTLGLLAVKPEHQQFIVDAGALPPLVKLLKRQRSTTNSRMVNSVIKRAADAITNLAHENSNIKTRVRMEGGIPPLVELLESQDLKVQRAAAGALRTLAFKNDENKTQIVQCNALPTLILMLRSEDAAIHYEAVGVIGNLVHSSPNIKKEVLNAGALQPVIGLLSSCCTESQREAALLLGQFASADSDCKVHIMQRGAVRPLIEMLQSADVQLREMSAFALGRLAQDTHNQAGIAYNGGLVPLFKLLDSKNGSLQHNAAFALYGVADNEDYVSDFIKVGGVQKLQDGEFIVQATKDCVAKTLKRLEEKINGRVLKHLLYLMRVGEQSVQRRVALALAHLCAPEDQRAIFIDNNGLDLLLDLLISMSPKHQQDGSAALYKLANKAAALSPMDAAPPSPTPQVYLGEQYVNSSTLSDVTFLVEGKRFYAHRIALLASSDAFRAMFDGGYREKDARDIEIPNIRWEVFELMMRFIYTGSVQINSEISQDLLRAADQYLLEGLKRLCEYTIAKDVNLDNVSDMYDLSEAFHAVSLRHTCILYILEHFNKICTRAGSAQLIQRVIPEIRNFLTKALNSSRSPSPSDRNSQT

SEQ ID NO: 108998 - protein, 546 aa, Zea mays subsp. mays
  misc_feature (1)..(546): Ceres Seq. ID no. 15226373
  misc_feature (363)..(471): Pfam Name: BTB/POZ domain Pfam Description: BTB/POZ domain
  misc_feature (1)..(311): Homolog of NCBI NO: 7491624 NR Description: hypothetical protein SPBC354.14c - fission yeast
  misc_feature (1)..(311): Homolog of NCBI NO: 19112030 NR Description: putative vacuolar protein; beta-catenin family
  misc_feature (1)..(312): Homolog of NCBI NO: 32414859 NR Description: hypothetical protein [Neurospora crassa]
  misc_feature (1)..(301): Homolog of NCBI NO: 6320824 NR Description: An armadillo repeat-containing protein localized
  misc_feature (1)..(469): Homolog of NCBI NO: 15239713 NR Description: expressed protein [Arabidopsis thaliana]
  misc_feature (1)..(280): Homolog of NCBI NO: 15239713 NR Description: expressed protein [Arabidopsis thaliana]
  misc_feature (1)..(539): Homolog of NCBI NO: 9955550 NR Description: putative protein [Arabidopsis thaliana]
  misc_feature (1)..(539): Homolog of NCBI NO: 30684235 NR Description: expressed protein [Arabidopsis thaliana]
  misc_feature (1)..(539): Homolog of NCBI NO: 18491179 NR Description: unknown protein [Arabidopsis thaliana]
  misc_feature (1)..(534): Homolog of NCBI NO: 30687245 NR Description: expressed protein [Arabidopsis thaliana]
MVNSVIKRAADAITNLAHENSNIKTRVRMEGGIPPLVELLESQDLKVQRAAAGALRTLAFKNDENKTQIVQCNALPTLILMLRSEDAAIHYEAVGVIGNLVHSSPNIKKEVLNAGALQPVIGLLSSCCTESQREAALLLGQFASADSDCKVHIMQRGAVRPLIEMLQSADVQLREMSAFALGRLAQDTHNQAGIAYNGGLVPLFKLLDSKNGSLQHNAAFALYGVADNEDYVSDFIKVGGVQKLQDGEFIVQATKDCVAKTLKRLEEKINGRVLKHLLYLMRVGEQSVQRRVALALAHLCAPEDQRAIFIDNNGLDLLLDLLISMSPKHQQDGSAALYKLANKAAALSPMDAAPPSPTPQVYLGEQYVNSSTLSDVTFLVEGKRFYAHRIALLASSDAFRAMFDGGYREKDARDIEIPNIRWEVFELMMRFIYTGSVQINSEISQDLLRAADQYLLEGLKRLCEYTIAKDVNLDNVSDMYDLSEAFHAVSLRHTCILYILEHFNKICTRAGSAQLIQRVIPEIRNFLTKALNSSRSPSPSDRNSQT

SEQ ID NO: 108999 - protein, 518 aa, Zea mays subsp. mays
  misc_feature (1)..(518): Ceres Seq. ID no. 15226374
  misc_feature (335)..(443): Pfam Name: BTB/POZ domain Pfam Description: BTB/POZ domain
  misc_feature (1)..(283): Homolog of NCBI NO: 7491624 NR Description: hypothetical protein SPBC354.14c - fission yeast
  misc_feature (1)..(283): Homolog of NCBI NO: 19112030 NR Description: putative vacuolar protein; beta-catenin family
  misc_feature (1)..(284): Homolog of NCBI NO: 32414859 NR Description: hypothetical protein [Neurospora crassa]
  misc_feature (1)..(273): Homolog of NCBI NO: 6320824 NR Description: An armadillo repeat-containing protein localized
  misc_feature (1)..(441): Homolog of NCBI NO: 15239713 NR Description: expressed protein [Arabidopsis thaliana]
  misc_feature (1)..(252): Homolog of NCBI NO: 15239713 NR Description: expressed protein [Arabidopsis thaliana]
  misc_feature (1)..(511): Homolog of NCBI NO: 9955550 NR Description: putative protein [Arabidopsis thaliana]
  misc_feature (1)..(511): Homolog of NCBI NO: 30684235 NR Description: expressed protein [Arabidopsis thaliana]
  misc_feature (1)..(511): Homolog of NCBI NO: 18491179 NR Description: unknown protein [Arabidopsis thaliana]
  misc_feature (1)..(506): Homolog of NCBI NO: 30687245 NR Description: expressed protein [Arabidopsis thaliana]
MEGGIPPLVELLESQDLKVQRAAAGALRTLAFKNDENKTQIVQCNALPTLILMLRSEDAAIHYEAVGVIGNLVHSSPNIKKEVLNAGALQPVIGLLSSCCTESQREAALLLGQFASADSDCKVHIMQRGAVRPLIEMLQSADVQLREMSAFALGRLAQDTHNQAGIAYNGGLVPLFKLLDSKNGSLQHNAAFALYGVADNEDYVSDFIKVGGVQKLQDGEFIVQATKDCVAKTLKRLEEKINGRVLKHLLYLMRVGEQSVQRRVALALAHLCAPEDQRAIFIDNNGLDLLLDLLISMSPKHQQDGSAALYKLANKAAALSPMDAAPPSPTPQVYLGEQYVNSSTLSDVTFLVEGKRFYAHRIALLASSDAFRAMFDGGYREKDARDIEIPNIRWEVFELMMRFIYTGSVQINSEISQDLLRAADQYLLEGLKRLCEYTIAKDVNLDNVSDMYDLSEAFHAVSLRHTCILYILEHFNKICTRAGSAQLIQRVIPEIRNFLTKALNSSRSPSPSDRNSQT

SEQ ID NO: 109000 - DNA, 2901 bp, Zea mays subsp. mays
  misc_feature (1)..(2901): Ceres Seq. ID no. 15227313
gataattctgttgggagtgtgtaccatctgatcaataggataccgcactctcagttttattggaaggtcaattgcaaactgtaaccctgctgtatgaagtgcttctgactttttcccgagtccagctgcgcactctgtgcttttgaactcgtcttgtgcaaggccaccagtaaacttgtttattcgttgtctgacatcgagatccgttagactaactgacctatagtacatctctgttagaaaaaggtcatagggaaaagaaaaaaacaggattacaatgttatcagaagtgaaagtgtgctcgctctaactagtaagcacagagactccctactctaccaaaaactaatgcacaaattataatcgtcttaggataggtatcaagatttcaactgaccgtttgggcgcaaactaaagaaactccggtaattttgaaccactctttttcttttcgctctctgatcaggagtttagaccacatgtacagtacagctacaagagtcagtagctgattagcggtggttacgaaggctattcacggaaggcttcaagccagagccaactcagtccatcggtgcggttagtgatcctcacaatgtaaccaatgtcctttttggcttttctatatcaacaattccttcagcttgcatgacactcaaagtaccaataccaaactatttttcttaaagtagacaaacacatggctacgagataatgtcacaaattgtcatccgctaccttttttatctcatgggaaaaaatgacggttagctcttcattagaattgaaggactcacagatacttgttattcttaaatgaaatataagctgtgcacgtatatgtacgtataacattttattgtttcagaaataaatatgtcgcgatcgatatataattcggatatgaggtgtcagctggatttgataacgtgagctcactgcctgacctgattttgaagtgtcagtgagacagccatttgacacagttgatacagttttgtatctggcgggatcgattgagcatcttccatgcaccaagtctagcagaataataattgttcttgctgagagggatcaatgcgtactgcaagacattgacccagaagagcttcacgcaaaattgcaagaccctagttttctcgaagaagctcaattgattgatgttcgggagcctgatgaagtgtaagatattccatcattatacttcattttattttgtctccacacaatcatcaaactaacatggcattcatgataagtgcccccaactttctgggtgagacatgtgtgaccttttgtccttagattgtaattcatgaatgaggatgcaaatgctttgctgatattgcgttatggtaaaaagaccagtaacttttgcataggctgccatgatgtttttttgcaaggtgataggttatatgttaaccagaagtgataaagttgggacttgtccttgtttgagaatcgagagtcatgtccgtatattggcgtgatttcacaaataatgagctggatcataaatgttaaattattcaataattacaacatctttttgtggttttcaaaaggaaatatgtaagttatcaagctaatgttgttaaaacaaacaacattagctgcagctttatctcgtatatggaccatttagtatgttaaccctctcatacttggaagatcctaattgcacaaattttagagtgtgcttcacatagttgtagcacatggatcgggacgtgcagttatttgattcagctagtatgttttttgtggttctcttgcatttctaggaatgatattgtgattaccaggttgagtttcattcttttatttattttcgttcttgctgggttgatgttgaatttctactacctgcatggtagggagaaagcttcacttccaggcttcaaggtgaactggcagatatgtttctgcggctttgtgaacttaaacttaaatttggctgcaggagtttccattgcctgtctctaaacttgcagtgcttctttggctgagtgtaggttactgccatattggaggatggtagaatatttgaagttgaccttttggttggtgccgatggaatatggtcaaaggtgaggaagacactattcgggcactcagatgccacctattcaggttacacctgctacactggaattgcagattttgtgctgcccgatatcgatacggttggaaaaccacagttgattttaagccatacattggtccaatctataatgcgatactaggacgtttggccaatcatgatcaggatcaggtttggcaaaattctcttttctcactccctttcttgtgtgcttgcagtgcactctcatttatcatgcaaatttgtgttctcccaagaggtaaaaaaatgcgccatatcttgcatgagtttggtggtctctacttttggtgatggtcttgaaagagaattaccagcatgccttcccatactcgttgacaggatgggtaatgaaattacaagacttacagttgtcaagttattgcaaatttacctctacgtattgatctctcgtgtgtcctggatcatgttgtttctgaactcacagctttccttcgtaaggtacttgcatagttgcatggatctttgctgccttcatttgatttttattttctatgaaaagcatagcaaagagcaagataatgccttcgttttctctctcttatggaacaggccaacagagctcttaggcaggcgacgttgggaactctaaattctttggttgtcacatatggtttgcaatatgtcaatataactaaataacaacttgctaaggtgttcagtccttagtaggctgcatgtaaagcttttatttagccgtcctattttgttctctaggtatcaaatttgaatacatagaatatatttacactctg

SEQ ID NO: 109001 - protein, 157 aa, Zea mays subsp. mays
  misc_feature (1)..(157): Ceres Seq. ID no. 15227314
  misc_feature (33)..(84): Pfam Name: TBP (TATA-binding protein) -interacting protein Pfam Description: TBP (TATA-binding protein) -interacting protein
  misc_feature (33)..(84): Homolog of NCBI NO: 22325430 NR Description: TIP120 protein, putative [Arabidopsis thaliana]
  misc_feature (33)..(84): Homolog of NCBI NO: 7487809 NR Description: hypothetical protein At2g02560 [imported] -
MIRIRFGKILFSHSLSCVLAVHSHLSCKFVFSQEVKKCAISCMSLVVSTFGDGLERELPACLPILVDRMGNEITRLTVVKLLQIYLYVLISRVSWIMLFLNSQLSFVRYLHSCMDLCCLHLIFIFYEKHSKEQDNAFVFSLLWNRPTELLGRRRWEL

SEQ ID NO: 109002 - protein, 115 aa, Zea mays subsp. mays
  misc_feature (1)..(115): Ceres Seq. ID no. 15227315
  misc_feature (1)..(42): Homolog of NCBI NO: 22325430 NR Description: TIP120 protein, putative [Arabidopsis thaliana]
  misc_feature (1)..(42): Homolog of NCBI NO: 7487809 NR Description: hypothetical protein At2g02560 [imported] -
MSLVVSTFGDGLERELPACLPILVDRMGNEITRLTVVKLLQIYLYVLISRVSWIMLFLNSQLSFVRYLHSCMDLCCLHLIFIFYEKHSKEQDNAFVFSLLWNRPTELLGRRRWEL

SEQ ID NO: 109003 - protein, 111 aa, Zea mays subsp. mays
  misc_feature (1)..(111): Ceres Seq. ID no. 15227316
  misc_feature (42)..(65): Homolog of NCBI NO: 22325430 NR Description: TIP120 protein, putative [Arabidopsis thaliana]
  misc_feature (42)..(65): Homolog of NCBI NO: 7487809 NR Description: hypothetical protein At2g02560 [imported] -
MVKGEEDTIRALRCHLFRLHLLHWNCRFCAARYRYGWKTTVDFKPYIGPIYNAILGRLANHDQDQVWQNSLFSLPFLCACSALSFIMQICVLPRGKKMRHILHEFGGLYFW

SEQ ID NO: 109004 - DNA, 1221 bp, Zea mays subsp. mays
  misc_feature (1)..(1221): Ceres Seq. ID no. 15226175
gtttcactcgaggaggtgaagcctgaacagaatgaagctgaccaaccagacaacattctctgtgatgttgttgaatgcatggaagaagatgcagatgagttagcttatgcatatccatgcaaagcagagtcagaatcgtctgattctgaatcatctgatgaggatgaccctggagggatttctgtgtctggcgacgagaactgtgacccagatactaaatttaccatgagcaattcattcaaggcagatttttttaggtctagcagaacatcagaggacttcgccacatggcagcgcatcataaggttggatgctatccggtcaaacagtgaatggattttgttctcccgcaaccagtctgaagttcccaaggagagagcattgcagtctgcagcatctgttgggttgaaagactatgagcacttggagcccagtatgatttatcatgcagctcgattagttgggttgctcgaagcatatgcggtctacgatccagagattggctactgccaaggcatgagcgatctgttgtcacctatcattgcggtgatggaggatgacgatgaagcgttctggtgtttcgtgggtttcatgaggaaagcaaggcacaacttcaggctcgacgaggttggaatacgaaggcaattgaagattgtctctcagattatcaagcgcaaagattcgcacctgtataggcatctgcagaagttgcaggccgaggactgtttcttcgtgtacagaatggtggtggttctgttcaggcgagagctcacctttgagcaaaccgtgtgcctgtggggggttatgtgggctgaccaggcagccatacgagccgggatcgggaggtccacctggggaaggataaggctgcgtgctccgccaactgacgacctgttgctctacgccatcgccgcctgcgtcctgcagaggaggaagctgataattgagaagtatagcagcatggacgagatactgcgagagtgcaatagcatggccgggcagctagacgtctggaggctgctagatgatgcacatgacctggttgttaaccttcatgataaaatctgatctgttctcggccctcatggtagaacagatgtactaagcctcaacaaaaggaaagaaaaaaaagaaactgaggctccttccacctaaggcattgttcgtttattccaattccatgtggattggagtgtattggaatggattaggatagatttt

SEQ ID NO: 109005 - protein, 355 aa, Zea mays subsp. mays
  misc_feature (1)..(355): Ceres Seq. ID no. 15226176
  misc_feature (95)..(272): Homolog of NCBI NO: 38103631 NR Description: hypothetical protein MG04067.4 [Magnaporthe
  misc_feature (109)..(271): Homolog of NCBI NO: 30688016 NR Description: expressed protein [Arabidopsis thaliana]
  misc_feature (69)..(272): Homolog of NCBI NO: 40738957 NR Description: hypothetical protein AN6618.2 [Aspergillus
  misc_feature (67)..(271): Homolog of NCBI NO: 34893986 NR Description: P0672D08.1 [Oryza sativa (japonica
  misc_feature (92)..(355): Homolog of NCBI NO: 15238777 NR Description: GTPase activator protein of Rab-related small
  misc_feature (92)..(355): Homolog of NCBI NO: 9759196 NR Description: GTPase activator protein of Rab-like small
  misc_feature (44)..(355): Homolog of NCBI NO: 15238518 NR Description: GTPase activator-related protein of Rab-like
  misc_feature (42)..(355): Homolog of NCBI NO: 37536102 NR Description: putative GTPase activating protein
  misc_feature (3)..(355): Homolog of NCBI NO: 15238237 NR Description: GTPase activator protein of Rab-related small
  misc_feature (44)..(355): Homolog of NCBI NO: 15229125 NR Description: GTPase activating -related protein [Arabidopsis
VSLEEVKPEQNEADQPDNILCDVVECMEEDADELAYAYPCKAESESSDSESSDEDDPGGISVSGDENCDPDTKFTMSNSFKADFFRSSRTSEDFATWQRIIRLDAIRSNSEWILFSRNQSEVPKERALQSAASVGLKDYEHLEPSMIYHAARLVGLLEAYAVYDPEIGYCQGMSDLLSPIIAVMEDDDEAFWCFVGFMRKARHNFRLDEVGIRRQLKIVSQIIKRKDSHLYRHLQKLQAEDCFFVYRMVVVLFRRELTFEQTVCLWGVMWADQAAIRAGIGRSTWGRIRLRAPPTDDLLLYAIAACVLQRRKLIIEKYSSMDEILRECNSMAGQLDVWRLLDDAHDLVVNLHDKI

SEQ ID NO: 109006 - protein, 329 aa, Zea mays subsp. mays
  misc_feature (1)..(329): Ceres Seq. ID no. 15226177
  misc_feature (69)..(246): Homolog of NCBI NO: 38103631 NR Description: hypothetical protein MG04067.4 [Magnaporthe
  misc_feature (83)..(245): Homolog of NCBI NO: 30688016 NR Description: expressed protein [Arabidopsis thaliana]
  misc_feature (43)..(246): Homolog of NCBI NO: 40738957 NR Description: hypothetical protein AN6618.2 [Aspergillus
  misc_feature (41)..(245): Homolog of NCBI NO: 34893986 NR Description: P0672D08.1 [Oryza sativa (japonica
  misc_feature (66)..(329): Homolog of NCBI NO: 15238777 NR Description: GTPase activator protein of Rab-related small
  misc_feature (66)..(329): Homolog of NCBI NO: 9759196 NR Description: GTPase activator protein of Rab-like small
  misc_feature (18)..(329): Homolog of NCBI NO: 15238518 NR Description: GTPase activator-related protein of Rab-like
  misc_feature (16)..(329): Homolog of NCBI NO: 37536102 NR Description: putative GTPase activating protein
  misc_feature (1)..(329): Homolog of NCBI NO: 15238237 NR Description: GTPase activator protein of Rab-related small
  misc_feature (18)..(329): Homolog of NCBI NO: 15229125 NR Description: GTPase activating -related protein [Arabidopsis
MEEDADELAYAYPCKAESESSDSESSDEDDPGGISVSGDENCDPDTKFTMSNSFKADFFRSSRTSEDFATWQRIIRLDAIRSNSEWILFSRNQSEVPKERALQSAASVGLKDYEHLEPSMIYHAARLVGLLEAYAVYDPEIGYCQGMSDLLSPIIAVMEDDDEAFWCFVGFMRKARHNFRLDEVGIRRQLKIVSQIIKRKDSHLYRHLQKLQAEDCFFVYRMVVVLFRRELTFEQTVCLWGVMWADQAAIRAGIGRSTWGRIRLRAPPTDDLLLYAIAACVLQRRKLIIEKYSSMDEILRECNSMAGQLDVWRLLDDAHDLVVNLHDKI

SEQ ID NO: 109007 - protein, 280 aa, Zea mays subsp. mays
  misc_feature (1)..(280): Ceres Seq. ID no. 15226178
  misc_feature (20)..(197): Homolog of NCBI NO: 38103631 NR Description: hypothetical protein MG04067.4 [Magnaporthe
  misc_feature (34)..(196): Homolog of NCBI NO: 30688016 NR Description: expressed protein [Arabidopsis thaliana]
  misc_feature (1)..(197): Homolog of NCBI NO: 40738957 NR Description: hypothetical protein AN6618.2 [Aspergillus
  misc_feature (1)..(196): Homolog of NCBI NO: 34893986 NR Description: P0672D08.1 [Oryza sativa (japonica
  misc_feature (17)..(280): Homolog of NCBI NO: 15238777 NR Description: GTPase activator protein of Rab-related small
  misc_feature (17)..(280): Homolog of NCBI NO: 9759196 NR Description: GTPase activator protein of Rab-like small
  misc_feature (1)..(280): Homolog of NCBI NO: 15238518 NR Description: GTPase activator-related protein of Rab-like
  misc_feature (1)..(280): Homolog of NCBI NO: 37536102 NR Description: putative GTPase activating protein
  misc_feature (1)..(280): Homolog of NCBI NO: 15238237 NR Description: GTPase activator protein of Rab-related small
  misc_feature (1)..(280): Homolog of NCBI NO: 15229125 NR Description: GTPase activating -related protein [Arabidopsis
MSNSFKADFFRSSRTSEDFATWQRIIRLDAIRSNSEWILFSRNQSEVPKERALQSAASVGLKDYEHLEPSMIYHAARLVGLLEAYAVYDPEIGYCQGMSDLLSPIIAVMEDDDEAFWCFVGFMRKARHNFRLDEVGIRRQLKIVSQIIKRKDSHLYRHLQKLQAEDCFFVYRMVVVLFRRELTFEQTVCLWGVMWADQAAIRAGIGRSTWGRIRLRAPPTDDLLLYAIAACVLQRRKLIIEKYSSMDEILRECNSMAGQLDVWRLLDDAHDLVVNLHDKI

SEQ ID NO: 109008 - DNA, 749 bp, Zea mays subsp. mays
  misc_feature (1)..(749): Ceres Seq. ID no. 13623632
aattcctaccatgacttagttgctgattctattagtttatggaaaatagttgacatgaaagttctcgaggaacttttggaggaagtgattaagcttcagtgcagctcagccagctatgtttacgattgttttattagatgtttgagcaaagtcgacagattggaggaagcaaaaagttttctcgtagggatgcagagtgctaacttaaccccaagtgaggatgtatatacttgtatgatagaatgttgctacagaatgaaattgctaaaagaagctttaaggtttcttgattcaatggtgaaaagaaactatttaccacgtttagaatcttataggtttattatttgtgctctttgtgaggaaggaagctttcatactgctaaaagcatttttggtgacatactatcaaaggaatacaaccgtgatgagattgcttggaagattttgattgatggcttattacaaaaaggaaacactgctgactgctcccgtctgctatcattcatggaggaacagaattgccgtcctggttctgcaatatattctaggcttacaggcgaaataacagttacaagtgaagctcaggaaattgctacatgaatacggacaaaccaaccaaccttagtgttggtgttgatggttccatgaatcagtacaagatgggcaaattgaaagctaaaaagactttggctgtttgacattagcagtgcccctgtaattgtgaggaaggatgtggcaacacaaataat

SEQ ID NO: 109009 - protein, 199 aa, Zea mays subsp. mays
  misc_feature (1)..(199): Ceres Seq. ID no. 13623633
  misc_feature (2)..(184): Homolog of NCBI NO: 18087893 NR Description: putative membrane-associated salt-inducible
  misc_feature (5)..(199): Homolog of NCBI NO: 15232243 NR Description: pentatricopeptide (PPR) repeat-containing protein
  misc_feature (19)..(184): Homolog of NCBI NO: 15231438 NR Description: pentatricopeptide (PPR) repeat-containing protein
  misc_feature (28)..(198): Homolog of NCBI NO: 15237375 NR Description: pentatricopeptide (PPR) repeat-containing protein
  misc_feature (1)..(184): Homolog of NCBI NO: 18424537 NR Description: pentatricopeptide (PPR) repeat-containing protein
  misc_feature (1)..(184): Homolog of NCBI NO: 30794106 NR Description: unknown protein [Arabidopsis thaliana]
  misc_feature (1)..(184): Homolog of NCBI NO: 14532710 NR Description: unknown protein [Arabidopsis thaliana]
  misc_feature (5)..(196): Homolog of NCBI NO: 15235288 NR Description: pentatricopeptide (PPR) repeat-containing protein
  misc_feature (16)..(184): Homolog of NCBI NO: 15238505 NR Description: pentatricopeptide (PPR) repeat-containing protein
  misc_feature (9)..(198): Homolog of NCBI NO: 34015356 NR Description: putative fertility restorer
NSYHDLVADSISLWKIVDMKVLEELLEEVIKLQCSSASYVYDCFIRCLSKVDRLEEAKSFLVGMQSANLTPSEDVYTCMIECCYRMKLLKEALRFLDSMVKRNYLPRLESYRFIICALCEEGSFHTAKSIFGDILSKEYNRDEIAWKILIDGLLQKGNTADCSRLLSFMEEQNCRPGSAIYSRLTGEITVTSEAQEIAT

SEQ ID NO: 109010 - protein, 181 aa, Zea mays subsp. mays
  misc_feature (1)..(181): Ceres Seq. ID no. 13623634
  misc_feature (1)..(166): Homolog of NCBI NO: 18087893 NR Description: putative membrane-associated salt-inducible
  misc_feature (1)..(181): Homolog of NCBI NO: 15232243 NR Description: pentatricopeptide (PPR) repeat-containing protein
  misc_feature (1)..(166): Homolog of NCBI NO: 15231438 NR Description: pentatricopeptide (PPR) repeat-containing protein
  misc_feature (10)..(180): Homolog of NCBI NO: 15237375 NR Description: pentatricopeptide (PPR) repeat-containing protein
  misc_feature (1)..(166): Homolog of NCBI NO: 30794106 NR Description: unknown protein [Arabidopsis thaliana]
  misc_feature (1)..(166): Homolog of NCBI NO: 18424537 NR Description: pentatricopeptide (PPR) repeat-containing protein
  misc_feature (1)..(166): Homolog of NCBI NO: 14532710 NR Description: unknown protein [Arabidopsis thaliana]
  misc_feature (1)..(178): Homolog of NCBI NO: 15235288 NR Description: pentatricopeptide (PPR) repeat-containing protein
  misc_feature (1)..(166): Homolog of NCBI NO: 15238505 NR Description: pentatricopeptide (PPR) repeat-containing protein
  misc_feature (1)..(180): Homolog of NCBI NO: 34015356 NR Description: putative fertility restorer
MKVLEELLEEVIKLQCSSASYVYDCFIRCLSKVDRLEEAKSFLVGMQSANLTPSEDVYTCMIECCYRMKLLKEALRFLDSMVKRNYLPRLESYRFIICALCEEGSFHTAKSIFGDILSKEYNRDEIAWKILIDGLLQKGNTADCSRLLSFMEEQNCRPGSAIYSRLTGEITVTSEAQEIAT

SEQ ID NO: 109011 - protein, 136 aa, Zea mays subsp. mays
  misc_feature (1)..(136): Ceres Seq. ID no. 13623635
  misc_feature (1)..(121): Homolog of NCBI NO: 18087893 NR Description: putative membrane-associated salt-inducible
  misc_feature (1)..(136): Homolog of NCBI NO: 15232243 NR Description: pentatricopeptide (PPR) repeat-containing protein
  misc_feature (1)..(121): Homolog of NCBI NO: 15231438 NR Description: pentatricopeptide (PPR) repeat-containing protein
  misc_feature (1)..(135): Homolog of NCBI NO: 15237375 NR Description: pentatricopeptide (PPR) repeat-containing protein
  misc_feature (1)..(121): Homolog of NCBI NO: 30794106 NR Description: unknown protein [Arabidopsis thaliana]
  misc_feature (1)..(121): Homolog of NCBI NO: 18424537 NR Description: pentatricopeptide (PPR) repeat-containing protein
  misc_feature (1)..(121): Homolog of NCBI NO: 14532710 NR Description: unknown protein [Arabidopsis thaliana]
  misc_feature (1)..(133): Homolog of NCBI NO: 15235288 NR Description: pentatricopeptide (PPR) repeat-containing protein
  misc_feature (1)..(121): Homolog of NCBI NO: 15238505 NR Description: pentatricopeptide (PPR) repeat-containing protein
  misc_feature (1)..(135): Homolog of NCBI NO: 34015356 NR Description: putative fertility restorer
MQSANLTPSEDVYTCMIECCYRMKLLKEALRFLDSMVKRNYLPRLESYRFIICALCEEGSFHTAKSIFGDILSKEYNRDEIAWKILIDGLLQKGNTADCSRLLSFMEEQNCRPGSAIYSRLTGEITVTSEAQEIAT

SEQ ID NO: 109012 - DNA, 2193 bp, Zea mays subsp. mays
  misc_feature (1)..(2193): Ceres Seq. ID no. 15224896
ctcactagtcccccccccccccccccgcctaaaagaaccttgtccttaccaaagtttaacttagttgcagttgggatgaaaacgggtatccaaattcttaggataaatttaatattttaaaattaatatgtacgaaattggatgcttagattttcttatgttatcaagcacattattataagtaagaataaaactttgctagtgtcatattctatggtttgatgtgtactagtctgcgtacatgtgtttatcgtttaaaaataattgttttggtaaatttttatcgttatcgatgcacttttgattgtatactttcgttatcgatattattgaaatatggataccgttttcgttttcgacaatatcgtatcgttttcgtttccgtcaaaataatttgaaagtgaaagtggtggagtctttttccgatcgttttcgaccgttttcagccttacccaaacccttatttaaagctatatggctatttgatgtttgcttacttcgtatttcttgtaaaaaccatcggtcggtccgcccctggtagcagcagcaggaggacaccatgaagcttgacgtgaatgcccttcgctacctcgccaaggacgacttccgtgtcctcaccgccgtcgagatgggcatgcgcaaccatgagattgttccagtagaacttattgacaggattgccagattgaagcatggaggcacatacaaagtgctgaggaatcttttgaggaacaagctggtgcatcatggtgccactaaatacgatggatatcggctcacctatctgggatatgacttccttgccatcaagactttggttaatcgaggagtttttgcttcagttggccgccagattggtgttggaaaggagtcagatatatttgaggtagccacagacgatggtacagtacttgccatgaagcttcataggttgggcaggacatcttttagagctgtgaaatctaagcgtgactatctaaggcaccgaaggagctttaattggctgtatctctcacgactcgcagccttgaaggaatttgcctttatgaaggctttaggagatcatggtttccctgttccaactgctgtggattgcaaccggcattgtgtgatcatgtcacttgtgcagggatatcctcttgttcaagtgaaaaagttacaaaatccggatgatgtttttgactcaattcttggtcttatcgttcgtttggctgagcatggactcatacactgtgactttaatgagttcaatatcatgattgacgatgatgaaaaaattacagtgattgactttccgcagatggtgtctgtttctcaccgtaatgcccaaatgttttttgaccgagacattgaatgcatctacaagttctttaacaaaaggttcaatctgaggtcagtgaaaaatgaagaacaagctggatctgaaaatgatgatgaagggaacagcagaccttcctttttgtccgtggaaaagggtgctggttccttggacaaggaactagctgccagtggatttaccaggaaagagaaagtggatatggataagtacatcgaggaagttgttgaagggcatgattccagctcagatgatgataatgatgaggacagttccgatgagcctgattgtgatcttaccccaagtgattcagacgcgcctggaactttttctgaagagcatggaacaagttgtagcggcgagaacagattggaaattcctccctcggatggcaatggagtggttatggcaccgctcgaatctgggatcaagacgttttccatggaagatgatgataacgatgatggctcgtcagaggatgctgatgaagaagaagatgctgagctcacgaaacaattgaacaagcaaaggagaaaagcaatcgcagctgcccatgggcggagaagaccaacgtcatccaggaacgcctacaaggacaagggtaagggcaccatgaactccaagatgcagaggcaggcgtgcaactggtgatggttgagtgcctcttgcggcagtaaatagattaggcgcagggttttgtgtggttgtataaccgtgggaccctttactagaatcaactccggctttatatttttactaggtgagtaatcgtgcgtcgcaacgagaacacataatattacgagaacttatatataaaatgtcgcaacgaaaacatataatattatgagaacttatat

SEQ ID NO: 109013 - protein, 475 aa, Zea mays subsp. mays
  misc_feature (1)..(475): Ceres Seq. ID no. 15224897
  misc_feature (106)..(288): Pfam Name: RIO1 family Pfam Description: RIO1 family
  misc_feature (2)..(435): Homolog of NCBI NO: 8922905 NR Description: hypothetical protein FLJ11159 [Homo sapiens]
  misc_feature (2)..(353): Homolog of NCBI NO: 14789753 NR Description: RIKEN cDNA 2010110K24 [Mus musculus]
  misc_feature (2)..(390): Homolog of NCBI NO: 13385428 NR Description: RIKEN cDNA 2010110K24 [Mus musculus]
  misc_feature (2)..(377): Homolog of NCBI NO: 27730419 NR Description: similar to RIKEN cDNA 2010110K24 [Rattus
  misc_feature (2)..(353): Homolog of NCBI NO: 26354833 NR Description: unnamed protein product [Mus musculus]
  misc_feature (2)..(471): Homolog of NCBI NO: 37681925 NR Description: RIO kinase 2 [Danio rerio]
  misc_feature (2)..(452): Homolog of NCBI NO: 28502888 NR Description: Similar to hypothetical protein FLJ11159 [Danio
  misc_feature (159)..(475): Homolog of NCBI NO: 34907494 NR Description: B1099D03.17 [Oryza sativa (japonica
  misc_feature (1)..(468): Homolog of NCBI NO: 15230437 NR Description: hypothetical protein [Arabidopsis thaliana]
  misc_feature (1)..(355): Homolog of NCBI NO: 34907494 NR Description: B1099D03.17 [Oryza sativa (japonica
MKLDVNALRYLAKDDFRVLTAVEMGMRNHEIVPVELIDRIARLKHGGTYKVLRNLLRNKLVHHGATKYDGYRLTYLGYDFLAIKTLVNRGVFASVGRQIGVGKESDIFEVATDDGTVLAMKLHRLGRTSFRAVKSKRDYLRHRRSFNWLYLSRLAALKEFAFMKALGDHGFPVPTAVDCNRHCVIMSLVQGYPLVQVKKLQNPDDVFDSILGLIVRLAEHGLIHCDFNEFNIMIDDDEKITVIDFPQMVSVSHRNAQMFFDRDIECIYKFFNKRFNLRSVKNEEQAGSENDDEGNSRPSFLSVEKGAGSLDKELAASGFTRKEKVDMDKYIEEVVEGHDSSSDDDNDEDSSDEPDCDLTPSDSDAPGTFSEEHGTSCSGENRLEIPPSDGNGVVMAPLESGIKTFSMEDDDNDDGSSEDADEEEDAELTKQLNKQRRKAIAAAHGRRRPTSSRNAYKDKGKGTMNSKMQRQACNW

SEQ ID NO: 109014 - protein, 452 aa, Zea mays subsp. mays
  misc_feature (1)..(452): Ceres Seq. ID no. 15224898
  misc_feature (83)..(265): Pfam Name: RIO1 family Pfam Description: RIO1 family
  misc_feature (1)..(412): Homolog of NCBI NO: 8922905 NR Description: hypothetical protein FLJ11159 [Homo sapiens]
  misc_feature (1)..(330): Homolog of NCBI NO: 14789753 NR Description: RIKEN cDNA 2010110K24 [Mus musculus]
  misc_feature (1)..(367): Homolog of NCBI NO: 13385428 NR Description: RIKEN cDNA 2010110K24 [Mus musculus]
  misc_feature (1)..(354): Homolog of NCBI NO: 27730419 NR Description: similar to RIKEN cDNA 2010110K24 [Rattus
  misc_feature (1)..(330): Homolog of NCBI NO: 26354833 NR Description: unnamed protein product [Mus musculus]
  misc_feature (1)..(448): Homolog of NCBI NO: 37681925 NR Description: RIO kinase 2 [Danio rerio]
  misc_feature (1)..(429): Homolog of NCBI NO: 28502888 NR Description: Similar to hypothetical protein FLJ11159 [Danio
  misc_feature (136)..(452): Homolog of NCBI NO: 34907494 NR Description: B1099D03.17 [Oryza sativa (japonica
  misc_feature (1)..(445): Homolog of NCBI NO: 15230437 NR Description: hypothetical protein [Arabidopsis thaliana]
  misc_feature (1)..(332): Homolog of NCBI NO: 34907494 NR Description: B1099D03.17 [Oryza sativa (japonica
MGMRNHEIVPVELIDRIARLKHGGTYKVLRNLLRNKLVHHGATKYDGYRLTYLGYDFLAIKTLVNRGVFASVGRQIGVGKESDIFEVATDDGTVLAMKLHRLGRTSFRAVKSKRDYLRHRRSFNWLYLSRLAALKEFAFMKALGDHGFPVPTAVDCNRHCVIMSLVQGYPLVQVKKLQNPDDVFDSILGLIVRLAEHGLIHCDFNEFNIMIDDDEKITVIDFPQMVSVSHRNAQMFFDRDIECIYKFFNKRFNLRSVKNEEQAGSENDDEGNSRPSFLSVEKGAGSLDKELAASGFTRKEKVDMDKYIEEVVEGHDSSSDDDNDEDSSDEPDCDLTPSDSDAPGTFSEEHGTSCSGENRLEIPPSDGNGVVMAPLESGIKTFSMEDDDNDDGSSEDADEEEDAELTKQLNKQRRKAIAAAHGRRRPTSSRNAYKDKGKGTMNSKMQRQACNW

SEQ ID NO: 109015 - protein, 450 aa, Zea mays subsp. mays
  misc_feature (1)..(450): Ceres Seq. ID no. 15224899
  misc_feature (81)..(263): Pfam Name: RIO1 family Pfam Description: RIO1 family
  misc_feature (1)..(410): Homolog of NCBI NO: 8922905 NR Description: hypothetical protein FLJ11159 [Homo sapiens]
  misc_feature (1)..(328): Homolog of NCBI NO: 14789753 NR Description: RIKEN cDNA 2010110K24 [Mus musculus]
  misc_feature (1)..(365): Homolog of NCBI NO: 13385428 NR Description: RIKEN cDNA 2010110K24 [Mus musculus]
  misc_feature (1)..(352): Homolog of NCBI NO: 27730419 NR Description: similar to RIKEN cDNA 2010110K24 [Rattus
  misc_feature (1)..(328): Homolog of NCBI NO: 26354833 NR Description: unnamed protein product [Mus musculus]
  misc_feature (1)..(446): Homolog of NCBI NO: 37681925 NR Description: RIO kinase 2 [Danio rerio]
  misc_feature (1)..(427): Homolog of NCBI NO: 28502888 NR Description: Similar to hypothetical protein FLJ11159 [Danio
  misc_feature (134)..(450): Homolog of NCBI NO: 34907494 NR Description: B1099D03.17 [Oryza sativa (japonica
  misc_feature (1)..(443): Homolog of NCBI NO: 15230437 NR Description: hypothetical protein [Arabidopsis thaliana]
  misc_feature (1)..(330): Homolog of NCBI NO: 34907494 NR Description: B1099D03.17 [Oryza sativa (japonica
MRNHEIVPVELIDRIARLKHGGTYKVLRNLLRNKLVHHGATKYDGYRLTYLGYDFLAIKTLVNRGVFASVGRQIGVGKESDIFEVATDDGTVLAMKLHRLGRTSFRAVKSKRDYLRHRRSFNWLYLSRLAALKEFAFMKALGDHGFPVPTAVDCNRHCVIMSLVQGYPLVQVKKLQNPDDVFDSILGLIVRLAEHGLIHCDFNEFNIMIDDDEKITVIDFPQMVSVSHRNAQMFFDRDIECIYKFFNKRFNLRSVKNEEQAGSENDDEGNSRPSFLSVEKGAGSLDKELAASGFTRKEKVDMDKYIEEVVEGHDSSSDDDNDEDSSDEPDCDLTPSDSDAPGTFSEEHGTSCSGENRLEIPPSDGNGVVMAPLESGIKTFSMEDDDNDDGSSEDADEEEDAELTKQLNKQRRKAIAAAHGRRRPTSSRNAYKDKGKGTMNSKMQRQACNW

SEQ ID NO: 109016 - DNA, 534 bp, Zea mays subsp. mays
  misc_feature (1)..(534): Ceres Seq. ID no. 12637673
cacattggatggatacgaacacacaacttattctcagcgaagtttcccaatctatcgtgggcaaccatttcagcagtacaacaacatgacttccagttacatccgaccgatgagggctcatcacaatggtcagcctgtctggtctaattataggctgacagaacctccaccaactacaatgggtgacggaatgctctggggagggaggggtggccattcgtttgcagcgagcggactgccacctacacttaggaaagattttgggagaatcttttagtcctgaatccggaggaatgccgaatgccaccaaattgatggcatcagttgtttgcatctgcaattccgggttggattatttgctgggggtgcctactggtattgcaatttgttgtgttcctccgatgtctcccaggatgttcggttcaaatgattatatggtacgggatatgattacagtgctcgttctttgctatacctgcacgatctagtagaaaaatgtcagttgtgctacttgatgcgaatcttgctagttcg

SEQ ID NO: 109017 - protein, 91 aa, Zea mays subsp. mays
  misc_feature (1)..(91): Ceres Seq. ID no. 12637674
  misc_feature (4)..(91): Homolog of NCBI NO: 38344150 NR Description: OSJNBa0041A02.17 [Oryza sativa (japonica
TLDGYEHTTYSQRSFPIYRGQPFQQYNNMTSSYIRPMRAHHNGQPVWSNYRLTEPPPTTMGDGMLWGGRGGHSFAASGLPPTLRKDFGRIF

SEQ ID NO: 109018 - protein, 64 aa, Zea mays subsp. mays
  misc_feature (1)..(64): Ceres Seq. ID no. 12637675
MPNATKLMASVVCICNSGLDYLLGVPTGIAICCVPPMSPRMFGSNDYMVRDMITVLVLCYTCTI

SEQ ID NO: 109019 - protein, 63 aa, Zea mays subsp. mays
  misc_feature (1)..(63): Ceres Seq. ID no. 12637676
  misc_feature (1)..(63): Homolog of NCBI NO: 38344150 NR Description: OSJNBa0041A02.17 [Oryza sativa (japonica
MTSSYIRPMRAHHNGQPVWSNYRLTEPPPTTMGDGMLWGGRGGHSFAASGLPPTLRKDFGRIF

SEQ ID NO: 109020 - DNA, 555 bp, Zea mays subsp. mays
  misc_feature (1)..(555): Ceres Seq. ID no. 12594507
attccgttccaacttccaaggtccgagggctccagaaaccggcaaggggatcgaagcggagagcaagggagcggtcgagcgggtgacatcatcgtcatccagggtttctcaatcggcagcgatggcgaccagggcggcggcgaggttcctgcagcgcaggtttctgtcttccggcggcaaggtcctcagcgaggaggagaaggccgccgagaacgtgtacatcaagaaagtggaacaagagaagctggagaagctcgcacgcaaggtatgcaaatacacaatatctctaagcattgaattgggcagcattcttttatgttcgatccagtgttgtcgtaaacgaccctgtaatctgtttacacactgtgtaaactacacggtcactagctgtttccattcaatcatcgtttatcctgttttacttggtcgtgtatcctaaattaatgctaaagataggtgcccaagtattaaccattttaagtttagtctgtcgttggataataagctaaacatggactaattttttttttttttttgtaatgagttctactcatc

SEQ ID NO: 109021 - protein, 145 aa, Zea mays subsp. mays
  misc_feature (1)..(145): Ceres Seq. ID no. 12594508
  misc_feature (41)..(88): Homolog of NCBI NO: 21592886 NR Description: F1F0-ATPase inhibitor protein [Arabidopsis
  misc_feature (41)..(88): Homolog of NCBI NO: 18401511 NR Description: expressed protein
  misc_feature (37)..(88): Homolog of NCBI NO: 5821432 NR Description: F1F0-ATPase inhibitor protein
FRSNFQGPRAPETGKGIEAESKGAVERVTSSSSRVSQSAAMATRAAARFLQRRFLSSGGKVLSEEEKAAENVYIKKVEQEKLEKLARKVCKYTISLSIELGSILLCSIQCCRKRPCNLFTHCVNYTVTSCFHSIIVYPVLLGRVS

SEQ ID NO: 109022 - protein, 105 aa, Zea mays subsp. mays
  misc_feature (1)..(105): Ceres Seq. ID no. 12594509
  misc_feature (1)..(48): Homolog of NCBI NO: 21592886 NR Description: F1F0-ATPase inhibitor protein [Arabidopsis
  misc_feature (1)..(48): Homolog of NCBI NO: 18401511 NR Description: expressed protein
  misc_feature (1)..(48): Homolog of NCBI NO: 5821432 NR Description: F1F0-ATPase inhibitor protein
MATRAAARFLQRRFLSSGGKVLSEEEKAAENVYIKKVEQEKLEKLARKVCKYTISLSIELGSILLCSIQCCRKRPCNLFTHCVNYTVTSCFHSIIVYPVLLGRVS

SEQ ID NO: 109023 - protein, 98 aa, Zea mays subsp. mays
  misc_feature (1)..(98): Ceres Seq. ID no. 12594510
IPFQLPRSEGSRNRQGDRSGEQGSGRAGDIIVIQGFSIGSDGDQGGGEVPAAQVSVFRRQGPQRGGEGRRERVHQESGTREAGEARTQGMQIHNISKH

SEQ ID NO: 109024 - DNA, 687 bp, Zea mays subsp. mays
  misc_feature (1)..(687): Ceres Seq. ID no. 13600072
agactcatcatcagttcaattcaatccaatccaatccaatcccaccccgccccttccaagaactctagtatcaaccaaccgtccaacaaaagcaggagtcgcatccgaccccccgcatcagagacaggcagggagggaaccgagatccgtccgtccgtgtcgatggagtcaacggtggagcggataagctcgtcggtgcagtcctgggtgaaggaccacgagctcgcagccatcggaggcgtgtgggctgcggcggtgggcacttcggtggcgtacagccggaggaaggcgccgcagcggggcacgggcctgcgcctcatccacgccaggatgcacgcgcaggcgctcacgctcgccgtcctcggcggcgccgccctcttccactactacggcgacggcgggcgcaggaagagggccgacgacatcgacctcgacttctactcgcagctgccgccggccaccgacgccgacggcaacgagaaccagcggtggagctggtaggaggagaaggaagaactgtagcagactagcagtgggtgcttgcagcaataataattgaggtggggccctatgacgtggcgggcgggagggattagtctgtgctaatcctaatccatccagctcagacaagacgacgggcggcccgtttacttaacattatcggtccatgctgtcatggccggcacc

SEQ ID NO: 109025 - protein, 166 aa, Zea mays subsp. mays
  misc_feature (1)..(166): Ceres Seq. ID no. 13600073
  misc_feature (66)..(126): Pfam Name: Hypoxia induced protein conserved region Pfam Description: Hypoxia induced protein conserved region
  misc_feature (59)..(99): Homolog of NCBI NO: 3282394 NR Description: anaerobically inducible early gene 2 [Oryza
  misc_feature (66)..(130): Homolog of NCBI NO: 15230007 NR Description: hypothetical protein [Arabidopsis thaliana]
  misc_feature (64)..(130): Homolog of NCBI NO: 15241035 NR Description: expressed protein [Arabidopsis thaliana]
RLIISSIQSNPIQSHPAPSKNSSINQPSNKSRSRIRPPASETGREGTEIRPSVSMESTVERISSSVQSWVKDHELAAIGGVWAAAVGTSVAYSRRKAPQRGTGLRLIHARMHAQALTLAVLGGAALFHYYGDGGRRKRADDIDLDFYSQLPPATDADGNENQRWSW

SEQ ID NO: 109026 - protein, 112 aa, Zea mays subsp. mays
  misc_feature (1)..(112): Ceres Seq. ID no. 13600074
  misc_feature (12)..(72): Pfam Name: Hypoxia induced protein conserved region Pfam Description: Hypoxia induced protein conserved region
  misc_feature (5)..(45): Homolog of NCBI NO: 3282394 NR Description: anaerobically inducible early gene 2 [Oryza
  misc_feature (12)..(76): Homolog of NCBI NO: 15230007 NR Description: hypothetical protein [Arabidopsis thaliana]
  misc_feature (10)..(76): Homolog of NCBI NO: 15241035 NR Description: expressed protein [Arabidopsis thaliana]
MESTVERISSSVQSWVKDHELAAIGGVWAAAVGTSVAYSRRKAPQRGTGLRLIHARMHAQALTLAVLGGAALFHYYGDGGRRKRADDIDLDFYSQLPPATDADGNENQRWSW

SEQ ID NO: 109027 - DNA, 1372 bp, Zea mays subsp. mays
  misc_feature (1)..(1372): Ceres Seq. ID no. 13600370
aacagtagctgccctgcctgactcctgcctccagcatgtccgacctgtcaaggactgttcctcaggagcagctcgtgtcccaggacctgctgcacctctcgccaacgcccgtgatcaaccttggccacctcagccttgatgattccgtgacgcgatctggcgtgatcaaccaaatcgccagagcatgccatgatctaggatacttccaggttacaaaccatgggatcagtcaatccgtcatggattgtgctgttgaagcagcttcagatttcttccaactaccaagtgaggcaaaggaacagttcgcatcacaggacctccgcaaacctgttagatatgacaccagctctaaagatagcattagcatgtcacgggcattcctaaagcattatgcccatccgcccagagactggattcagtattggccagacaaaccaccaatctacagggaatacatgggaaagtatgctgttgaagtaaggagggtggctttgcatctgatgcaggcaatactagaaggcctaggattgggcaaggaatacatgaacgagaaatttcagcaaggctcacaactactgtcagtgaactgctatcctaaagcatcacaagacgccatgactatagggctggctccacactctgattatggatttcttaccatcttgctcacaagttgccagggcctccaagtcgttgaccgcagcagcgacgacagctggaaaacggtccagcaacttccgcatgcgttgcatgtccatgtaggagaccacatggaagtcctgagcaatggtcaaatcaaaacagttgtgcaccgtgctgttttgaatcccgaagaagcaaggatttctatagcaagcattcatggttttgagctacatgagaaggtcgcctgtgctaaggagcttgtggatgaacaaaatcccccaaaatacaaagagagcagctttactgacttcctcgaccatctcacagctaatatggacaacaagaacaggaattttcttgaaagcctcagaatgtaaggactacaagccctaatttggtacaaccttaactacaagtccaaaaggtggtaagacaacatcctatatatgtstactttagagttcagactaatgctctaaacttctatgtccttgttgctttgataaagaggtgctaattaacttcgtcatattggggatatgtagttctggtataaaattttaaaccatccaatcatgcaggttaactggtgcgttgatatttgagaaagcagatcgagctaaggtttactgtcacatgttgaactgaagtgtccatgtatttttttttaacgaaatgaagtgtccatgtaatcttcaataaagccctatatgtgtctggtggtgcc

SEQ ID NO: 109028 - protein, 328 aa, Zea mays subsp. mays
  misc_feature (1)..(328): Ceres Seq. ID no. 15218923
  misc_feature (177)..(278): Pfam Name: 2OG-Fe(II) oxygenase superfamily Pfam Description: 2OG-Fe(II) oxygenase superfamily
  misc_feature (43)..(319): Homolog of NCBI NO: 38345872 NR Description: OSJNBa0064M23.14 [Oryza sativa (japonica
  misc_feature (9)..(319): Homolog of NCBI NO: 37536444 NR Description: unknown protein [Oryza sativa (japonica
  misc_feature (25)..(100): Homolog of NCBI NO: 15232291 NR Description: oxidoreductase, 2OG-Fe(II) oxygenase family
  misc_feature (135)..(327): Homolog of NCBI NO: 15232291 NR Description: oxidoreductase, 2OG-Fe(II) oxygenase family
  misc_feature (55)..(328): Homolog of NCBI NO: 15228020 NR Description: oxidoreductase, 2OG-Fe(II) oxygenase family
  misc_feature (25)..(327): Homolog of NCBI NO: 30689834 NR Description: flavonol synthase family [Arabidopsis thaliana]
  misc_feature (25)..(327): Homolog of NCBI NO: 7433240 NR Description: probable flavonol synthase [imported] -
  misc_feature (59)..(328): Homolog of NCBI NO: 15240797 NR Description: oxidoreductase, 2OG-Fe(II) oxygenase family
  misc_feature (23)..(328): Homolog of NCBI NO: 32488372 NR Description: OSJNBa0043A12.2 [Oryza sativa (japonica
  misc_feature (1)..(328): Homolog of NCBI NO: 32488371 NR Description: OSJNBa0043A12.1 [Oryza sativa (japonica
MSDLSRTVPQEQLVSQDLLHLSPTPVINLGHLSLDDSVTRSGVINQIARACHDLGYFQVTNHGISQSVMDCAVEAASDFFQLPSEAKEQFASQDLRKPVRYDTSSKDSISMSRAFLKHYAHPPRDWIQYWPDKPPIYREYMGKYAVEVRRVALHLMQAILEGLGLGKEYMNEKFQQGSQLLSVNCYPKASQDAMTIGLAPHSDYGFLTILLTSCQGLQVVDRSSDDSWKTVQQLPHALHVHVGDHMEVLSNGQIKTVVHRAVLNPEEARISIASIHGFELHEKVACAKELVDEQNPPKYKESSFTDFLDHLTANMDNKNRNFLESLRM

SEQ ID NO: 109029 - protein, 260 aa, Zea mays subsp. mays
  misc_feature (1)..(260): Ceres Seq. ID no. 15218924
  misc_feature (109)..(210): Pfam Name: 2OG-Fe(II) oxygenase superfamily Pfam Description: 2OG-Fe(II) oxygenase superfamily
  misc_feature (1)..(251): Homolog of NCBI NO: 38345872 NR Description: OSJNBa0064M23.14 [Oryza sativa (japonica
  misc_feature (1)..(251): Homolog of NCBI NO: 37536444 NR Description: unknown protein [Oryza sativa (japonica
  misc_feature (1)..(32): Homolog of NCBI NO: 15232291 NR Description: oxidoreductase, 2OG-Fe(II) oxygenase family
  misc_feature (67)..(259): Homolog of NCBI NO: 15232291 NR Description: oxidoreductase, 2OG-Fe(II) oxygenase family
  misc_feature (1)..(260): Homolog of NCBI NO: 15228020 NR Description: oxidoreductase, 2OG-Fe(II) oxygenase family
  misc_feature (1)..(259): Homolog of NCBI NO: 30689834 NR Description: flavonol synthase family [Arabidopsis thaliana]
  misc_feature (1)..(259): Homolog of NCBI NO: 7433240 NR Description: probable flavonol synthase [imported] -
  misc_feature (1)..(260): Homolog of NCBI NO: 15240797 NR Description: oxidoreductase, 2OG-Fe(II) oxygenase family
  misc_feature (1)..(260): Homolog of NCBI NO: 32488372 NR Description: OSJNBa0043A12.2 [Oryza sativa (japonica
  misc_feature (1)..(260): Homolog of NCBI NO: 32488371 NR Description: OSJNBa0043A12.1 [Oryza sativa (japonica
MDCAVEAASDFFQLPSEAKEQFASQDLRKPVRYDTSSKDSISMSRAFLKHYAHPPRDWIQYWPDKPPIYREYMGKYAVEVRRVALHLMQAILEGLGLGKEYMNEKFQQGSQLLSVNCYPKASQDAMTIGLAPHSDYGFLTILLTSCQGLQVVDRSSDDSWKTVQQLPHALHVHVGDHMEVLSNGQIKTVVHRAVLNPEEARISIASIHGFELHEKVACAKELVDEQNPPKYKESSFTDFLDHLTANMDNKNRNFLESLRM

SEQ ID NO: 109030 - protein, 218 aa, Zea mays subsp. mays
  misc_feature (1)..(218): Ceres Seq. ID no. 15218925
  misc_feature (67)..(168): Pfam Name: 2OG-Fe(II) oxygenase superfamily Pfam Description: 2OG-Fe(II) oxygenase superfamily
  misc_feature (1)..(215): Homolog of NCBI NO: 15238567 NR Description: oxidoreductase, 2OG-Fe(II) oxygenase family
  misc_feature (1)..(209): Homolog of NCBI NO: 38345872 NR Description: OSJNBa0064M23.14 [Oryza sativa (japonica
  misc_feature (1)..(209): Homolog of NCBI NO: 37536444 NR Description: unknown protein [Oryza sativa (japonica
  misc_feature (25)..(217): Homolog of NCBI NO: 15232291 NR Description: oxidoreductase, 2OG-Fe(II) oxygenase family
  misc_feature (1)..(218): Homolog of NCBI NO: 15228020 NR Description: oxidoreductase, 2OG-Fe(II) oxygenase family
  misc_feature (1)..(217): Homolog of NCBI NO: 30689834 NR Description: flavonol synthase family [Arabidopsis thaliana]
  misc_feature (1)..(217): Homolog of NCBI NO: 7433240 NR Description: probable flavonol synthase [imported] -
  misc_feature (1)..(218): Homolog of NCBI NO: 15240797 NR Description: oxidoreductase, 2OG-Fe(II) oxygenase family
  misc_feature (1)..(218): Homolog of NCBI NO: 32488372 NR Description: OSJNBa0043A12.2 [Oryza sativa (japonica
  misc_feature (1)..(218): Homolog of NCBI NO: 32488371 NR Description: OSJNBa0043A12.1 [Oryza sativa (japonica
MSRAFLKHYAHPPRDWIQYWPDKPPIYREYMGKYAVEVRRVALHLMQAILEGLGLGKEYMNEKFQQGSQLLSVNCYPKASQDAMTIGLAPHSDYGFLTILLTSCQGLQVVDRSSDDSWKTVQQLPHALHVHVGDHMEVLSNGQIKTVVHRAVLNPEEARISIASIHGFELHEKVACAKELVDEQNPPKYKESSFTDFLDHLTANMDNKNRNFLESLRM

SEQ ID NO: 109031 - DNA, 696 bp, Zea mays subsp. mays
  misc_feature (1)..(696): Ceres Seq. ID no. 13623723
taatccaaaactgatcccctctgtttctgctgacccaccaaaaccctaatggcttcccgcctcctccacctgcgccgcctcctcccggccgcgcgcccgtcatgcgccgccgcgttctccaccgccgtcaccccgaccccgcaggtctccggtctcgtcgacgagatctgcggcctcaacctcatcgaggcctcctccctcgccgatgcgctgcgcggccgcctcggcgtcgaccagctccctcccctagccatcctcatgggcggcgcagccccgctggccggagatgctgccggggccggcgaggaggcgaaacccaaggaggaaaaaatggcgttcgacgtgaagctggaggggttcgacgccgcggcgaagctcaagattatcaaggagctgagggcgatcacgagtttgggcctgaaggaggccaaggagctcgtggagaaggcgccggccgtgctcaaggccggggttcccaaggaggaggcggagagcatcgccgagaagatgcgggcactgggcgccaagattgttctcgagtgagaggacgagatctctgtatgcctttgcttcttgatttcttcctgtttattgtacgaaggaattagagaaattttggtactaaggagtcaataattgacgagactgactctagatatcctctcgttgatagtggaaatggcagttgagcttttg

SEQ ID NO: 109032 - protein, 168 aa, Zea mays subsp. mays
  misc_feature (1)..(168): Ceres Seq. ID no. 13623724
  misc_feature (58)..(117): Pfam Name: Collagen triple helix repeat (20 copies) Pfam Description: Collagen triple helix repeat (20 copies)
  misc_feature (39)..(146): Homolog of NCBI NO: 93144 NR Description: hypothetical protein - suid herpesvirus 1 (strain
  misc_feature (39)..(143): Homolog of NCBI NO: 465445 NR Description: PROBABLE NUCLEAR ANTIGEN
MRRRVLHRRHPDPAGLRSRRRDLRPQPHRGLLPRRCAARPPRRRPAPSPSHPHGRRSPAGRRCCRGRRGGETQGGKNGVRREAGGVRRRGEAQDYQGAEGDHEFGPEGGQGARGEGAGRAQGRGSQGGGGEHRREDAGTGRQDCSRVRGRDLCMPLLLDFFLFIVRRN

SEQ ID NO: 109033 - protein, 164 aa, Zea mays subsp. mays
  misc_feature (1)..(164): Ceres Seq. ID no. 13623725
  misc_feature (97)..(164): Pfam Name: Ribosomal protein L7/L12 C-terminal domain Pfam Description: Ribosomal protein L7/L12 C-terminal domain
  misc_feature (1)..(164): Homolog of NCBI NO: 19075581 NR Description: putative 60s ribosomal protein l7/l12
  misc_feature (33)..(163): Homolog of NCBI NO: 730573 NR Description: 50S ribosomal protein L7/L12
  misc_feature (17)..(164): Homolog of NCBI NO: 15230614 NR Description: expressed protein [Arabidopsis thaliana]
  misc_feature (24)..(164): Homolog of NCBI NO: 32411687 NR Description: hypothetical protein [Neurospora crassa]
  misc_feature (1)..(164): Homolog of NCBI NO: 15235649 NR Description: ribosomal - like protein [Arabidopsis thaliana]
  misc_feature (26)..(164): Homolog of NCBI NO: 40745733 NR Description: hypothetical protein AN2057.2 [Aspergillus
  misc_feature (42)..(164): Homolog of NCBI NO: 15209174 NR Description: hypothetical protein [Solanum demissum]
  misc_feature (8)..(164): Homolog of NCBI NO: 34913132 NR Description: contains EST AU058363(E50673)~ribosomal-like
  misc_feature (29)..(164): Homolog of NCBI NO: 18409467 NR Description: expressed protein [Arabidopsis thaliana]
  misc_feature (22)..(164): Homolog of NCBI NO: 15234393 NR Description: ribosomal protein [Arabidopsis thaliana]
MASRLLHLRRLLPAARPSCAAAFSTAVTPTPQVSGLVDEICGLNLIEASSLADALRGRLGVDQLPPLAILMGGAAPLAGDAAGAGEEAKPKEEKMAFDVKLEGFDAAAKLKIIKELRAITSLGLKEAKELVEKAPAVLKAGVPKEEAESIAEKMRALGAKIVLE

SEQ ID NO: 109034 - protein, 94 aa, Zea mays subsp. mays
  misc_feature (1)..(94): Ceres Seq. ID no. 13623726
  misc_feature (27)..(94): Pfam Name: Ribosomal protein L7/L12 C-terminal domain Pfam Description: Ribosomal protein L7/L12 C-terminal domain
  misc_feature (1)..(94): Homolog of NCBI NO: 19075581 NR Description: putative 60s ribosomal protein l7/l12
  misc_feature (1)..(93): Homolog of NCBI NO: 730573 NR Description: 50S ribosomal protein L7/L12
  misc_feature (1)..(94): Homolog of NCBI NO: 15230614 NR Description: expressed protein [Arabidopsis thaliana]
  misc_feature (1)..(94): Homolog of NCBI NO: 32411687 NR Description: hypothetical protein [Neurospora crassa]
  misc_feature (1)..(94): Homolog of NCBI NO: 15235649 NR Description: ribosomal - like protein [Arabidopsis thaliana]
  misc_feature (1)..(94): Homolog of NCBI NO: 40745733 NR Description: hypothetical protein AN2057.2 [Aspergillus
  misc_feature (1)..(94): Homolog of NCBI NO: 15209174 NR Description: hypothetical protein [Solanum demissum]
  misc_feature (1)..(94): Homolog of NCBI NO: 34913132 NR Description: contains EST AU058363(E50673)~ribosomal-like
  misc_feature (1)..(94): Homolog of NCBI NO: 18409467 NR Description: expressed protein [Arabidopsis thaliana]
  misc_feature (1)..(94): Homolog of NCBI NO: 15234393 NR Description: ribosomal protein [Arabidopsis thaliana]
MGGAAPLAGDAAGAGEEAKPKEEKMAFDVKLEGFDAAAKLKIIKELRAITSLGLKEAKELVEKAPAVLKAGVPKEEAESIAEKMRALGAKIVLE

SEQ ID NO: 109035 - DNA, 761 bp, Zea mays subsp. mays
  misc_feature (1)..(761): Ceres Seq. ID no. 13600371
ccatcccagccagccgtcaaagcacgacacatccaggtccaagcaaagcatccccagcccagccgagaccgcgtgcgctccacgcagcatccgccgcagcagccgcccagagaagtcgccgccggagaagggggaggatgtcgtggcagacgtacgtcgacgaccacctgtgctgcgagatcgacggccagcacctcacctccgccgccatcctcggccacgacggcagcgtctgggccgagtcccccaacttccccaagttcaagcctgaggagattgctggcatcgttaaagactttgaagaacctggacaccttgcaccaactggtcttttccttggaggcacaaagtacatggtcatccaaggtgaacctggggttgtcatccgaggaaagaagggcaccggtggcattactatcaagaagaccggcatggccctgattcttggtatctacgatgagcccatgactcctggccagtgcaatttggtcgtggagaggctcggcgactacctggtcgagcagggtttctaagcccgccctgatatgctgttattttggtcgtctgggactaagtttgctctactgtgggctttgcatccatctgcttggcgtaccgcatgatatatgcagtgaataattttagcttggggtttgtcggttggtgatgtgtcgaaggggaaaaatggatttactatgttttctttttaatgtttggcatcgcgtcgtatcaaactcagccgctctttcgctgagtaatgt

SEQ ID NO: 109036 - protein, 176 aa, Zea mays subsp. mays
  misc_feature (1)..(176): Ceres Seq. ID no. 15218926
  misc_feature (47)..(171): Pfam Name: Profilin Pfam Description: Profilin
  misc_feature (46)..(175): Homolog of NCBI NO: 464471 NR Description: PROFILIN 1 (POLLEN ALLERGEN PHL P 11) (PHL P XI)
  misc_feature (46)..(175): Homolog of NCBI NO: 464466 NR Description: Profilin 1 (ZmPRO1)
  misc_feature (46)..(175): Homolog of NCBI NO: 3914432 NR Description: PROFILIN 2/4 (POLLEN ALLERGEN PHL P 11) (PHL P
  misc_feature (46)..(176): Homolog of NCBI NO: 14161637 NR Description: profilin [Ananas comosus]
  misc_feature (46)..(176): Homolog of NCBI NO: 3914423 NR Description: Profilin 4 (ZmPRO4)
  misc_feature (46)..(176): Homolog of NCBI NO: 14423853 NR Description: Profilin 5 (ZmPRO5)
  misc_feature (46)..(176): Homolog of NCBI NO: 1346806 NR Description: Profilin 3
  misc_feature (46)..(176): Homolog of NCBI NO: 1709779 NR Description: Profilin 1
  misc_feature (46)..(176): Homolog of NCBI NO: 1346804 NR Description: Profilin 2
  misc_feature (46)..(176): Homolog of NCBI NO: 1346803 NR Description: Profilin 1
IPASRQSTTHPGPSKASPAQPRPRALHAASAAAAAQRSRRRRRGRMSWQTYVDDHLCCEIDGQHLTSAAILGHDGSVWAESPNFPKFKPEEIAGIVKDFEEPGHLAPTGLFLGGTKYMVIQGEPGVVIRGKKGTGGITIKKTGMALILGIYDEPMTPGQCNLVVERLGDYLVEQGF

SEQ ID NO: 109037 - protein, 146 aa, Zea mays subsp. mays
  misc_feature (1)..(146): Ceres Seq. ID no. 15218927
PSQPAVKARHIQVQAKHPQPSRDRVRSTQHPPQQPPREVAAGEGGGCRGRRTSTTTCAARSTASTSPPPPSSATTAASGPSPPTSPSSSLRRLLASLKTLKNLDTLHQLVFSLEAQSTWSSKVNLGLSSEERRAPVALLSRRPAWP

SEQ ID NO: 109038 - protein, 131 aa, Zea mays subsp. mays
  misc_feature (1)..(131): Ceres Seq. ID no. 15218928
  misc_feature (2)..(126): Pfam Name: Profilin Pfam Description: Profilin
  misc_feature (1)..(130): Homolog of NCBI NO: 464466 NR Description: Profilin 1 (ZmPRO1)
  misc_feature (1)..(130): Homolog of NCBI NO: 3914432 NR Description: PROFILIN 2/4 (POLLEN ALLERGEN PHL P 11) (PHL P
  misc_feature (1)..(131): Homolog of NCBI NO: 14161637 NR Description: profilin [Ananas comosus]
  misc_feature (1)..(131): Homolog of NCBI NO: 3914423 NR Description: Profilin 4 (ZmPRO4)
  misc_feature (1)..(131): Homolog of NCBI NO: 14423853 NR Description: Profilin 5 (ZmPRO5)
  misc_feature (1)..(130): Homolog of NCBI NO: 464471 NR Description: PROFILIN 1 (POLLEN ALLERGEN PHL P 11) (PHL P XI)
  misc_feature (1)..(131): Homolog of NCBI NO: 1346806 NR Description: Profilin 3
  misc_feature (1)..(131): Homolog of NCBI NO: 1709779 NR Description: Profilin 1
  misc_feature (1)..(131): Homolog of NCBI NO: 1346804 NR Description: Profilin 2
  misc_feature (1)..(131): Homolog of NCBI NO: 1346803 NR Description: Profilin 1
MSWQTYVDDHLCCEIDGQHLTSAAILGHDGSVWAESPNFPKFKPEEIAGIVKDFEEPGHLAPTGLFLGGTKYMVIQGEPGVVIRGKKGTGGITIKKTGMALILGIYDEPMTPGQCNLVVERLGDYLVEQGF

SEQ ID NO: 109039 - DNA, 750 bp, Zea mays subsp. mays
  misc_feature (1)..(750): Ceres Seq. ID no. 12636818
agatggtgttatatgcttcttgccgtggtattgcttctaaaatctctcactaaatcagccagctcttctgcttgtccttattttgtttaatattccttgattgttatgatgagttgagaaggccgacacttgacggatgcagctatggcgtggtggaggtggagctcgtcttgcctgacagccccttcgcatcccccaccaaggaggaggcctcatgcgctgatgctgtcaccgctgcagccgctcggaatggcagcagcagcagccctcgccatgtggcttcaccgtcccttttcgcacccgcgtcttccaccaccctcgacctgcccccctacagctcctcctgcttctttcaggtgcccaggttttctcctgggcatgaagccattgggctgtgatgtgtgaggtgcacggagcaaaaaaagagggaggggacctccattcctctaatctgggagatggcccctaaagttatggagcaaaaggattacgatttcaaggcagatatttggttgtttggcattactgcacttgaacttgctattggccatgcaccattttctatccaacctccagcaaaggtttttctcatgacgttgcaacatgcccctccataacttcataacacaaaggagaagaagttttcagacgtatggtttcaaaaatattttctaagaaattaattgtgtgtgactattgaatcatttcttgtcttgtttgtagtcttttaagagtctgattgccacttgc

SEQ ID NO: 109040 - protein, 86 aa, Zea mays subsp. mays
  misc_feature (1)..(86): Ceres Seq. ID no. 12636819
MAWWRWSSSCLTAPSHPPPRRRPHALMLSPLQPLGMAAAAALAMWLHRPFSHPRLPPPSTCPPTAPPASFRCPGFLLGMKPLGCDV

SEQ ID NO: 109041 - protein, 60 aa, Zea mays subsp. mays
  misc_feature (1)..(60): Ceres Seq. ID no. 12636820
MLSPLQPLGMAAAAALAMWLHRPFSHPRLPPPSTCPPTAPPASFRCPGFLLGMKPLGCDV

SEQ ID NO: 109042 - protein, 52 aa, Zea mays subsp. mays
  misc_feature (1)..(52): Ceres Seq. ID no. 12636821
  misc_feature (1)..(52): Pfam Name: Protein kinase domain Pfam Description: Protein kinase domain
  misc_feature (1)..(52): Homolog of NCBI NO: 22328895 NR Description: putative protein
  misc_feature (1)..(52): Homolog of NCBI NO: 7487178 NR Description: hypothetical protein T19F6.90 - Arabidopsis
  misc_feature (1)..(52): Homolog of NCBI NO: 7486904 NR Description: hypothetical protein T12H20.4 - Arabidopsis
  misc_feature (1)..(52): Homolog of NCBI NO: 2262107 NR Description: Ser/Thr protein kinase isolog [Arabidopsis
  misc_feature (1)..(52): Homolog of NCBI NO: 37536118 NR Description: putative Ste20-related protein kinase
  misc_feature (1)..(52): Homolog of NCBI NO: 17998578 NR Description: putative Ste-20 related kinase, 3'-partial [Oryza
  misc_feature (1)..(52): Homolog of NCBI NO: 7485682 NR Description: hypothetical protein F17O7.3 - Arabidopsis
  misc_feature (1)..(52): Homolog of NCBI NO: 30685021 NR Description: protein kinase family [Arabidopsis thaliana]
  misc_feature (1)..(52): Homolog of NCBI NO: 17529280 NR Description: putative protein kinase [Arabidopsis thaliana]
  misc_feature (1)..(52): Homolog of NCBI NO: 11358725 NR Description: protein kinase-like protein - Arabidopsis
MAPKVMEQKDYDFKADIWLFGITALELAIGHAPFSIQPPAKVFLMTLQHAPP

SEQ ID NO: 109043 - DNA, 725 bp, Zea mays subsp. mays
  misc_feature (1)..(725): Ceres Seq. ID no. 13624255
aaaatttcgttcgaccattctatccacaaactccaaccatagcgtcgtgtactcgtgtaccagttgatgctgccactgcccacggcgggggcggtcgccgccgcaggggtagcggcgcccctcgggtcgcgtccgctccgcctcgtcgcgactcgagccaccactaccccttcttctcccactacttccacctcggccatatccaacgcgtcaccagcggggcattcccgcaaggacctgtcaggcagggacggcgccccgtcgaagcccaccaagccccgggtgttcttcctcgacgtcaatcctctatgcttccgcggctcccagcgcaacctcggggccttcgcgcgctggctggcgctcttcttcgcgcacgtcagcctccgtgaccctgtcgttgctgttttggacggcgatggagagaaagagaacgagtaccggaggcgggtgctgccttagtacaaggcgcatagggctcgcggcgttggcactggcgctgacacgcgcgtcgtcaacgttctctgcgaatgcaatgtccgggtgggtgcacatgtttaaactagtgcagccactcagttattcttagctcagactcagattattgagtgtcaattttggaaacggcaaattcaggttgtaagagtcgatggatatgaggctgatgatgtggtggctaccttgacagaacaggttctacagaaaggttacagagttttcaaagcctc

SEQ ID NO: 109044 - protein, 130 aa, Zea mays subsp. mays
  misc_feature (1)..(130): Ceres Seq. ID no. 13624256
  misc_feature (71)..(130): Pfam Name: 5'-3' exonuclease, N-terminal resolvase-like domain Pfam Description: 5'-3' exonuclease, N-terminal resolvase-like
  misc_feature (29)..(130): Homolog of NCBI NO: 15218609 NR Description: DNA polymerase type I -related [Arabidopsis
  misc_feature (5)..(130): Homolog of NCBI NO: 34907292 NR Description: putative DNA polymerase I
MLPLPTAGAVAAAGVAAPLGSRPLRLVATRATTTPSSPTTSTSAISNASPAGHSRKDLSGRDGAPSKPTKPRVFFLDVNPLCFRGSQRNLGAFARWLALFFAHVSLRDPVVAVLDGDGEKENEYRRRVLP

SEQ ID NO: 109045 - protein, 128 aa, Zea mays subsp. mays
  misc_feature (1)..(128): Ceres Seq. ID no. 13624257
NFVRPFYPQTPTIASCTRVPVDAATAHGGGGRRRRGSGAPRVASAPPRRDSSHHYPFFSHYFHLGHIQRVTSGAFPQGPVRQGRRPVEAHQAPGVLPRRQSSMLPRLPAQPRGLRALAGALLRARQPP

SEQ ID NO: 109046 - DNA, 902 bp, Zea mays subsp. mays
  misc_feature (1)..(902): Ceres Seq. ID no. 12637454
atcaacaacctctccgctttctccttcccgtctctctcctctggtcccgattcccttctccgagcttcctccctataaataaggcggcccgcggcggccatcaattcccgtcaccgcccaccgaggccgcgaattattcctccgccccgcccgccgcgaaaaccctagccgccgccgatcccatggccaccgcctccagccaggcgagcctcctcctccagaagcagctccgagatctcgcgaagcaccccgtcgatgggttttcagctgggctcgtcgacgacagcaacgtcttcgagtggcaggtcaccatcatcggcccgcccgagaccctatatgatggaggctatttcaatgcaattatgagcttcccacaaaattatccgaacagccctccaacagtcagattcacttctgaaatgtggcatcctaatgtttatccagatgggcgggtatgcatttctattcttcatccacctggtgatgatcccaacggatatgagctcgcgagtgagcgttggacaccagtccatacggttgagagtatagtattaagcatcatttcgatgctttctagtccaaatgatgaatcaccggcaaatattgaagcagctaaggactggagagagaagcaggatgagttcaagaagaaggtcaggcgcgccgtacggaaatcccaggaaatgctctgaataaaatgggagtactggggaagttagccatgccatttcaggtgtggagggttttgctgttgatctccaaatgtccatccgacactagcaatttcacttctcccctgtatattttccattagcctgtctcctgtggaggtcttggttttgactctgaaaacgcaacacatattctaagggtttggttgttgtaattgtgtggcttcggct

SEQ ID NO: 109047 - protein, 229 aa, Zea mays subsp. mays
  misc_feature (1)..(229): Ceres Seq. ID no. 12637455
  misc_feature (93)..(228): Homolog of NCBI NO: 18424219 NR Description: E2, ubiquitin-conjugating enzyme 7 (UBC7)
  misc_feature (64)..(229): Homolog of NCBI NO: 18410268 NR Description: E2, ubiquitin-conjugating enzyme 14 (UBC14)
  misc_feature (61)..(229): Homolog of NCBI NO: 136647 NR Description: Ubiquitin-conjugating enzyme E2-20 kDa
  misc_feature (65)..(228): Homolog of NCBI NO: 18408206 NR Description: E2, ubiquitin-conjugating enzyme 13 (UBC13)
  misc_feature (65)..(228): Homolog of NCBI NO: 31088843 NR Description: Ubiquitin-conjugating enzyme E2 7
  misc_feature (62)..(228): Homolog of NCBI NO: 28973769 NR Description: putative E2, ubiquitin-conjugating enzyme UBC7
  misc_feature (62)..(228): Homolog of NCBI NO: 19347846 NR Description: putative E2, ubiquitin-conjugating enzyme UBC7
  misc_feature (61)..(228): Homolog of NCBI NO: 7437988 NR Description: ubiquitin-conjugating enzyme - maize
  misc_feature (61)..(229): Homolog of NCBI NO: 7437989 NR Description: ubiquitin-conjugating enzyme E2 - maize
  misc_feature (61)..(229): Homolog of NCBI NO: 34908132 NR Description: putative Ubiquitin carrier protein UBC7
QQPLRFLLPVSLLWSRFPSPSFLPINKAARGGHQFPSPPTEAANYSSAPPAAKTLAAADPMATASSQASLLLQKQLRDLAKHPVDGFSAGLVDDSNVFEWQVTIIGPPETLYDGGYFNAIMSFPQNYPNSPPTVRFTSEMWHPNVYPDGRVCISILHPPGDDPNGYELASERWTPVHTVESIVLSIISMLSSPNDESPANIEAAKDWREKQDEFKKKVRRAVRKSQEML

SEQ ID NO: 109048 - protein, 169 aa, Zea mays subsp. mays; identical to SEQ ID NO: 51953
  misc_feature (1)..(169): Ceres Seq. ID no. 12637456
  misc_feature (33)..(168): Homolog of NCBI NO: 18424219 NR Description: E2, ubiquitin-conjugating enzyme 7 (UBC7)
  misc_feature (4)..(169): Homolog of NCBI NO: 18410268 NR Description: E2, ubiquitin-conjugating enzyme 14 (UBC14)
  misc_feature (1)..(169): Homolog of NCBI NO: 136647 NR Description: Ubiquitin-conjugating enzyme E2-20 kDa
  misc_feature (5)..(168): Homolog of NCBI NO: 18408206 NR Description: E2, ubiquitin-conjugating enzyme 13 (UBC13)
  misc_feature (5)..(168): Homolog of NCBI NO: 31088843 NR Description: Ubiquitin-conjugating enzyme E2 7
  misc_feature (2)..(168): Homolog of NCBI NO: 28973769 NR Description: putative E2, ubiquitin-conjugating enzyme UBC7
  misc_feature (2)..(168): Homolog of NCBI NO: 19347846 NR Description: putative E2, ubiquitin-conjugating enzyme UBC7
  misc_feature (1)..(168): Homolog of NCBI NO: 7437988 NR Description: ubiquitin-conjugating enzyme - maize
  misc_feature (1)..(169): Homolog of NCBI NO: 7437989 NR Description: ubiquitin-conjugating enzyme E2 - maize
  misc_feature (1)..(169): Homolog of NCBI NO: 34908132 NR Description: putative Ubiquitin carrier protein UBC7

SEQ ID NO: 109049 - DNA, 1290 bp, Zea mays subsp. mays
  misc_feature (1)..(1290): Ceres Seq. ID no. 13623732
acctagaacatcctaatcgaaaacagacctacttactcatccaccaatcatcagttcatcacagcacgaacgacatggctgctgctccggtggttgtgccgcgcatgaagctgggctcgcaggggctggaggtctcggcgcagggcctcggctgcatgggcatgtccgcggcctacggcgagcgcaagcccgaccaggacatgatcgcgctcctccgccacgccgtcgccgccggcgtcaccttcctcgacacctccgacatctacggcccccacaccaacgagctcttactcggcaaggcgctgcagggaggggtgagggagcaggtccaattggccacgaaatttggcatcacggccacctgggaggtccacggcgacccggcctacgtgcgggcggcgtgcgagggcagcctcgcccggctcggcgtcgactgcatcgacctctactaccagcaccgcatcgacaagaatgtccccgtggagatcacgatgggtgagatcaagaagttagtccaagaaggaaaagtgaaatacgtcgggttgtcggaggcctcggcgtcgacaataagaagggcacacgcagttcatcccatcaccgccgttcagctggagtggtctttgtggtcaagagatgtcgaagaagatataatcccaacttgcagagaacttggcattggaattgtagcttacagtccactaggcagaggttttctatccactggacctaaactagtggacacattaccagaagacgatttccgcaagaatctcccaagatttcaacccgagaacatgaagaagaatgcagagatattcgagcgcgtgagcgagatggctgcgaggaagggttgcacgtcgtctcagctcgtgctggcttgggttcaccaccagggaagcgatgtgtgccccatacccggcacgacgaaagttgagaatttcaaccagaacctgagagcattgtctgttgagctcacggctgaggagatggctgagctcgagtcctacgctgccatggatgcggtccaaggtgatcggtaccacaacacgttcctcaacacctggaaggactccgagaccccttccctgtcatcctggaaagccacttagttgggtatcatgggaatcaatcactatgctgatgcttcgtatcactggtttgaaatagttgcaaatcaaataatttcacgagcactccgtgcatggatggaatcatggaaccaccaattgtttactaatgtagcacaattcctgcccatgagtgttgaactttttattatgcctgcaaggt

SEQ ID NO: 109050 - protein, 368 aa, Zea mays subsp. mays
  misc_feature (1)..(368): Ceres Seq. ID no. 13623733
  misc_feature (32)..(367): Homolog of NCBI NO: 6562980 NR Description: auxin-induced atb2 [Arabidopsis thaliana]
  misc_feature (32)..(367): Homolog of NCBI NO: 30696459 NR Description: aldo/keto reductase family [Arabidopsis thaliana]
  misc_feature (32)..(368): Homolog of NCBI NO: 30696451 NR Description: aldo/keto reductase family [Arabidopsis thaliana]
  misc_feature (32)..(367): Homolog of NCBI NO: 7447933 NR Description: auxin-induced protein - common sunflower
  misc_feature (32)..(367): Homolog of NCBI NO: 18406861 NR Description: aldo/keto reductase family [Arabidopsis thaliana]
  misc_feature (32)..(367): Homolog of NCBI NO: 15219786 NR Description: aldo/keto reductase family [Arabidopsis thaliana]
  misc_feature (32)..(368): Homolog of NCBI NO: 30102704 NR Description: At1g60680 [Arabidopsis thaliana]
  misc_feature (28)..(367): Homolog of NCBI NO: 38344994 NR Description: OSJNBa0008A08.8 [Oryza sativa (japonica
  misc_feature (26)..(367): Homolog of NCBI NO: 38344997 NR Description: OSJNBa0008A08.11 [Oryza sativa (japonica
  misc_feature (26)..(367): Homolog of NCBI NO: 38345357 NR Description: OSJNBa0032I19.9 [Oryza sativa (japonica
LEHPNRKQTYLLIHQSSVHHSTNDMAAAPVVVPRMKLGSQGLEVSAQGLGCMGMSAAYGERKPDQDMIALLRHAVAAGVTFLDTSDIYGPHTNELLLGKALQGGVREQVQLATKFGITATWEVHGDPAYVRAACEGSLARLGVDCIDLYYQHRIDKNVPVEITMGEIKKLVQEGKVKYVGLSEASASTIRRAHAVHPITAVQLEWSLWSRDVEEDIIPTCRELGIGIVAYSPLGRGFLSTGPKLVDTLPEDDFRKNLPRFQPENMKKNAEIFERVSEMAARKGCTSSQLVLAWVHHQGSDVCPIPGTTKVENFNQNLRALSVELTAEEMAELESYAAMDAVQGDRYHNTFLNTWKDSETPSLSSWKAT

SEQ ID NO: 109051 - protein, 344 aa, Zea mays subsp. mays
  misc_feature (1)..(344): Ceres Seq. ID no. 13623734
  misc_feature (8)..(343): Homolog of NCBI NO: 6562980 NR Description: auxin-induced atb2 [Arabidopsis thaliana]
  misc_feature (8)..(343): Homolog of NCBI NO: 30696459 NR Description: aldo/keto reductase family [Arabidopsis thaliana]
  misc_feature (8)..(344): Homolog of NCBI NO: 30696451 NR Description: aldo/keto reductase family [Arabidopsis thaliana]
  misc_feature (8)..(343): Homolog of NCBI NO: 7447933 NR Description: auxin-induced protein - common sunflower
  misc_feature (8)..(343): Homolog of NCBI NO: 18406861 NR Description: aldo/keto reductase family [Arabidopsis thaliana]
  misc_feature (8)..(343): Homolog of NCBI NO: 15219786 NR Description: aldo/keto reductase family [Arabidopsis thaliana]
  misc_feature (8)..(344): Homolog of NCBI NO: 30102704 NR Description: At1g60680 [Arabidopsis thaliana]
  misc_feature (4)..(343): Homolog of NCBI NO: 38344994 NR Description: OSJNBa0008A08.8 [Oryza sativa (japonica
  misc_feature (2)..(343): Homolog of NCBI NO: 38344997 NR Description: OSJNBa0008A08.11 [Oryza sativa (japonica
  misc_feature (2)..(343): Homolog of NCBI NO: 38345357 NR Description: OSJNBa0032I19.9 [Oryza sativa (japonica
MAAAPVVVPRMKLGSQGLEVSAQGLGCMGMSAAYGERKPDQDMIALLRHAVAAGVTFLDTSDIYGPHTNELLLGKALQGGVREQVQLATKFGITATWEVHGDPAYVRAACEGSLARLGVDCIDLYYQHRIDKNVPVEITMGEIKKLVQEGKVKYVGLSEASASTIRRAHAVHPITAVQLEWSLWSRDVEEDIIPTCRELGIGIVAYSPLGRGFLSTGPKLVDTLPEDDFRKNLPRFQPENMKKNAEIFERVSEMAARKGCTSSQLVLAWVHHQGSDVCPIPGTTKVENFNQNLRALSVELTAEEMAELESYAAMDAVQGDRYHNTFLNTWKDSETPSLSSWKAT

SEQ ID NO: 109052 - protein, 334 aa, Zea mays subsp. mays
  misc_feature (1)..(334): Ceres Seq. ID no. 13623735
  misc_feature (1)..(333): Homolog of NCBI NO: 6562980 NR Description: auxin-induced atb2 [Arabidopsis thaliana]
  misc_feature (1)..(333): Homolog of NCBI NO: 30696459 NR Description: aldo/keto reductase family [Arabidopsis thaliana]
  misc_feature (1)..(334): Homolog of NCBI NO: 30696451 NR Description: aldo/keto reductase family [Arabidopsis thaliana]
  misc_feature (1)..(333): Homolog of NCBI NO: 7447933 NR Description: auxin-induced protein - common sunflower
  misc_feature (1)..(333): Homolog of NCBI NO: 18406861 NR Description: aldo/keto reductase family [Arabidopsis thaliana]
  misc_feature (1)..(333): Homolog of NCBI NO: 15219786 NR Description: aldo/keto reductase family [Arabidopsis thaliana]
  misc_feature (1)..(334): Homolog of NCBI NO: 30102704 NR Description: At1g60680 [Arabidopsis thaliana]
  misc_feature (1)..(333): Homolog of NCBI NO: 38344994 NR Description: OSJNBa0008A08.8 [Oryza sativa (japonica
  misc_feature (1)..(333): Homolog of NCBI NO: 38344997 NR Description: OSJNBa0008A08.11 [Oryza sativa (japonica
  misc_feature (1)..(333): Homolog of NCBI NO: 38345357 NR Description: OSJNBa0032I19.9 [Oryza sativa (japonica
MKLGSQGLEVSAQGLGCMGMSAAYGERKPDQDMIALLRHAVAAGVTFLDTSDIYGPHTNELLLGKALQGGVREQVQLATKFGITATWEVHGDPAYVRAACEGSLARLGVDCIDLYYQHRIDKNVPVEITMGEIKKLVQEGKVKYVGLSEASASTIRRAHAVHPITAVQLEWSLWSRDVEEDIIPTCRELGIGIVAYSPLGRGFLSTGPKLVDTLPEDDFRKNLPRFQPENMKKNAEIFERVSEMAARKGCTSSQLVLAWVHHQGSDVCPIPGTTKVENFNQNLRALSVELTAEEMAELESYAAMDAVQGDRYHNTFLNTWKDSETPSLSSWKAT

SEQ ID NO: 109053 - DNA, 1547 bp, Zea mays subsp. mays
  misc_feature (1)..(1547): Ceres Seq. ID no. 13623689
atataaatttggttaaatttgaattacttttgactcctcaaggaatgacttataataatttaggatggagggagtatttccatattactagagctcagactgacaaatttagactacagagttatcctaagaaattgagaaaccatatcaaaacataataactgaacaggtgcatactcaggcacttcctgacttaacactgacgctgcaacatgtctgacaccatgaacaactaaaaactcgacaccagatagataacaaaatcaagattcacctaccatgcttgagtaggtcatacaacatttgctggtaatcgatcatcagtgcacttaaataccataaaatagaattcttagatgatactcagctcagtccactgcatcactcagccaggtccatgagcgtcctggtcacttccttggtcaggtcgtggcgacgaagatgtaggttcatcagtgcacgcctctgcttcttgatcctctcgtccagtgtacgggccttgctgtcttcgatcatcccaaactcccgcttgaacaagcctgggtgtgccctctgaagcgccctcacctcctccgcaaggtatgggtacagctcacacatctcgtcaggctccctcccagcaccaccgttagccgacgccttggtaaccgccttggtaacaggcttggcattgctaacagaaggccagacgttcttgcagaggtcgaagagacggcgatcctgatccttgctcggtggcgcgcctttcttgaccgctttggcgtaccggctctgcaaactcctcaccttcctcttgagatcggagaggctgcagccactattgtcgagcttgccagcgagggcgtcggccagcacgtccgtttgaggcagcgcgccgtgctccaggcgttgagcagcgagggcctgcaggatgcggaagtggtcgtcaatcgaccaggtgcgctggaacggcgcgctcggccgctttgcacctttagcctacacctcttgatttggagcggggttcgtctgcggcatctcgtcgtgcgcctccctatccttttcttcgtcggaagcctcagaatcctcgccagtctgcggcggcggaggcgggttcttggtggcggaagaagggaccacgtggttggccttctcgtcctcttcgatatcctcctcttcgtcgtcttcatcctcatcggacgcttcgggttcctggaccttctgcggctcgtcatcttcatcgtcatactcatcctcgtcggacgcttcgggttcctggaccttctgcggcagcggagcaacgctcttgggagcgacgggaggcggtgagtgggcggtctccaaatcatcctcctcctcctcctcctcctcctcctcctcctcctcggagcccgaaccagaggcggtctcctcggaggaggcagccgggggcggaggcggcggaggtggagccgagcgcttgggggccatctccgccgctgcacctagggttagagatttggcaagctggtgaggcggcaccaagctagggttttcgcggcgtcgcggttttgttcatttttttatat

SEQ ID NO: 109054 - protein, 52 aa, Zea mays subsp. mays
  misc_feature (1)..(52): Ceres Seq. ID no. 13623690
  misc_feature (29)..(52): Homolog of NCBI NO: 13592175 NR Description: ppg3 [Leishmania major]
  misc_feature (29)..(52): Homolog of NCBI NO: 15901602 NR Description: cell wall surface anchor family protein
MSVLVTSLVRSWRRRCRFISARLCFLILSSSVRALLSSIIPNSRLNKPGCAL

SEQ ID NO: 109055 - protein, 51 aa, Zea mays subsp. mays
  misc_feature (1)..(51): Ceres Seq. ID no. 13623691
INLVKFELLLTPQGMTYNNLGWREYFHITRAQTDKFRLQSYPKKLRNHIKT

SEQ ID NO: 109056 - protein, 37 aa, Zea mays subsp. mays
  misc_feature (1)..(37): Ceres Seq. ID no. 13623692
MTYNNLGWREYFHITRAQTDKFRLQSYPKKLRNHIKT

SEQ ID NO: 109057 - DNA, 987 bp, Zea mays subsp. mays
  misc_feature (1)..(987): Ceres Seq. ID no. 13635585
aaaatcagtaattaatccgtcacctataatattttgagcattcagaaacacaccaagcgaagcacattagcaacaacctaacaacaatggctaccaagatattatccctccttgcgcttcttgcgctttttgcgagcgcaacaaatgcgttcattattccacaatgctcacttgctccaagttccattattacacagttcctcccaccagttacttcaatgggcttcgaacacccagctgtgcaagcctataggctacaacaagcaattgcggcgagcgtcttacaacaaccaatttcccagttgcaacaacaatccttggcacatctaacaatacaaaccatcgcaacgcaacagcaacaacagttcctaccagcactgagccacctagccatggtgaaccctgtcgcctacttgcaacagcagctgcttgcatccaacccacttgctctagcaaacgtagttgcaaaccagcaacaacaacagctgcaacagtttctgccagcgcttagtcaactagccatggtgaaccctgccgcctacctacaacagcaacaactgctttcatctagcccgctcgctgtggccaatgcacctacatacctgcaacaagaattgttgcaacagattgtaccagctctgactcagctagttgtggcaaaccctgttgcctacttgcaacagctgcttccattcaaccaactgactatgtcgaactctgctgcgtacctacaacagcgacaacagttacttaatccattggcagtggctaacccattggtcgctgccttcctacagcagcaacaattgctgccatacaaccagttctctttgataaaccctgtcttgtcgaggcagcaacccatcgttggaggtgccatcttttagattacatatgagatgtactcgataatggtgccctcattccggcatgtgtttcctagaaataatcaatatattgattgagatttatctcaatatatttctg

SEQ ID NO: 109058 - protein, 266 aa, Zea mays subsp. mays
  misc_feature (1)..(266): Ceres Seq. ID no. 13635586
  misc_feature (1)..(266): Pfam Name: Zein seed storage protein Pfam Description: Zein seed storage protein
  misc_feature (1)..(266): Homolog of NCBI NO: 13606091 NR Description: zp22/6 [Zea mays]
  misc_feature (1)..(266): Homolog of NCBI NO: 13606090 NR Description: azs22-10 [Zea mays]
  misc_feature (1)..(266): Homolog of NCBI NO: 468517 NR Description: zein [Zea mays]
  misc_feature (1)..(266): Homolog of NCBI NO: 100939 NR Description: zein precursor - maize
  misc_feature (1)..(266): Homolog of NCBI NO: 141615 NR Description: Zein-alpha precursor (22 kDa) (Clone PZ22.3)
  misc_feature (1)..(266): Homolog of NCBI NO: 13775591 NR Description: azs22-14 [Zea mays]
  misc_feature (1)..(266): Homolog of NCBI NO: 72307 NR Description: 22K zein precursor (clone pZ22.3) - maize
  misc_feature (1)..(266): Homolog of NCBI NO: 7442056 NR Description: 22K zein precursor (clone ZSF4C1) - maize
  misc_feature (1)..(266): Homolog of NCBI NO: 13606088 NR Description: azs22-4 [Zea mays]
  misc_feature (1)..(266): Homolog of NCBI NO: 7442059 NR Description: alpha zein 4, 22K - maize
MATKILSLLALLALFASATNAFIIPQCSLAPSSIITQFLPPVTSMGFEHPAVQAYRLQQAIAASVLQQPISQLQQQSLAHLTIQTIATQQQQQFLPALSHLAMVNPVAYLQQQLLASNPLALANVVANQQQQQLQQFLPALSQLAMVNPAAYLQQQQLLSSSPLAVANAPTYLQQELLQQIVPALTQLVVANPVAYLQQLLPFNQLTMSNSAAYLQQRQQLLNPLAVANPLVAAFLQQQQLLPYNQFSLINPVLSRQQPIVGGAIF

SEQ ID NO: 109059 - protein, 222 aa, Zea mays subsp. mays
  misc_feature (1)..(222): Ceres Seq. ID no. 13635587
  misc_feature (1)..(222): Pfam Name: Zein seed storage protein Pfam Description: Zein seed storage protein
  misc_feature (1)..(222): Homolog of NCBI NO: 13606091 NR Description: zp22/6 [Zea mays]
  misc_feature (1)..(222): Homolog of NCBI NO: 13606090 NR Description: azs22-10 [Zea mays]
  misc_feature (1)..(222): Homolog of NCBI NO: 468517 NR Description: zein [Zea mays]
  misc_feature (1)..(222): Homolog of NCBI NO: 100939 NR Description: zein precursor - maize
  misc_feature (1)..(222): Homolog of NCBI NO: 141615 NR Description: Zein-alpha precursor (22 kDa) (Clone PZ22.3)
  misc_feature (1)..(222): Homolog of NCBI NO: 13775591 NR Description: azs22-14 [Zea mays]
  misc_feature (1)..(222): Homolog of NCBI NO: 72307 NR Description: 22K zein precursor (clone pZ22.3) - maize
  misc_feature (1)..(222): Homolog of NCBI NO: 7442056 NR Description: 22K zein precursor (clone ZSF4C1) - maize
  misc_feature (1)..(222): Homolog of NCBI NO: 13606088 NR Description: azs22-4 [Zea mays]
  misc_feature (1)..(222): Homolog of NCBI NO: 7442059 NR Description: alpha zein 4, 22K - maize
MGFEHPAVQAYRLQQAIAASVLQQPISQLQQQSLAHLTIQTIATQQQQQFLPALSHLAMVNPVAYLQQQLLASNPLALANVVANQQQQQLQQFLPALSQLAMVNPAAYLQQQQLLSSSPLAVANAPTYLQQELLQQIVPALTQLVVANPVAYLQQLLPFNQLTMSNSAAYLQQRQQLLNPLAVANPLVAAFLQQQQLLPYNQFSLINPVLSRQQPIVGGAIF

SEQ ID NO: 109060 - protein, 164 aa, Zea mays subsp. mays
  misc_feature (1)..(164): Ceres Seq. ID no. 13635588
  misc_feature (1)..(164): Pfam Name: Zein seed storage protein Pfam Description: Zein seed storage protein
  misc_feature (1)..(164): Homolog of NCBI NO: 13606091 NR Description: zp22/6 [Zea mays]
  misc_feature (1)..(164): Homolog of NCBI NO: 13606090 NR Description: azs22-10 [Zea mays]
  misc_feature (1)..(164): Homolog of NCBI NO: 468517 NR Description: zein [Zea mays]
  misc_feature (1)..(164): Homolog of NCBI NO: 100939 NR Description: zein precursor - maize
  misc_feature (1)..(164): Homolog of NCBI NO: 141615 NR Description: Zein-alpha precursor (22 kDa) (Clone PZ22.3)
  misc_feature (1)..(164): Homolog of NCBI NO: 13775591 NR Description: azs22-14 [Zea mays]
  misc_feature (1)..(164): Homolog of NCBI NO: 72307 NR Description: 22K zein precursor (clone pZ22.3) - maize
  misc_feature (1)..(164): Homolog of NCBI NO: 7442056 NR Description: 22K zein precursor (clone ZSF4C1) - maize
  misc_feature (1)..(164): Homolog of NCBI NO: 13606088 NR Description: azs22-4 [Zea mays]
  misc_feature (1)..(164): Homolog of NCBI NO: 7442059 NR Description: alpha zein 4, 22K - maize
MVNPVAYLQQQLLASNPLALANVVANQQQQQLQQFLPALSQLAMVNPAAYLQQQQLLSSSPLAVANAPTYLQQELLQQIVPALTQLVVANPVAYLQQLLPFNQLTMSNSAAYLQQRQQLLNPLAVANPLVAAFLQQQQLLPYNQFSLINPVLSRQQPIVGGAIF

SEQ ID NO: 109061 - DNA, 1438 bp, Zea mays subsp. mays
  misc_feature (1)..(1438): Ceres Seq. ID no. 12783179
gaagccggacccctaatctgatgtgcacctgagttcgaagccgaattcacgactgcaattgcaaaaccctagctaccgcttcgccgaattccctgtcctccgcccgcttcgccgaattccctgtcctccgcccgcttcgccgaatttcctctcctccccgcccgccgcccgtcaccgcggcttcgtctgcgcttgtccctcccgttccaaggagcacgtgcttctcgccgcgccgttcgcccgccgccgccgccaccggttcatcgccagctatgtcttctcaggtcgacagccgcagccagtccgccgggaagcgcgcgcgcaccgacggcagccggcgtgaggacgactgggtttgccccagctgcaagaacgttaacttcgcctttcgcaccacttgcaacatgcgcaactgcaaccagtccaggccagcagatcacacggccatgcagaccccgcctcgctatcccacatcaggaggttacatgagcccagggacgccaccgtcgatgtaccttggtggtggtgctcccccatatggctcttcaatgtttaacgggcctgcaatgacgcgctatggtatcacacagttccctgggggttctgcgtatccatatggatatggtggccgcatatcaatggggagcccctacgggccaatgcaaatggctgggccaaccgcatactctggtggatctatgatgggagcaggtggaatgtatggaatgcccatggacaggtatgggctaatacctgctggttctggtccaatgggcacgagagctggctcatattctgatgaagattctcagaagaagtctgcaggagctggccgtgataatgattgggagtgtccaaattgccacaacatcaactttggcttccgcacagtctgtaatatgagaaagtgcaacacacctagacctgaaaaccagggatctaagcctgatggtttaagagggtcaaaaccaaagacaccagagggcagttggaagtgtgagcagtgcaataacataaactatcctttccgaacgaaatgcaatcgtccccaatgtggagcagaaaagccatcacagacgaacaatgcaaatgaatcagcggaagatcaggacaatcagtgagtcctagaacagtaatgagggtcaagaaggtccagcgtcgtcgtcaaggttcagtctgaatgtggggtacatctgtgtcagtagtcgccgttacaagtttcttccccttgagaacttagttgagtcggggccttggagttggcaatggagtcttgccttccttaatcactgcggataatggtcaagaacatcaatttgttatgtggtttgtcaagaacatccatcttgcctttcctggctgaacttggttacttgtctttgttactggtactctggataaattaccatatgttatatgaatgtcttttatatgtgtc

SEQ ID NO: 109062 - protein, 282 aa, Zea mays subsp. mays
  misc_feature (1)..(282): Ceres Seq. ID no. 12783180
  misc_feature (48)..(151): Pfam Name: Keratin Pfam Description: Keratin
  misc_feature (1)..(282): Homolog of NCBI NO: 27817857 NR Description: OJ1081_B12.5 [Oryza sativa (japonica
  misc_feature (109)..(223): Homolog of NCBI NO: 10177024 NR Description: gene_id:MQJ2.7~unknown protein [Arabidopsis
  misc_feature (123)..(225): Homolog of NCBI NO: 33604057 NR Description: Unknown (protein for IMAGE:6789697) [Danio rerio]
  misc_feature (6)..(54): Homolog of NCBI NO: 18698995 NR Description: p53 binding protein [Oryza sativa]
  misc_feature (70)..(227): Homolog of NCBI NO: 15029724 NR Description: Similar to fusion, derived from t(12;16)
  misc_feature (170)..(265): Homolog of NCBI NO: 15865325 NR Description: putative non-ribosomal nucleolar protein
  misc_feature (179)..(267): Homolog of NCBI NO: 18698995 NR Description: p53 binding protein [Oryza sativa]
  misc_feature (2)..(267): Homolog of NCBI NO: 33146999 NR Description: putative p53 binding protein
  misc_feature (45)..(281): Homolog of NCBI NO: 25404955 NR Description: protein F1N21.14 [imported] - Arabidopsis
  misc_feature (3)..(281): Homolog of NCBI NO: 22330480 NR Description: similar to RRM-containing RNA-binding protein,
MSSQVDSRSQSAGKRARTDGSRREDDWVCPSCKNVNFAFRTTCNMRNCNQSRPADHTAMQTPPRYPTSGGYMSPGTPPSMYLGGGAPPYGSSMFNGPAMTRYGITQFPGGSAYPYGYGGRISMGSPYGPMQMAGPTAYSGGSMMGAGGMYGMPMDRYGLIPAGSGPMGTRAGSYSDEDSQKKSAGAGRDNDWECPNCHNINFGFRTVCNMRKCNTPRPENQGSKPDGLRGSKPKTPEGSWKCEQCNNINYPFRTKCNRPQCGAEKPSQTNNANESAEDQDNQ

SEQ ID NO: 109063 - protein, 238 aa, Zea mays subsp. mays
  misc_feature (1)..(238): Ceres Seq. ID no. 12783181
  misc_feature (4)..(107): Pfam Name: Keratin Pfam Description: Keratin
  misc_feature (141)..(221): Homolog of NCBI NO: 15227939 NR Description: similar to putative zinc finger protein; protein
  misc_feature (65)..(179): Homolog of NCBI NO: 10177024 NR Description: gene_id:MQJ2.7~unknown protein [Arabidopsis
  misc_feature (79)..(181): Homolog of NCBI NO: 33604057 NR Description: Unknown (protein for IMAGE:6789697) [Danio rerio]
  misc_feature (26)..(183): Homolog of NCBI NO: 15029724 NR Description: Similar to fusion, derived from t(12;16)
  misc_feature (126)..(221): Homolog of NCBI NO: 15865325 NR Description: putative non-ribosomal nucleolar protein
  misc_feature (135)..(223): Homolog of NCBI NO: 18698995 NR Description: p53 binding protein [Oryza sativa]
  misc_feature (1)..(223): Homolog of NCBI NO: 33146999 NR Description: putative p53 binding protein
  misc_feature (1)..(237): Homolog of NCBI NO: 25404955 NR Description: protein F1N21.14 [imported] - Arabidopsis
  misc_feature (1)..(237): Homolog of NCBI NO: 22330480 NR Description: similar to RRM-containing RNA-binding protein,
  misc_feature (1)..(238): Homolog of NCBI NO: 27817857 NR Description: OJ1081_B12.5 [Oryza sativa (japonica
MRNCNQSRPADHTAMQTPPRYPTSGGYMSPGTPPSMYLGGGAPPYGSSMFNGPAMTRYGITQFPGGSAYPYGYGGRISMGSPYGPMQMAGPTAYSGGSMMGAGGMYGMPMDRYGLIPAGSGPMGTRAGSYSDEDSQKKSAGAGRDNDWECPNCHNINFGFRTVCNMRKCNTPRPENQGSKPDGLRGSKPKTPEGSWKCEQCNNINYPFRTKCNRPQCGAEKPSQTNNANESAEDQDNQ

SEQ ID NO: 109064 - protein, 224 aa, Zea mays subsp. mays
  misc_feature (1)..(224): Ceres Seq. ID no. 12783182
  misc_feature (1)..(93): Pfam Name: Keratin Pfam Description: Keratin
  misc_feature (127)..(207): Homolog of NCBI NO: 15227939 NR Description: similar to putative zinc finger protein; protein
  misc_feature (51)..(165): Homolog of NCBI NO: 10177024 NR Description: gene_id:MQJ2.7~unknown protein [Arabidopsis
  misc_feature (65)..(167): Homolog of NCBI NO: 33604057 NR Description: Unknown (protein for IMAGE:6789697) [Danio rerio]
  misc_feature (12)..(169): Homolog of NCBI NO: 15029724 NR Description: Similar to fusion, derived from t(12;16)
  misc_feature (112)..(207): Homolog of NCBI NO: 15865325 NR Description: putative non-ribosomal nucleolar protein
  misc_feature (121)..(209): Homolog of NCBI NO: 18698995 NR Description: p53 binding protein [Oryza sativa]
  misc_feature (1)..(209): Homolog of NCBI NO: 33146999 NR Description: putative p53 binding protein
  misc_feature (1)..(223): Homolog of NCBI NO: 25404955 NR Description: protein F1N21.14 [imported] - Arabidopsis
  misc_feature (1)..(223): Homolog of NCBI NO: 22330480 NR Description: similar to RRM-containing RNA-binding protein,
  misc_feature (1)..(224): Homolog of NCBI NO: 27817857 NR Description: OJ1081_B12.5 [Oryza sativa (japonica
MQTPPRYPTSGGYMSPGTPPSMYLGGGAPPYGSSMFNGPAMTRYGITQFPGGSAYPYGYGGRISMGSPYGPMQMAGPTAYSGGSMMGAGGMYGMPMDRYGLIPAGSGPMGTRAGSYSDEDSQKKSAGAGRDNDWECPNCHNINFGFRTVCNMRKCNTPRPENQGSKPDGLRGSKPKTPEGSWKCEQCNNINYPFRTKCNRPQCGAEKPSQTNNANESAEDQDNQ

SEQ ID NO: 109065 - DNA, 598 bp, Zea mays subsp. mays
  misc_feature (1)..(598): Ceres Seq. ID no. 15226580
aattttgagtgaacctcctgctggacgcaccaagaaagcacaagggagctctatggctacacatagaaaaccagttgctaccgagatggcttctgcagcattccatgacgccacgccagctaaccaaaacatcgaagaggatcaggacgcgtgctccatatccatactactactcccattcgttctgcatctggccttcatggcattcacagccttgttcgtgatgcacgtccaggtgtccacacggttcctatccgctagccccccggtttactgggctgccgcgcacgttctggcttctccgagccgcgccaacagacgatggggctacctgatctgtgtctatttcatcgcgtacattcttctaggtagcctgctcttctccaacttctaccctttcacgtaacgtaagaacggcggtggattttctcgaccagctttgcctgaaggtttccctaggttggtagtggtaggtgtttcctttggttcagtaattgagcgttggctactcgaatcgcttggaatctgctcggctgatgtatcttggggggtcgatcttctccaattattcaatggcactatctatctccatttgacg

SEQ ID NO: 109066 - protein, 134 aa, Zea mays subsp. mays
  misc_feature (1)..(134): Ceres Seq. ID no. 15226581
  misc_feature (53)..(134): Pfam Name: Protein of unknown function (DUF409) Pfam Description: Protein of unknown function (DUF409)
  misc_feature (59)..(134): Homolog of NCBI NO: 16197911 NR Description: GM14315p [Drosophila melanogaster]
  misc_feature (58)..(134): Homolog of NCBI NO: 31242749 NR Description: ENSANGP00000009757 [Anopheles gambiae]
  misc_feature (53)..(134): Homolog of NCBI NO: 15221122 NR Description: hypothetical protein [Arabidopsis thaliana]
ILSEPPAGRTKKAQGSSMATHRKPVATEMASAAFHDATPANQNIEEDQDACSISILLLPFVLHLAFMAFTALFVMHVQVSTRFLSASPPVYWAAAHVLASPSRANRRWGYLICVYFIAYILLGSLLFSNFYPFT

SEQ ID NO: 109067 - protein, 117 aa, Zea mays subsp. mays
  misc_feature (1)..(117): Ceres Seq. ID no. 15226582
  misc_feature (36)..(117): Pfam Name: Protein of unknown function (DUF409) Pfam Description: Protein of unknown function (DUF409)
  misc_feature (42)..(117): Homolog of NCBI NO: 16197911 NR Description: GM14315p [Drosophila melanogaster]
  misc_feature (41)..(117): Homolog of NCBI NO: 31242749 NR Description: ENSANGP00000009757 [Anopheles gambiae]
  misc_feature (36)..(117): Homolog of NCBI NO: 15221122 NR Description: hypothetical protein [Arabidopsis thaliana]
MATHRKPVATEMASAAFHDATPANQNIEEDQDACSISILLLPFVLHLAFMAFTALFVMHVQVSTRFLSASPPVYWAAAHVLASPSRANRRWGYLICVYFIAYILLGSLLFSNFYPFT

SEQ ID NO: 109068 - protein, 106 aa, Zea mays subsp. mays
  misc_feature (1)..(106): Ceres Seq. ID no. 15226583
  misc_feature (25)..(106): Pfam Name: Protein of unknown function (DUF409) Pfam Description: Protein of unknown function (DUF409)
  misc_feature (31)..(106): Homolog of NCBI NO: 16197911 NR Description: GM14315p [Drosophila melanogaster]
  misc_feature (30)..(106): Homolog of NCBI NO: 31242749 NR Description: ENSANGP00000009757 [Anopheles gambiae]
  misc_feature (25)..(106): Homolog of NCBI NO: 15221122 NR Description: hypothetical protein [Arabidopsis thaliana]
MASAAFHDATPANQNIEEDQDACSISILLLPFVLHLAFMAFTALFVMHVQVSTRFLSASPPVYWAAAHVLASPSRANRRWGYLICVYFIAYILLGSLLFSNFYPFT

SEQ ID NO: 109069 - DNA, 740 bp, Zea mays subsp. mays
  misc_feature (1)..(740): Ceres Seq. ID no. 13600066
aaattcccaatcccaaccccaagtcacactccacctccgcaaccaaacgcgctagggtttccgcaccgcacctctagtcctccacccaccccaccccactaccggcgatggccaccgcggcggcacagggcggtagcgacaagccggcgctccggaagcccgtcttcaccaaggtcgaccagctcaagccgggcactaacgggcacaccctcaccgtcaaggtcgtcagcgccacccccgtgccgggccgcgcgcgcccgggcgcacccgccgccgcctcgtcccgcgcgccgcgcatcgccgagtgcctcgtcggagacgagaccggcgtcatcgtattcaccgcccgcaacgaccaagttgatttgctgaagcccgatgccacggtgatcttgcgcaatgccaaaatcgacatgttcaaaggatcaatgaggcttgcagtggacaaatgggggcggattgaggctacagagccagccagcttcacagtgaaggaagacaacaacttgtcccttgtagagtatgaattggttaacgtggctgaataaccgtcgaagcgtttctgcccccctttcttctttttcacgcacgccataagatgataagaaaacgaacagcatctcgaagctgagtttatttgttacggtggtcgataaggtcaaggcttctgctgttacacctttggatccaatccattaagatgaattacccttgcatctattgtaattgtgtggttatcc

SEQ ID NO: 109070 - protein, 146 aa, Zea mays subsp. mays
  misc_feature (1)..(146): Ceres Seq. ID no. 13600067
  misc_feature (1)..(142): Homolog of NCBI NO: 15219562 NR Description: hypothetical protein [Arabidopsis thaliana]
  misc_feature (85)..(144): Homolog of NCBI NO: 6573753 NR Description: F20B24.1 [Arabidopsis thaliana]
  misc_feature (14)..(84): Homolog of NCBI NO: 6573753 NR Description: F20B24.1 [Arabidopsis thaliana]
  misc_feature (14)..(144): Homolog of NCBI NO: 30681801 NR Description: expressed protein [Arabidopsis thaliana]
  misc_feature (14)..(144): Homolog of NCBI NO: 18391179 NR Description: expressed protein [Arabidopsis thaliana]
  misc_feature (10)..(146): Homolog of NCBI NO: 18395285 NR Description: expressed protein [Arabidopsis thaliana]
  misc_feature (3)..(144): Homolog of NCBI NO: 15235304 NR Description: expressed protein [Arabidopsis thaliana]
  misc_feature (1)..(144): Homolog of NCBI NO: 34909622 NR Description: P0435B05.31 [Oryza sativa (japonica
  misc_feature (1)..(146): Homolog of NCBI NO: 18403397 NR Description: expressed protein [Arabidopsis thaliana]
  misc_feature (1)..(146): Homolog of NCBI NO: 34904470 NR Description: OSJNBa0086P08.14 [Oryza sativa (japonica
MATAAAQGGSDKPALRKPVFTKVDQLKPGTNGHTLTVKVVSATPVPGRARPGAPAAASSRAPRIAECLVGDETGVIVFTARNDQVDLLKPDATVILRNAKIDMFKGSMRLAVDKWGRIEATEPASFTVKEDNNLSLVEYELVNVAE

SEQ ID NO: 109071 - protein, 123 aa, Zea mays subsp. mays
  misc_feature (1)..(123): Ceres Seq. ID no. 13600068
  misc_feature (11)..(123): Homolog of NCBI NO: 31227421 NR Description: ENSANGP00000004917 [Anopheles gambiae]
  misc_feature (5)..(115): Homolog of NCBI NO: 25989119 NR Description: unknown [Streptomyces aureofaciens]
  misc_feature (3)..(118): Homolog of NCBI NO: 1076205 NR Description: hypothetical protein WP6 - Chlamydomonas
  misc_feature (3)..(120): Homolog of NCBI NO: 81286 NR Description: extensin - Volvox carteri (fragment)
  misc_feature (3)..(123): Homolog of NCBI NO: 30387315 NR Description: unknown [Choristoneura fumiferana MNPV]
  misc_feature (3)..(119): Homolog of NCBI NO: 12697907 NR Description: KIAA1681 protein [Homo sapiens]
  misc_feature (3)..(123): Homolog of NCBI NO: 1076211 NR Description: hypothetical protein VSP-3 - Chlamydomonas
  misc_feature (6)..(123): Homolog of NCBI NO: 7949115 NR Description: Ser/Arg-related nuclear matrix protein
  misc_feature (6)..(123): Homolog of NCBI NO: 5032119 NR Description: Ser/Arg-related nuclear matrix protein (plenty of
  misc_feature (3)..(118): Homolog of NCBI NO: 30387315 NR Description: unknown [Choristoneura fumiferana MNPV]
KFPIPTPSHTPPPQPNALGFPHRTSSPPPTPPHYRRWPPRRHRAVATSRRSGSPSSPRSTSSSRALTGTPSPSRSSAPPPCRAARARAHPPPPRPARRASPSASSETRPASSYSPPATTKLIC

SEQ ID NO: 109072 - DNA, 1387 bp, Zea mays subsp. mays
  misc_feature (1)..(1387): Ceres Seq. ID no. 14313491
aatcaaatcccccagcaagtcagccccgccccgccccgcgccgacgcctctccccgatcccgatctgtgtgcctggctgcctgcaacctccgtgggatggaggcggcgcggcagcagcaggaggagtgcccgtgcggcggggccgaggccgctgaccagttcgagcggctgcacgacgcggtgctgctcgacgtcctcaatcgcatcggcgacgtcaaggcgctcggccgctgcgccctcgtctcgcgccgcttccacgcgctcgtgccgctcgtcgactccgtcttcgtccgcgtcgactgcgtcatccctgacgacccgccgccctcgtcctcctcctcctcctcctcctcttccgccgcaccaggcaccccgccgcggcaggcgccagccccaaccgcgcgcgggcgcggcgcgctcgcgcacatcgtgcgcgtcctgctcggcggcatcgccaggcccatccacgcgctcggccagatcctctcccccgccgccgcggccgtctcccggcgctccgaggcactgcccgcttccccgcgcgcgcccgtcgcggacgtctctcaccactccccctccgaggtgctccgctccttcaaggagctgcggcgccttcacatcgagctgcccacgggcgagctcggcattgacgacggtgtgctccttaagtggaaggccgacttcggctccaccctcgtcagctgcgtcatcctcggcgcctcgtcgatctcgtccaagccgccgacagggtacactcaggcggaatcggaaactgctacggccgccactcccgataccagtcgggagactgaagagccggggagcctacctgattctctttatacaaatggaggactcaagcttcgcgttgtctggaccatcagctccctgattgccgcgtcggcgaggcattacttgctgcagccgattatctggaatcacgaattgctggagagcttggacctgacagatgctgacgggcaaggggtgctcaccatggacaagaggcagctgcaggaactgcgggtgcggcccgtctttccgtcagggagctcgcaccgcaccctcatgccggctctcagtatgcgtctgcactacgcaccgctcattgagctgcctgggggaacgctgctgaagggtgcgacactagtggcgatcaaaccaagcgaagatgccttgagggagggccaaggggctggggctgcaggtcctgttggtacatgctggatttcagaggcctttgaggagccatatcggactgcggcaaaggtgcttctcaagagaagggcatattgtcttgaaatgaactcgttctgagcactagggggtttacttccacagagttctacccttctgacaggtgaaatgccactttacagttctaaat

SEQ ID NO: 109073 - protein, 438 aa, Zea mays subsp. mays
  misc_feature (1)..(438): Ceres Seq. ID no. 14313492
  misc_feature (54)..(100): Pfam Name: F-box domain Pfam Description: F-box domain
  misc_feature (188)..(438): Homolog of NCBI NO: 18411823 NR Description: F-box protein family [Arabidopsis thaliana]
  misc_feature (52)..(111): Homolog of NCBI NO: 15219845 NR Description: F-box protein family [Arabidopsis thaliana]
  misc_feature (177)..(260): Homolog of NCBI NO: 15219845 NR Description: F-box protein family [Arabidopsis thaliana]
  misc_feature (285)..(438): Homolog of NCBI NO: 15219845 NR Description: F-box protein family [Arabidopsis thaliana]
  misc_feature (111)..(438): Homolog of NCBI NO: 18397400 NR Description: expressed protein [Arabidopsis thaliana]
  misc_feature (52)..(158): Homolog of NCBI NO: 34909194 NR Description: P0425G02.20 [Oryza sativa (japonica
  misc_feature (183)..(436): Homolog of NCBI NO: 34909194 NR Description: P0425G02.20 [Oryza sativa (japonica
  misc_feature (114)..(438): Homolog of NCBI NO: 15236865 NR Description: F-box protein family [Arabidopsis thaliana]
  misc_feature (52)..(438): Homolog of NCBI NO: 15237391 NR Description: F-box protein family [Arabidopsis thaliana]
  misc_feature (46)..(438): Homolog of NCBI NO: 34909910 NR Description: P0665A11.15 [Oryza sativa (japonica
NQIPQQVSPAPPRADASPRSRSVCLAACNLRGMEAARQQQEECPCGGAEAADQFERLHDAVLLDVLNRIGDVKALGRCALVSRRFHALVPLVDSVFVRVDCVIPDDPPPSSSSSSSSSSAAPGTPPRQAPAPTARGRGALAHIVRVLLGGIARPIHALGQILSPAAAAVSRRSEALPASPRAPVADVSHHSPSEVLRSFKELRRLHIELPTGELGIDDGVLLKWKADFGSTLVSCVILGASSISSKPPTGYTQAESETATAATPDTSRETEEPGSLPDSLYTNGGLKLRVVWTISSLIAASARHYLLQPIIWNHELLESLDLTDADGQGVLTMDKRQLQELRVRPVFPSGSSHRTLMPALSMRLHYAPLIELPGGTLLKGATLVAIKPSEDALREGQGAGAAGPVGTCWISEAFEEPYRTAAKVLLKRRAYCLEMNSF

SEQ ID NO: 109074 - protein, 406 aa, Zea mays subsp. mays
  misc_feature (1)..(406): Ceres Seq. ID no. 14313493
  misc_feature (22)..(68): Pfam Name: F-box domain Pfam Description: F-box domain
  misc_feature (20)..(79): Homolog of NCBI NO: 15219845 NR Description: F-box protein family [Arabidopsis thaliana]
  misc_feature (145)..(228): Homolog of NCBI NO: 15219845 NR Description: F-box protein family [Arabidopsis thaliana]
  misc_feature (253)..(406): Homolog of NCBI NO: 15219845 NR Description: F-box protein family [Arabidopsis thaliana]
  misc_feature (79)..(406): Homolog of NCBI NO: 18397400 NR Description: expressed protein [Arabidopsis thaliana]
  misc_feature (20)..(126): Homolog of NCBI NO: 34909194 NR Description: P0425G02.20 [Oryza sativa (japonica
  misc_feature (156)..(406): Homolog of NCBI NO: 18411823 NR Description: F-box protein family [Arabidopsis thaliana]
  misc_feature (151)..(404): Homolog of NCBI NO: 34909194 NR Description: P0425G02.20 [Oryza sativa (japonica
  misc_feature (82)..(406): Homolog of NCBI NO: 15236865 NR Description: F-box protein family [Arabidopsis thaliana]
  misc_feature (20)..(406): Homolog of NCBI NO: 15237391 NR Description: F-box protein family [Arabidopsis thaliana]
  misc_feature (14)..(406): Homolog of NCBI NO: 34909910 NR Description: P0665A11.15 [Oryza sativa (japonica
MEAARQQQEECPCGGAEAADQFERLHDAVLLDVLNRIGDVKALGRCALVSRRFHALVPLVDSVFVRVDCVIPDDPPPSSSSSSSSSSAAPGTPPRQAPAPTARGRGALAHIVRVLLGGIARPIHALGQILSPAAAAVSRRSEALPASPRAPVADVSHHSPSEVLRSFKELRRLHIELPTGELGIDDGVLLKWKADFGSTLVSCVILGASSISSKPPTGYTQAESETATAATPDTSRETEEPGSLPDSLYTNGGLKLRVVWTISSLIAASARHYLLQPIIWNHELLESLDLTDADGQGVLTMDKRQLQELRVRPVFPSGSSHRTLMPALSMRLHYAPLIELPGGTLLKGATLVAIKPSEDALREGQGAGAAGPVGTCWISEAFEEPYRTAAKVLLKRRAYCLEMNSF

SEQ ID NO: 109075 - protein, 296 aa, Zea mays subsp. mays
  misc_feature (1)..(296): Ceres Seq. ID no. 14313494
  misc_feature (79)..(248): Pfam Name: Formin Homology 2 Domain Pfam Description: Formin Homology 2 Domain
  misc_feature (3)..(246): Homolog of NCBI NO: 13592175 NR Description: ppg3 [Leishmania major]
  misc_feature (3)..(245): Homolog of NCBI NO: 23017082 NR Description: hypothetical protein [Thermobifida fusca]
  misc_feature (20)..(246): Homolog of NCBI NO: 5420387 NR Description: proteophosphoglycan [Leishmania major]
  misc_feature (28)..(213): Homolog of NCBI NO: 32699068 NR Description: hypothetical protein FLJ35107 [Homo sapiens]
  misc_feature (5)..(246): Homolog of NCBI NO: 13592175 NR Description: ppg3 [Leishmania major]
  misc_feature (3)..(243): Homolog of NCBI NO: 13592175 NR Description: ppg3 [Leishmania major]
  misc_feature (3)..(246): Homolog of NCBI NO: 13592175 NR Description: ppg3 [Leishmania major]
  misc_feature (33)..(246): Homolog of NCBI NO: 32699068 NR Description: hypothetical protein FLJ35107 [Homo sapiens]
  misc_feature (3)..(239): Homolog of NCBI NO: 11359723 NR Description: proteophosphoglycan, membrane-associated
  misc_feature (37)..(250): Homolog of NCBI NO: 32699068 NR Description: hypothetical protein FLJ35107 [Homo sapiens]
IKSPSKSAPPRPAPTPLPDPDLCAWLPATSVGWRRRGSSRRSARAAGPRPLTSSSGCTTRCCSTSSIASATSRRSAAAPSSRAASTRSCRSSTPSSSASTASSLTTRRPRPPPPPPPLPPHQAPRRGRRQPQPRAGAARSRTSCASCSAASPGPSTRSARSSPPPPRPSPGAPRHCPLPRARPSRTSLTTPPPRCSAPSRSCGAFTSSCPRASSALTTVCSLSGRPTSAPPSSAASSSAPRRSRPSRRQGTLRRNRKLLRPPLPIPVGRLKSRGAYLILFIQMEDSSFALSGPSAP

SEQ ID NO: 109076 - DNA, 1303 bp, Zea mays subsp. mays
  misc_feature (1)..(1303): Ceres Seq. ID no. 14313495
aatgctgctgttccctcccccgtttcaatgccttggcttcaagtgaccgtggtaaaagaaaatttgacgccacaacacacgtcggttgcttgtttacttgctgtggctttaattcgactgcagctgctgcggcttttattttgtcattagagagcagccgagcgccaccgtccatcacgagcttccatgttcaagccctgctctctgctcttataataaataaaagtcggcacatgattgcatcgcccccccgcctacagactccaaacaaaatcaagactgagagcaaaaccgtctcatctgatctagcgagcactccagctttctgcaatggcgattcaccgtctgatgcttcccatttctatccttctgatgagctcactctccggtacgccgccgcccctcgatggcacgcgcgataattaatcctgatccttccttacgatgccgtgtttgctgccttgtgcaggggccgtgtcgacgacgttcacgctggccaactcctgcggctacacggtgtggcctgggctgctgtcgagcgcgggctcggcgccgctgcccaccacgggcttcgcgctggcaccgggggagtcgcgcgtcgtggacgcgcccgcggcgtggtccggccgcatatggggccgcacgcgctgcgccgcggacaaccaggcctccggccggttcgcctgcgccacgggcgagtgcggctcgggggcggtggagtgcgcgggcggcggggccgcgccgcccaccacgctcgcggagttcacgctggacggcgccggcgggaacgacttctacgacgtgagcctggtggacgggtcgaacctgccgatggccgtggtgccgcagggcggcgccgggaccagctgcggcgccacgggctgcctggcggacctgaacgggccgtgccccgccgacctcagggtggtgggctccgacggcgccggcatcgcctgcaagagcgcgtgcggggcgtacgggcggccccaggactgctgcagcggcgactacggcacccccgcgacgtgccagccgtccgccagctcgcagttcttcaagaacgcgtgcccgcgcgcctacagttacgcctacgatgacgccacctccaccttcacctgcacgtccggcaccgccagttacctcgtcacgttctgcccaagcatctccaggtaacaagatcacagttgacctcacctacctagctagtggagatgcgagttgatcattttggcatgaataatggaacgaatgatcgatcagagatgatttcatgcccaagtaaacgttgcatgcaaactcacct

SEQ ID NO: 109077 - protein, 242 aa, Zea mays subsp. mays
  misc_feature (1)..(242): Ceres Seq. ID no. 14313496
  misc_feature (19)..(238): Pfam Name: Thaumatin family Pfam Description: Thaumatin family
  misc_feature (14)..(238): Homolog of NCBI NO: 30692042 NR Description: thaumatin family [Arabidopsis thaliana]
  misc_feature (14)..(238): Homolog of NCBI NO: 7442169 NR Description: pathogenesis-related protein F20M13.230 -
  misc_feature (1)..(239): Homolog of NCBI NO: 6273383 NR Description: SCUTL1 [Vitis vinifera]
  misc_feature (8)..(239): Homolog of NCBI NO: 4105697 NR Description: thaumatin-like protein [Arabidopsis thaliana]
  misc_feature (8)..(239): Homolog of NCBI NO: 15222875 NR Description: thaumatin family [Arabidopsis thaliana]
  misc_feature (9)..(242): Homolog of NCBI NO: 15227907 NR Description: thaumatin family [Arabidopsis thaliana]
  misc_feature (11)..(239): Homolog of NCBI NO: 30686652 NR Description: thaumatin family [Arabidopsis thaliana]
  misc_feature (8)..(239): Homolog of NCBI NO: 25296204 NR Description: hypothetical protein T20H2.19 [imported] -
  misc_feature (9)..(239): Homolog of NCBI NO: 15233437 NR Description: thaumatin family [Arabidopsis thaliana]
  misc_feature (1)..(239): Homolog of NCBI NO: 37531042 NR Description: putative thaumatin-like protein
MPCLLPCAGAVSTTFTLANSCGYTVWPGLLSSAGSAPLPTTGFALAPGESRVVDAPAAWSGRIWGRTRCAADNQASGRFACATGECGSGAVECAGGGAAPPTTLAEFTLDGAGGNDFYDVSLVDGSNLPMAVVPQGGAGTSCGATGCLADLNGPCPADLRVVGSDGAGIACKSACGAYGRPQDCCSGDYGTPATCQPSASSQFFKNACPRAYSYAYDDATSTFTCTSGTASYLVTFCPSISR

SEQ ID NO: 109078 - protein, 154 aa, Zea mays subsp. mays
  misc_feature (1)..(154): Ceres Seq. ID no. 14313497
MGPHALRRGQPGLRPVRLRHGRVRLGGGGVRGRRGRAAHHARGVHAGRRRRERLLRREPGGRVEPADGRGAAGRRRDQLRRHGLPGGPERAVPRRPQGGGLRRRRHRLQERVRGVRAAPGLLQRRLRHPRDVPAVRQLAVLQERVPARLQLRLR

SEQ ID NO: 109079 - protein, 139 aa, Zea mays subsp. mays
  misc_feature (1)..(139): Ceres Seq. ID no. 14313498
CCCSLPRFNALASSDRGKRKFDATTHVGCLFTCCGFNSTAAAAAFILSLESSRAPPSITSFHVQALLSALIINKSRHMIASPPRLQTPNKIKTESKTVSSDLASTPAFCNGDSPSDASHFYPSDELTLRYAAAPRWHAR

SEQ ID NO: 109080 - DNA, 613 bp, Zea mays subsp. mays
  misc_feature (1)..(613): Ceres Seq. ID no. 12594788
ctcatgtcggtacagccgagaaccgggaccgtgcatttctgggatggggctgctcttccttgagcggctcgagggggagggcgtgttcaggtgccggcgctgccgcgtggacgccgcctccaaggacgccatcatctccagggacttctacggccgcagcggccgcgcctacctcttcgaccacgttgtgaacatatgcctaggccctaatgaggatcggtatcttgtaaccgggctccatactgtgaatgacatctactgtagctgctgccaacagattcttggctggagatataaatggcaggagctctgcctaatcattaaaaggagagtccagaaaacacactgtacaggtccgaggaccgagacaagacaagacagactagcaaacacgacgtgaggaacgctcctaacagacccgtacaaagcagctaaaccactgcagcagccctaatactggggaacgtagctctcttgaaagtgaacacatcctctttatttcaattcgccttatgtcatttctgctaaaatggtggatgaacggtatacctttatattttcaacccagcatcgtgttatgacttctactgttatatccagaaatgcaacaatt

SEQ ID NO: 109081 - protein, 132 aa, Zea mays subsp. mays
  misc_feature (1)..(132): Ceres Seq. ID no. 12594789
  misc_feature (15)..(99): Pfam Name: Yippee putative zinc-binding protein Pfam Description: Yippee putative zinc-binding protein
  misc_feature (15)..(99): Homolog of NCBI NO: 15232001 NR Description: Yippee-like protein; protein id: At3g08990.1
  misc_feature (15)..(99): Homolog of NCBI NO: 15225631 NR Description: unknown protein
  misc_feature (29)..(99): Homolog of NCBI NO: 31201993 NR Description: ENSANGP00000019801 [Anopheles gambiae]
  misc_feature (15)..(99): Homolog of NCBI NO: 27923880 NR Description: Yippee-like protein
  misc_feature (15)..(99): Homolog of NCBI NO: 28273361 NR Description: putative zinc binding protein
  misc_feature (15)..(100): Homolog of NCBI NO: 21617953 NR Description: yippee-like protein [Arabidopsis thaliana]
  misc_feature (15)..(100): Homolog of NCBI NO: 18399156 NR Description: expressed protein
  misc_feature (15)..(99): Homolog of NCBI NO: 15238881 NR Description: zinc-binding protein-like
  misc_feature (15)..(99): Homolog of NCBI NO: 34393694 NR Description: Yippee-like protein [Oryza sativa (japonica
  misc_feature (15)..(99): Homolog of NCBI NO: 37533560 NR Description: hypothetical protein [Oryza sativa (japonica
SCRYSREPGPCISGMGLLFLERLEGEGVFRCRRCRVDAASKDAIISRDFYGRSGRAYLFDHVVNICLGPNEDRYLVTGLHTVNDIYCSCCQQILGWRYKWQELCLIIKRRVQKTHCTGPRTETRQDRLANTT

SEQ ID NO: 109082 - protein, 118 aa, Zea mays subsp. mays
  misc_feature (1)..(118): Ceres Seq. ID no. 12594790
  misc_feature (1)..(85): Pfam Name: Yippee putative zinc-binding protein Pfam Description: Yippee putative zinc-binding protein
  misc_feature (1)..(85): Homolog of NCBI NO: 15232001 NR Description: Yippee-like protein; protein id: At3g08990.1
  misc_feature (1)..(85): Homolog of NCBI NO: 15225631 NR Description: unknown protein
  misc_feature (15)..(85): Homolog of NCBI NO: 31201993 NR Description: ENSANGP00000019801 [Anopheles gambiae]
  misc_feature (1)..(85): Homolog of NCBI NO: 27923880 NR Description: Yippee-like protein
  misc_feature (1)..(85): Homolog of NCBI NO: 28273361 NR Description: putative zinc binding protein
  misc_feature (1)..(86): Homolog of NCBI NO: 21617953 NR Description: yippee-like protein [Arabidopsis thaliana]
  misc_feature (1)..(86): Homolog of NCBI NO: 18399156 NR Description: expressed protein
  misc_feature (1)..(85): Homolog of NCBI NO: 15238881 NR Description: zinc-binding protein-like
  misc_feature (1)..(85): Homolog of NCBI NO: 34393694 NR Description: Yippee-like protein [Oryza sativa (japonica
  misc_feature (1)..(85): Homolog of NCBI NO: 37533560 NR Description: hypothetical protein [Oryza sativa (japonica
MGLLFLERLEGEGVFRCRRCRVDAASKDAIISRDFYGRSGRAYLFDHVVNICLGPNEDRYLVTGLHTVNDIYCSCCQQILGWRYKWQELCLIIKRRVQKTHCTGPRTETRQDRLANTT

SEQ ID NO: 109083 - DNA, 815 bp, Zea mays subsp. mays
  misc_feature (1)..(815): Ceres Seq. ID no. 12636863
  misc_feature: MA Experiment ID: 108522 Result: Up-regulated in Transcription
  misc_feature: MA Experiment 108522 PARAMETER Experiment Name: Zm_42deg_Heat_P Parameter: Age (day) Value: 8
  misc_feature: MA Experiment 108522 PARAMETER Experiment Name: Zm_42deg_Heat_P Parameter: Organism Value: Zea mays
  misc_feature: MA Experiment 108522 PARAMETER Experiment Name: Zm_42deg_Heat_P Parameter: Plant Line Value: 35A19
  misc_feature: MA Experiment 108522 PARAMETER Experiment Name: Zm_42deg_Heat_P Parameter: Temperature (deg C) Value: 42 vs. 22
  misc_feature: MA Experiment 108522 PARAMETER Experiment Name: Zm_42deg_Heat_P Parameter: Timepoint (hr) Value: 1
  misc_feature: MA Experiment 108522 PARAMETER Experiment Name: Zm_42deg_Heat_P Parameter: Tissue Value: Aerial
  misc_feature: MA Experiment ID: 108543 Result: Up-regulated in Transcription
  misc_feature: MA Experiment ID: 108544 Result: Up-regulated in Transcription
  misc_feature: MA Experiment ID: 108556 Result: Up-regulated in Transcription
  misc_feature: MA Experiment 108556 PARAMETER Experiment Name: Zm_Drought_P Parameter: Age (day) Value: 9
  misc_feature: MA Experiment 108556 PARAMETER Experiment Name: Zm_Drought_P Parameter: Organism Value: Zea mays
  misc_feature: MA Experiment 108556 PARAMETER Experiment Name: Zm_Drought_P Parameter: Plant Line Value: 35A19
  misc_feature: MA Experiment 108556 PARAMETER Experiment Name: Zm_Drought_P Parameter: Timepoint (hr) Value: 24
  misc_feature: MA Experiment 108556 PARAMETER Experiment Name: Zm_Drought_P Parameter: Tissue Value: Aerial
  misc_feature: MA Experiment 108556 PARAMETER Experiment Name: Zm_Drought_P Parameter: Treatment Value: Drought vs. No Drought
  misc_feature: MA Experiment ID: 108597 Result: Up-regulated in Transcription
  misc_feature: MA Experiment 108597 PARAMETER Experiment Name: Zm_100uM_ABA_P Parameter: Age (day) Value: 9
  misc_feature: MA Experiment 108597 PARAMETER Experiment Name: Zm_100uM_ABA_P Parameter: Organism Value: Zea mays
  misc_feature: MA Experiment 108597 PARAMETER Experiment Name: Zm_100uM_ABA_P Parameter: Plant Line Value: 35A19
  misc_feature: MA Experiment 108597 PARAMETER Experiment Name: Zm_100uM_ABA_P Parameter: Timepoint (hr) Value: 24
  misc_feature: MA Experiment 108597 PARAMETER Experiment Name: Zm_100uM_ABA_P Parameter: Tissue Value: Aerial
  misc_feature: MA Experiment 108597 PARAMETER Experiment Name: Zm_100uM_ABA_P Parameter: Treatment Value: 100uM ABA vs. No Treatment
  misc_feature: MA Experiment ID: 108689 Result: Up-regulated in Transcription
  misc_feature: MA Experiment 108689 PARAMETER Experiment Name: Zm_Drought_Roots_P Parameter: Age (day) Value: 9
  misc_feature: MA Experiment 108689 PARAMETER Experiment Name: Zm_Drought_Roots_P Parameter: Organism Value: Zea mays
  misc_feature: MA Experiment 108689 PARAMETER Experiment Name: Zm_Drought_Roots_P Parameter: Plant Line Value: 35A19
  misc_feature: MA Experiment 108689 PARAMETER Experiment Name: Zm_Drought_Roots_P Parameter: Timepoint (hr) Value: 24
  misc_feature: MA Experiment 108689 PARAMETER Experiment Name: Zm_Drought_Roots_P Parameter: Tissue Value: Roots
  misc_feature: MA Experiment 108689 PARAMETER Experiment Name: Zm_Drought_Roots_P Parameter: Treatment Value: Drought vs. No Drought
  misc_feature: MA Experiment ID: 20000479 Result: Up-regulated in Transcription
  misc_feature: MA Experiment 20000479 PARAMETER Experiment Name: Zm_Drought_P Parameter: Age (day) Value: 10
  misc_feature: MA Experiment 20000479 PARAMETER Experiment Name: Zm_Drought_P Parameter: Organism Value: Zea mays
  misc_feature: MA Experiment 20000479 PARAMETER Experiment Name: Zm_Drought_P Parameter: Plant Line Value: 35A19
  misc_feature: MA Experiment 20000479 PARAMETER Experiment Name: Zm_Drought_P Parameter: Timepoint (hr) Value: 48
  misc_feature: MA Experiment 20000479 PARAMETER Experiment Name: Zm_Drought_P Parameter: Tissue Value: Aerial
  misc_feature: MA Experiment 20000479 PARAMETER Experiment Name: Zm_Drought_P Parameter: Treatment Value: Drought vs. No Drought
  misc_feature: MA Experiment ID: 20000480 Result: Up-regulated in Transcription
  misc_feature: MA Experiment 20000480 PARAMETER Experiment Name: Zm_Drought_P Parameter: Age (day) Value: 11
  misc_feature: MA Experiment 20000480 PARAMETER Experiment Name: Zm_Drought_P Parameter: Organism Value: Zea mays
  misc_feature: MA Experiment 20000480 PARAMETER Experiment Name: Zm_Drought_P Parameter: Plant Line Value: 35A19
  misc_feature: MA Experiment 20000480 PARAMETER Experiment Name: Zm_Drought_P Parameter: Timepoint (hr) Value: 72
  misc_feature: MA Experiment 20000480 PARAMETER Experiment Name: Zm_Drought_P Parameter: Tissue Value: Aerial
  misc_feature: MA Experiment 20000480 PARAMETER Experiment Name: Zm_Drought_P Parameter: Treatment Value: Drought vs. No Drought
  misc_feature: MA Experiment ID: 20000487 Result: Up-regulated in Transcription
  misc_feature: MA Experiment 20000487 PARAMETER Experiment Name: Zm_50mM_NH4NO3_L_to_H_P Parameter: Organism Value: Zea mays
  misc_feature: MA Experiment 20000487 PARAMETER Experiment Name: Zm_50mM_NH4NO3_L_to_H_P Parameter: Timepoint (hr) Value: 4
  misc_feature: MA Experiment 20000487 PARAMETER Experiment Name: Zm_50mM_NH4NO3_L_to_H_P Parameter: Tissue Value: Leaves
  misc_feature: MA Experiment 20000487 PARAMETER Experiment Name: Zm_50mM_NH4NO3_L_to_H_P Parameter: Treatment Value: 50mM NH4NO3 vs. 100mM Mannitol
  misc_feature: MA Experiment ID: 20000535 Result: Up-regulated in Transcription
  misc_feature: MA Experiment 20000535 PARAMETER Experiment Name: Zm_Hybrid_Seed_Dev_P Parameter: DAP Value: 30 vs. 12
  misc_feature: MA Experiment 20000535 PARAMETER Experiment Name: Zm_Hybrid_Seed_Dev_P Parameter: Organism Value: Zea mays
  misc_feature: MA Experiment 20000535 PARAMETER Experiment Name: Zm_Hybrid_Seed_Dev_P Parameter: Plant Line Value: 35A19
  misc_feature: MA Experiment 20000535 PARAMETER Experiment Name: Zm_Hybrid_Seed_Dev_P Parameter: Tissue Value: Embryo vs. Unfert Floret
agaaaacactagtactgtcccctcccggacatcagagacagacacagtagagacgaggcagaggcttctagatctactgccagctcggcagcaacaaagccgaagcgtctcgcgtgcgcggccgccaccggggattagggatggcggcgaagaaggtgctcatgctctgcggcgactacatggaggactacgaggtcatggtcccgttccaagcgctgcaagcgtatggggtgtccgtggacgccgtctgccctagcaagaaggccggcgacatctgccgcaccgccgtccatcagctgaccggtcaccagacatactctgagacaaaaggccataatttcacactgaatgcttcatttgatgagattactgctagtgaatatgatggattggtaattcctggagggcgtgcaccagaataccttgcgatggatgaaaaggtgcttgacctagtcagaatgttctctggtgctaagaagcctattgcatcagtttgtcatggacagttgattttagcggcagcaagagtagtcgagaaccgtacctgcacagcatttccggctgttaaaccagttttggttgctgctggtgccaagtgggaagagcctgacacaatggcaaaatgcactgttgatggcaatctcatcacagcagcgacttataattctcatcccgaattcatcagcctatttgtcaaagcactcggaggttcagtggcaggctcagataagagaatactgttcctatgtggggactacatggaggattatgaggtcatggtcccattccaggctctccaagctcgtgggtgccat

SEQ ID NO: 109084 - protein, 225 aa, Zea mays subsp. mays
  misc_feature (1)..(225): Ceres Seq. ID no. 12636864
  misc_feature (1)..(193): Homolog of NCBI NO: 15599532 NR Description: conserved hypothetical protein [Pseudomonas
  misc_feature (1)..(193): Homolog of NCBI NO: 22298105 NR Description: ORF_ID:tll0562~hypothetical protein
  misc_feature (3)..(189): Homolog of NCBI NO: 22978710 NR Description: hypothetical protein [Ralstonia metallidurans]
  misc_feature (1)..(189): Homolog of NCBI NO: 23475025 NR Description: hypothetical protein [Desulfovibrio desulfuricans
  misc_feature (1)..(192): Homolog of NCBI NO: 23502074 NR Description: ThiJ/PfpI family protein [Brucella suis 1330]
  misc_feature (1)..(192): Homolog of NCBI NO: 17987076 NR Description: PROTEASE I [Brucella melitensis]
  misc_feature (64)..(224): Homolog of NCBI NO: 21954064 NR Description: unknown protein [Arabidopsis thaliana]
  misc_feature (2)..(193): Homolog of NCBI NO: 21954064 NR Description: unknown protein [Arabidopsis thaliana]
  misc_feature (2)..(193): Homolog of NCBI NO: 15232958 NR Description: expressed protein; protein id: At3g02720.1
  misc_feature (3)..(224): Homolog of NCBI NO: 15232958 NR Description: expressed protein; protein id: At3g02720.1
MAAKKVLMLCGDYMEDYEVMVPFQALQAYGVSVDAVCPSKKAGDICRTAVHQLTGHQTYSETKGHNFTLNASFDEITASEYDGLVIPGGRAPEYLAMDEKVLDLVRMFSGAKKPIASVCHGQLILAAARVVENRTCTAFPAVKPVLVAAGAKWEEPDTMAKCTVDGNLITAATYNSHPEFISLFVKALGGSVAGSDKRILFLCGDYMEDYEVMVPFQALQARGCH

SEQ ID NO: 109085 - protein, 218 aa, Zea mays subsp. mays
  misc_feature (1)..(218): Ceres Seq. ID no. 12636865
  misc_feature (1)..(186): Homolog of NCBI NO: 15599532 NR Description: conserved hypothetical protein [Pseudomonas
  misc_feature (1)..(186): Homolog of NCBI NO: 22298105 NR Description: ORF_ID:tll0562~hypothetical protein
  misc_feature (1)..(182): Homolog of NCBI NO: 22978710 NR Description: hypothetical protein [Ralstonia metallidurans]
  misc_feature (1)..(182): Homolog of NCBI NO: 23475025 NR Description: hypothetical protein [Desulfovibrio desulfuricans
  misc_feature (1)..(185): Homolog of NCBI NO: 23502074 NR Description: ThiJ/PfpI family protein [Brucella suis 1330]
  misc_feature (1)..(185): Homolog of NCBI NO: 17987076 NR Description: PROTEASE I [Brucella melitensis]
  misc_feature (57)..(217): Homolog of NCBI NO: 21954064 NR Description: unknown protein [Arabidopsis thaliana]
  misc_feature (1)..(186): Homolog of NCBI NO: 21954064 NR Description: unknown protein [Arabidopsis thaliana]
  misc_feature (1)..(186): Homolog of NCBI NO: 15232958 NR Description: expressed protein; protein id: At3g02720.1
  misc_feature (1)..(217): Homolog of NCBI NO: 15232958 NR Description: expressed protein; protein id: At3g02720.1
MLCGDYMEDYEVMVPFQALQAYGVSVDAVCPSKKAGDICRTAVHQLTGHQTYSETKGHNFTLNASFDEITASEYDGLVIPGGRAPEYLAMDEKVLDLVRMFSGAKKPIASVCHGQLILAAARVVENRTCTAFPAVKPVLVAAGAKWEEPDTMAKCTVDGNLITAATYNSHPEFISLFVKALGGSVAGSDKRILFLCGDYMEDYEVMVPFQALQARGCH

SEQ ID NO: 109086 - protein, 212 aa, Zea mays subsp. mays
  misc_feature (1)..(212): Ceres Seq. ID no. 12636866
  misc_feature (1)..(180): Homolog of NCBI NO: 15599532 NR Description: conserved hypothetical protein [Pseudomonas
  misc_feature (1)..(180): Homolog of NCBI NO: 22298105 NR Description: ORF_ID:tll0562~hypothetical protein
  misc_feature (1)..(176): Homolog of NCBI NO: 22978710 NR Description: hypothetical protein [Ralstonia metallidurans]
  misc_feature (1)..(176): Homolog of NCBI NO: 23475025 NR Description: hypothetical protein [Desulfovibrio desulfuricans
  misc_feature (1)..(179): Homolog of NCBI NO: 23502074 NR Description: ThiJ/PfpI family protein [Brucella suis 1330]
  misc_feature (1)..(179): Homolog of NCBI NO: 17987076 NR Description: PROTEASE I [Brucella melitensis]
  misc_feature (51)..(211): Homolog of NCBI NO: 21954064 NR Description: unknown protein [Arabidopsis thaliana]
  misc_feature (1)..(180): Homolog of NCBI NO: 21954064 NR Description: unknown protein [Arabidopsis thaliana]
  misc_feature (1)..(180): Homolog of NCBI NO: 15232958 NR Description: expressed protein; protein id: At3g02720.1
  misc_feature (1)..(211): Homolog of NCBI NO: 15232958 NR Description: expressed protein; protein id: At3g02720.1
MEDYEVMVPFQALQAYGVSVDAVCPSKKAGDICRTAVHQLTGHQTYSETKGHNFTLNASFDEITASEYDGLVIPGGRAPEYLAMDEKVLDLVRMFSGAKKPIASVCHGQLILAAARVVENRTCTAFPAVKPVLVAAGAKWEEPDTMAKCTVDGNLITAATYNSHPEFISLFVKALGGSVAGSDKRILFLCGDYMEDYEVMVPFQALQARGCH

SEQ ID NO: 109087 - DNA, 1534 bp, Zea mays subsp. mays
  misc_feature (1)..(1534): Ceres Seq. ID no. 13624112
aaagacacacgttcacatcaatccaccattgaccaattcctcccacactgaagccaccacaccaccacaacagcagcctttgtagcaagcacacactcgccacaatgcgcacgcccttcgtggatcctcacagcgccgccggccggctcaagcagcgcctggcaaggatcctcacgcgctccacctgcaccaccaataacgccgctgccgccagctcgggcggcacggccacggccacggccttcgtcagcctcgccaagaccaacaacgcccacaccgccgcctcctcatctcacccggagccggaagcgccgccctccccgtacttctgcacgccctgcacctacgactacgagcgccccaaggccgaccgcgggacgcgcccgcgccgcacccgcagcgcctcgctcatacacatctccgtcgactgcacgggcggggccgcctccggccgccgctccgcccactccgacgcgccgcttctgcagcacctcttgtcggaacaggtgccggcgagggacgtcgtcggcggcacgaagcagagcaagagcggcggcaggagcaagctgacgacgacgcggtcgtctccgtcggcgtcgaggcggcactgctcgtcgtcgtcctcctcctggggccgcgcccgcgcgcgccggcccagcagcacgcccacgccctacagctggtcgtcgtcgtcgtcgtcgcggtcgtccgccaccgcgacggacgacgagctcgcgccgttcagcggcagcgacgacgaggagggcggcggcggcggcgaggcggccgacatgcgggcgctcttctcgtccctcagcttctcgtccgaccccacatcatccgagttctaccgcaccaacggcggccgcagcggcaacggcaacgccagcaggaggagccacaggaacacggcgagtcgtcgtcgcggccgccgcgcgcgcgcgccacggcgtgcgctgtcgagatccagcggcggcgacccggcagcaccgcccgacgccttccggccgctggtgtccgtggagacgacgaggcgcactacggagcgcagcgagaggagcaaggaagacaagggtctcaataacgccaagaagctgacgatgacgatgctgggcgcggccgcagccgcggaggaggaggccgccggcgcgggcatggctgtggtgaagcgctcgagcaacccttacctggacttccgcagctccatggtggagatggtggtggagcggcgcatcgccagcgtggggaagatggaggagctcctgggctcgtacctctcgctcaactcgccgcgccaccacccggccatcctcgctgccttcgaggacgtctgggaggccgtcttcggcgaggagtgactcgactgggagcgtcaagcgtgatctctttcagagtactgtttcaaaacttctacgtacatgccaatgtataaattggcaccgttttgccacgccgagatgctgtggtgctcatcgtatgtaacgagcttcatatacatggtgataattgagcgcctgagtggctgagttgttct

SEQ ID NO: 109088 - protein, 417 aa, Zea mays subsp. mays
  misc_feature (1)..(417): Ceres Seq. ID no. 13624113
  misc_feature (357)..(416): Pfam Name: Protein of unknown function, DUF623 Pfam Description: Protein of unknown function, DUF623
  misc_feature (34)..(257): Homolog of NCBI NO: 13592175 NR Description: ppg3 [Leishmania major]
  misc_feature (314)..(414): Homolog of NCBI NO: 15241148 NR Description: hypothetical protein [Arabidopsis thaliana]
  misc_feature (233)..(410): Homolog of NCBI NO: 34908542 NR Description: P0423B08.21 [Oryza sativa (japonica
  misc_feature (252)..(414): Homolog of NCBI NO: 15224185 NR Description: expressed protein [Arabidopsis thaliana]
  misc_feature (253)..(415): Homolog of NCBI NO: 34904220 NR Description: P0443E07.26 [Oryza sativa (japonica
  misc_feature (149)..(417): Homolog of NCBI NO: 34912854 NR Description: P0006C01.11 [Oryza sativa (japonica
  misc_feature (1)..(209): Homolog of NCBI NO: 34912854 NR Description: P0006C01.11 [Oryza sativa (japonica
MRTPFVDPHSAAGRLKQRLARILTRSTCTTNNAAAASSGGTATATAFVSLAKTNNAHTAASSSHPEPEAPPSPYFCTPCTYDYERPKADRGTRPRRTRSASLIHISVDCTGGAASGRRSAHSDAPLLQHLLSEQVPARDVVGGTKQSKSGGRSKLTTTRSSPSASRRHCSSSSSSWGRARARRPSSTPTPYSWSSSSSSRSSATATDDELAPFSGSDDEEGGGGGEAADMRALFSSLSFSSDPTSSEFYRTNGGRSGNGNASRRSHRNTASRRRGRRARAPRRALSRSSGGDPAAPPDAFRPLVSVETTRRTTERSERSKEDKGLNNAKKLTMTMLGAAAAAEEEAAGAGMAVVKRSSNPYLDFRSSMVEMVVERRIASVGKMEELLGSYLSLNSPRHHPAILAAFEDVWEAVFGEE

SEQ ID NO: 109089 - DNA, 890 bp, Zea mays subsp. mays
  misc_feature (1)..(890): Ceres Seq. ID no. 13600020
atccaccacactacaactcgacaccgagaaaagcgcagcaaagcaacgcaaagcccacgccgctacagtgctacagcgagcgagcctcttgcctgccgctacgagccaacgactcgaacgcatacactccaatggcagcgacggtgatggcctccatgagccccctcgcctccgccaccccaggcgcgcgtcgcgctttccctgtacggctgctgctccaggcatctgcgctcgcgccgcgccagcgcgccttggccgtgaccgtgagggcccagagcgacgacgccgaggccgagccaaaggaggaggcggcggcggccaccaccccggcgccaaagtccaaggcggcggcgacggcgagccccgggctgtgggacgcgctggcgttcagcggcccggctcccgagcgcatcaacggccgcctcgccatggtgggcttcgtgtcggcgctcgccgtcgaggcgtcccgcggcgggggcctcctctcgcaggccggcagcgggtccgggctcgcctggttcgcggccacggctgctgtgctgtccgtggcctcgctggtgccgctgctcaggggcgacagcgccgaggccaggagcggcgccgtcatgagcgccgacgccgagctctggaacggccgcttcgccatgctcggcctcgtcgcgctcgccttcactgagtacctcaccggcgcaccgttcatcaacgcgtagatgtgttgtgtattttggaactgtgtatgctagtcaggcagtcagctagcggcaccatgcgcgtagtaggagcctagctacagttggacgagctactttttattgggatttactagtcttgggccatttacttctcttcttattaaagtccactcataaatcagaaatccaattttatct

SEQ ID NO: 109090 - protein, 235 aa, Zea mays subsp. mays
  misc_feature (1)..(235): Ceres Seq. ID no. 13600021
  misc_feature (44)..(234): Homolog of NCBI NO: 14029814 NR Description: early light-inducible protein ELIP [Zea mays]
  misc_feature (50)..(234): Homolog of NCBI NO: 28971959 NR Description: putative low molecular mass early light-induced
  misc_feature (44)..(234): Homolog of NCBI NO: 34904610 NR Description: putative early light-inducible protein
  misc_feature (44)..(234): Homolog of NCBI NO: 28971958 NR Description: putative low molecular mass early light-induced
  misc_feature (55)..(233): Homolog of NCBI NO: 7447855 NR Description: early light-induced protein homolog SDi-1,
  misc_feature (44)..(229): Homolog of NCBI NO: 28194659 NR Description: putative early light induced protein [Arachis
  misc_feature (100)..(234): Homolog of NCBI NO: 4521272 NR Description: early light-inducible protein [Triticum aestivum]
  misc_feature (100)..(234): Homolog of NCBI NO: 119285 NR Description: Low molecular mass early light-inducible protein
  misc_feature (27)..(234): Homolog of NCBI NO: 119284 NR Description: High molecular mass early light-inducible protein
  misc_feature (100)..(234): Homolog of NCBI NO: 119286 NR Description: Low molecular mass early light-inducible protein
PPHYNSTPRKAQQSNAKPTPLQCYSERASCLPLRANDSNAYTPMAATVMASMSPLASATPGARRAFPVRLLLQASALAPRQRALAVTVRAQSDDAEAEPKEEAAAATTPAPKSKAAATASPGLWDALAFSGPAPERINGRLAMVGFVSALAVEASRGGGLLSQAGSGSGLAWFAATAAVLSVASLVPLLRGDSAEARSGAVMSADAELWNGRFAMLGLVALAFTEYLTGAPFINA

SEQ ID NO: 109091 - protein, 224 aa, Zea mays subsp. mays
  misc_feature (1)..(224): Ceres Seq. ID no. 13600022
  misc_feature (131)..(201): Homolog of NCBI NO: 7447858 NR Description: early light-induced protein, low molecular weight
STTLQLDTEKSAAKQRKAHAATVLQRASLLPAATSQRLERIHSNGSDGDGLHEPPRLRHPRRASRFPCTAAAPGICARAAPARLGRDREGPERRRRGRAKGGGGGGHHPGAKVQGGGDGEPRAVGRAGVQRPGSRAHQRPPRHGGLRVGARRRGVPRRGPPLAGRQRVRARLVRGHGCCAVRGLAGAAAQGRQRRGQERRRHERRRRALERPLRHARPRRARLH

SEQ ID NO: 109092 - protein, 192 aa, Zea mays subsp. mays
  misc_feature (1)..(192): Ceres Seq. ID no. 13600023
  misc_feature (12)..(190): Homolog of NCBI NO: 7447855 NR Description: early light-induced protein homolog SDi-1,
  misc_feature (1)..(186): Homolog of NCBI NO: 28194659 NR Description: putative early light induced protein [Arachis
  misc_feature (57)..(191): Homolog of NCBI NO: 4521272 NR Description: early light-inducible protein [Triticum aestivum]
  misc_feature (57)..(191): Homolog of NCBI NO: 119285 NR Description: Low molecular mass early light-inducible protein
  misc_feature (1)..(191): Homolog of NCBI NO: 119284 NR Description: High molecular mass early light-inducible protein
  misc_feature (57)..(191): Homolog of NCBI NO: 119286 NR Description: Low molecular mass early light-inducible protein
  misc_feature (1)..(191): Homolog of NCBI NO: 14029814 NR Description: early light-inducible protein ELIP [Zea mays]
  misc_feature (7)..(191): Homolog of NCBI NO: 28971959 NR Description: putative low molecular mass early light-induced
  misc_feature (1)..(191): Homolog of NCBI NO: 34904610 NR Description: putative early light-inducible protein
  misc_feature (1)..(191): Homolog of NCBI NO: 28971958 NR Description: putative low molecular mass early light-induced
MAATVMASMSPLASATPGARRAFPVRLLLQASALAPRQRALAVTVRAQSDDAEAEPKEEAAAATTPAPKSKAAATASPGLWDALAFSGPAPERINGRLAMVGFVSALAVEASRGGGLLSQAGSGSGLAWFAATAAVLSVASLVPLLRGDSAEARSGAVMSADAELWNGRFAMLGLVALAFTEYLTGAPFINA

SEQ ID NO: 109093 - DNA, 893 bp, Zea mays subsp. mays
  misc_feature (1)..(893): Ceres Seq. ID no. 13624040
acagcgccaagggcaccaccagcaaggaccaagacagagcacagcgcagctcgtcggcctctcgacgccggttgctgcaaccaccgcctttattgcccacgcgggccgtgcggaagaagcaagaagacacgccaatggaggtcgccgcagcatcggcagcgggctacggattcaaggccgacgacgacgttgacagcctcagggcgacggagctcaggcttggcctgccgggcacggaggaggaggaggccgaggagtcccagaacaaggcgccgccgccgccgccgtcgacgcccagaggcaagaagcgcgacgtcgtcgccagcagcgggcccgaggatgcgcccaagaagcgcgactgcgagaccgacaccgatgccgcgccgccgccggccgccaaggctcagctggtgggatggccgccggtgaggtcgtacaggaagagctgcttccagcagcaggcggcggccaagaacaagccggcggcagcgctggcggaggaggccccggccgccggcgggctgttcgtgaaggtgagcatggacggcgccccctacctcaggaaggtggacctaaagatgtacaagggctaccgcgagctgcgggaggcgctggaggccatgttcctctgcttctccggcgccggcgccgccgacgcgcccgccgtcaacccctccgacttcgccgtcacctacgaggacaaggacggcgacctcatgctcgtcggcgacgtgcccttcggcatgttcatcagcacctgcaagaggctgaggatcatgaaggggtcagaagcgagagggctcggctcggccaagaacaactgatgatgattgatgaggcgtctatcgcatgcttgtgctgtgcgtgcgtgcatgcgccagcaaagcttatcg

SEQ ID NO: 109094 - protein, 273 aa, Zea mays subsp. mays
  misc_feature (1)..(273): Ceres Seq. ID no. 13624041
  misc_feature (65)..(270): Pfam Name: AUX/IAA family Pfam Description: AUX/IAA family
  misc_feature (64)..(268): Homolog of NCBI NO: 11131103 NR Description: Auxin-induced protein 22D (Indole-3-acetic acid
  misc_feature (44)..(267): Homolog of NCBI NO: 34904314 NR Description: unnamed protein product [Oryza sativa (japonica
  misc_feature (61)..(93): Homolog of NCBI NO: 99663 NR Description: auxin-induced protein AUX2-11 - Arabidopsis
  misc_feature (111)..(268): Homolog of NCBI NO: 99663 NR Description: auxin-induced protein AUX2-11 - Arabidopsis
  misc_feature (61)..(93): Homolog of NCBI NO: 15239950 NR Description: auxin-responsive protein IAA4 (Indoleacetic
  misc_feature (111)..(268): Homolog of NCBI NO: 15239950 NR Description: auxin-responsive protein IAA4 (Indoleacetic
  misc_feature (64)..(265): Homolog of NCBI NO: 34897206 NR Description: putative auxin-induced protein
  misc_feature (59)..(267): Homolog of NCBI NO: 32400272 NR Description: IAA1 protein [Triticum aestivum]
  misc_feature (59)..(265): Homolog of NCBI NO: 34393534 NR Description: putative auxin-induced protein
  misc_feature (65)..(270): Homolog of NCBI NO: 20269063 NR Description: aux/IAA protein [Populus tremula x Populus
SAKGTTSKDQDRAQRSSSASRRRLLQPPPLLPTRAVRKKQEDTPMEVAAASAAGYGFKADDDVDSLRATELRLGLPGTEEEEAEESQNKAPPPPPSTPRGKKRDVVASSGPEDAPKKRDCETDTDAAPPPAAKAQLVGWPPVRSYRKSCFQQQAAAKNKPAAALAEEAPAAGGLFVKVSMDGAPYLRKVDLKMYKGYRELREALEAMFLCFSGAGAADAPAVNPSDFAVTYEDKDGDLMLVGDVPFGMFISTCKRLRIMKGSEARGLGSAKNN

SEQ ID NO: 109095 - protein, 229 aa, Zea mays subsp. mays
  misc_feature (1)..(229): Ceres Seq. ID no. 13624042
  misc_feature (21)..(226): Pfam Name: AUX/IAA family Pfam Description: AUX/IAA family
  misc_feature (20)..(224): Homolog of NCBI NO: 11131103 NR Description: Auxin-induced protein 22D (Indole-3-acetic acid
  misc_feature (1)..(223): Homolog of NCBI NO: 34904314 NR Description: unnamed protein product [Oryza sativa (japonica
  misc_feature (17)..(49): Homolog of NCBI NO: 99663 NR Description: auxin-induced protein AUX2-11 - Arabidopsis
  misc_feature (67)..(224): Homolog of NCBI NO: 99663 NR Description: auxin-induced protein AUX2-11 - Arabidopsis
  misc_feature (17)..(49): Homolog of NCBI NO: 15239950 NR Description: auxin-responsive protein IAA4 (Indoleacetic
  misc_feature (67)..(224): Homolog of NCBI NO: 15239950 NR Description: auxin-responsive protein IAA4 (Indoleacetic
  misc_feature (20)..(221): Homolog of NCBI NO: 34897206 NR Description: putative auxin-induced protein
  misc_feature (15)..(223): Homolog of NCBI NO: 32400272 NR Description: IAA1 protein [Triticum aestivum]
  misc_feature (15)..(221): Homolog of NCBI NO: 34393534 NR Description: putative auxin-induced protein
  misc_feature (21)..(226): Homolog of NCBI NO: 20269063 NR Description: aux/IAA protein [Populus tremula x Populus
MEVAAASAAGYGFKADDDVDSLRATELRLGLPGTEEEEAEESQNKAPPPPPSTPRGKKRDVVASSGPEDAPKKRDCETDTDAAPPPAAKAQLVGWPPVRSYRKSCFQQQAAAKNKPAAALAEEAPAAGGLFVKVSMDGAPYLRKVDLKMYKGYRELREALEAMFLCFSGAGAADAPAVNPSDFAVTYEDKDGDLMLVGDVPFGMFISTCKRLRIMKGSEARGLGSAKNN

SEQ ID NO: 109096 - protein, 159 aa, Zea mays subsp. mays
  misc_feature (1)..(159): Ceres Seq. ID no. 13624043
  misc_feature (1)..(148): Homolog of NCBI NO: 93505 NR Description: ORF5 protein - Orf virus (strain NZ2)
MAAGEVVQEELLPAAGGGQEQAGGSAGGGGPGRRRAVREGEHGRRPLPQEGGPKDVQGLPRAAGGAGGHVPLLLRRRRRRRARRQPLRLRRHLRGQGRRPHARRRRALRHVHQHLQEAEDHEGVRSERARLGQEQLMMIDEASIACLCCACVHAPAKLI

SEQ ID NO: 109097 - DNA, 974 bp, Zea mays subsp. mays
  misc_feature (1)..(974): Ceres Seq. ID no. 14302646
accctttccatgaccatgagtccatgaccataactgcactgcatgcatggttgcacatccttctgccatcaaagaaaccatgtgaccgatcgacccatcaggttcccggaggtggtgaagctgcaggacgtgtgctggctggagatcagcgggaagctcagtctgtcgctgctgtctccggggacgacctacgcggcgcacctcgtcttcgccatagccgacgactcgtacggcctcgagtgccacgtcgggatgccggcgcttaaggccacggtcaccgtcaccgtctccggcaagacaacgatggcggagcacgacatctgcctgcaccacatgcagggcgaggcggaggccgcggcgcaccggcggacgcagcagtacgtgcgcctccgcaggggctacggcggcggagggaaggcgacggtgctgacgacgacgagggaggccgaccccgacatcaggtgcccccggcggaggggcgacgggtgggccgaggtcgaggtgggcgagttcgccgtggcgggcgacgagggcgacgccgcggacgtggaggtgacggtgcaggaggatagcctgcgctggaagaggggcctcgtggtgctgggcgtcgacatccggcccaagcagcacacgccaacgccatgctagctagctagcgcaatggccggtgcccgctgcccggtggattttattttttatacaaaaatctagggagaaattaacaagctaagtgctgatcaaattagatccagtcaggaacaggtaggcgatgtgcccactgctcaataaggccaagctttaaaacctgtatcttttatggacagactagtgcacttttaaaacggccgtccatttcttagcgctttagcttctctgaatatgcgcatggtgtattatttattattgtgtcagttgcttgcatgcaggctacgtacgtagcccataaaaccgtgatgaaattataggtgtgtttt

SEQ ID NO: 109098 - protein, 201 aa, Zea mays subsp. mays
  misc_feature (1)..(201): Ceres Seq. ID no. 14302647
  misc_feature (140)..(194): Homolog of NCBI NO: 21592660 NR Description: phloem-specific lectin PP2-like protein
  misc_feature (20)..(112): Homolog of NCBI NO: 21592660 NR Description: phloem-specific lectin PP2-like protein
  misc_feature (142)..(193): Homolog of NCBI NO: 15226939 NR Description: F-box protein (SKP1 interacting partner
  misc_feature (20)..(78): Homolog of NCBI NO: 15226939 NR Description: F-box protein (SKP1 interacting partner
  misc_feature (20)..(195): Homolog of NCBI NO: 15226908 NR Description: F-box protein (SKP1 interacting partner
  misc_feature (20)..(195): Homolog of NCBI NO: 38454184 NR Description: At2g02230 [Arabidopsis thaliana]
MHGCTSFCHQRNHVTDRPIRFPEVVKLQDVCWLEISGKLSLSLLSPGTTYAAHLVFAIADDSYGLECHVGMPALKATVTVTVSGKTTMAEHDICLHHMQGEAEAAAHRRTQQYVRLRRGYGGGGKATVLTTTREADPDIRCPRRRGDGWAEVEVGEFAVAGDEGDAADVEVTVQEDSLRWKRGLVVLGVDIRPKQHTPTPC

SEQ ID NO: 109099 - protein, 131 aa, Zea mays subsp. mays
  misc_feature (1)..(131): Ceres Seq. ID no. 14302648
  misc_feature (70)..(124): Homolog of NCBI NO: 21592660 NR Description: phloem-specific lectin PP2-like protein
  misc_feature (1)..(42): Homolog of NCBI NO: 21592660 NR Description: phloem-specific lectin PP2-like protein
  misc_feature (72)..(123): Homolog of NCBI NO: 15226939 NR Description: F-box protein (SKP1 interacting partner
  misc_feature (1)..(125): Homolog of NCBI NO: 15226908 NR Description: F-box protein (SKP1 interacting partner
  misc_feature (1)..(125): Homolog of NCBI NO: 38454184 NR Description: At2g02230 [Arabidopsis thaliana]
MPALKATVTVTVSGKTTMAEHDICLHHMQGEAEAAAHRRTQQYVRLRRGYGGGGKATVLTTTREADPDIRCPRRRGDGWAEVEVGEFAVAGDEGDAADVEVTVQEDSLRWKRGLVVLGVDIRPKQHTPTPC

SEQ ID NO: 109100 - protein, 114 aa, Zea mays subsp. mays
  misc_feature (1)..(114): Ceres Seq. ID no. 14302649
  misc_feature (53)..(107): Homolog of NCBI NO: 21592660 NR Description: phloem-specific lectin PP2-like protein
  misc_feature (1)..(25): Homolog of NCBI NO: 21592660 NR Description: phloem-specific lectin PP2-like protein
  misc_feature (55)..(106): Homolog of NCBI NO: 15226939 NR Description: F-box protein (SKP1 interacting partner
  misc_feature (1)..(108): Homolog of NCBI NO: 15226908 NR Description: F-box protein (SKP1 interacting partner
  misc_feature (1)..(108): Homolog of NCBI NO: 38454184 NR Description: At2g02230 [Arabidopsis thaliana]
MAEHDICLHHMQGEAEAAAHRRTQQYVRLRRGYGGGGKATVLTTTREADPDIRCPRRRGDGWAEVEVGEFAVAGDEGDAADVEVTVQEDSLRWKRGLVVLGVDIRPKQHTPTPC

SEQ ID NO: 109101 - DNA, 1654 bp, Zea mays subsp. mays
  misc_feature (1)..(1654): Ceres Seq. ID no. 13600071
  misc_feature: MA Experiment ID: 20000492 Result: Up-regulated in Transcription
  misc_feature: MA Experiment 20000492 PARAMETER Experiment Name: Zm_Hybrid_Seed_Dev_P Parameter: DAP Value: 12
  misc_feature: MA Experiment 20000492 PARAMETER Experiment Name: Zm_Hybrid_Seed_Dev_P Parameter: Organism Value: Zea mays
  misc_feature: MA Experiment 20000492 PARAMETER Experiment Name: Zm_Hybrid_Seed_Dev_P Parameter: Plant Line Value: 35A19
  misc_feature: MA Experiment 20000492 PARAMETER Experiment Name: Zm_Hybrid_Seed_Dev_P Parameter: Tissue Value: Fert Kernel vs. Unfert Floret
gaattcgcgctcttcacccatttccccatctccgacctcccccttcctctcccccctgccgctccccgcgccgagaaggagaaccccagccgccgcgcagcgcgccgcccatggcctcctcgtcggagaacgcggctgtgccgccggaggaggagccccaggccccgccgccgccggacacagagcctaccgaggcggcgcccggcgaggcggaggatgagccgcaaaccctagagcgggcgcaggagctcttcgacaggggttccaaggccatcgaggatgaggacttcgtcgacgccgtagactgcctcagccgagcgctcgagatcagggcttcacattatggagagctcgcgccggagtgtgccagcacatacttcaaatatggatgtgccctgctatacaaagctcaggaggagagtgatgttttgggaaatgttcccaagagcttgccaaatgaagactcagtgaagagtacagctactaaagatgacagtggaacctcaaaggtctctggtaccaatgtggaggatgctgcgtcatcagaaaaagttgatgctgaagaaggtcaaaactcaaatggcaaaaatcaggagaatgggaatggtgaagttgagagagatgatgatgacgacgacgatgatgagaagatgggagatgaagaggataatgatttggatctttcttggaaaatgttggacattgctagggcaatagttgagaagagccaagataacactatggagaaagtaaaaatatattctgctcttgctgaagtggcaacagaaagagaggacatggacaactcactcagtgactatatgaaagctttatccatgttggagcatttggttgagcctgaccatcgtcgagttgtggaattaaattttcgcatttgtttggtttatgaactagtttccaagatcggagatgcagtttcatactgtgcaaaagcaatttcactatgcaagtcacgcatacagagcctgaaaagttccaaggatgctttgttggctggtatagatggtgatgcatctgctgctgcagctgaaggaggctcagaaaaatctgccgttgaaaaagagctagagcagcttactagtatattgcctgatcttgagaagaagcttgaggacctgtctgaagcaaacccaagcgctgacatggatgagatggtgaaggcaattgcgtccagggtaactgaagtgatgccaaaagctgcatcttttacttcttcccagatggcaacctcaagcaatggattcgactcctcggttatgtctacggcagcgacaaccggaagctctggaagcacggtgactgaccttggggttgtaggcagaggcgtcaaacgagctagcatcaagccgatctctgctgaacctgctgctaagaaacctgcacttgattcaccatctctccaaggtgacagcagcatcaactctgaggttgtccctgcaacgcagactggagacgagtccgtatctaagtaaattacaatttcattagccctactgtaatgttaacttgctggaacatattagctgctatgtaaacgcttaagaagggactgctggagccatagactcatcgtgagctgacaattgaaatgttaaattgctgaggagatcaaaaaaaaaaaaaaaaaagctta

SEQ ID NO: 109102 - protein, 496 aa, Zea mays subsp. mays
  misc_feature (1)..(496): Ceres Seq. ID no. 15218642
  misc_feature (80)..(113): Pfam Name: TPR Domain Pfam Description: TPR Domain
  misc_feature (57)..(428): Homolog of NCBI NO: 123127 NR Description: HISTONE-BINDING PROTEIN N1/N2
  misc_feature (66)..(335): Homolog of NCBI NO: 30584691 NR Description: Homo sapiens nuclear autoantigenic sperm protein
  misc_feature (66)..(335): Homolog of NCBI NO: 27262630 NR Description: nuclear autoantigenic sperm protein isoform 3
  misc_feature (37)..(335): Homolog of NCBI NO: 13435642 NR Description: Nasp protein [Mus musculus]
  misc_feature (64)..(141): Homolog of NCBI NO: 18129310 NR Description: hypothetical protein [Pinus pinaster]
  misc_feature (66)..(335): Homolog of NCBI NO: 4104353 NR Description: nuclear autoantigenic sperm protein autosomal
  misc_feature (59)..(380): Homolog of NCBI NO: 25407799 NR Description: hypothetical protein AT4g37210 [imported] -
  misc_feature (59)..(437): Homolog of NCBI NO: 18419996 NR Description: tetratricopeptide repeat (TPR)-containing protein
  misc_feature (145)..(496): Homolog of NCBI NO: 32352192 NR Description: hypothetical protein [Oryza sativa (japonica
  misc_feature (37)..(496): Homolog of NCBI NO: 38175649 NR Description: tetratricopeptide repeat-containing protein-like
IRALHPFPHLRPPPSSPPCRSPRREGEPQPPRSAPPMASSSENAAVPPEEEPQAPPPPDTEPTEAAPGEAEDEPQTLERAQELFDRGSKAIEDEDFVDAVDCLSRALEIRASHYGELAPECASTYFKYGCALLYKAQEESDVLGNVPKSLPNEDSVKSTATKDDSGTSKVSGTNVEDAASSEKVDAEEGQNSNGKNQENGNGEVERDDDDDDDDEKMGDEEDNDLDLSWKMLDIARAIVEKSQDNTMEKVKIYSALAEVATEREDMDNSLSDYMKALSMLEHLVEPDHRRVVELNFRICLVYELVSKIGDAVSYCAKAISLCKSRIQSLKSSKDALLAGIDGDASAAAAEGGSEKSAVEKELEQLTSILPDLEKKLEDLSEANPSADMDEMVKAIASRVTEVMPKAASFTSSQMATSSNGFDSSVMSTAATTGSSGSTVTDLGVVGRGVKRASIKPISAEPAAKKPALDSPSLQGDSSINSEVVPATQTGDESVSK

SEQ ID NO: 109103 - protein, 460 aa, Zea mays subsp. mays
  misc_feature (1)..(460): Ceres Seq. ID no. 15218643
  misc_feature (44)..(77): Pfam Name: TPR Domain Pfam Description: TPR Domain
  misc_feature (21)..(392): Homolog of NCBI NO: 123127 NR Description: HISTONE-BINDING PROTEIN N1/N2
  misc_feature (30)..(299): Homolog of NCBI NO: 30584691 NR Description: Homo sapiens nuclear autoantigenic sperm protein
  misc_feature (30)..(299): Homolog of NCBI NO: 27262630 NR Description: nuclear autoantigenic sperm protein isoform 3
  misc_feature (1)..(299): Homolog of NCBI NO: 13435642 NR Description: Nasp protein [Mus musculus]
  misc_feature (28)..(105): Homolog of NCBI NO: 18129310 NR Description: hypothetical protein [Pinus pinaster]
  misc_feature (30)..(299): Homolog of NCBI NO: 4104353 NR Description: nuclear autoantigenic sperm protein autosomal
  misc_feature (23)..(344): Homolog of NCBI NO: 25407799 NR Description: hypothetical protein AT4g37210 [imported] -
  misc_feature (23)..(401): Homolog of NCBI NO: 18419996 NR Description: tetratricopeptide repeat (TPR)-containing protein
  misc_feature (109)..(460): Homolog of NCBI NO: 32352192 NR Description: hypothetical protein [Oryza sativa (japonica
  misc_feature (1)..(460): Homolog of NCBI NO: 38175649 NR Description: tetratricopeptide repeat-containing protein-like
MASSSENAAVPPEEEPQAPPPPDTEPTEAAPGEAEDEPQTLERAQELFDRGSKAIEDEDFVDAVDCLSRALEIRASHYGELAPECASTYFKYGCALLYKAQEESDVLGNVPKSLPNEDSVKSTATKDDSGTSKVSGTNVEDAASSEKVDAEEGQNSNGKNQENGNGEVERDDDDDDDDEKMGDEEDNDLDLSWKMLDIARAIVEKSQDNTMEKVKIYSALAEVATEREDMDNSLSDYMKALSMLEHLVEPDHRRVVELNFRICLVYELVSKIGDAVSYCAKAISLCKSRIQSLKSSKDALLAGIDGDASAAAAEGGSEKSAVEKELEQLTSILPDLEKKLEDLSEANPSADMDEMVKAIASRVTEVMPKAASFTSSQMATSSNGFDSSVMSTAATTGSSGSTVTDLGVVGRGVKRASIKPISAEPAAKKPALDSPSLQGDSSINSEVVPATQTGDESVSK

SEQ ID NO: 109104 - protein, 280 aa, Zea mays subsp. mays
  misc_feature (1)..(280): Ceres Seq. ID no. 15218644
  misc_feature (1)..(268): Homolog of NCBI NO: 28277791 NR Description: Unknown (protein for MGC:56007) [Danio rerio]
  misc_feature (1)..(212): Homolog of NCBI NO: 123127 NR Description: HISTONE-BINDING PROTEIN N1/N2
  misc_feature (1)..(119): Homolog of NCBI NO: 30584691 NR Description: Homo sapiens nuclear autoantigenic sperm protein
  misc_feature (1)..(119): Homolog of NCBI NO: 27262630 NR Description: nuclear autoantigenic sperm protein isoform 3
  misc_feature (1)..(119): Homolog of NCBI NO: 13435642 NR Description: Nasp protein [Mus musculus]
  misc_feature (1)..(119): Homolog of NCBI NO: 4104353 NR Description: nuclear autoantigenic sperm protein autosomal
  misc_feature (1)..(164): Homolog of NCBI NO: 25407799 NR Description: hypothetical protein AT4g37210 [imported] -
  misc_feature (1)..(221): Homolog of NCBI NO: 18419996 NR Description: tetratricopeptide repeat (TPR)-containing protein
  misc_feature (1)..(280): Homolog of NCBI NO: 32352192 NR Description: hypothetical protein [Oryza sativa (japonica
  misc_feature (1)..(280): Homolog of NCBI NO: 38175649 NR Description: tetratricopeptide repeat-containing protein-like
MGDEEDNDLDLSWKMLDIARAIVEKSQDNTMEKVKIYSALAEVATEREDMDNSLSDYMKALSMLEHLVEPDHRRVVELNFRICLVYELVSKIGDAVSYCAKAISLCKSRIQSLKSSKDALLAGIDGDASAAAAEGGSEKSAVEKELEQLTSILPDLEKKLEDLSEANPSADMDEMVKAIASRVTEVMPKAASFTSSQMATSSNGFDSSVMSTAATTGSSGSTVTDLGVVGRGVKRASIKPISAEPAAKKPALDSPSLQGDSSINSEVVPATQTGDESVSK

SEQ ID NO: 109105 - DNA, 677 bp, Zea mays subsp. mays
  misc_feature (1)..(677): Ceres Seq. ID no. 12594284
atcaacgacagccccagacaacactcaccgatagcaagtagcgccgccgacgtttcgagagcagagtatccaagctagccaagcgcgcacctcggtgacctaagctagttcaggcgacgatatggcgtcaggtcaggaaaagcagggaaggagntggaccgcaagggcccgcgaggggcggagaccgtcggttcccccggcggggaccggcgggcaaggaagcgtcgaggcccaggagcacccttcgccggaagggcgcagccgcggaggccagactcgcagggagcagctggggcagcaggggtacagcgagatggggaagaagggcggtgtgagcaccacggacgagtccggcggcgagcgcgccgccagggagggcgtcagcatcgacgagtccaagttcaccaagtagtcctatcgcgtgcgtgcgtacgcagcgttcgtagctgtctgcgtagtgtaccttggccgtagctagtgctactctgtactttggagtagctgaatgataataatgtagctagcagcatgcatgtaggcgatcatacatacgtacgtacacaggtacgtgtgtgtgatcatgtatgcttccagaagggtatcctagcttaatcagtcacgtcgtcaagtcgtcaatatggcaggttcgcgtcagggctttgtagtttgatagcctg

SEQ ID NO: 109106 - protein, 96 aa, Zea mays subsp. mays
  misc_feature (1)..(96): Ceres Seq. ID no. 12594285
  misc_feature (1)..(96): Pfam Name: Small hydrophilic plant seed protein Pfam Description: Small hydrophilic plant seed protein
  misc_feature (1)..(96): Homolog of NCBI NO: 7594647 NR Description: Early-methionine-labelled polypeptide [Secale
  misc_feature (1)..(96): Homolog of NCBI NO: 1170723 NR Description: Late embryogenesis abundant protein B19.1B
  misc_feature (1)..(96): Homolog of NCBI NO: 7594645 NR Description: Early-methionine-labelled polypeptide [Secale
  misc_feature (1)..(96): Homolog of NCBI NO: 119313 NR Description: EM PROTEIN
  misc_feature (1)..(96): Homolog of NCBI NO: 1169516 NR Description: EM PROTEIN H2
  misc_feature (1)..(96): Homolog of NCBI NO: 547817 NR Description: Late embryogenesis abundant protein B19.1A
  misc_feature (1)..(96): Homolog of NCBI NO: 7594641 NR Description: Early-methionine-labelled polypeptide [Secale
  misc_feature (1)..(96): Homolog of NCBI NO: 119315 NR Description: EM PROTEIN CS41
  misc_feature (1)..(96): Homolog of NCBI NO: 1169521 NR Description: Embryonic abundant protein 1
  misc_feature (1)..(96): Homolog of NCBI NO: 1169520 NR Description: LATE EMBRYOGENESIS ABUNDANT PROTEIN EMB564
MASGQEKQGRXWTARAREGRRPSVPPAGTGGQGSVEAQEHPSPEGRSRGGQTRREQLGQQGYSEMGKKGGVSTTDESGGERAAREGVSIDESKFTK

SEQ ID NO: 109107 - DNA, 664 bp, Zea mays subsp. mays
  misc_feature (1)..(664): Ceres Seq. ID no. 13600689
acccctacccgcgacttcgctcagcttccgccgatcggcttgccccgtcgatttcgccaacccctcgacccgatcggctccattgatcgtacctcgtcgtccggttgtcgatggccaggacctctttcaaaatggagcacgacctcgagaaaaggcagtccgaatctgccaggatcagggataagtatcccgacagaattcctgtgattgttgagaaagctggcaaaactgatgtccccgagattgataagaagaagtaccttgtccctgctgatctcactgtcggccagtttgtctatgtggtgaggaagagaatcaagctgagcccagagaaggccatctttgtctttgtgaagaacaccttgccaccaactgcctctttgatgtctgcaatctacgaagagaacaaggacgaggatggcttcctttacatgacctacagtggtgaaaacaccttcggctctgcctagagcaatcgcccctgccactgtaaataaacgagcatgatggggctgctgctattgtaaacctgtgtatatacctcagtctctagtatgctgctgccggattgcttcaatggcttcaatgacacccttagctttcaactgtttggatttctcctgtgacattgaattccttcggtatcgaaacatttgatcatttc

SEQ ID NO: 109108 - protein, 119 aa, Zea mays subsp. mays
  misc_feature (1)..(119): Ceres Seq. ID no. 13600690
  misc_feature (15)..(117): Pfam Name: Microtubule associated protein 1A/1B, light chain 3 Pfam Description: Microtubule associated protein 1A/1B, light
  misc_feature (1)..(118): Homolog of NCBI NO: 21553487 NR Description: symbiosis-related like protein [Arabidopsis
  misc_feature (1)..(117): Homolog of NCBI NO: 21592920 NR Description: putative microtubule-associated protein
  misc_feature (1)..(118): Homolog of NCBI NO: 18415813 NR Description: symbiosis-related like protein [Arabidopsis
  misc_feature (1)..(117): Homolog of NCBI NO: 15220686 NR Description: symbiosis-related protein -related [Arabidopsis
  misc_feature (1)..(117): Homolog of NCBI NO: 38344173 NR Description: OSJNBa0053K19.12 [Oryza sativa (japonica
  misc_feature (1)..(118): Homolog of NCBI NO: 34595981 NR Description: microtubule-associated protein 1 light chain 3
  misc_feature (1)..(117): Homolog of NCBI NO: 40253647 NR Description: putative microtubial binding protein
  misc_feature (7)..(119): Homolog of NCBI NO: 37776903 NR Description: putative microtubule-associated protein [Oryza
  misc_feature (1)..(119): Homolog of NCBI NO: 32401365 NR Description: autophagy [Triticum aestivum]
  misc_feature (1)..(119): Homolog of NCBI NO: 33146967 NR Description: putative microtubule associated protein
MARTSFKMEHDLEKRQSESARIRDKYPDRIPVIVEKAGKTDVPEIDKKKYLVPADLTVGQFVYVVRKRIKLSPEKAIFVFVKNTLPPTASLMSAIYEENKDEDGFLYMTYSGENTFGSA

SEQ ID NO: 109109 - protein, 112 aa, Zea mays subsp. mays
  misc_feature (1)..(112): Ceres Seq. ID no. 13600691
  misc_feature (8)..(110): Pfam Name: Microtubule associated protein 1A/1B, light chain 3 Pfam Description: Microtubule associated protein 1A/1B, light
  misc_feature (1)..(111): Homolog of NCBI NO: 21553487 NR Description: symbiosis-related like protein [Arabidopsis
  misc_feature (1)..(110): Homolog of NCBI NO: 21592920 NR Description: putative microtubule-associated protein
  misc_feature (1)..(111): Homolog of NCBI NO: 18415813 NR Description: symbiosis-related like protein [Arabidopsis
  misc_feature (1)..(110): Homolog of NCBI NO: 15220686 NR Description: symbiosis-related protein -related [Arabidopsis
  misc_feature (1)..(110): Homolog of NCBI NO: 38344173 NR Description: OSJNBa0053K19.12 [Oryza sativa (japonica
  misc_feature (1)..(111): Homolog of NCBI NO: 34595981 NR Description: microtubule-associated protein 1 light chain 3
  misc_feature (1)..(110): Homolog of NCBI NO: 40253647 NR Description: putative microtubial binding protein
  misc_feature (1)..(112): Homolog of NCBI NO: 37776903 NR Description: putative microtubule-associated protein [Oryza
  misc_feature (1)..(112): Homolog of NCBI NO: 32401365 NR Description: autophagy [Triticum aestivum]
  misc_feature (1)..(112): Homolog of NCBI NO: 33146967 NR Description: putative microtubule associated protein
MEHDLEKRQSESARIRDKYPDRIPVIVEKAGKTDVPEIDKKKYLVPADLTVGQFVYVVRKRIKLSPEKAIFVFVKNTLPPTASLMSAIYEENKDEDGFLYMTYSGENTFGSA

SEQ ID NO: 109110 - protein, 68 aa, Zea mays subsp. mays
  misc_feature (1)..(68): Ceres Seq. ID no. 13600692
TPTRDFAQLPPIGLPRRFRQPLDPIGSIDRTSSSGCRWPGPLSKWSTTSRKGSPNLPGSGISIPTEFL

SEQ ID NO: 109111 - DNA, 1723 bp, Zea mays subsp. mays
  misc_feature (1)..(1723): Ceres Seq. ID no. 12782785
actgtcttgactcttcctcgtctccactctccaccaccatcattgattcctgtctccgcagcttgacccacagacgcgactagggcagtcaccgcggcgtagctgccgcgtcttgccccgaaacacagccgtcaacgccgccccggaccgcagcagcgcggcgcaaccccaatcggagccggagccagcgaagcgagcgcctcgcttccacaagtcgctagctgcatctggagcgccgccggcccgaccaacgcccgagccaaccgtgggcgttcggccgccgattcctctgggctctggtggatgtcttgtaggaacacacttggatgaggttacaatacgcgtgaaacgccatacccttcatcttgctattttgtgctatctcaacaaataaaatcttctccaacaacaaacctttcagcttcaccatagtgtctgctaggtcgttgcttgagatcgaccccaattcaggactcgttcaggacaaggtaaaagttggacaaactttggaagaggacacccaaaacattatcaatatgactatgaatgtgtcgtctggatggagcattgtgaaagaagaattcatacttcctgctagaggtgcccctttcaatagttgccatgcttctactattgtacagattgaggaagacaattttttggtagcatattttggtggatccagggaaggtgctccggatgttaaaatctggttacagagatatagtgatggtcactggcatcctccagtggtggctgatgaacaagatggggtgcccatgtggaatcctgttttgtttcagcttccctcccgtgagctgcttctcttctacaagattggtcaagaagttcagaagtggagcggtgccatgaaaagatcgttagatggcggtgtaacctggtcaccgagagagcagttacctcctggcatccttggtcctattaaaaataagcctttcttgcttgaagatgggcgcctactgtgtggatcatcagttgaaagttggaattcttggggtgcatggcttgaggttacgaaagatgccggatggacctggagaaagtatggccctatatgtataaaaggtcaaccacttggggtaattcagccagttccctacaggactgacgatggaactattcgagtgttgctgcgatcatttgaaacaattggtcatgtatgtatggccgattccattgatgaaggtgtgacatggagttatgtccgtgagactgagcttccaaacccaaattctgggattgatggagttaagatgaaggatggaagagtactgcttgcctacaacaccttctccagaggaacgctcaagcttgcagtatccttaaacgacggtgattcatgggacgaagtaatgacactagaggacacgaaaggtatggagttttcgtatcctgcagtgatccagtctatggatgagctcatacatgttacctatacatacaatcggacacaggttaagcatgttgttcttcgacctagttcgatggtgaagttgtgagcctgctgcaactgatgaaggcctatggctggcaacttcaggacacccaaatttatcaccaaatgtttaggagaggggggtcattgcatcggattggctagattatgctcagttgatgtcaaataaatgctttcaggtgctacttaatggactttttccgaggttcatctaaaaaggtatatactgtttaaaatgttctgctc

SEQ ID NO: 109112 - protein, 327 aa, Zea mays subsp. mays
  misc_feature (1)..(327): Ceres Seq. ID no. 12782786
  misc_feature (11)..(324): Homolog of NCBI NO: 21232340 NR Description: conserved hypothetical protein
  misc_feature (11)..(322): Homolog of NCBI NO: 21243816 NR Description: conserved hypothetical protein
  misc_feature (9)..(312): Homolog of NCBI NO: 26452755 NR Description: unknown protein [Arabidopsis thaliana]
  misc_feature (5)..(319): Homolog of NCBI NO: 23617011 NR Description: hypothetial protein~similar to Arabidopsis
  misc_feature (9)..(139): Homolog of NCBI NO: 9759267 NR Description: gene_id:MRI1.6~pir||D64592~similar to unknown
  misc_feature (136)..(323): Homolog of NCBI NO: 9759267 NR Description: gene_id:MRI1.6~pir||D64592~similar to unknown
  misc_feature (9)..(323): Homolog of NCBI NO: 21536870 NR Description: unknown [Arabidopsis thaliana]
  misc_feature (9)..(323): Homolog of NCBI NO: 30696919 NR Description: expressed protein [Arabidopsis thaliana]
  misc_feature (9)..(323): Homolog of NCBI NO: 30696915 NR Description: expressed protein [Arabidopsis thaliana]
  misc_feature (1)..(326): Homolog of NCBI NO: 34393670 NR Description: alpha-rhamnosidase-like protein
MTMNVSSGWSIVKEEFILPARGAPFNSCHASTIVQIEEDNFLVAYFGGSREGAPDVKIWLQRYSDGHWHPPVVADEQDGVPMWNPVLFQLPSRELLLFYKIGQEVQKWSGAMKRSLDGGVTWSPREQLPPGILGPIKNKPFLLEDGRLLCGSSVESWNSWGAWLEVTKDAGWTWRKYGPICIKGQPLGVIQPVPYRTDDGTIRVLLRSFETIGHVCMADSIDEGVTWSYVRETELPNPNSGIDGVKMKDGRVLLAYNTFSRGTLKLAVSLNDGDSWDEVMTLEDTKGMEFSYPAVIQSMDELIHVTYTYNRTQVKHVVLRPSSMVKL

SEQ ID NO: 109113 - protein, 325 aa, Zea mays subsp. mays
  misc_feature (1)..(325): Ceres Seq. ID no. 12782787
  misc_feature (9)..(322): Homolog of NCBI NO: 21232340 NR Description: conserved hypothetical protein
  misc_feature (9)..(320): Homolog of NCBI NO: 21243816 NR Description: conserved hypothetical protein
  misc_feature (7)..(310): Homolog of NCBI NO: 26452755 NR Description: unknown protein [Arabidopsis thaliana]
  misc_feature (3)..(317): Homolog of NCBI NO: 23617011 NR Description: hypothetial protein~similar to Arabidopsis
  misc_feature (7)..(137): Homolog of NCBI NO: 9759267 NR Description: gene_id:MRI1.6~pir||D64592~similar to unknown
  misc_feature (134)..(321): Homolog of NCBI NO: 9759267 NR Description: gene_id:MRI1.6~pir||D64592~similar to unknown
  misc_feature (7)..(321): Homolog of NCBI NO: 21536870 NR Description: unknown [Arabidopsis thaliana]
  misc_feature (7)..(321): Homolog of NCBI NO: 30696919 NR Description: expressed protein [Arabidopsis thaliana]
  misc_feature (7)..(321): Homolog of NCBI NO: 30696915 NR Description: expressed protein [Arabidopsis thaliana]
  misc_feature (1)..(324): Homolog of NCBI NO: 34393670 NR Description: alpha-rhamnosidase-like protein
MNVSSGWSIVKEEFILPARGAPFNSCHASTIVQIEEDNFLVAYFGGSREGAPDVKIWLQRYSDGHWHPPVVADEQDGVPMWNPVLFQLPSRELLLFYKIGQEVQKWSGAMKRSLDGGVTWSPREQLPPGILGPIKNKPFLLEDGRLLCGSSVESWNSWGAWLEVTKDAGWTWRKYGPICIKGQPLGVIQPVPYRTDDGTIRVLLRSFETIGHVCMADSIDEGVTWSYVRETELPNPNSGIDGVKMKDGRVLLAYNTFSRGTLKLAVSLNDGDSWDEVMTLEDTKGMEFSYPAVIQSMDELIHVTYTYNRTQVKHVVLRPSSMVKL

SEQ ID NO: 109114 - protein, 246 aa, Zea mays subsp. mays
  misc_feature (1)..(246): Ceres Seq. ID no. 12782788
  misc_feature (1)..(243): Homolog of NCBI NO: 21232340 NR Description: conserved hypothetical protein
  misc_feature (1)..(241): Homolog of NCBI NO: 21243816 NR Description: conserved hypothetical protein
  misc_feature (1)..(231): Homolog of NCBI NO: 26452755 NR Description: unknown protein [Arabidopsis thaliana]
  misc_feature (1)..(238): Homolog of NCBI NO: 23617011 NR Description: hypothetial protein~similar to Arabidopsis
  misc_feature (1)..(58): Homolog of NCBI NO: 9759267 NR Description: gene_id:MRI1.6~pir||D64592~similar to unknown
  misc_feature (55)..(242): Homolog of NCBI NO: 9759267 NR Description: gene_id:MRI1.6~pir||D64592~similar to unknown
  misc_feature (1)..(242): Homolog of NCBI NO: 21536870 NR Description: unknown [Arabidopsis thaliana]
  misc_feature (1)..(242): Homolog of NCBI NO: 30696919 NR Description: expressed protein [Arabidopsis thaliana]
  misc_feature (1)..(242): Homolog of NCBI NO: 30696915 NR Description: expressed protein [Arabidopsis thaliana]
  misc_feature (1)..(245): Homolog of NCBI NO: 34393670 NR Description: alpha-rhamnosidase-like protein
MWNPVLFQLPSRELLLFYKIGQEVQKWSGAMKRSLDGGVTWSPREQLPPGILGPIKNKPFLLEDGRLLCGSSVESWNSWGAWLEVTKDAGWTWRKYGPICIKGQPLGVIQPVPYRTDDGTIRVLLRSFETIGHVCMADSIDEGVTWSYVRETELPNPNSGIDGVKMKDGRVLLAYNTFSRGTLKLAVSLNDGDSWDEVMTLEDTKGMEFSYPAVIQSMDELIHVTYTYNRTQVKHVVLRPSSMVKL

SEQ ID NO: 109115 - DNA, 722 bp, Zea mays subsp. mays
  misc_feature (1)..(722): Ceres Seq. ID no. 12636917
atcacaattcactccactcatcttttctcgtttagaacctctaaaatttcccccactcgccagtcgcagcagcacctgtagcagtcatggacgccagcggagccggtagcaaggggaagaagggggcggccgggcgcaaggcaggcggccccaggaagaagtcggtgacgcggtccgtcaaggccgggctgcagttccccgtcggccggatcgggcgctacctcaagaagggccggtacgcgcagcgcgtgggcactggcgcccccgtctacctcgccgccgtcctggagtacctcgccgccgaggttctggagttggcagggaacgcggcgaaagacaacaagaagacgcgcatcatcccgcgccacgtgctcctggcgatccgcaacgacgaggagctcgggaagctgctggccggcgtcaccatcgcgcacggcggcgtcctccccaacatccactccgtgctcctgcccaagaaggcggcggagaaggcggccagcggcggcagcaaggagcccaagtcccccaagaagggcgccaagtcccccaagaaggcttagaaagtagggtcttcatttgcgctgtgtgctgtagcatgttcgtgtctagatctgtggatgggatgtgtcctgctctagtatcgtccttgtgtcttattgtatgttcgtcttcatcgagaagatcttcagcagtcagagctcgttgtgtactaatgttccccc

SEQ ID NO: 109116 - protein, 157 aa, Zea mays subsp. mays
  misc_feature (1)..(157): Ceres Seq. ID no. 12636918
  misc_feature (9)..(131): Pfam Name: Core histone H2A/H2B/H3/H4 Pfam Description: Core histone H2A/H2B/H3/H4
  misc_feature (8)..(157): Homolog of NCBI NO: 122003 NR Description: HISTONE H2A
  misc_feature (1)..(157): Homolog of NCBI NO: 729669 NR Description: Histone H2A
  misc_feature (6)..(157): Homolog of NCBI NO: 15241857 NR Description: putative protein
  misc_feature (1)..(157): Homolog of NCBI NO: 122006 NR Description: HISTONE H2A
  misc_feature (8)..(157): Homolog of NCBI NO: 121982 NR Description: HISTONE H2A.2.2
  misc_feature (7)..(157): Homolog of NCBI NO: 121974 NR Description: HISTONE H2A.2.1
  misc_feature (7)..(157): Homolog of NCBI NO: 7649159 NR Description: histone H2A [Euphorbia esula]
  misc_feature (6)..(157): Homolog of NCBI NO: 122007 NR Description: Histone H2A
  misc_feature (1)..(157): Homolog of NCBI NO: 34914498 NR Description: putative histone H2A [Oryza sativa (japonica
  misc_feature (1)..(157): Homolog of NCBI NO: 729671 NR Description: Histone H2A
MDASGAGSKGKKGAAGRKAGGPRKKSVTRSVKAGLQFPVGRIGRYLKKGRYAQRVGTGAPVYLAAVLEYLAAEVLELAGNAAKDNKKTRIIPRHVLLAIRNDEELGKLLAGVTIAHGGVLPNIHSVLLPKKAAEKAASGGSKEPKSPKKGAKSPKKA

SEQ ID NO: 109117 - DNA, 808 bp, Zea mays subsp. mays
  misc_feature (1)..(808): Ceres Seq. ID no. 13623785
aaaaaaaaaaaaggatacatcaaaccctcaaaagtgaaaagcccgtgtctactaaaacccaagacacttgggcggttcacggcggcccagactgcggcgcctcaccaaccaacgagaccacgaagcagaccatgtcatcctacggtcccgccggcgccgcggcggacgcgatggaagctgccggcggcggcagctaccgtgtgtgcgacacggtggtgctcgtctgcctcgcctgcgcctccgccctcatcgtctctacgatggccgtctgcttccgccgcgccttcgccaacgggtacacggccagcgcgggggccaccgctgcgaacggcagaagccagtgtgggctggcgccgtccgcgctgtcggcgatccccaagctcgcctaccggaggggcgctggcgctggcgctgggtgggcgcagtgcgcgatctgcctcgccttggtgcgggacggcgagacggtgcggttgctgccggcgtgtggccacctattccacgttgagtgcatcgacctgtggctgcgctctcacgctacgtgcccgctttgccggcgtgacgtcggggaggagccacatgaaaaagtttgagctcgccgctggtggaccaggatgacacacgccggctactggttcaaccgccggcctctagagtctagactctagttcaacttttgtttcctgccatgatgttgggcattcatccaaagaattgtacatcctagggtttaggcgtagtttcattttttttcggtggaatggaacctttattctgccatccaaaaaaaaaaaaaaaaaagcttatcgat

SEQ ID NO: 109118 - protein, 204 aa, Zea mays subsp. mays
  misc_feature (1)..(204): Ceres Seq. ID no. 13623786
KKKKGYIKPSKVKSPCLLKPKTLGRFTAAQTAAPHQPTRPRSRPCHPTVPPAPRRTRWKLPAAAATVCATRWCSSASPAPPPSSSLRWPSASAAPSPTGTRPARGPPLRTAEASVGWRRPRCRRSPSSPTGGALALALGGRSARSASPWCGTARRCGCCRRVATYSTLSASTCGCALTLRARFAGVTSGRSHMKKFELAAGGPG

SEQ ID NO: 109119 - protein, 195 aa, Zea mays subsp. mays
  misc_feature (1)..(195): Ceres Seq. ID no. 13623787
  misc_feature (142)..(183): Pfam Name: Zinc finger, C3HC4 type (RING finger) Pfam Description: Zinc finger, C3HC4 type (RING finger)
  misc_feature (92)..(191): Homolog of NCBI NO: 34903936 NR Description: OSJNBa0038J17.13 [Oryza sativa (japonica
  misc_feature (53)..(187): Homolog of NCBI NO: 34903926 NR Description: OSJNBa0038J17.8 [Oryza sativa (japonica
  misc_feature (46)..(187): Homolog of NCBI NO: 34907826 NR Description: P0485B12.26 [Oryza sativa (japonica
  misc_feature (71)..(187): Homolog of NCBI NO: 34903928 NR Description: OSJNBa0038J17.9 [Oryza sativa (japonica
  misc_feature (107)..(189): Homolog of NCBI NO: 21645888 NR Description: ring-H2 zinc finger protein [Zea mays]
  misc_feature (65)..(195): Homolog of NCBI NO: 28558782 NR Description: RING/C3HC4/PHD zinc finger-like protein [Cucumis
  misc_feature (115)..(187): Homolog of NCBI NO: 21740712 NR Description: OSJNBa0086B14.5 [Oryza sativa (japonica
  misc_feature (93)..(191): Homolog of NCBI NO: 34903920 NR Description: OSJNBa0038J17.5 [Oryza sativa (japonica
  misc_feature (51)..(191): Homolog of NCBI NO: 34909640 NR Description: P0503C12.20 [Oryza sativa (japonica
  misc_feature (29)..(187): Homolog of NCBI NO: 7489432 NR Description: probable ring finger protein - barley
KKKRIHQTLKSEKPVSTKTQDTWAVHGGPDCGASPTNETTKQTMSSYGPAGAAADAMEAAGGGSYRVCDTVVLVCLACASALIVSTMAVCFRRAFANGYTASAGATAANGRSQCGLAPSALSAIPKLAYRRGAGAGAGWAQCAICLALVRDGETVRLLPACGHLFHVECIDLWLRSHATCPLCRRDVGEEPHEKV

SEQ ID NO: 109120 - protein, 152 aa, Zea mays subsp. mays
  misc_feature (1)..(152): Ceres Seq. ID no. 13623788
  misc_feature (99)..(140): Pfam Name: Zinc finger, C3HC4 type (RING finger) Pfam Description: Zinc finger, C3HC4 type (RING finger)
  misc_feature (64)..(146): Homolog of NCBI NO: 21645888 NR Description: ring-H2 zinc finger protein [Zea mays]
  misc_feature (22)..(152): Homolog of NCBI NO: 28558782 NR Description: RING/C3HC4/PHD zinc finger-like protein [Cucumis
  misc_feature (28)..(144): Homolog of NCBI NO: 34903928 NR Description: OSJNBa0038J17.9 [Oryza sativa (japonica
  misc_feature (72)..(144): Homolog of NCBI NO: 21740712 NR Description: OSJNBa0086B14.5 [Oryza sativa (japonica
  misc_feature (49)..(148): Homolog of NCBI NO: 34903936 NR Description: OSJNBa0038J17.13 [Oryza sativa (japonica
  misc_feature (10)..(144): Homolog of NCBI NO: 34903926 NR Description: OSJNBa0038J17.8 [Oryza sativa (japonica
  misc_feature (3)..(144): Homolog of NCBI NO: 34907826 NR Description: P0485B12.26 [Oryza sativa (japonica
  misc_feature (50)..(148): Homolog of NCBI NO: 34903920 NR Description: OSJNBa0038J17.5 [Oryza sativa (japonica
  misc_feature (8)..(148): Homolog of NCBI NO: 34909640 NR Description: P0503C12.20 [Oryza sativa (japonica
  misc_feature (1)..(144): Homolog of NCBI NO: 7489432 NR Description: probable ring finger protein - barley
MSSYGPAGAAADAMEAAGGGSYRVCDTVVLVCLACASALIVSTMAVCFRRAFANGYTASAGATAANGRSQCGLAPSALSAIPKLAYRRGAGAGAGWAQCAICLALVRDGETVRLLPACGHLFHVECIDLWLRSHATCPLCRRDVGEEPHEKV

SEQ ID NO: 109121 - DNA, 755 bp, Zea mays subsp. mays
  misc_feature (1)..(755): Ceres Seq. ID no. 13600397
gcacactaaccgaagtcccaatcccaatggcgccaacctgccgtcctcggccggatgcggcgctcctgctgctgctgctgacggcgagtagcgtcggcgtcgcacgggcggcgccgcgggtgccggcggtgatcgtgttcggggactcgacggtggacacgggcaacaacaaccagatccccaccccgctgcgcgccgacttcccgccctacggtcgcgacatgccgggcgggccgcgcgccaccggccggttcggcaacgggcggctgcccccggacctcatctccgaggcgctcggcctgccgccgctggtgccggcctacctcgacccggcctacggcatcgacgacttcgcgcgcggcgtctgcttcgcgtccgcgggcaccggcatcgacaacgccaccgccggagtcttggtaagtctccgccgtacgcctccagccgatacttgctgttctttgtcgatccatcatctgtgctcgttaagtcttcactgccgaatagtatcgccacacaagcatttctgcagaacagaattgtgcacggcccatccgcattccaaagcagagaagtgtgtggcttacctgcgtacacttcagtttgattgagtgtaggtgttgctcgcgcattagaccgtctcaacaagagttttatcagagtttggtggcattaaatatgttgatatggtatggaataaacgataagagatgatgaaagttttacgatatcaaatgaatttgagcaggatgaaacct

SEQ ID NO: 109122 - protein, 201 aa, Zea mays subsp. mays
  misc_feature (1)..(201): Ceres Seq. ID no. 13600398
  misc_feature (43)..(140): Pfam Name: GDSL-like Lipase/Acylhydrolase Pfam Description: GDSL-like Lipase/Acylhydrolase
  misc_feature (41)..(148): Homolog of NCBI NO: 18390708 NR Description: GDSL-motif lipase/hydrolase protein [Arabidopsis
  misc_feature (21)..(138): Homolog of NCBI NO: 15229307 NR Description: lipase, putative [Arabidopsis thaliana]
  misc_feature (20)..(138): Homolog of NCBI NO: 15217977 NR Description: lipase, putative [Arabidopsis thaliana]
  misc_feature (20)..(138): Homolog of NCBI NO: 18406327 NR Description: lipase, putative [Arabidopsis thaliana]
  misc_feature (21)..(138): Homolog of NCBI NO: 15229719 NR Description: lipase, putative [Arabidopsis thaliana]
  misc_feature (23)..(138): Homolog of NCBI NO: 21593518 NR Description: putative GDSL-motif lipase/hydrolase [Arabidopsis
  misc_feature (23)..(138): Homolog of NCBI NO: 15228157 NR Description: GDSL-motif lipase/hydrolase protein [Arabidopsis
  misc_feature (21)..(138): Homolog of NCBI NO: 18416824 NR Description: GDSL-motif lipase/hydrolase protein [Arabidopsis
  misc_feature (21)..(140): Homolog of NCBI NO: 7485330 NR Description: hypothetical protein F10M23.130 - Arabidopsis
  misc_feature (21)..(137): Homolog of NCBI NO: 40641607 NR Description: putative GDSL-motif lipase [Triticum aestivum]
TLTEVPIPMAPTCRPRPDAALLLLLLTASSVGVARAAPRVPAVIVFGDSTVDTGNNNQIPTPLRADFPPYGRDMPGGPRATGRFGNGRLPPDLISEALGLPPLVPAYLDPAYGIDDFARGVCFASAGTGIDNATAGVLVSLRRTPPADTCCSLSIHHLCSLSLHCRIVSPHKHFCRTELCTAHPHSKAEKCVAYLRTLQFD

SEQ ID NO: 109123 - protein, 193 aa, Zea mays subsp. mays
  misc_feature (1)..(193): Ceres Seq. ID no. 13600399
  misc_feature (35)..(132): Pfam Name: GDSL-like Lipase/Acylhydrolase Pfam Description: GDSL-like Lipase/Acylhydrolase
  misc_feature (33)..(140): Homolog of NCBI NO: 18390708 NR Description: GDSL-motif lipase/hydrolase protein [Arabidopsis
  misc_feature (13)..(130): Homolog of NCBI NO: 15229307 NR Description: lipase, putative [Arabidopsis thaliana]
  misc_feature (12)..(130): Homolog of NCBI NO: 15217977 NR Description: lipase, putative [Arabidopsis thaliana]
  misc_feature (12)..(130): Homolog of NCBI NO: 18406327 NR Description: lipase, putative [Arabidopsis thaliana]
  misc_feature (13)..(130): Homolog of NCBI NO: 15229719 NR Description: lipase, putative [Arabidopsis thaliana]
  misc_feature (15)..(130): Homolog of NCBI NO: 21593518 NR Description: putative GDSL-motif lipase/hydrolase [Arabidopsis
  misc_feature (15)..(130): Homolog of NCBI NO: 15228157 NR Description: GDSL-motif lipase/hydrolase protein [Arabidopsis
  misc_feature (13)..(130): Homolog of NCBI NO: 18416824 NR Description: GDSL-motif lipase/hydrolase protein [Arabidopsis
  misc_feature (13)..(132): Homolog of NCBI NO: 7485330 NR Description: hypothetical protein F10M23.130 - Arabidopsis
  misc_feature (13)..(129): Homolog of NCBI NO: 40641607 NR Description: putative GDSL-motif lipase [Triticum aestivum]
MAPTCRPRPDAALLLLLLTASSVGVARAAPRVPAVIVFGDSTVDTGNNNQIPTPLRADFPPYGRDMPGGPRATGRFGNGRLPPDLISEALGLPPLVPAYLDPAYGIDDFARGVCFASAGTGIDNATAGVLVSLRRTPPADTCCSLSIHHLCSLSLHCRIVSPHKHFCRTELCTAHPHSKAEKCVAYLRTLQFD

SEQ ID NO: 109124 - protein, 128 aa, Zea mays subsp. mays
  misc_feature (1)..(128): Ceres Seq. ID no. 13600400
  misc_feature (1)..(67): Pfam Name: GDSL-like Lipase/Acylhydrolase Pfam Description: GDSL-like Lipase/Acylhydrolase
  misc_feature (1)..(75): Homolog of NCBI NO: 18390708 NR Description: GDSL-motif lipase/hydrolase protein [Arabidopsis
  misc_feature (1)..(65): Homolog of NCBI NO: 15229307 NR Description: lipase, putative [Arabidopsis thaliana]
  misc_feature (1)..(65): Homolog of NCBI NO: 15217977 NR Description: lipase, putative [Arabidopsis thaliana]
  misc_feature (1)..(65): Homolog of NCBI NO: 18406327 NR Description: lipase, putative [Arabidopsis thaliana]
  misc_feature (1)..(65): Homolog of NCBI NO: 15229719 NR Description: lipase, putative [Arabidopsis thaliana]
  misc_feature (1)..(65): Homolog of NCBI NO: 21593518 NR Description: putative GDSL-motif lipase/hydrolase [Arabidopsis
  misc_feature (1)..(65): Homolog of NCBI NO: 15228157 NR Description: GDSL-motif lipase/hydrolase protein [Arabidopsis
  misc_feature (1)..(65): Homolog of NCBI NO: 18416824 NR Description: GDSL-motif lipase/hydrolase protein [Arabidopsis
  misc_feature (1)..(67): Homolog of NCBI NO: 7485330 NR Description: hypothetical protein F10M23.130 - Arabidopsis
  misc_feature (1)..(64): Homolog of NCBI NO: 40641607 NR Description: putative GDSL-motif lipase [Triticum aestivum]
MPGGPRATGRFGNGRLPPDLISEALGLPPLVPAYLDPAYGIDDFARGVCFASAGTGIDNATAGVLVSLRRTPPADTCCSLSIHHLCSLSLHCRIVSPHKHFCRTELCTAHPHSKAEKCVAYLRTLQFD

SEQ ID NO: 109125 - DNA, 729 bp, Zea mays subsp. mays
  misc_feature (1)..(729): Ceres Seq. ID no. 14302679
  misc_feature: MA Experiment ID: 108523 Result: Up-regulated in Transcription
  misc_feature: MA Experiment 108523 PARAMETER Experiment Name: Zm_42deg_Heat_P Parameter: Age (day) Value: 8
  misc_feature: MA Experiment 108523 PARAMETER Experiment Name: Zm_42deg_Heat_P Parameter: Organism Value: Zea mays
  misc_feature: MA Experiment 108523 PARAMETER Experiment Name: Zm_42deg_Heat_P Parameter: Plant Line Value: 35A19
  misc_feature: MA Experiment 108523 PARAMETER Experiment Name: Zm_42deg_Heat_P Parameter: Temperature (deg C) Value: 42 vs. 22
  misc_feature: MA Experiment 108523 PARAMETER Experiment Name: Zm_42deg_Heat_P Parameter: Timepoint (hr) Value: 6
  misc_feature: MA Experiment 108523 PARAMETER Experiment Name: Zm_42deg_Heat_P Parameter: Tissue Value: Aerial
tccgttggttgattctgattcgtctcctgttggctgttgccttcgaccgcctccacctcgtctccgacgatgtcctccgtcgccggtgagggagaaggagagggaggaggacggcgccgacgggaggagccaaggagccaacaacatgaggacggggtcgaggtggccgacggaaaactggatttgggtgacctttacggcgcggcggcggggtgggtagaggcgcggaccagctgcccgcacctcggcaccatgccgcccgctggtgctgaattgctgatgaccttgctcgcgtgcctccgcccgactctccgtgctccagatgtcatgaccctgctgaaaactgattatgcttgatatgcaaagatgtgatgtgcagtcgttttatcaacaaacatatgttgtgccatcatgaagaagaaactggtcactgtcttgctttgagcttcagtgatctttcagtttggtgtttctcatgtgactcgtacctagatgttcaagccattttagaattgcgcccaagttgcacatttgttgaagtttggagaacaccttttcaatcacttgaagtactggatttcagcactggtgaaagtggaagttcatcaaggacttagttgtttgtattcaagtgatgagtttcttttcatgatgcttcaatcagatcaagacagacagttgtgtagtatcctggcactttttaagcttcagtatgttctagttatattt

SEQ ID NO: 109126 - protein, 95 aa, Zea mays subsp. mays
  misc_feature (1)..(95): Ceres Seq. ID no. 14302680
  misc_feature (31)..(64): Homolog of NCBI NO: 26984073 NR Description: hypothetical protein [Arabidopsis thaliana]
MSSVAGEGEGEGGGRRRREEPRSQQHEDGVEVADGKLDLGDLYGAAAGWVEARTSCPHLGTMPPAGAELLMTLLACLRPTLRAPDVMTLLKTDYA

SEQ ID NO: 109127 - protein, 81 aa, Zea mays subsp. mays
  misc_feature (1)..(81): Ceres Seq. ID no. 14302681
  misc_feature (1)..(49): Homolog of NCBI NO: 34933421 NR Description: histone deacetylase 6 [Rattus norvegicus]
  misc_feature (1)..(49): Homolog of NCBI NO: 40788979 NR Description: KIAA0901 protein [Homo sapiens]
  misc_feature (1)..(49): Homolog of NCBI NO: 13128864 NR Description: histone deacetylase 6 [Homo sapiens]
  misc_feature (1)..(49): Homolog of NCBI NO: 10720024 NR Description: Histone deacetylase 6 (HD6)
  misc_feature (1)..(49): Homolog of NCBI NO: 7108921 NR Description: GR AF-1 specific histone deacetylase [Homo
  misc_feature (1)..(49): Homolog of NCBI NO: 15489272 NR Description: histone deacetylase 6 [Homo sapiens]
  misc_feature (1)..(49): Homolog of NCBI NO: 11360193 NR Description: hypothetical protein DKFZp566E044.1 - human
  misc_feature (1)..(45): Homolog of NCBI NO: 27882614 NR Description: Similar to histone deacetylase 6 [Xenopus laevis]
  misc_feature (1)..(45): Homolog of NCBI NO: 31203211 NR Description: ENSANGP00000007396 [Anopheles gambiae]
  misc_feature (1)..(50): Homolog of NCBI NO: 26984073 NR Description: hypothetical protein [Arabidopsis thaliana]
MCSRFINKHMLCHHEEETGHCLALSFSDLSVWCFSCDSYLDVQAILELRPSCTFVEVWRTPFQSLEVLDFSTGESGSSSRT

SEQ ID NO: 109128 - protein, 72 aa, Zea mays subsp. mays
  misc_feature (1)..(72): Ceres Seq. ID no. 14302682
PLVDSDSSPVGCCLRPPPPRLRRCPPSPVREKEREEDGADGRSQGANNMRTGSRWPTENWIWVTFTARRRGG

SEQ ID NO: 109129 - DNA, 1452 bp, Zea mays subsp. mays
  misc_feature (1)..(1452): Ceres Seq. ID no. 13623850
atccaatatccactgcaccacttctgctaatcccttgttcttgtgcctccgatccggagctctcaccattgtcatcgtcaatcgatcaatataaagcgagccaattaccccaaggagctaccgcttgcgacggtatggcgatcccggtgattgacttctccaagctggacggccctgagagggccgagaccatggcggccctcgctgccgggttcgagcacgtggggttcttccagctggtgaacaccggcatctccgacgacctgctggagcgggtgaagaaggtgtgcagcgactcctacaagctgcgggacgaggcgttcaaggactccaaccccgcggtgaaggcgctcacagagctcgtggacaaggagatcgaggacggcctccccgcgaggaagataaaggacatggactgggaggacgtcttcaccctccatgacgacctgccatggccttccaaccctcccgccttcaaggagacgatgatggagtaccgcagggagctgaagaagctggcggagaagatgctgggcgtgatggaggagctgctggggttggaggagggccacatcaggaaggccttcagcaacgacggcgagttcgagcccttctacggcaccaaggtcagccactacccgccgtgcccgcggccggacctcatcgacggcctgcgcgcgcacaccgacgccggcggcctcatccttctgttccaggatgaccgcttcggcggcctgcaggcgcagcttccggacggcagctgggtcgacgtccagcccctcgagaacgccatcgtcatcaacaccggcgaccagatcgaggtgctgagcaatggccggtacaagagcgcatggcaccgcatcctggcgacccgcgacggcaaccggcgctccatcgcctccttctacaacccagcgcgcctggccaccatcgctccggcgatccccgccgcaggggtcggcgacgacgactacccgagcttcgtgttcggcaactacatggaggtgtacgtcaagcagaagttccagcctaaggcgcccagatttgaagccatggccacgacgacgaccaagtgatgacctagcagcgactcagcgagagcctaaataaatattaattcacagtcgtcaagttaatcttgtggttatacggtacgggcggggcttgtacttatgtaggttgctaagtcttaagtgtgtagtttaattaacgtgtgtgtggaatgtacgcgtcatacaaatgtgttggtgtgtgccctgccgcaagattgcggtgagcggtggatctatggtcaacgggtgcctaaatgatttgtgcttttgtagcataaaatggcacatctcctctgcttttgttacatctccaccttttctttttgcacttttcacctcaagtaaaacatgtggcggctttcactaagtacaaagaagctctacagagctatttctattg

SEQ ID NO: 109130 - protein, 357 aa, Zea mays subsp. mays
  misc_feature (1)..(357): Ceres Seq. ID no. 13623851
  misc_feature (203)..(304): Pfam Name: 2OG-Fe(II) oxygenase superfamily Pfam Description: 2OG-Fe(II) oxygenase superfamily
  misc_feature (48)..(351): Homolog of NCBI NO: 2385371 NR Description: ACC oxidase [Malus x domestica]
  misc_feature (48)..(355): Homolog of NCBI NO: 7433206 NR Description: probable 1-aminocyclopropane-1-carboxylate
  misc_feature (45)..(351): Homolog of NCBI NO: 25285689 NR Description: hypothetical protein F2P24.4 [imported] -
  misc_feature (45)..(351): Homolog of NCBI NO: 21555054 NR Description: 1-aminocyclopropane-1-carboxylate oxidase,
  misc_feature (45)..(351): Homolog of NCBI NO: 18411485 NR Description: 1-aminocyclopropane-1-carboxylate oxidase (ACC
  misc_feature (45)..(351): Homolog of NCBI NO: 27371996 NR Description: 1-aminocyclopropane-1-carboxylic acid oxidase
  misc_feature (45)..(351): Homolog of NCBI NO: 28949891 NR Description: 1-aminocyclopropane-1-carboxylic acid oxidase
  misc_feature (45)..(351): Homolog of NCBI NO: 25452792 NR Description: 1-aminocyclopropane-1-carboxylate oxidase (ACC
  misc_feature (45)..(351): Homolog of NCBI NO: 12001828 NR Description: 1-aminocyclopropane-1-carboxylate oxidase; ACC
  misc_feature (45)..(357): Homolog of NCBI NO: 7433217 NR Description: 1-aminocyclopropane-1-carboxylate oxidase (EC
PISTAPLLLIPCSCASDPELSPLSSSIDQYKASQLPQGATACDGMAIPVIDFSKLDGPERAETMAALAAGFEHVGFFQLVNTGISDDLLERVKKVCSDSYKLRDEAFKDSNPAVKALTELVDKEIEDGLPARKIKDMDWEDVFTLHDDLPWPSNPPAFKETMMEYRRELKKLAEKMLGVMEELLGLEEGHIRKAFSNDGEFEPFYGTKVSHYPPCPRPDLIDGLRAHTDAGGLILLFQDDRFGGLQAQLPDGSWVDVQPLENAIVINTGDQIEVLSNGRYKSAWHRILATRDGNRRSIASFYNPARLATIAPAIPAAGVGDDDYPSFVFGNYMEVYVKQKFQPKAPRFEAMATTTTK

SEQ ID NO: 109131 - protein, 313 aa, Zea mays subsp. mays
  misc_feature (1)..(313): Ceres Seq. ID no. 13623852
  misc_feature (159)..(260): Pfam Name: 2OG-Fe(II) oxygenase superfamily Pfam Description: 2OG-Fe(II) oxygenase superfamily
  misc_feature (4)..(307): Homolog of NCBI NO: 2385371 NR Description: ACC oxidase [Malus x domestica]
  misc_feature (4)..(311): Homolog of NCBI NO: 7433206 NR Description: probable 1-aminocyclopropane-1-carboxylate
  misc_feature (1)..(307): Homolog of NCBI NO: 25285689 NR Description: hypothetical protein F2P24.4 [imported] -
  misc_feature (1)..(307): Homolog of NCBI NO: 21555054 NR Description: 1-aminocyclopropane-1-carboxylate oxidase,
  misc_feature (1)..(307): Homolog of NCBI NO: 18411485 NR Description: 1-aminocyclopropane-1-carboxylate oxidase (ACC
  misc_feature (1)..(307): Homolog of NCBI NO: 27371996 NR Description: 1-aminocyclopropane-1-carboxylic acid oxidase
  misc_feature (1)..(307): Homolog of NCBI NO: 28949891 NR Description: 1-aminocyclopropane-1-carboxylic acid oxidase
  misc_feature (1)..(307): Homolog of NCBI NO: 25452792 NR Description: 1-aminocyclopropane-1-carboxylate oxidase (ACC
  misc_feature (1)..(307): Homolog of NCBI NO: 12001828 NR Description: 1-aminocyclopropane-1-carboxylate oxidase; ACC
  misc_feature (1)..(313): Homolog of NCBI NO: 7433217 NR Description: 1-aminocyclopropane-1-carboxylate oxidase (EC
MAIPVIDFSKLDGPERAETMAALAAGFEHVGFFQLVNTGISDDLLERVKKVCSDSYKLRDEAFKDSNPAVKALTELVDKEIEDGLPARKIKDMDWEDVFTLHDDLPWPSNPPAFKETMMEYRRELKKLAEKMLGVMEELLGLEEGHIRKAFSNDGEFEPFYGTKVSHYPPCPRPDLIDGLRAHTDAGGLILLFQDDRFGGLQAQLPDGSWVDVQPLENAIVINTGDQIEVLSNGRYKSAWHRILATRDGNRRSIASFYNPARLATIAPAIPAAGVGDDDYPSFVFGNYMEVYVKQKFQPKAPRFEAMATTTTK

SEQ ID NO: 109132 - protein, 294 aa, Zea mays subsp. mays
  misc_feature (1)..(294): Ceres Seq. ID no. 13623853
  misc_feature (140)..(241): Pfam Name: 2OG-Fe(II) oxygenase superfamily Pfam Description: 2OG-Fe(II) oxygenase superfamily
  misc_feature (1)..(288): Homolog of NCBI NO: 2385371 NR Description: ACC oxidase [Malus x domestica]
  misc_feature (1)..(292): Homolog of NCBI NO: 7433206 NR Description: probable 1-aminocyclopropane-1-carboxylate
  misc_feature (1)..(288): Homolog of NCBI NO: 25285689 NR Description: hypothetical protein F2P24.4 [imported] -
  misc_feature (1)..(288): Homolog of NCBI NO: 21555054 NR Description: 1-aminocyclopropane-1-carboxylate oxidase,
  misc_feature (1)..(288): Homolog of NCBI NO: 18411485 NR Description: 1-aminocyclopropane-1-carboxylate oxidase (ACC
  misc_feature (1)..(288): Homolog of NCBI NO: 27371996 NR Description: 1-aminocyclopropane-1-carboxylic acid oxidase
  misc_feature (1)..(288): Homolog of NCBI NO: 28949891 NR Description: 1-aminocyclopropane-1-carboxylic acid oxidase
  misc_feature (1)..(288): Homolog of NCBI NO: 25452792 NR Description: 1-aminocyclopropane-1-carboxylate oxidase (ACC
  misc_feature (1)..(288): Homolog of NCBI NO: 12001828 NR Description: 1-aminocyclopropane-1-carboxylate oxidase; ACC
  misc_feature (1)..(294): Homolog of NCBI NO: 7433217 NR Description: 1-aminocyclopropane-1-carboxylate oxidase (EC
MAALAAGFEHVGFFQLVNTGISDDLLERVKKVCSDSYKLRDEAFKDSNPAVKALTELVDKEIEDGLPARKIKDMDWEDVFTLHDDLPWPSNPPAFKETMMEYRRELKKLAEKMLGVMEELLGLEEGHIRKAFSNDGEFEPFYGTKVSHYPPCPRPDLIDGLRAHTDAGGLILLFQDDRFGGLQAQLPDGSWVDVQPLENAIVINTGDQIEVLSNGRYKSAWHRILATRDGNRRSIASFYNPARLATIAPAIPAAGVGDDDYPSFVFGNYMEVYVKQKFQPKAPRFEAMATTTTK

SEQ ID NO: 109133 - DNA, 1657 bp, Zea mays subsp. mays
  misc_feature (1)..(1657): Ceres Seq. ID no. 13600140
  misc_feature: MA Experiment ID: 20000535 Result: Up-regulated in Transcription
  misc_feature: MA Experiment 20000535 PARAMETER Experiment Name: Zm_Hybrid_Seed_Dev_P Parameter: DAP Value: 30 vs. 12
  misc_feature: MA Experiment 20000535 PARAMETER Experiment Name: Zm_Hybrid_Seed_Dev_P Parameter: Organism Value: Zea mays
  misc_feature: MA Experiment 20000535 PARAMETER Experiment Name: Zm_Hybrid_Seed_Dev_P Parameter: Plant Line Value: 35A19
  misc_feature: MA Experiment 20000535 PARAMETER Experiment Name: Zm_Hybrid_Seed_Dev_P Parameter: Tissue Value: Embryo vs. Unfert Floret
aaatcacttcttcccggactcccagactcctcccaaaaccctcgcatcctctcccacgcatgtcacaatcgccatgaccgacagaaaccccgccgccgcctcaagcaagcgtcactgtgacctctccctcgacgatcccacgccgtcggccaagctccagcggtgctccgagccgtcagaaccaacgccggcggggaaaccgaacggcggcgcggcgacgggagaggagagcgagatgatggccggcgcacggaaccctagggcgcagaggtacctggtcgccgtggagtacattggcacccgcttctccggctcacagaagcagcccaaccagcgcaccgtcactggggtcctcgaggaggcatttcaccgatttattgggcagccagtttcaataatcttttctagccgaacggatgcaggtgttcatgctttatcaaatgtttgtcatgttgatgttgagcggataagtaaaaggaagcctggcgaagttttaacacctcatgagcctggagttgtaaaacgtgctgtgaaccactttctactgaagagtgaaggtgacataatggtgactgatgtctgctgtgttgcaccagattttcatgctagatacaaatctctagagcgcacatatcactatcgcttgcttgctggacctgaatcaacatctgtttttgagaaaaactctgtttggcatatatctgaagatttggatattcagtcaatgaagaaagcatgcagcatacttgttgggcatcatgatttcagttcatttcgagcggctggatgtcaggcaaactctccagtgcgaactctggatgaacttagtgttacagaagtattccctttcatgttttttccttcaagtgtagaaagatcagagttggaattatcaaatgtctctcttgtttattcaaggaaaccagacatggaatcttctgggaaaggatctgatggttcctgtaccagtagtgtgaaatcagattttgagaatggaaaagattttggaaagcggtcaaggcaccgttgctttgttgttactgcaagggcacggtcttttctttaccaccaggtaaggttgatggtcggtcttctaaaatctgttgggactggagatctaacaactgcagatgttgagagaattctggatgcaaagacggttactgctgcacccagtatggcaccttcttgtggtctgtaccttgctaacgttaaatatgatctgaatacctgaagacaagttttatcaagtggcttctgttggtgggcctccagattttgtcagctgttggctatcaaaggaattatatgctgccacttgccaaagctttcagttgcctgttttgtccactgaatcttgcatggtgattgaaaacctagaattaagtttatctgtcagcacaagagccggcttcattctcttcttgtacacagagctcttctgcatgttcagaaacaaaataggtagcttcattttagttaagttcaactatccactctttaaatttcagctggatccacccgattttgttgggtgtacgtagatttgacctggtaggggcaaaattttatttcttggttttctcatgactgtacttggttcttgatatataattaattagccaaaaaaaaaaaaaaaaaagcttatcgataccgt

SEQ ID NO: 109134 - protein, 410 aa, Zea mays subsp. mays
  misc_feature (1)..(410): Ceres Seq. ID no. 15218648
  misc_feature (139)..(205): Pfam Name: tRNA pseudouridine synthase Pfam Description: tRNA pseudouridine synthase
  misc_feature (264)..(377): Homolog of NCBI NO: 15218280 NR Description: hypothetical protein [Arabidopsis thaliana]
  misc_feature (85)..(119): Homolog of NCBI NO: 15218280 NR Description: hypothetical protein [Arabidopsis thaliana]
  misc_feature (175)..(243): Homolog of NCBI NO: 15218280 NR Description: hypothetical protein [Arabidopsis thaliana]
  misc_feature (90)..(280): Homolog of NCBI NO: 23016535 NR Description: hypothetical protein [Magnetospirillum
  misc_feature (346)..(406): Homolog of NCBI NO: 22965972 NR Description: hypothetical protein [Rhodospirillum rubrum]
  misc_feature (90)..(280): Homolog of NCBI NO: 22965972 NR Description: hypothetical protein [Rhodospirillum rubrum]
  misc_feature (346)..(406): Homolog of NCBI NO: 13474062 NR Description: tRNA-pseudouridine synthase (EC 5.4.99.12)
  misc_feature (90)..(307): Homolog of NCBI NO: 13474062 NR Description: tRNA-pseudouridine synthase (EC 5.4.99.12)
  misc_feature (346)..(406): Homolog of NCBI NO: 15887719 NR Description: AGR_C_644p [Agrobacterium tumefaciens]
  misc_feature (90)..(278): Homolog of NCBI NO: 15887719 NR Description: AGR_C_644p [Agrobacterium tumefaciens]
NHFFPDSQTPPKTLASSPTHVTIAMTDRNPAAASSKRHCDLSLDDPTPSAKLQRCSEPSEPTPAGKPNGGAATGEESEMMAGARNPRAQRYLVAVEYIGTRFSGSQKQPNQRTVTGVLEEAFHRFIGQPVSIIFSSRTDAGVHALSNVCHVDVERISKRKPGEVLTPHEPGVVKRAVNHFLLKSEGDIMVTDVCCVAPDFHARYKSLERTYHYRLLAGPESTSVFEKNSVWHISEDLDIQSMKKACSILVGHHDFSSFRAAGCQANSPVRTLDELSVTEVFPFMFFPSSVERSELELSNVSLVYSRKPDMESSGKGSDGSCTSSVKSDFENGKDFGKRSRHRCFVVTARARSFLYHQVRLMVGLLKSVGTGDLTTADVERILDAKTVTAAPSMAPSCGLYLANVKYDLNT

SEQ ID NO: 109135 - protein, 386 aa, Zea mays subsp. mays
  misc_feature (1)..(386): Ceres Seq. ID no. 15218649
  misc_feature (115)..(181): Pfam Name: tRNA pseudouridine synthase Pfam Description: tRNA pseudouridine synthase
  misc_feature (66)..(256): Homolog of NCBI NO: 23016535 NR Description: hypothetical protein [Magnetospirillum
  misc_feature (322)..(382): Homolog of NCBI NO: 22965972 NR Description: hypothetical protein [Rhodospirillum rubrum]
  misc_feature (66)..(256): Homolog of NCBI NO: 22965972 NR Description: hypothetical protein [Rhodospirillum rubrum]
  misc_feature (322)..(382): Homolog of NCBI NO: 13474062 NR Description: tRNA-pseudouridine synthase (EC 5.4.99.12)
  misc_feature (66)..(283): Homolog of NCBI NO: 13474062 NR Description: tRNA-pseudouridine synthase (EC 5.4.99.12)
  misc_feature (322)..(382): Homolog of NCBI NO: 15887719 NR Description: AGR_C_644p [Agrobacterium tumefaciens]
  misc_feature (66)..(254): Homolog of NCBI NO: 15887719 NR Description: AGR_C_644p [Agrobacterium tumefaciens]
  misc_feature (61)..(95): Homolog of NCBI NO: 15218280 NR Description: hypothetical protein [Arabidopsis thaliana]
  misc_feature (151)..(219): Homolog of NCBI NO: 15218280 NR Description: hypothetical protein [Arabidopsis thaliana]
  misc_feature (240)..(353): Homolog of NCBI NO: 15218280 NR Description: hypothetical protein [Arabidopsis thaliana]
MTDRNPAAASSKRHCDLSLDDPTPSAKLQRCSEPSEPTPAGKPNGGAATGEESEMMAGARNPRAQRYLVAVEYIGTRFSGSQKQPNQRTVTGVLEEAFHRFIGQPVSIIFSSRTDAGVHALSNVCHVDVERISKRKPGEVLTPHEPGVVKRAVNHFLLKSEGDIMVTDVCCVAPDFHARYKSLERTYHYRLLAGPESTSVFEKNSVWHISEDLDIQSMKKACSILVGHHDFSSFRAAGCQANSPVRTLDELSVTEVFPFMFFPSSVERSELELSNVSLVYSRKPDMESSGKGSDGSCTSSVKSDFENGKDFGKRSRHRCFVVTARARSFLYHQVRLMVGLLKSVGTGDLTTADVERILDAKTVTAAPSMAPSCGLYLANVKYDLNT

SEQ ID NO: 109136 - protein, 332 aa, Zea mays subsp. mays
  misc_feature (1)..(332): Ceres Seq. ID no. 15218650
  misc_feature (61)..(127): Pfam Name: tRNA pseudouridine synthase Pfam Description: tRNA pseudouridine synthase
  misc_feature (12)..(202): Homolog of NCBI NO: 23016535 NR Description: hypothetical protein [Magnetospirillum
  misc_feature (268)..(328): Homolog of NCBI NO: 22965972 NR Description: hypothetical protein [Rhodospirillum rubrum]
  misc_feature (12)..(202): Homolog of NCBI NO: 22965972 NR Description: hypothetical protein [Rhodospirillum rubrum]
  misc_feature (268)..(328): Homolog of NCBI NO: 13474062 NR Description: tRNA-pseudouridine synthase (EC 5.4.99.12)
  misc_feature (12)..(229): Homolog of NCBI NO: 13474062 NR Description: tRNA-pseudouridine synthase (EC 5.4.99.12)
  misc_feature (268)..(328): Homolog of NCBI NO: 15887719 NR Description: AGR_C_644p [Agrobacterium tumefaciens]
  misc_feature (12)..(200): Homolog of NCBI NO: 15887719 NR Description: AGR_C_644p [Agrobacterium tumefaciens]
  misc_feature (7)..(41): Homolog of NCBI NO: 15218280 NR Description: hypothetical protein [Arabidopsis thaliana]
  misc_feature (97)..(165): Homolog of NCBI NO: 15218280 NR Description: hypothetical protein [Arabidopsis thaliana]
  misc_feature (186)..(299): Homolog of NCBI NO: 15218280 NR Description: hypothetical protein [Arabidopsis thaliana]
MMAGARNPRAQRYLVAVEYIGTRFSGSQKQPNQRTVTGVLEEAFHRFIGQPVSIIFSSRTDAGVHALSNVCHVDVERISKRKPGEVLTPHEPGVVKRAVNHFLLKSEGDIMVTDVCCVAPDFHARYKSLERTYHYRLLAGPESTSVFEKNSVWHISEDLDIQSMKKACSILVGHHDFSSFRAAGCQANSPVRTLDELSVTEVFPFMFFPSSVERSELELSNVSLVYSRKPDMESSGKGSDGSCTSSVKSDFENGKDFGKRSRHRCFVVTARARSFLYHQVRLMVGLLKSVGTGDLTTADVERILDAKTVTAAPSMAPSCGLYLANVKYDLNT

SEQ ID NO: 109137 - DNA, 1316 bp, Zea mays subsp. mays
  misc_feature (1)..(1316): Ceres Seq. ID no. 13600141
accatcgccacccgtcagtccgtcacccctcgcgcccatagtccccttccccataccatgtccgacctccacccgccggagcaccaagtcgccggccaccgcgcctccgccagcaagctgggcccgctcatcgacggctccggcctcttctacaagccgctccaggccggcgaccgtggggagcacgaggtcgccttctatgaggcgttctccgcccacgccgccgtcccggcccgcatccgagacaccttcttcccccggttccacggcacgcgactcctccccaccgaggcgcagcccggggagccgcatcctcacctcgtcctcgacgacctcctcgcggggtttcaggcgccctgcgtcgcagacatcaagatcggcgccatcacgtggccaccgagttcgccggagccctacatcgccaagtgcctcgccaaggaccgcgggaccacgagcgttctgctcggattccgcgtctccggcgtccgagtcgtcggccccgagggcgccgtgtggcggacggagcgcccggaggtgaaggccatggacaccgccggcgtccgccgcgtgctccggcgctacgtgtcatccgttgccgacgaggggatggactgtgcgctcgccgcggcggtgtacggaggaaaaggtggagtcttgtcacagctgcgcgagctcaaggcgtggttcgaggagcagactctgttccacttctactcggcgtcgattcttctgggctatgatgctgctgcagtcgcagcaggcggagatgggggtggggtgacggtgaagctggtggactttgcccatgtggccgagggtgatggggtgattgaccacaacttcctgggcgggctctgctcgctgatcaagttcgtttctgacattgttccggagactcctcatacgcagcctttgggtccttcttaagagaggatcctggcatttcgatttgataacaaagccctacaagttttgtctggaaaaagaagcgcctccgagttgtgctgggtgtggagatccgtgagacggtcgtcgccccacgtggttgccttgccttcccttccctgcaaacatacggcaacctgctccttttttcgcaacccctttcttcggaagaaacctttttctcacttttggggggttcgattacgttggattggaactggttgtgccactcggtcagaggttgtaagcatggaggcgtgttgatccggcaactgcctgtaccgctgctactagtcagtcttttgcctgctgtagctgcacatatggatggatgtgtatgggttatcagcagtgttccaaagcttatcgat

SEQ ID NO: 109138 - protein, 308 aa, Zea mays subsp. mays
  misc_feature (1)..(308): Ceres Seq. ID no. 13600142
  misc_feature (40)..(293): Pfam Name: Inositol polyphosphate kinase Pfam Description: Inositol polyphosphate kinase
  misc_feature (102)..(302): Homolog of NCBI NO: 32564658 NR Description: inositol polyphosphate kinase (37.2 kD) (1K70)
  misc_feature (29)..(296): Homolog of NCBI NO: 24580674 NR Description: CG13688-PA [Drosophila melanogaster]
  misc_feature (29)..(296): Homolog of NCBI NO: 21430778 NR Description: SD14726p [Drosophila melanogaster]
  misc_feature (23)..(300): Homolog of NCBI NO: 8919088 NR Description: putative inositol hexaphosphate kinase
  misc_feature (23)..(294): Homolog of NCBI NO: 13509210 NR Description: hypothetical protein [Linum usitatissimum]
  misc_feature (23)..(300): Homolog of NCBI NO: 15240776 NR Description: inositol polyphosphate 6-/3-/5-kinase 2a (IPK2a)
  misc_feature (23)..(300): Homolog of NCBI NO: 21592823 NR Description: putative inositol hexaphosphate kinase
  misc_feature (23)..(296): Homolog of NCBI NO: 21553994 NR Description: putative inositol hexaphosphate kinase
  misc_feature (23)..(296): Homolog of NCBI NO: 15240350 NR Description: inositol polyphosphate 6-/3-/5-kinase 2b (IPK2b)
  misc_feature (26)..(304): Homolog of NCBI NO: 13509208 NR Description: hypothetical protein [Linum usitatissimum]
TIATRQSVTPRAHSPLPHTMSDLHPPEHQVAGHRASASKLGPLIDGSGLFYKPLQAGDRGEHEVAFYEAFSAHAAVPARIRDTFFPRFHGTRLLPTEAQPGEPHPHLVLDDLLAGFQAPCVADIKIGAITWPPSSPEPYIAKCLAKDRGTTSVLLGFRVSGVRVVGPEGAVWRTERPEVKAMDTAGVRRVLRRYVSSVADEGMDCALAAAVYGGKGGVLSQLRELKAWFEEQTLFHFYSASILLGYDAAAVAAGGDGGGVTVKLVDFAHVAEGDGVIDHNFLGGLCSLIKFVSDIVPETPHTQPLGPS

SEQ ID NO: 109139 - protein, 289 aa, Zea mays subsp. mays
  misc_feature (1)..(289): Ceres Seq. ID no. 13600143
  misc_feature (21)..(274): Pfam Name: Inositol polyphosphate kinase Pfam Description: Inositol polyphosphate kinase
  misc_feature (83)..(283): Homolog of NCBI NO: 32564658 NR Description: inositol polyphosphate kinase (37.2 kD) (1K70)
  misc_feature (10)..(277): Homolog of NCBI NO: 24580674 NR Description: CG13688-PA [Drosophila melanogaster]
  misc_feature (10)..(277): Homolog of NCBI NO: 21430778 NR Description: SD14726p [Drosophila melanogaster]
  misc_feature (4)..(281): Homolog of NCBI NO: 8919088 NR Description: putative inositol hexaphosphate kinase
  misc_feature (4)..(275): Homolog of NCBI NO: 13509210 NR Description: hypothetical protein [Linum usitatissimum]
  misc_feature (4)..(281): Homolog of NCBI NO: 15240776 NR Description: inositol polyphosphate 6-/3-/5-kinase 2a (IPK2a)
  misc_feature (4)..(281): Homolog of NCBI NO: 21592823 NR Description: putative inositol hexaphosphate kinase
  misc_feature (4)..(277): Homolog of NCBI NO: 21553994 NR Description: putative inositol hexaphosphate kinase
  misc_feature (4)..(277): Homolog of NCBI NO: 15240350 NR Description: inositol polyphosphate 6-/3-/5-kinase 2b (IPK2b)
  misc_feature (7)..(285): Homolog of NCBI NO: 13509208 NR Description: hypothetical protein [Linum usitatissimum]
MSDLHPPEHQVAGHRASASKLGPLIDGSGLFYKPLQAGDRGEHEVAFYEAFSAHAAVPARIRDTFFPRFHGTRLLPTEAQPGEPHPHLVLDDLLAGFQAPCVADIKIGAITWPPSSPEPYIAKCLAKDRGTTSVLLGFRVSGVRVVGPEGAVWRTERPEVKAMDTAGVRRVLRRYVSSVADEGMDCALAAAVYGGKGGVLSQLRELKAWFEEQTLFHFYSASILLGYDAAAVAAGGDGGGVTVKLVDFAHVAEGDGVIDHNFLGGLCSLIKFVSDIVPETPHTQPLGPS

SEQ ID NO: 109140 - protein, 178 aa, Zea mays subsp. mays
  misc_feature (1)..(178): Ceres Seq. ID no. 13600144
  misc_feature (2)..(178): Pfam Name: Glycoprotein GG/GX Pfam Description: Glycoprotein GG/GX
  misc_feature (2)..(178): Homolog of NCBI NO: 13592175 NR Description: ppg3 [Leishmania major]
  misc_feature (1)..(178): Homolog of NCBI NO: 186396 NR Description: mucin
  misc_feature (2)..(178): Homolog of NCBI NO: 11359723 NR Description: proteophosphoglycan, membrane-associated
  misc_feature (1)..(173): Homolog of NCBI NO: 14017929 NR Description: KIAA1856 protein [Homo sapiens]
  misc_feature (2)..(178): Homolog of NCBI NO: 13592175 NR Description: ppg3 [Leishmania major]
  misc_feature (1)..(178): Homolog of NCBI NO: 188864 NR Description: mucin
  misc_feature (2)..(178): Homolog of NCBI NO: 23017082 NR Description: hypothetical protein [Thermobifida fusca]
  misc_feature (3)..(178): Homolog of NCBI NO: 15233976 NR Description: leucine-rich repeat extensin family [Arabidopsis
  misc_feature (1)..(178): Homolog of NCBI NO: 27375632 NR Description: blr0521 [Bradyrhizobium japonicum]
  misc_feature (1)..(167): Homolog of NCBI NO: 1076211 NR Description: hypothetical protein VSP-3 - Chlamydomonas
PSPPVSPSPLAPIVPFPIPCPTSTRRSTKSPATAPPPASWARSSTAPASSTSRSRPATVGSTRSPSMRRSPPTPPSRPASETPSSPGSTARDSSPPRRSPGSRILTSSSTTSSRGFRRPASQTSRSAPSRGHRVRRSPTSPSASPRTAGPRAFCSDSASPASESSAPRAPCGGRSARR

SEQ ID NO: 109141 - DNA, 859 bp, Zea mays subsp. mays
  misc_feature (1)..(859): Ceres Seq. ID no. 14302675
  misc_feature: MA Experiment ID: 108528 Result: Down-regulated in Transcription
  misc_feature: MA Experiment 108528 PARAMETER Experiment Name: Zm_Imbibed_Seeds_P Parameter: Age (day) Value: 5 vs. 2
  misc_feature: MA Experiment 108528 PARAMETER Experiment Name: Zm_Imbibed_Seeds_P Parameter: Organism Value: Zea mays
  misc_feature: MA Experiment 108528 PARAMETER Experiment Name: Zm_Imbibed_Seeds_P Parameter: Plant Line Value: 35A19
  misc_feature: MA Experiment 108528 PARAMETER Experiment Name: Zm_Imbibed_Seeds_P Parameter: Tissue Value: Aerial vs. Embryo
  misc_feature: MA Experiment ID: 108530 Result: Down-regulated in Transcription
  misc_feature: MA Experiment 108530 PARAMETER Experiment Name: Zm_Imbibed_Seeds_P Parameter: Age (day) Value: 6 vs. 2
  misc_feature: MA Experiment 108530 PARAMETER Experiment Name: Zm_Imbibed_Seeds_P Parameter: Organism Value: Zea mays
  misc_feature: MA Experiment 108530 PARAMETER Experiment Name: Zm_Imbibed_Seeds_P Parameter: Plant Line Value: 35A19
  misc_feature: MA Experiment 108530 PARAMETER Experiment Name: Zm_Imbibed_Seeds_P Parameter: Tissue Value: Aerial vs. Embryo
  misc_feature: MA Experiment ID: 108535 Result: Up-regulated in Transcription
  misc_feature: MA Experiment 108535 PARAMETER Experiment Name: Zm_Meristem_P Parameter: Age (day) Value: 8
  misc_feature: MA Experiment 108535 PARAMETER Experiment Name: Zm_Meristem_P Parameter: Organism Value: Zea mays
  misc_feature: MA Experiment 108535 PARAMETER Experiment Name: Zm_Meristem_P Parameter: Plant Line Value: 35A19
  misc_feature: MA Experiment 108535 PARAMETER Experiment Name: Zm_Meristem_P Parameter: Tissue Value: Root Meristem vs. Above Root Meristem
  misc_feature: MA Experiment ID: 108544 Result: Down-regulated in Transcription
  misc_feature: MA Experiment ID: 108556 Result: Down-regulated in Transcription
  misc_feature: MA Experiment 108556 PARAMETER Experiment Name: Zm_Drought_P Parameter: Age (day) Value: 9
  misc_feature: MA Experiment 108556 PARAMETER Experiment Name: Zm_Drought_P Parameter: Organism Value: Zea mays
  misc_feature: MA Experiment 108556 PARAMETER Experiment Name: Zm_Drought_P Parameter: Plant Line Value: 35A19
  misc_feature: MA Experiment 108556 PARAMETER Experiment Name: Zm_Drought_P Parameter: Timepoint (hr) Value: 24
  misc_feature: MA Experiment 108556 PARAMETER Experiment Name: Zm_Drought_P Parameter: Tissue Value: Aerial
  misc_feature: MA Experiment 108556 PARAMETER Experiment Name: Zm_Drought_P Parameter: Treatment Value: Drought vs. No Drought
  misc_feature: MA Experiment ID: 20000492 Result: Up-regulated in Transcription
  misc_feature: MA Experiment 20000492 PARAMETER Experiment Name: Zm_Hybrid_Seed_Dev_P Parameter: DAP Value: 12
  misc_feature: MA Experiment 20000492 PARAMETER Experiment Name: Zm_Hybrid_Seed_Dev_P Parameter: Organism Value: Zea mays
  misc_feature: MA Experiment 20000492 PARAMETER Experiment Name: Zm_Hybrid_Seed_Dev_P Parameter: Plant Line Value: 35A19
  misc_feature: MA Experiment 20000492 PARAMETER Experiment Name: Zm_Hybrid_Seed_Dev_P Parameter: Tissue Value: Fert Kernel vs. Unfert Floret
  misc_feature: MA Experiment ID: 20000535 Result: Up-regulated in Transcription
  misc_feature: MA Experiment 20000535 PARAMETER Experiment Name: Zm_Hybrid_Seed_Dev_P Parameter: DAP Value: 30 vs. 12
  misc_feature: MA Experiment 20000535 PARAMETER Experiment Name: Zm_Hybrid_Seed_Dev_P Parameter: Organism Value: Zea mays
  misc_feature: MA Experiment 20000535 PARAMETER Experiment Name: Zm_Hybrid_Seed_Dev_P Parameter: Plant Line Value: 35A19
  misc_feature: MA Experiment 20000535 PARAMETER Experiment Name: Zm_Hybrid_Seed_Dev_P Parameter: Tissue Value: Embryo vs. Unfert Floret
  misc_feature: MA Experiment ID: 20001612 Result: Up-regulated in Transcription
  misc_feature: MA Experiment 20001612 PARAMETER Experiment Name: Zm_50ppm_KNO3_L-to-H_P Parameter: Age (day) Value: 19
  misc_feature: MA Experiment 20001612 PARAMETER Experiment Name: Zm_50ppm_KNO3_L-to-H_P Parameter: Organism Value: Zea mays
  misc_feature: MA Experiment 20001612 PARAMETER Experiment Name: Zm_50ppm_KNO3_L-to-H_P Parameter: Plant Line Value: 35A19
  misc_feature: MA Experiment 20001612 PARAMETER Experiment Name: Zm_50ppm_KNO3_L-to-H_P Parameter: Timepoint (hr) Value: 8
  misc_feature: MA Experiment 20001612 PARAMETER Experiment Name: Zm_50ppm_KNO3_L-to-H_P Parameter: Tissue Value: Roots
  misc_feature: MA Experiment 20001612 PARAMETER Experiment Name: Zm_50ppm_KNO3_L-to-H_P Parameter: Treatment Value: 50ppm KNO3 vs. 50ppm KCl
atttttcgaccgccgccgcccccagtccccgatccgaagctgtgcctcgtaccatttcgatccaatggcgccgacgtcgaagctgtcgacgggcatcaagcgcgcttcgcggtcgcacacgtaccatcgccgtgggctgtgggccatcaaggccaagaacggcggcgccttccccaaggccgacaaggccgccgccgccgtggaacccaagttctaccctgccgacgacgtcaagccccgcgttcccagcacccgcaagcctaagcctaccaagctcaggtcgagcatcacgcctgggacggtgctgatcctcctcgcagggcgcttcatggggaagagagtggtgtttctcaagcagctcaagtctggcctgctccttatctctgggcctttcaagatcaatggagtaccgatccgccgtgtgaaccagacctatgtcattgctacatcaaccaaagttgacatctctggtgttgatgtcgccaagtttgatgacaagtactttgccagggagaagaagcagaaggtgaagaagaccgagggcgagctttttgagacagaaaaggaggcatccaagtcactgcctgacttcaagaaggatgaccagaaggctgtggattctgctctgatcaaggctatcgaggctgtcctggagctgaaaacctatcttggcgcccggttctctctcagggatggtgacaagccccatgagatggtattctaagtttctagttttggagttcgtaggaagctgttttgtctgtgttcttgtacttctgagttttgtaccagtagcgaacgtttcattgtgattgaagtcttcctgcccaaatattataagatctaagaaagttctatc

SEQ ID NO: 109142 - protein, 240 aa, Zea mays subsp. mays
  misc_feature (1)..(240): Ceres Seq. ID no. 14302676
  misc_feature (133)..(240): Pfam Name: Ribosomal protein L6e Pfam Description: Ribosomal protein L6e
  misc_feature (64)..(240): Homolog of NCBI NO: 6323567 NR Description: Homology to rat L6 and human L6; Rpl6ap
  misc_feature (67)..(240): Homolog of NCBI NO: 7271018 NR Description: ribosomal protein L16 [Candida albicans]
  misc_feature (69)..(240): Homolog of NCBI NO: 6012952 NR Description: 60S ribosomal protein L6 (YL 16 like) [Cyanophora
  misc_feature (28)..(240): Homolog of NCBI NO: 7208784 NR Description: 60S ribosomal protein L6 [Cicer arietinum]
  misc_feature (28)..(240): Homolog of NCBI NO: 21593910 NR Description: 60S ribosomal protein L6, putative [Arabidopsis
  misc_feature (28)..(240): Homolog of NCBI NO: 15221798 NR Description: 60S ribosomal protein L6 (RPL6A) [Arabidopsis
  misc_feature (27)..(240): Homolog of NCBI NO: 464621 NR Description: 60S RIBOSOMAL PROTEIN L6 (YL16-LIKE)
  misc_feature (28)..(240): Homolog of NCBI NO: 15221127 NR Description: 60S ribosomal protein L6 (RPL6B) [Arabidopsis
  misc_feature (28)..(240): Homolog of NCBI NO: 15221126 NR Description: 60S ribosomal protein L6 (RPL6C) [Arabidopsis
  misc_feature (22)..(240): Homolog of NCBI NO: 38344818 NR Description: OSJNBb0022F23.11 [Oryza sativa (japonica
FFDRRRPQSPIRSCASYHFDPMAPTSKLSTGIKRASRSHTYHRRGLWAIKAKNGGAFPKADKAAAAVEPKFYPADDVKPRVPSTRKPKPTKLRSSITPGTVLILLAGRFMGKRVVFLKQLKSGLLLISGPFKINGVPIRRVNQTYVIATSTKVDISGVDVAKFDDKYFAREKKQKVKKTEGELFETEKEASKSLPDFKKDDQKAVDSALIKAIEAVLELKTYLGARFSLRDGDKPHEMVF

SEQ ID NO: 109143 - protein, 219 aa, Zea mays subsp. mays
  misc_feature (1)..(219): Ceres Seq. ID no. 14302677
  misc_feature (112)..(219): Pfam Name: Ribosomal protein L6e Pfam Description: Ribosomal protein L6e
  misc_feature (43)..(219): Homolog of NCBI NO: 6323567 NR Description: Homology to rat L6 and human L6; Rpl6ap
  misc_feature (46)..(219): Homolog of NCBI NO: 7271018 NR Description: ribosomal protein L16 [Candida albicans]
  misc_feature (48)..(219): Homolog of NCBI NO: 6012952 NR Description: 60S ribosomal protein L6 (YL 16 like) [Cyanophora
  misc_feature (7)..(219): Homolog of NCBI NO: 7208784 NR Description: 60S ribosomal protein L6 [Cicer arietinum]
  misc_feature (7)..(219): Homolog of NCBI NO: 21593910 NR Description: 60S ribosomal protein L6, putative [Arabidopsis
  misc_feature (7)..(219): Homolog of NCBI NO: 15221798 NR Description: 60S ribosomal protein L6 (RPL6A) [Arabidopsis
  misc_feature (6)..(219): Homolog of NCBI NO: 464621 NR Description: 60S RIBOSOMAL PROTEIN L6 (YL16-LIKE)
  misc_feature (7)..(219): Homolog of NCBI NO: 15221127 NR Description: 60S ribosomal protein L6 (RPL6B) [Arabidopsis
  misc_feature (7)..(219): Homolog of NCBI NO: 15221126 NR Description: 60S ribosomal protein L6 (RPL6C) [Arabidopsis
  misc_feature (1)..(219): Homolog of NCBI NO: 38344818 NR Description: OSJNBb0022F23.11 [Oryza sativa (japonica
MAPTSKLSTGIKRASRSHTYHRRGLWAIKAKNGGAFPKADKAAAAVEPKFYPADDVKPRVPSTRKPKPTKLRSSITPGTVLILLAGRFMGKRVVFLKQLKSGLLLISGPFKINGVPIRRVNQTYVIATSTKVDISGVDVAKFDDKYFAREKKQKVKKTEGELFETEKEASKSLPDFKKDDQKAVDSALIKAIEAVLELKTYLGARFSLRDGDKPHEMVF

SEQ ID NO: 109144 - protein, 131 aa, Zea mays subsp. mays
  misc_feature (1)..(131): Ceres Seq. ID no. 14302678
  misc_feature (24)..(131): Pfam Name: Ribosomal protein L6e Pfam Description: Ribosomal protein L6e
  misc_feature (1)..(131): Homolog of NCBI NO: 6323567 NR Description: Homology to rat L6 and human L6; Rpl6ap
  misc_feature (1)..(131): Homolog of NCBI NO: 7271018 NR Description: ribosomal protein L16 [Candida albicans]
  misc_feature (1)..(131): Homolog of NCBI NO: 6012952 NR Description: 60S ribosomal protein L6 (YL 16 like) [Cyanophora
  misc_feature (1)..(131): Homolog of NCBI NO: 7208784 NR Description: 60S ribosomal protein L6 [Cicer arietinum]
  misc_feature (1)..(131): Homolog of NCBI NO: 21593910 NR Description: 60S ribosomal protein L6, putative [Arabidopsis
  misc_feature (1)..(131): Homolog of NCBI NO: 15221798 NR Description: 60S ribosomal protein L6 (RPL6A) [Arabidopsis
  misc_feature (1)..(131): Homolog of NCBI NO: 464621 NR Description: 60S RIBOSOMAL PROTEIN L6 (YL16-LIKE)
  misc_feature (1)..(131): Homolog of NCBI NO: 15221127 NR Description: 60S ribosomal protein L6 (RPL6B) [Arabidopsis
  misc_feature (1)..(131): Homolog of NCBI NO: 15221126 NR Description: 60S ribosomal protein L6 (RPL6C) [Arabidopsis
  misc_feature (1)..(131): Homolog of NCBI NO: 38344818 NR Description: OSJNBb0022F23.11 [Oryza sativa (japonica
MGKRVVFLKQLKSGLLLISGPFKINGVPIRRVNQTYVIATSTKVDISGVDVAKFDDKYFAREKKQKVKKTEGELFETEKEASKSLPDFKKDDQKAVDSALIKAIEAVLELKTYLGARFSLRDGDKPHEMVF

SEQ ID NO: 109145 - DNA, 728 bp, Zea mays subsp. mays
  misc_feature (1)..(728): Ceres Seq. ID no. 13600643
ataaattgggtacactctgatagcgagagaactcaccagacttgcagctccacaccagcaacagcgcgacgatagctagctagtagtagaagcaggcagcggctctagttgtcgagcgttccacaggtcatcaagcaccggcgtttaattagccatccgctccgatcgtcccctcccctattcccatggccagtttcgctgctcaggtcatggacatgttcttcgtgctcgtcgagcgcgtcaccggctacggcggccacgctgaggacgaccagaaggacgcttcaggtgcacatgagcccaccaagctgctgacatcgtctggcgtttctgaaaccgaacaaggagaagaagaggtggtcgttgcggtgcagaatgttcagataagagcaagagggggcggcgaaccctttgtgcaaggtggctcgatgcctcaggttaattagcactgcatgcatgcgggttttgtagaggttattagttgccgctgcctcaggtgatcgagcttcgcagacgatgatgcgtttaatttgcagccagtgttttaacctttttcatgcaaggatgtgtgtgtgtgtgttgtctggatcgtgtttcgtcgtttccttcttctgattgaattaagagtatgtctgtcgagttctatcaagttggttgtaattccagtatcctatgtgcaagcaatgtgtgagcttgctgtcaagtttgtggtgccatcgaatcagtcc

SEQ ID NO: 109146 - protein, 86 aa, Zea mays subsp. mays
  misc_feature (1)..(86): Ceres Seq. ID no. 13600644
  misc_feature (1)..(86): Homolog of NCBI NO: 38345614 NR Description: OSJNBb0003B01.6 [Oryza sativa (japonica
MASFAAQVMDMFFVLVERVTGYGGHAEDDQKDASGAHEPTKLLTSSGVSETEQGEEEVVVAVQNVQIRARGGGEPFVQGGSMPQVN

SEQ ID NO: 109147 - protein, 78 aa, Zea mays subsp. mays
  misc_feature (1)..(78): Ceres Seq. ID no. 13600645
  misc_feature (1)..(78): Homolog of NCBI NO: 38345614 NR Description: OSJNBb0003B01.6 [Oryza sativa (japonica
MDMFFVLVERVTGYGGHAEDDQKDASGAHEPTKLLTSSGVSETEQGEEEVVVAVQNVQIRARGGGEPFVQGGSMPQVN

SEQ ID NO: 109148 - protein, 76 aa, Zea mays subsp. mays
  misc_feature (1)..(76): Ceres Seq. ID no. 13600646
  misc_feature (1)..(76): Homolog of NCBI NO: 38345614 NR Description: OSJNBb0003B01.6 [Oryza sativa (japonica
MFFVLVERVTGYGGHAEDDQKDASGAHEPTKLLTSSGVSETEQGEEEVVVAVQNVQIRARGGGEPFVQGGSMPQVN

SEQ ID NO: 109149 - DNA, 1207 bp, Zea mays subsp. mays
  misc_feature (1)..(1207): Ceres Seq. ID no. 13600110
  misc_feature: MA Experiment ID: 108556 Result: Down-regulated in Transcription
  misc_feature: MA Experiment 108556 PARAMETER Experiment Name: Zm_Drought_P Parameter: Age (day) Value: 9
  misc_feature: MA Experiment 108556 PARAMETER Experiment Name: Zm_Drought_P Parameter: Organism Value: Zea mays
  misc_feature: MA Experiment 108556 PARAMETER Experiment Name: Zm_Drought_P Parameter: Plant Line Value: 35A19
  misc_feature: MA Experiment 108556 PARAMETER Experiment Name: Zm_Drought_P Parameter: Timepoint (hr) Value: 24
  misc_feature: MA Experiment 108556 PARAMETER Experiment Name: Zm_Drought_P Parameter: Tissue Value: Aerial
  misc_feature: MA Experiment 108556 PARAMETER Experiment Name: Zm_Drought_P Parameter: Treatment Value: Drought vs. No Drought
  misc_feature: MA Experiment ID: 20000534 Result: Down-regulated in Transcription
  misc_feature: MA Experiment 20000534 PARAMETER Experiment Name: Zm_Hybrid_Pollen_P Parameter: Age (day) Value: 8
  misc_feature: MA Experiment 20000534 PARAMETER Experiment Name: Zm_Hybrid_Pollen_P Parameter: Organism Value: Zea mays
  misc_feature: MA Experiment 20000534 PARAMETER Experiment Name: Zm_Hybrid_Pollen_P Parameter: Plant Line Value: 35A19
  misc_feature: MA Experiment 20000534 PARAMETER Experiment Name: Zm_Hybrid_Pollen_P Parameter: Tissue Value: Pollen vs. Aerial
aattcgcttctctgtcaacttcacttcctcgtcgacgcctccggcccaccaaccatgccggcggctgcggcggcgcagaggctcctcgcggcgagcacgaaaatcatcggcgttgggcgcaactacatagcccactccaaggagctcggcaatccggtccccaaggagcccgtcctgttcctgaagccgacctcgtcgtttctccacgctggtgtggccaccgccgccgttgagatcccggagccgctcgagtcgctacaccacgaggtcgagctcgccgtcgtcatttcccggcgcctcctgtcgccgccgtccgccaccgcggccgctcggcgggccgcgccagttgccgctgaggctgtttccagcgggggtggcgtcctcctacctaggggtggtgtcgccggggtagcggccaacggatggagtggtagcggcccagggctccgcttggctcgaaggctctgcacctacgacgagagagatgacagggcactagaggaagaagttgagaagaaatttggatggatattgaagataatcttcctaggaactgctggcctagttggttaccaattctttccatacatgggtgataacctgcttcaacaatctatctcgcttttgcgtgtcaaggatcccttgttcaagcggatgggagcttctcgtttagctcgttttgcagtggatgaccaaagaagaatgaaggtggtagagatagggggagctcaggaactgcttaatgtattggaaggtgctaaagatgataaaacacgaaaagaaactctaaaagctcttgctgcgctttcaaaatctgaagaagctgcaggatttttggacaaggtcggcgcctacgctatagtcagttccactcccgactctcaagaatatgctgagatccaaacttacaagaccagtcttctgacggcatttgatcaactgaagtcatgatgtccaaatgccaatgggtatattaagcaacattttaactctgcactttgccgtggcggttaatgttctagtttcttgaatcgacgcaatttatctctagaacatgctggacctcctttgttgaccaagtgggttgctgatggaaatgcatgtctggttcatttgtttcaaacaggacagtacattctttccttctgtgggccaataacaagagctttaatttatttattttcttggtataaaaraaraaraaaar

SEQ ID NO: 109150 - protein, 316 aa, Zea mays subsp. mays
  misc_feature (1)..(316): Ceres Seq. ID no. 15218913
  misc_feature (49)..(108): Pfam Name: Fumarylacetoacetate (FAA) hydrolase family Pfam Description: Fumarylacetoacetate (FAA) hydrolase family
  misc_feature (34)..(99): Homolog of NCBI NO: 28829830 NR Description: similar to Arabidopsis thaliana (Mouse-ear
  misc_feature (21)..(108): Homolog of NCBI NO: 7485073 NR Description: hypothetical protein - Arabidopsis thaliana
  misc_feature (21)..(108): Homolog of NCBI NO: 15228286 NR Description: decarboxilase -related [Arabidopsis thaliana]
  misc_feature (21)..(108): Homolog of NCBI NO: 16209656 NR Description: AT4g15940/dl4011w [Arabidopsis thaliana]
  misc_feature (21)..(108): Homolog of NCBI NO: 15234757 NR Description: isomerase like protein [Arabidopsis thaliana]
  misc_feature (219)..(308): Homolog of NCBI NO: 11281187 NR Description: hypothetical protein F18O21.170 - Arabidopsis
  misc_feature (22)..(108): Homolog of NCBI NO: 34897304 NR Description: putative hydroxylase [Oryza sativa]
  misc_feature (22)..(108): Homolog of NCBI NO: 28372682 NR Description: putative isomerase [Oryza sativa (japonica
  misc_feature (152)..(308): Homolog of NCBI NO: 30694398 NR Description: expressed protein [Arabidopsis thaliana]
  misc_feature (92)..(316): Homolog of NCBI NO: 40538927 NR Description: expressed protein [Oryza sativa (japonica
NSLLCQLHFLVDASGPPTMPAAAAAQRLLAASTKIIGVGRNYIAHSKELGNPVPKEPVLFLKPTSSFLHAGVATAAVEIPEPLESLHHEVELAVVISRRLLSPPSATAAARRAAPVAAEAVSSGGGVLLPRGGVAGVAANGWSGSGPGLRLARRLCTYDERDDRALEEEVEKKFGWILKIIFLGTAGLVGYQFFPYMGDNLLQQSISLLRVKDPLFKRMGASRLARFAVDDQRRMKVVEIGGAQELLNVLEGAKDDKTRKETLKALAALSKSEEAAGFLDKVGAYAIVSSTPDSQEYAEIQTYKTSLLTAFDQLKS

SEQ ID NO: 109151 - protein, 298 aa, Zea mays subsp. mays
  misc_feature (1)..(298): Ceres Seq. ID no. 15218914
  misc_feature (31)..(90): Pfam Name: Fumarylacetoacetate (FAA) hydrolase family Pfam Description: Fumarylacetoacetate (FAA) hydrolase family
  misc_feature (16)..(81): Homolog of NCBI NO: 28829830 NR Description: similar to Arabidopsis thaliana (Mouse-ear
  misc_feature (3)..(90): Homolog of NCBI NO: 7485073 NR Description: hypothetical protein - Arabidopsis thaliana
  misc_feature (3)..(90): Homolog of NCBI NO: 15228286 NR Description: decarboxilase -related [Arabidopsis thaliana]
  misc_feature (3)..(90): Homolog of NCBI NO: 16209656 NR Description: AT4g15940/dl4011w [Arabidopsis thaliana]
  misc_feature (3)..(90): Homolog of NCBI NO: 15234757 NR Description: isomerase like protein [Arabidopsis thaliana]
  misc_feature (201)..(290): Homolog of NCBI NO: 11281187 NR Description: hypothetical protein F18O21.170 - Arabidopsis
  misc_feature (4)..(90): Homolog of NCBI NO: 34897304 NR Description: putative hydroxylase [Oryza sativa]
  misc_feature (4)..(90): Homolog of NCBI NO: 28372682 NR Description: putative isomerase [Oryza sativa (japonica
  misc_feature (134)..(290): Homolog of NCBI NO: 30694398 NR Description: expressed protein [Arabidopsis thaliana]
  misc_feature (74)..(298): Homolog of NCBI NO: 40538927 NR Description: expressed protein [Oryza sativa (japonica
MPAAAAAQRLLAASTKIIGVGRNYIAHSKELGNPVPKEPVLFLKPTSSFLHAGVATAAVEIPEPLESLHHEVELAVVISRRLLSPPSATAAARRAAPVAAEAVSSGGGVLLPRGGVAGVAANGWSGSGPGLRLARRLCTYDERDDRALEEEVEKKFGWILKIIFLGTAGLVGYQFFPYMGDNLLQQSISLLRVKDPLFKRMGASRLARFAVDDQRRMKVVEIGGAQELLNVLEGAKDDKTRKETLKALAALSKSEEAAGFLDKVGAYAIVSSTPDSQEYAEIQTYKTSLLTAFDQLKS

SEQ ID NO: 109152 - DNA, 954 bp, Zea mays subsp. mays
  misc_feature (1)..(954): Ceres Seq. ID no. 12594806
aagcgttctacggctccaatttctctgacttctccctgagcctttgcggccggctggagctggacggtccccgggcagcgcaggcagccggactgcgggagtcacctccatggcctcggctgctactgcaaccctccccaaggttcagttgaggccaagatgcaacagctacttccaggtccgccccgtccttgcactccctctcccctcccgaaagttcagctcatcagttgccctgttgattcgttccaacatgccctcaaccctaaggtgaccggtcaagtccatgcccacaccaaaacatgcggtgcctgcaagtgtccgacccatatccacgggttgcttgtttcagctggaggaaggaggacattcctgccggtgtctgcagttggatcaggtcagggctcatcggtcactgaggccgacaggaagagcgatttgtcgctggagaacgtcaagacgtccgttgtatcccgcgacggtgaaaagattaatgtacgagtgcagttgcctggaaaggcgacgcaaaaggtgtttgatgaggctctgacgttcttggcccgtgatgcgccaccggttcctggttttagaaagtccaaaggagggaaaacatcaaatatacccagcagcatcctgctgcagatgcttggcaagagccgggtcaccaaattcgttcttcaggaaatactgagcatcaccattgaagaatttgtcaagaaggaaaacctgaaggtgaaacctgagatccagacaacccagtccgaaggcgagatggagtccgcgttcgcgccgggatcagcatttgggttcaatgttgtccttcagctcgagacacctgactctgatgatccagaggagaaacctggctctgatgacgatttacaggaggaatctggttcctcggagtagaaagaaatgcatatcgcctgcatgcatttatcaaccttcttcatg

SEQ ID NO: 109153 - protein, 249 aa, Zea mays subsp. mays
  misc_feature (1)..(249): Ceres Seq. ID no. 12594807
  misc_feature (110)..(224): Pfam Name: Bacterial trigger factor protein (TF) Pfam Description: Bacterial trigger factor protein (TF)
  misc_feature (55)..(224): Homolog of NCBI NO: 18402430 NR Description: Expressed protein
  misc_feature (113)..(245): Homolog of NCBI NO: 34907590 NR Description: B1078G07.36 [Oryza sativa (japonica
MQQLLPGPPRPCTPSPLPKVQLISCPVDSFQHALNPKVTGQVHAHTKTCGACKCPTHIHGLLVSAGGRRTFLPVSAVGSGQGSSVTEADRKSDLSLENVKTSVVSRDGEKINVRVQLPGKATQKVFDEALTFLARDAPPVPGFRKSKGGKTSNIPSSILLQMLGKSRVTKFVLQEILSITIEEFVKKENLKVKPEIQTTQSEGEMESAFAPGSAFGFNVVLQLETPDSDDPEEKPGSDDDLQEESGSSE

SEQ ID NO: 109154 - DNA, 890 bp, Zea mays subsp. mays
  misc_feature (1)..(890): Ceres Seq. ID no. 12579223
cccggccgtctcgatcccagcatccgagagagctccacaggccaggtccccatcgccgcggcgcttgccccacctctcccccgcccggtagtagcctcgccgccgttgccgagatggggttcgtgtccttcgtcgggagggtgctcttcgtcgccgctttcctcctctccgcctaccaggagtttaatgaattcggtgctgatggtggaccagcagctaaggcccttcggcccaaattcaacgtgtttgtcaaaaatgtatctgctcatctgggagtagctgtgccacacattgagttgaagcatgtgattgctgctacaattggtcttaagggtcttggaagcctcctttttattttgagcagctctctcggtgcttatctcctgctgctgtaccttgctttgatcactcctatcatccatgacttctacaactacgatatggagaaggcagaatttgcaggcctctttgcgaagttcacccaggatttggcgctgatcggagctctgctcttctttctgggcatgaagaactccatcccgaagcggcagggcggcaagaagaaggcccccaaggcgaagacgaactagggctgcttagatagctgcacgcctcaggtggggtgtatcaggagacaggtctatttcgaagcaggctcagcgcgatgcagcgaatgccatcgagctgcgcttttacatgtttatcatcagattccattttgcggcccgaacaaaggtgtgaccggggtgggttaggcgactagattgcacgattatgtacttgagatttgtttgttgaactgggttgccgacggttaatcttctccatttgattttatcttgttagcagcgcaggaaccgttgctgattcagtggttggtagtttcttcc

SEQ ID NO: 109155 - protein, 195 aa, Zea mays subsp. mays
  misc_feature (1)..(195): Ceres Seq. ID no. 12579224
  misc_feature (38)..(175): Pfam Name: HR-like lesion-inducing Pfam Description: HR-like lesion-inducing
  misc_feature (38)..(193): Homolog of NCBI NO: 15239873 NR Description: Nicotiana lesion-inducing like
  misc_feature (38)..(193): Homolog of NCBI NO: 21592798 NR Description: Nicotiana lesion-inducing like [Arabidopsis
  misc_feature (38)..(193): Homolog of NCBI NO: 15219714 NR Description: unknown protein
  misc_feature (38)..(165): Homolog of NCBI NO: 7489143 NR Description: hypothetical protein (clone ND1) - common tobacco
  misc_feature (38)..(195): Homolog of NCBI NO: 15236497 NR Description: elicitor like protein
  misc_feature (38)..(195): Homolog of NCBI NO: 7489144 NR Description: hypothetical protein (clone NF22) - common
  misc_feature (38)..(195): Homolog of NCBI NO: 38346190 NR Description: OSJNBa0027O01.6 [Oryza sativa (japonica
  misc_feature (38)..(61): Homolog of NCBI NO: 37534824 NR Description: putative RNA-binding protein
  misc_feature (61)..(194): Homolog of NCBI NO: 37534824 NR Description: putative RNA-binding protein
  misc_feature (38)..(195): Homolog of NCBI NO: 27261473 NR Description: Unknown protein [Oryza sativa (japonica
RPSRSQHPRELHRPGPHRRGACPTSPPPGSSLAAVAEMGFVSFVGRVLFVAAFLLSAYQEFNEFGADGGPAAKALRPKFNVFVKNVSAHLGVAVPHIELKHVIAATIGLKGLGSLLFILSSSLGAYLLLLYLALITPIIHDFYNYDMEKAEFAGLFAKFTQDLALIGALLFFLGMKNSIPKRQGGKKKAPKAKTN

SEQ ID NO: 109156 - protein, 158 aa, Zea mays subsp. mays
  misc_feature (1)..(158): Ceres Seq. ID no. 12579225
  misc_feature (1)..(138): Pfam Name: HR-like lesion-inducing Pfam Description: HR-like lesion-inducing
  misc_feature (1)..(156): Homolog of NCBI NO: 15239873 NR Description: Nicotiana lesion-inducing like
  misc_feature (1)..(156): Homolog of NCBI NO: 21592798 NR Description: Nicotiana lesion-inducing like [Arabidopsis
  misc_feature (1)..(156): Homolog of NCBI NO: 15219714 NR Description: unknown protein
  misc_feature (1)..(128): Homolog of NCBI NO: 7489143 NR Description: hypothetical protein (clone ND1) - common tobacco
  misc_feature (1)..(158): Homolog of NCBI NO: 15236497 NR Description: elicitor like protein
  misc_feature (1)..(158): Homolog of NCBI NO: 7489144 NR Description: hypothetical protein (clone NF22) - common
  misc_feature (1)..(158): Homolog of NCBI NO: 38346190 NR Description: OSJNBa0027O01.6 [Oryza sativa (japonica
  misc_feature (1)..(24): Homolog of NCBI NO: 37534824 NR Description: putative RNA-binding protein
  misc_feature (24)..(157): Homolog of NCBI NO: 37534824 NR Description: putative RNA-binding protein
  misc_feature (1)..(158): Homolog of NCBI NO: 27261473 NR Description: Unknown protein [Oryza sativa (japonica
MGFVSFVGRVLFVAAFLLSAYQEFNEFGADGGPAAKALRPKFNVFVKNVSAHLGVAVPHIELKHVIAATIGLKGLGSLLFILSSSLGAYLLLLYLALITPIIHDFYNYDMEKAEFAGLFAKFTQDLALIGALLFFLGMKNSIPKRQGGKKKAPKAKTN

SEQ ID NO: 109157 - DNA, 1365 bp, Zea mays subsp. mays
  misc_feature (1)..(1365): Ceres Seq. ID no. 15179680
gtgctgtcgcggtgtcgccagccagccgcctcccgcatcgcctccaaggctctccaaccggggcgcctgcctaaccggccgatttccttccttgcgtagctccattccactgcacaaacagcgcgccactttcccaattcccgtcgcgtggcctccttccgatcctggccactttgtgcgtcctgtagcgagggggtgatcggtgatggactgggggaacaggaccaaggccgccgccgccgctgcggcgccggacgagagggccgggggaggggaagggctcggaggatacgtcaaggtcatgaccgacgaacagatggaggtgctccgcaagcagatctccatctacgccaccatctgcgagcagcttgtcgagatgcatcgcgtcctcaccgagcaccaggacaccattgcaggattgaggtttagcaatctgtactgtgaccctctaatcatcgccggcggtcacaagatcacggcaaggcagcggtggcaaccaacaccgatgcagctgcagatcctggagagcatcttcgaccagggcaacgggacaccgagcaagcagaagataaaggagatagcagcggagctctcgcagcacggccagatctcggagacgaacgtgtacaactggttccagaacaggcgggcacggtcgaagcggaagcaggccgctgcttccttaccgaacaacgccgaatccgaagccgaggcggacgaggagcctctcgccgacaagaagccgaagtcagacaggccgccgccgccgccgccgccgatccaggataataccaaggctacgggcgctctcagcgccgacagggtctctggtgggacgcgtcacttggacacgggtcatgaccagaccagtggcgtgatgtatgggtgcaacgacagtggcttgttgagatcgtccggcagttcgggccagatgtccttgtacgagaacttcatgtcgaatccaagaatcgatcgtttcccggcgaaggtggagagctcccggagcttcccccatctccaacaacacggggaaggctttggcatgtttggatgacatgcatgctgctgcgctgagttgccgtgtgaaaaatggaggtcgacacagcgtgcgttcgatttgctgacgtgaaagttttatcttggatggtacgtgttgcttatcacggtctggttgaccacctccgcggatggtagctagctagcttgaacgaacctgctcttttggagtagctgtaagaggttgatatatagtagtatttgcacgtagtctaattactctaaattatcagcatataattcttcatgtttgcagatttagcacgagaccagtcctacgctgctgctgctgagcagcaggttgtggtt

SEQ ID NO: 109158 - protein, 282 aa, Zea mays subsp. mays
  misc_feature (1)..(282): Ceres Seq. ID no. 15179681
  misc_feature (92)..(153): Pfam Name: Homeobox domain Pfam Description: Homeobox domain
  misc_feature (86)..(191): Homolog of NCBI NO: 8099120 NR Description: similar to a putative homeodomain transcription
  misc_feature (119)..(183): Homolog of NCBI NO: 18419580 NR Description: putative homeobox-containing protein [Narcissus
  misc_feature (24)..(172): Homolog of NCBI NO: 15218015 NR Description: homeodomain protein [Arabidopsis thaliana]
  misc_feature (27)..(173): Homolog of NCBI NO: 30686974 NR Description: homeodomain protein PALE-2, putative [Arabidopsis
  misc_feature (19)..(195): Homolog of NCBI NO: 3955019 NR Description: HB1 homeodomain protein [Populus tremula x
  misc_feature (19)..(195): Homolog of NCBI NO: 40233067 NR Description: homeodomain protein HB1 [Populus tomentosa]
  misc_feature (1)..(179): Homolog of NCBI NO: 15237035 NR Description: homeodomain protein HB2, putative [Arabidopsis
  misc_feature (29)..(217): Homolog of NCBI NO: 3955021 NR Description: HB2 homeodomain protein [Populus tremula x
  misc_feature (21)..(217): Homolog of NCBI NO: 40233087 NR Description: homeodomain protein HB2 [Populus tomentosa]
  misc_feature (1)..(253): Homolog of NCBI NO: 34909272 NR Description: putative HB2 homeodomain protein
MDWGNRTKAAAAAAAPDERAGGGEGLGGYVKVMTDEQMEVLRKQISIYATICEQLVEMHRVLTEHQDTIAGLRFSNLYCDPLIIAGGHKITARQRWQPTPMQLQILESIFDQGNGTPSKQKIKEIAAELSQHGQISETNVYNWFQNRRARSKRKQAAASLPNNAESEAEADEEPLADKKPKSDRPPPPPPPIQDNTKATGALSADRVSGGTRHLDTGHDQTSGVMYGCNDSGLLRSSGSSGQMSLYENFMSNPRIDRFPAKVESSRSFPHLQQHGEGFGMFG

SEQ ID NO: 109159 - protein, 250 aa, Zea mays subsp. mays
  misc_feature (1)..(250): Ceres Seq. ID no. 15179682
  misc_feature (60)..(121): Pfam Name: Homeobox domain Pfam Description: Homeobox domain
  misc_feature (54)..(159): Homolog of NCBI NO: 8099120 NR Description: similar to a putative homeodomain transcription
  misc_feature (87)..(151): Homolog of NCBI NO: 18419580 NR Description: putative homeobox-containing protein [Narcissus
  misc_feature (1)..(140): Homolog of NCBI NO: 15218015 NR Description: homeodomain protein [Arabidopsis thaliana]
  misc_feature (1)..(141): Homolog of NCBI NO: 30686974 NR Description: homeodomain protein PALE-2, putative [Arabidopsis
  misc_feature (1)..(163): Homolog of NCBI NO: 3955019 NR Description: HB1 homeodomain protein [Populus tremula x
  misc_feature (1)..(163): Homolog of NCBI NO: 40233067 NR Description: homeodomain protein HB1 [Populus tomentosa]
  misc_feature (1)..(147): Homolog of NCBI NO: 15237035 NR Description: homeodomain protein HB2, putative [Arabidopsis
  misc_feature (1)..(185): Homolog of NCBI NO: 3955021 NR Description: HB2 homeodomain protein [Populus tremula x
  misc_feature (1)..(185): Homolog of NCBI NO: 40233087 NR Description: homeodomain protein HB2 [Populus tomentosa]
  misc_feature (1)..(221): Homolog of NCBI NO: 34909272 NR Description: putative HB2 homeodomain protein
MTDEQMEVLRKQISIYATICEQLVEMHRVLTEHQDTIAGLRFSNLYCDPLIIAGGHKITARQRWQPTPMQLQILESIFDQGNGTPSKQKIKEIAAELSQHGQISETNVYNWFQNRRARSKRKQAAASLPNNAESEAEADEEPLADKKPKSDRPPPPPPPIQDNTKATGALSADRVSGGTRHLDTGHDQTSGVMYGCNDSGLLRSSGSSGQMSLYENFMSNPRIDRFPAKVESSRSFPHLQQHGEGFGMFG

SEQ ID NO: 109160 - protein, 245 aa, Zea mays subsp. mays
  misc_feature (1)..(245): Ceres Seq. ID no. 15179683
  misc_feature (55)..(116): Pfam Name: Homeobox domain Pfam Description: Homeobox domain
  misc_feature (49)..(154): Homolog of NCBI NO: 8099120 NR Description: similar to a putative homeodomain transcription
  misc_feature (82)..(146): Homolog of NCBI NO: 18419580 NR Description: putative homeobox-containing protein [Narcissus
  misc_feature (1)..(135): Homolog of NCBI NO: 15218015 NR Description: homeodomain protein [Arabidopsis thaliana]
  misc_feature (1)..(136): Homolog of NCBI NO: 30686974 NR Description: homeodomain protein PALE-2, putative [Arabidopsis
  misc_feature (1)..(158): Homolog of NCBI NO: 3955019 NR Description: HB1 homeodomain protein [Populus tremula x
  misc_feature (1)..(158): Homolog of NCBI NO: 40233067 NR Description: homeodomain protein HB1 [Populus tomentosa]
  misc_feature (1)..(142): Homolog of NCBI NO: 15237035 NR Description: homeodomain protein HB2, putative [Arabidopsis
  misc_feature (1)..(180): Homolog of NCBI NO: 3955021 NR Description: HB2 homeodomain protein [Populus tremula x
  misc_feature (1)..(180): Homolog of NCBI NO: 40233087 NR Description: homeodomain protein HB2 [Populus tomentosa]
  misc_feature (1)..(216): Homolog of NCBI NO: 34909272 NR Description: putative HB2 homeodomain protein
MEVLRKQISIYATICEQLVEMHRVLTEHQDTIAGLRFSNLYCDPLIIAGGHKITARQRWQPTPMQLQILESIFDQGNGTPSKQKIKEIAAELSQHGQISETNVYNWFQNRRARSKRKQAAASLPNNAESEAEADEEPLADKKPKSDRPPPPPPPIQDNTKATGALSADRVSGGTRHLDTGHDQTSGVMYGCNDSGLLRSSGSSGQMSLYENFMSNPRIDRFPAKVESSRSFPHLQQHGEGFGMFG

SEQ ID NO: 109161 - DNA, 547 bp, Zea mays subsp. mays
  misc_feature (1)..(547): Ceres Seq. ID no. 13624647
ataccgatttgcagacccatggtgctgacgaagaatgcactccgcattctctacaaatagcttggcaccttgacacctagcttcacctccctcctcctggcccagtcgtcctagccatcaaaattcagttgagggttcttcagttcagccatgaagcttgagatgacagcagcggccatggtcttgatcctgctgacctcgggcgccgaggccaaggtctgctactcgcggagcaggaccttcaaggggtggtgctaccacagcatcaactgcatcgccatctgcatcaccgagggcgacaccagcgggttctgccaggccggggcctgcatgtgcacttatgagtgtctcaatggtgtcgtcgccggtggcggcggtggcggcggacagcatccatcggttggctcatcgcgtggtggtggtgctgaggctaaagcagccgtcccatcagtgtagagcttctgattctggcggggtgatggcagatggtgcactactactcttccgtgcacatgctaactcaaggtttcgagttgatgaataacac

SEQ ID NO: 109162 - protein, 101 aa, Zea mays subsp. mays
  misc_feature (1)..(101): Ceres Seq. ID no. 13624648
  misc_feature (22)..(66): Pfam Name: Gamma-thionins family Pfam Description: Gamma-thionins family
  misc_feature (10)..(66): Homolog of NCBI NO: 7451428 NR Description: proteinase inhibitor - rice
  misc_feature (1)..(66): Homolog of NCBI NO: 7939581 NR Description: thionin like protein [Nicotiana tabacum]
  misc_feature (1)..(66): Homolog of NCBI NO: 28624546 NR Description: defensin protein 1 [Prunus persica]
  misc_feature (2)..(66): Homolog of NCBI NO: 17373811 NR Description: Defensin J1-2 precursor
  misc_feature (5)..(79): Homolog of NCBI NO: 34907150 NR Description: P0506E04.26 [Oryza sativa (japonica
MKLEMTAAAMVLILLTSGAEAKVCYSRSRTFKGWCYHSINCIAICITEGDTSGFCQAGACMCTYECLNGVVAGGGGGGGQHPSVGSSRGGGAEAKAAVPSV

SEQ ID NO: 109163 - protein, 97 aa, Zea mays subsp. mays
  misc_feature (1)..(97): Ceres Seq. ID no. 13624649
  misc_feature (18)..(62): Pfam Name: Gamma-thionins family Pfam Description: Gamma-thionins family
  misc_feature (6)..(62): Homolog of NCBI NO: 7451428 NR Description: proteinase inhibitor - rice
  misc_feature (1)..(62): Homolog of NCBI NO: 7939581 NR Description: thionin like protein [Nicotiana tabacum]
  misc_feature (1)..(62): Homolog of NCBI NO: 28624546 NR Description: defensin protein 1 [Prunus persica]
  misc_feature (1)..(62): Homolog of NCBI NO: 17373811 NR Description: Defensin J1-2 precursor
  misc_feature (1)..(75): Homolog of NCBI NO: 34907150 NR Description: P0506E04.26 [Oryza sativa (japonica
MTAAAMVLILLTSGAEAKVCYSRSRTFKGWCYHSINCIAICITEGDTSGFCQAGACMCTYECLNGVVAGGGGGGGQHPSVGSSRGGGAEAKAAVPSV

SEQ ID NO: 109164 - protein, 92 aa, Zea mays subsp. mays
  misc_feature (1)..(92): Ceres Seq. ID no. 13624650
  misc_feature (13)..(57): Pfam Name: Gamma-thionins family Pfam Description: Gamma-thionins family
  misc_feature (1)..(57): Homolog of NCBI NO: 7451428 NR Description: proteinase inhibitor - rice
  misc_feature (1)..(57): Homolog of NCBI NO: 7939581 NR Description: thionin like protein [Nicotiana tabacum]
  misc_feature (1)..(57): Homolog of NCBI NO: 28624546 NR Description: defensin protein 1 [Prunus persica]
  misc_feature (1)..(57): Homolog of NCBI NO: 17373811 NR Description: Defensin J1-2 precursor
  misc_feature (1)..(70): Homolog of NCBI NO: 34907150 NR Description: P0506E04.26 [Oryza sativa (japonica
MVLILLTSGAEAKVCYSRSRTFKGWCYHSINCIAICITEGDTSGFCQAGACMCTYECLNGVVAGGGGGGGQHPSVGSSRGGGAEAKAAVPSV

SEQ ID NO: 109165 - DNA, 1133 bp, Zea mays subsp. mays
  misc_feature (1)..(1133): Ceres Seq. ID no. 13624283
acgcctgcacatccccactcctaaaaatagtagccggcggcatgcaaatacgataccccacgccttcttcccgttcatgatatggagctctcctcagatcaataatgggcctatatatgagacgcacgagcaacgccagttagcaaccagccaccactaccaaccctccagtctcagtctccgtctcctgctgagcaacaaggcttcagcagttcagagattctgctggagcctggaggaagcttctctacccaccactccgacgcggccgccgtcgacgagatcagccgcgccgtcgccaccaaaggcaaaagaagagatcgagctcgaggctcgagctcgagcaggcagcagggagggggcacccagatatatagatccccaaaaggtgcatgtaatcatcggctgcgtcgtcacgtcagtcgttcatgtgtttgtatctgattcgtggatgccagattaattgatggacctgtccccgaaccccgagagcccgggaagcggtggtgatggcggcggtggcggaggcggagccgggggatcgagcagcggcggggcgtctccgtcggggggcttcggcacgccgcagacgccgagccggtacgaggcgcagaagcggcgggactggaacacgttcgggcagtacctgcggaaccaccggccgccgctgagcctggcgcagtgcagcggtgcgcacgtgctggagttcctgcgctacctggaccagttcggcaagaccaaggtgcacacgccggcgtgccccttcttcggccacccgaacccgcccgcgccgtgcccctgcccgctgcgccaggcctggggtagcctcgacgcgctggtggcccgcctccgcgccgccttcgaggagaacggggtcctcccggagtccaaccccttcgcggcgcgcgccgtccgcctctacctccgcgaggtccgcgagcaccaggcccgcgcgcgcggcgtcagctacgagaagaagaagcgcaagaaggcgcagcggccggctgatcatgccagcggcagtggaggcggccaaggacctcaccacccgccgcccgccggcgcgtcgggctgaggaacccatggtatgccggccggactgagcatattttatgtaggtttcgatcgatttg

SEQ ID NO: 109166 - protein, 202 aa, Zea mays subsp. mays
  misc_feature (1)..(202): Ceres Seq. ID no. 13624284
  misc_feature (24)..(159): Pfam Name: Protein of unknown function (DUF640) Pfam Description: Protein of unknown function (DUF640)
  misc_feature (19)..(191): Homolog of NCBI NO: 18412120 NR Description: expressed protein [Arabidopsis thaliana]
  misc_feature (34)..(175): Homolog of NCBI NO: 18406012 NR Description: expressed protein [Arabidopsis thaliana]
  misc_feature (32)..(174): Homolog of NCBI NO: 15229310 NR Description: hypothetical protein [Arabidopsis thaliana]
  misc_feature (29)..(188): Homolog of NCBI NO: 15237680 NR Description: hypothetical protein [Arabidopsis thaliana]
  misc_feature (39)..(179): Homolog of NCBI NO: 15241821 NR Description: expressed protein [Arabidopsis thaliana]
  misc_feature (30)..(175): Homolog of NCBI NO: 18390725 NR Description: expressed protein [Arabidopsis thaliana]
  misc_feature (20)..(202): Homolog of NCBI NO: 34907938 NR Description: B1088C09.17 [Oryza sativa (japonica
  misc_feature (9)..(186): Homolog of NCBI NO: 18402578 NR Description: expressed protein [Arabidopsis thaliana]
  misc_feature (7)..(201): Homolog of NCBI NO: 37535384 NR Description: hypothetical protein [Oryza sativa (japonica
  misc_feature (1)..(202): Homolog of NCBI NO: 38344650 NR Description: OSJNBb0072M01.12 [Oryza sativa (japonica
MDLSPNPESPGSGGDGGGGGGGAGGSSSGGASPSGGFGTPQTPSRYEAQKRRDWNTFGQYLRNHRPPLSLAQCSGAHVLEFLRYLDQFGKTKVHTPACPFFGHPNPPAPCPCPLRQAWGSLDALVARLRAAFEENGVLPESNPFAARAVRLYLREVREHQARARGVSYEKKKRKKAQRPADHASGSGGGQGPHHPPPAGASG

SEQ ID NO: 109167 - protein, 153 aa, Zea mays subsp. mays
  misc_feature (1)..(153): Ceres Seq. ID no. 13624285
RLHIPTPKNSSRRHANTIPHAFFPFMIWSSPQINNGPIYETHEQRQLATSHHYQPSSLSLRLLLSNKASAVQRFCWSLEEASLPTTPTRPPSTRSAAPSPPKAKEEIELEARARAGSREGAPRYIDPQKVHVIIGCVVTSVVHVFVSDSWMPD

SEQ ID NO: 109168 - protein, 128 aa, Zea mays subsp. mays
  misc_feature (1)..(128): Ceres Seq. ID no. 13624286
MIWSSPQINNGPIYETHEQRQLATSHHYQPSSLSLRLLLSNKASAVQRFCWSLEEASLPTTPTRPPSTRSAAPSPPKAKEEIELEARARAGSREGAPRYIDPQKVHVIIGCVVTSVVHVFVSDSWMPD

SEQ ID NO: 109169 - DNA, 906 bp, Zea mays subsp. mays
  misc_feature (1)..(906): Ceres Seq. ID no. 13600477
accgtgtctgcctcaaagctatgccaggacgccacgtccaagcaaagcacccgatgccattgccacctcccagcactcacgcgtgagcgtgactataaaaaacgcaccctctgcatccgcccccgtctgcctgccctatcgaatctttcgccgccccatcagcccagcaattcttcgctgttcgttgccgttggttccatcggttgatcgaccggccggaagcagagagagagagatgggcaagtcctgggcgctcatcagccacctccacaccgtcgccgggccgagcatcaccctgctgtaccctctgtacgcgtcggtgtgcgcgatggagagcccgtccaaggcggacgacgagcagtggctgtcctactggatcatacactccttcgtcaccctcctggagatgctcgccgagccgctcctccactgggtacccgtgtggtacccggccaaggtgctgttcgcggcgtggctggcgctgccgcagttcaagggcgcctccttcgtctacgagaagctcgtcagggaacagctccggaactaccgcgccaggtacccgcgcaagggcgccgccgccgccgccgccgtcggcgacgacgacgacgaccataaggtgcacatagccaaggtaggctgaggctgagcacgaccatgtgcagtgaaagcgtgtggagacgacgcaggagctgaccggagatcatcacaggaacttctgtagatctggtgttccaaggtgttcatttgatgtatcctacgtgtctctgtagctcttgtggactgccggtgtcgcgtaatgtatctgaactctcttcgcgagtgcgacggaaccccccctccccttgcagcacgagatgcttctgtaagaacgataacatgtagacaagccaagcgcctcagctcctt

SEQ ID NO: 109170 - protein, 212 aa, Zea mays subsp. mays
  misc_feature (1)..(212): Ceres Seq. ID no. 13600478
  misc_feature (82)..(179): Pfam Name: TB2/DP1, HVA22 family Pfam Description: TB2/DP1, HVA22 family
  misc_feature (85)..(181): Homolog of NCBI NO: 15222421 NR Description: AtHVA22c [Arabidopsis thaliana]
  misc_feature (85)..(179): Homolog of NCBI NO: 15241840 NR Description: AtHVA22b-related protein [Arabidopsis thaliana]
  misc_feature (85)..(179): Homolog of NCBI NO: 4884934 NR Description: AtHVA22b [Arabidopsis thaliana]
  misc_feature (85)..(184): Homolog of NCBI NO: 15221266 NR Description: AtHVA22a [Arabidopsis thaliana]
  misc_feature (99)..(182): Homolog of NCBI NO: 7484787 NR Description: abscisic acid-induced protein homolog F13M23.100
  misc_feature (99)..(188): Homolog of NCBI NO: 8777395 NR Description: gene_id:MFB16.12~pir||T05517~similar to unknown
  misc_feature (79)..(182): Homolog of NCBI NO: 18416458 NR Description: abscisic acid-induced - like protein [Arabidopsis
  misc_feature (79)..(188): Homolog of NCBI NO: 18423191 NR Description: expressed protein [Arabidopsis thaliana]
  misc_feature (79)..(210): Homolog of NCBI NO: 33342176 NR Description: hypothetical protein [Triticum aestivum]
  misc_feature (79)..(210): Homolog of NCBI NO: 1076715 NR Description: abscisic acid-induced protein HVA22 - barley
PCLPQSYARTPRPSKAPDAIATSQHSRVSVTIKNAPSASAPVCLPYRIFRRPISPAILRCSLPLVPSVDRPAGSREREMGKSWALISHLHTVAGPSITLLYPLYASVCAMESPSKADDEQWLSYWIIHSFVTLLEMLAEPLLHWVPVWYPAKVLFAAWLALPQFKGASFVYEKLVREQLRNYRARYPRKGAAAAAAVGDDDDDHKVHIAKVG

SEQ ID NO: 109171 - protein, 134 aa, Zea mays subsp. mays
  misc_feature (1)..(134): Ceres Seq. ID no. 13600479
  misc_feature (4)..(101): Pfam Name: TB2/DP1, HVA22 family Pfam Description: TB2/DP1, HVA22 family
  misc_feature (7)..(103): Homolog of NCBI NO: 15222421 NR Description: AtHVA22c [Arabidopsis thaliana]
  misc_feature (7)..(101): Homolog of NCBI NO: 15241840 NR Description: AtHVA22b-related protein [Arabidopsis thaliana]
  misc_feature (7)..(101): Homolog of NCBI NO: 4884934 NR Description: AtHVA22b [Arabidopsis thaliana]
  misc_feature (7)..(106): Homolog of NCBI NO: 15221266 NR Description: AtHVA22a [Arabidopsis thaliana]
  misc_feature (21)..(104): Homolog of NCBI NO: 7484787 NR Description: abscisic acid-induced protein homolog F13M23.100
  misc_feature (21)..(110): Homolog of NCBI NO: 8777395 NR Description: gene_id:MFB16.12~pir||T05517~similar to unknown
  misc_feature (1)..(104): Homolog of NCBI NO: 18416458 NR Description: abscisic acid-induced - like protein [Arabidopsis
  misc_feature (1)..(110): Homolog of NCBI NO: 18423191 NR Description: expressed protein [Arabidopsis thaliana]
  misc_feature (1)..(132): Homolog of NCBI NO: 33342176 NR Description: hypothetical protein [Triticum aestivum]
  misc_feature (1)..(132): Homolog of NCBI NO: 1076715 NR Description: abscisic acid-induced protein HVA22 - barley
MGKSWALISHLHTVAGPSITLLYPLYASVCAMESPSKADDEQWLSYWIIHSFVTLLEMLAEPLLHWVPVWYPAKVLFAAWLALPQFKGASFVYEKLVREQLRNYRARYPRKGAAAAAAVGDDDDDHKVHIAKVG

SEQ ID NO: 109172 - DNA, 511 bp, Zea mays subsp. mays
  misc_feature (1)..(511): Ceres Seq. ID no. 13624271
accaccgcatcccacaacccccgagctcagcttagctccactccagctccaatcgcagtcgtgaccagagcgcgagagctagctagagggccgtgaaaatgccgatcaataggatcgccctggggagccaccaggaggtgtaccacccgggcgccctcaaggcggcgttcgctgagttcatctccaccctcatcttcgtcttcgccggccagggctccggcatggccttcagcaagctgaccggcggcggcccgacgaccccggcgggcctgatcgcggcggcggtggcgcacgcgttcgcgctgtttcgtggcggtgtctgtgggcgcgaacaatctccggcgggcacgtgaaaccctgccgtggaccttcggcgccttcgtgggcggcaacatcacccttgttccgggggctcctggtactggggtggcgcagnctgctggggtccaaccgtggcgtgcttcctgctccggcttctcgacgggcgggcaggccacgggcacctttcggg

SEQ ID NO: 109173 - protein, 84 aa, Zea mays subsp. mays
  misc_feature (1)..(84): Ceres Seq. ID no. 13624272
  misc_feature (13)..(84): Pfam Name: Major intrinsic protein Pfam Description: Major intrinsic protein
  misc_feature (1)..(84): Homolog of NCBI NO: 6478150 NR Description: putative gamma tonoplast intrinsic protein (TIP)
  misc_feature (1)..(84): Homolog of NCBI NO: 23957320 NR Description: tonoplast intrinsic protein [Kandelia candel]
  misc_feature (1)..(84): Homolog of NCBI NO: 8699604 NR Description: putative aquaporin TIP3 [Vitis berlandieri x
  misc_feature (1)..(84): Homolog of NCBI NO: 13447819 NR Description: tonoplast membrane integral protein ZmTIP1-2 [Zea
  misc_feature (1)..(84): Homolog of NCBI NO: 17940748 NR Description: aquaporin-like protein [Petunia x hybrida]
  misc_feature (1)..(84): Homolog of NCBI NO: 1200161 NR Description: tonoplast intrinsic protein [Tulipa gesneriana]
  misc_feature (1)..(84): Homolog of NCBI NO: 4099406 NR Description: gamma-type tonoplast intrinsic protein [Triticum
  misc_feature (1)..(84): Homolog of NCBI NO: 629784 NR Description: tonoplast intrinsic protein gamma - barley
  misc_feature (1)..(84): Homolog of NCBI NO: 1729971 NR Description: TONOPLAST INTRINSIC PROTEIN, GAMMA (GAMMA TIP)
  misc_feature (1)..(84): Homolog of NCBI NO: 3004950 NR Description: tonoplast intrinsic protein; ZmTIP1 [Zea mays]
MPINRIALGSHQEVYHPGALKAAFAEFISTLIFVFAGQGSGMAFSKLTGGGPTTPAGLIAAAVAHAFALFRGGVCGREQSPAGT

SEQ ID NO: 109174 - protein, 43 aa, Zea mays subsp. mays
  misc_feature (1)..(43): Ceres Seq. ID no. 13624273
  misc_feature (1)..(43): Homolog of NCBI NO: 6478150 NR Description: putative gamma tonoplast intrinsic protein (TIP)
  misc_feature (1)..(43): Homolog of NCBI NO: 23957320 NR Description: tonoplast intrinsic protein [Kandelia candel]
  misc_feature (1)..(43): Homolog of NCBI NO: 8699604 NR Description: putative aquaporin TIP3 [Vitis berlandieri x
  misc_feature (1)..(43): Homolog of NCBI NO: 13447819 NR Description: tonoplast membrane integral protein ZmTIP1-2 [Zea
  misc_feature (1)..(43): Homolog of NCBI NO: 17940748 NR Description: aquaporin-like protein [Petunia x hybrida]
  misc_feature (1)..(43): Homolog of NCBI NO: 1200161 NR Description: tonoplast intrinsic protein [Tulipa gesneriana]
  misc_feature (1)..(43): Homolog of NCBI NO: 4099406 NR Description: gamma-type tonoplast intrinsic protein [Triticum
  misc_feature (1)..(43): Homolog of NCBI NO: 629784 NR Description: tonoplast intrinsic protein gamma - barley
  misc_feature (1)..(43): Homolog of NCBI NO: 1729971 NR Description: TONOPLAST INTRINSIC PROTEIN, GAMMA (GAMMA TIP)
  misc_feature (1)..(43): Homolog of NCBI NO: 3004950 NR Description: tonoplast intrinsic protein; ZmTIP1 [Zea mays]
MAFSKLTGGGPTTPAGLIAAAVAHAFALFRGGVCGREQSPAGT

SEQ ID NO: 109175 - DNA, 1619 bp, Zea mays subsp. mays
  misc_feature (1)..(1619): Ceres Seq. ID no. 12637085
aaaagcccccttcccctcccccctctccgccttggcgcatattatattcgcgcaccatcgccgcaacttgcacgggcgccgatgactagttgcgccagatgcactgcatctgctcggcgtggtgcctccaacgtccaacccctcttgtctcttgtctacctctcttctgcccctctgcgtccgtgtctccctcgtcgtcgctgcgtgaggttgacgacgaccagtcacaggatctgttcgttcctcatgcgacccagctagctaaaactggcatgcatggacatgctacgctgctgcgtcaatccatctcaccagcaggtacgctgctgtacatgctgctacgagcctacgatcgatagcagtctatgcctttgctcgatgccgatgtttatctgcatgtgatcgtattcgtatgcacggccctctcaagctgagtgctttttggtgggtccatcgtcctatatatacgctcatcagttcactgacgacgatataacgattgttggggttcagaaactacatatggtggtgctcgcccgatctctttcttgtatattcttcttattattagtctacttctctctctctctctctctttctgaaagaacaaggaactagatgtcttgtcttgtgcctcctactatacctttacgtgtttttcttccttttgtcgtccatggcttttcaccggtctgctgggtgaagtgaagtaatttacacgcatgtcttacgcacgcgctccttcagttgtccgcatatctgatcataacatcgcttcattcatgtgctgacgagatatttttcgccgccgagactgcagtgctagctagctagatctggcctgattcgccgatcgagcggtcgccggtcagagactcagagttcatgagacggagtgcttcagctcaaagactgctagtggtagctaggtagctgcgtgcactgcatgcgcggcgccttggacttgaagaaaccgagcgctccgatagtccgatccggaaacgatgagtgccgggccggaggacacccagcagctgatcaacagtgccgccgctagccccaaccgcagcgcaccgtccgccgcgcccagcgatatggagaggggcagcggaaccgccgcgtcctcgtcgcgcgcttcgacgacgtcccactcccaccagagggccacccacagggtggtggaggaggaggaggaggagcctagtagcagccgtggcgccggcagcctctgctccgggtacctgtcgcttccggctctgctgctcgtcggcgtcaccgcgtcgctggtgatcctcccgctcgtcctgcccccgctgccgccgccgccgtcgttgctgatgctggtccccgtggcaatgctgctcctgctgctcgtgctggcgttcatgcccacgtcgtccaccggcggccgcggtggaaccggaccgacctacatgtagataatcacatcggttttttttttcctttctttctcttgtcgtcctttcgtttggattttgtgacagagggaggtcttgcgatggatcagttagtcctcagcttctgctcttctcgatcgtacgatgtctctgttcggctaattaatttgcataggggtatatatatgctgcctagatctt

SEQ ID NO: 109176 - protein, 144 aa, Zea mays subsp. mays
  misc_feature (1)..(144): Ceres Seq. ID no. 12637086
  misc_feature (85)..(129): Homolog of NCBI NO: 20161874 NR Description: B1139B11.15 [Oryza sativa (japonica
  misc_feature (11)..(129): Homolog of NCBI NO: 34907496 NR Description: B1099D03.18 [Oryza sativa (japonica
  misc_feature (75)..(133): Homolog of NCBI NO: 30689607 NR Description: expressed protein [Arabidopsis thaliana]
  misc_feature (75)..(133): Homolog of NCBI NO: 7486480 NR Description: hypothetical protein At2g44080 [imported] -
  misc_feature (53)..(131): Homolog of NCBI NO: 30695081 NR Description: expressed protein [Arabidopsis thaliana]
  misc_feature (53)..(131): Homolog of NCBI NO: 11282356 NR Description: hypothetical protein F24G16.170 - Arabidopsis
MSAGPEDTQQLINSAAASPNRSAPSAAPSDMERGSGTAASSSRASTTSHSHQRATHRVVEEEEEEPSSSRGAGSLCSGYLSLPALLLVGVTASLVILPLVLPPLPPPPSLLMLVPVAMLLLLLVLAFMPTSSTGGRGGTGPTYM

SEQ ID NO: 109177 - protein, 114 aa, Zea mays subsp. mays
  misc_feature (1)..(114): Ceres Seq. ID no. 12637087
  misc_feature (55)..(99): Homolog of NCBI NO: 20161874 NR Description: B1139B11.15 [Oryza sativa (japonica
  misc_feature (1)..(99): Homolog of NCBI NO: 34907496 NR Description: B1099D03.18 [Oryza sativa (japonica
  misc_feature (45)..(103): Homolog of NCBI NO: 30689607 NR Description: expressed protein [Arabidopsis thaliana]
  misc_feature (45)..(103): Homolog of NCBI NO: 7486480 NR Description: hypothetical protein At2g44080 [imported] -
  misc_feature (23)..(101): Homolog of NCBI NO: 30695081 NR Description: expressed protein [Arabidopsis thaliana]
  misc_feature (23)..(101): Homolog of NCBI NO: 11282356 NR Description: hypothetical protein F24G16.170 - Arabidopsis
MERGSGTAASSSRASTTSHSHQRATHRVVEEEEEEPSSSRGAGSLCSGYLSLPALLLVGVTASLVILPLVLPPLPPPPSLLMLVPVAMLLLLLVLAFMPTSSTGGRGGTGPTYM

SEQ ID NO: 109178 - protein, 86 aa, Zea mays subsp. mays
  misc_feature (1)..(86): Ceres Seq. ID no. 12637088
MHCICSAWCLQRPTPLVSCLPLFCPSASVSPSSSLREVDDDQSQDLFVPHATQLAKTGMHGHATLLRQSISPAGTLLYMLLRAYDR

SEQ ID NO: 109179 - DNA, 612 bp, Zea mays subsp. mays
  misc_feature (1)..(612): Ceres Seq. ID no. 13600175
aatcgaaaaaggagatcgcgagactgttgaaaacatactcagaaatatggtggatgttcgtgatgttgctgacgctcttcttctggcttacgaaaagccagaagcgtctggacgatacatctgcagttcacatgcaataaaagttgctgatatgataaacatactgaagaccttgtatccatcttacccttatcccaaaaattttgtggaagatgatgtcaactctgtatacagctctgagaaactgcagaagctggggtggagcttcaagcctatagaggaatccctccgcgacactgttgaatcctacaaagcatttggcatcctgaattgaacatccagctacgactgttccatctgctgtttttgcctccgaactctttctgaataataatgtatgtaggcagtgaaacagcattgccagcaggttaatcctggcatcatgctggagcagcactgtagttctctctttttttttcatccccaatactatctagtggttcaggaccaaataagtaggccccgtgctgactggtttatggcttgtggcctattgtcgctgctaaaactagaagcgttcgtactatcttgcactgctgcacttgatttctc

SEQ ID NO: 109180 - protein, 110 aa, Zea mays subsp. mays
  misc_feature (1)..(110): Ceres Seq. ID no. 13600176
  misc_feature (4)..(109): Homolog of NCBI NO: 16580096 NR Description: cinnamoyl-CoA reductase [Prunus persica]
  misc_feature (4)..(109): Homolog of NCBI NO: 25140432 NR Description: cinnamoyl CoA reductase [Hordeum vulgare]
  misc_feature (4)..(109): Homolog of NCBI NO: 7431410 NR Description: cinnamoyl CoA reductase - maize
  misc_feature (4)..(109): Homolog of NCBI NO: 3242328 NR Description: cinnamoyl-CoA reductase [Zea mays]
  misc_feature (4)..(109): Homolog of NCBI NO: 3341511 NR Description: cinnamoyl-CoA reductase [Saccharum officinarum]
  misc_feature (4)..(109): Homolog of NCBI NO: 9964087 NR Description: cinnamoyl CoA reductase [Lolium perenne]
  misc_feature (16)..(109): Homolog of NCBI NO: 15223068 NR Description: cinnamoyl-CoA reductase family [Arabidopsis
  misc_feature (16)..(109): Homolog of NCBI NO: 6554472 NR Description: putative cinnamoyl-CoA reductase; 14056-15506
  misc_feature (7)..(104): Homolog of NCBI NO: 15226135 NR Description: cinnamoyl-CoA reductase family [Arabidopsis
  misc_feature (7)..(104): Homolog of NCBI NO: 15226134 NR Description: cinnamoyl-CoA reductase family [Arabidopsis
IEKGDRETVENILRNMVDVRDVADALLLAYEKPEASGRYICSSHAIKVADMINILKTLYPSYPYPKNFVEDDVNSVYSSEKLQKLGWSFKPIEESLRDTVESYKAFGILN

SEQ ID NO: 109181 - protein, 95 aa, Zea mays subsp. mays
  misc_feature (1)..(95): Ceres Seq. ID no. 13600177
  misc_feature (1)..(94): Homolog of NCBI NO: 16580096 NR Description: cinnamoyl-CoA reductase [Prunus persica]
  misc_feature (1)..(94): Homolog of NCBI NO: 25140432 NR Description: cinnamoyl CoA reductase [Hordeum vulgare]
  misc_feature (1)..(94): Homolog of NCBI NO: 7431410 NR Description: cinnamoyl CoA reductase - maize
  misc_feature (1)..(94): Homolog of NCBI NO: 3242328 NR Description: cinnamoyl-CoA reductase [Zea mays]
  misc_feature (1)..(94): Homolog of NCBI NO: 3341511 NR Description: cinnamoyl-CoA reductase [Saccharum officinarum]
  misc_feature (1)..(94): Homolog of NCBI NO: 9964087 NR Description: cinnamoyl CoA reductase [Lolium perenne]
  misc_feature (1)..(94): Homolog of NCBI NO: 15223068 NR Description: cinnamoyl-CoA reductase family [Arabidopsis
  misc_feature (1)..(94): Homolog of NCBI NO: 6554472 NR Description: putative cinnamoyl-CoA reductase; 14056-15506
  misc_feature (1)..(89): Homolog of NCBI NO: 15226135 NR Description: cinnamoyl-CoA reductase family [Arabidopsis
  misc_feature (1)..(89): Homolog of NCBI NO: 15226134 NR Description: cinnamoyl-CoA reductase family [Arabidopsis
MVDVRDVADALLLAYEKPEASGRYICSSHAIKVADMINILKTLYPSYPYPKNFVEDDVNSVYSSEKLQKLGWSFKPIEESLRDTVESYKAFGILN

SEQ ID NO: 109182 - protein, 60 aa, Zea mays subsp. mays
  misc_feature (1)..(60): Ceres Seq. ID no. 13600178
  misc_feature (1)..(54): Homolog of NCBI NO: 15226134 NR Description: cinnamoyl-CoA reductase family [Arabidopsis
  misc_feature (1)..(59): Homolog of NCBI NO: 16580096 NR Description: cinnamoyl-CoA reductase [Prunus persica]
  misc_feature (1)..(59): Homolog of NCBI NO: 25140432 NR Description: cinnamoyl CoA reductase [Hordeum vulgare]
  misc_feature (1)..(59): Homolog of NCBI NO: 7431410 NR Description: cinnamoyl CoA reductase - maize
  misc_feature (1)..(59): Homolog of NCBI NO: 3242328 NR Description: cinnamoyl-CoA reductase [Zea mays]
  misc_feature (1)..(59): Homolog of NCBI NO: 3341511 NR Description: cinnamoyl-CoA reductase [Saccharum officinarum]
  misc_feature (1)..(59): Homolog of NCBI NO: 9964087 NR Description: cinnamoyl CoA reductase [Lolium perenne]
  misc_feature (1)..(59): Homolog of NCBI NO: 15223068 NR Description: cinnamoyl-CoA reductase family [Arabidopsis
  misc_feature (1)..(59): Homolog of NCBI NO: 6554472 NR Description: putative cinnamoyl-CoA reductase; 14056-15506
  misc_feature (1)..(54): Homolog of NCBI NO: 15226135 NR Description: cinnamoyl-CoA reductase family [Arabidopsis
MINILKTLYPSYPYPKNFVEDDVNSVYSSEKLQKLGWSFKPIEESLRDTVESYKAFGILN

SEQ ID NO: 109183 - DNA, 1253 bp, Zea mays subsp. mays
  misc_feature (1)..(1253): Ceres Seq. ID no. 13600098
atatgttcatccattgtattcttccgatttaaactgaaaagcttaggtgacgtacgttgtcccttcgtttgaaggtcaagatcatcagatacgcgccttgcggggagatcgtcaagcacgcatcggtgccgtacaatctcactgaagataacggttggggcctagagatctttgaagtcaagaggtgcttggaagaggctcgttcggctggcctcactgttagagctatggtggtaataaatcccggcaaccctactggacaggtgctatccgtcacaaaccaggaggagatagtagagttttgtcggaaggaaggtctggttatacttgctgatgaggtataccaggaaaatatctacgcagagaacaagaagttccattccttcaagaaagtggccagatcacttgcttacgacgaaaatgacctcaccctagtatcacttcattccgtttcaatgagctatggggagagtggcagaagaggaggctacatggaggtgtctggtgttgcagctaatgtgaaggatcagatttacaaggtggcttctttaacactctgccccaacattgctggccagattctcgtcagccttgcaatggatccaccgaagctaggagatgaatctttcgagtcatttgataaggagaaggaacagatccgttcatccttctgcaagcgagccaagaccctggagaaagctttcagcggcctggagggcgtgacttgcaacaagttagagggtgcgctgtacttgttcccacggctccacctcccctccgctgcgatcagggccgccgatttcgagggagtttcacctgacatattctacgctcaccgcctgcttgatgccaccgggattgccgttgtgccgggctctgggttccaccaggcctctgggacgatccatatccgatgcacgatccttcctgacgaaagaaaaatcgaggcgatggtcgcacgcttgagggcgttccataaggcgttcatgaacgagttccggggctctcagcaggtcatgaacgatctccgtcgctgatggtgtcgatgcatggcacggttaggcctgtgcgtgtgcccatgggcaatcaagacaacttctgagctctggagttgttgtttgttgttctgtgttcttgcttcctcgttgagctgtgcccgtttgtcctcacttatgcagtcagtggtctgtctgtagtctgtactgcttaaagataagctgtgctttcaggaataaaaagtctgcagcttgtgc

SEQ ID NO: 109184 - protein, 269 aa, Zea mays subsp. mays
  misc_feature (1)..(269): Ceres Seq. ID no. 13600099
  misc_feature (1)..(250): Pfam Name: Aminotransferase class I and II Pfam Description: Aminotransferase class I and II
  misc_feature (1)..(258): Homolog of NCBI NO: 461498 NR Description: ALANINE AMINOTRANSFERASE 2 (GPT)
  misc_feature (1)..(258): Homolog of NCBI NO: 3694807 NR Description: alanine aminotransferase [Zea mays]
  misc_feature (1)..(258): Homolog of NCBI NO: 21954069 NR Description: putative alanine aminotransferase [Arabidopsis
  misc_feature (1)..(258): Homolog of NCBI NO: 30698866 NR Description: alanine aminotransferase, putative [Arabidopsis
  misc_feature (1)..(258): Homolog of NCBI NO: 9082270 NR Description: alanine aminotransferase [Arabidopsis thaliana]
  misc_feature (1)..(258): Homolog of NCBI NO: 25287212 NR Description: hypothetical protein T13M22.3 [imported] -
  misc_feature (1)..(258): Homolog of NCBI NO: 22329623 NR Description: alanine aminotransferase, putative [Arabidopsis
  misc_feature (1)..(258): Homolog of NCBI NO: 21954071 NR Description: putative alanine aminotransferase [Arabidopsis
  misc_feature (1)..(258): Homolog of NCBI NO: 33146868 NR Description: putative alanine aminotransferase
  misc_feature (1)..(258): Homolog of NCBI NO: 34906732 NR Description: alanine aminotransferase [Oryza sativa (japonica
MVVINPGNPTGQVLSVTNQEEIVEFCRKEGLVILADEVYQENIYAENKKFHSFKKVARSLAYDENDLTLVSLHSVSMSYGESGRRGGYMEVSGVAANVKDQIYKVASLTLCPNIAGQILVSLAMDPPKLGDESFESFDKEKEQIRSSFCKRAKTLEKAFSGLEGVTCNKLEGALYLFPRLHLPSAAIRAADFEGVSPDIFYAHRLLDATGIAVVPGSGFHQASGTIHIRCTILPDERKIEAMVARLRAFHKAFMNEFRGSQQVMNDLRR

SEQ ID NO: 109185 - protein, 193 aa, Zea mays subsp. mays
  misc_feature (1)..(193): Ceres Seq. ID no. 13600100
  misc_feature (1)..(174): Pfam Name: Aminotransferase class I and II Pfam Description: Aminotransferase class I and II
  misc_feature (1)..(182): Homolog of NCBI NO: 461498 NR Description: ALANINE AMINOTRANSFERASE 2 (GPT)
  misc_feature (1)..(182): Homolog of NCBI NO: 3694807 NR Description: alanine aminotransferase [Zea mays]
  misc_feature (1)..(182): Homolog of NCBI NO: 21954069 NR Description: putative alanine aminotransferase [Arabidopsis
  misc_feature (1)..(182): Homolog of NCBI NO: 30698866 NR Description: alanine aminotransferase, putative [Arabidopsis
  misc_feature (1)..(182): Homolog of NCBI NO: 9082270 NR Description: alanine aminotransferase [Arabidopsis thaliana]
  misc_feature (1)..(182): Homolog of NCBI NO: 22329623 NR Description: alanine aminotransferase, putative [Arabidopsis
  misc_feature (1)..(182): Homolog of NCBI NO: 25287212 NR Description: hypothetical protein T13M22.3 [imported] -
  misc_feature (1)..(182): Homolog of NCBI NO: 21954071 NR Description: putative alanine aminotransferase [Arabidopsis
  misc_feature (1)..(182): Homolog of NCBI NO: 33146868 NR Description: putative alanine aminotransferase
  misc_feature (1)..(182): Homolog of NCBI NO: 34906732 NR Description: alanine aminotransferase [Oryza sativa (japonica
MSYGESGRRGGYMEVSGVAANVKDQIYKVASLTLCPNIAGQILVSLAMDPPKLGDESFESFDKEKEQIRSSFCKRAKTLEKAFSGLEGVTCNKLEGALYLFPRLHLPSAAIRAADFEGVSPDIFYAHRLLDATGIAVVPGSGFHQASGTIHIRCTILPDERKIEAMVARLRAFHKAFMNEFRGSQQVMNDLRR

SEQ ID NO: 109186 - protein, 181 aa, Zea mays subsp. mays
  misc_feature (1)..(181): Ceres Seq. ID no. 13600101
  misc_feature (1)..(162): Pfam Name: Aminotransferase class I and II Pfam Description: Aminotransferase class I and II
  misc_feature (1)..(170): Homolog of NCBI NO: 461498 NR Description: ALANINE AMINOTRANSFERASE 2 (GPT)
  misc_feature (1)..(170): Homolog of NCBI NO: 3694807 NR Description: alanine aminotransferase [Zea mays]
  misc_feature (1)..(170): Homolog of NCBI NO: 21954069 NR Description: putative alanine aminotransferase [Arabidopsis
  misc_feature (1)..(170): Homolog of NCBI NO: 30698866 NR Description: alanine aminotransferase, putative [Arabidopsis
  misc_feature (1)..(170): Homolog of NCBI NO: 9082270 NR Description: alanine aminotransferase [Arabidopsis thaliana]
  misc_feature (1)..(170): Homolog of NCBI NO: 22329623 NR Description: alanine aminotransferase, putative [Arabidopsis
  misc_feature (1)..(170): Homolog of NCBI NO: 25287212 NR Description: hypothetical protein T13M22.3 [imported] -
  misc_feature (1)..(170): Homolog of NCBI NO: 21954071 NR Description: putative alanine aminotransferase [Arabidopsis
  misc_feature (1)..(170): Homolog of NCBI NO: 33146868 NR Description: putative alanine aminotransferase
  misc_feature (1)..(170): Homolog of NCBI NO: 34906732 NR Description: alanine aminotransferase [Oryza sativa (japonica
MEVSGVAANVKDQIYKVASLTLCPNIAGQILVSLAMDPPKLGDESFESFDKEKEQIRSSFCKRAKTLEKAFSGLEGVTCNKLEGALYLFPRLHLPSAAIRAADFEGVSPDIFYAHRLLDATGIAVVPGSGFHQASGTIHIRCTILPDERKIEAMVARLRAFHKAFMNEFRGSQQVMNDLRR

SEQ ID NO: 109187 - DNA, 963 bp, Zea mays subsp. mays
  misc_feature (1)..(963): Ceres Seq. ID no. 12637705
agcagtccgatagccagcaagccagcgcacgtcggtaggcacgccaccatgccggggctcaccatcggcgacaccgtccccaacctggagctggactccacccacggcaagatccgcatccacgactacgtcggcgacggctacgccatcatcttctcccacccagccgacttcacgcccgtgtgcacaacggagatggcggcgatggcggggtacgccaaggagttcgagaagcgtggcgtgaagctgctgggcatctcgtgcgacgacgtggagtcgcacaggcagtggaccaaggacgtggaggcgtacggcgggaagcagcagcagcagcaggcgacgacgacgaaggtgacgttcccgatcctggcggacccggcgcgggacgccatccggcagctgaacatggtggaccccgacgagaaggacgcggcggggcggagcatgccgtcccgcgcgctccacgtcgtcgggcccgacaaggccgtcaagctgagcttcctgtacccggccaccacggggcggaacatggacgaggtgctgcgcgctgtcgactcgctgctcaccgccgccaagcatggcgggaaggtggccacgcccgccaactggaagcccggggagtgcgccgtcatcgcgcccggcgtctccgacgaggaggccaggaagatgttcccgcaggggttcgagaccgccgacctgccctccaagaagggctacctccgtttcaccaaggtttagctagccgacgtacggcacggacatctagctcgtctgtcagtccgcgtcgaccggggtgcgcggatcttttgtgcctgctggtggtttctctgactagtactagtatatatataggctctatgtatgtgcgtactatgccgtgccgtgttgtctcgtgtagtggtggcaaccggttcgtggcactaccgcgctagtattgtccacccatatcaatgtcctcttctg

SEQ ID NO: 109188 - protein, 245 aa, Zea mays subsp. mays
  misc_feature (1)..(245): Ceres Seq. ID no. 12637706
  misc_feature (22)..(182): Pfam Name: AhpC/TSA family Pfam Description: AhpC/TSA family
  misc_feature (17)..(245): Homolog of NCBI NO: 15221082 NR Description: peroxiredoxin; protein id: At1g48130.1
  misc_feature (17)..(245): Homolog of NCBI NO: 6466096 NR Description: 1-Cys peroxiredoxin [Fagopyrum esculentum]
  misc_feature (17)..(245): Homolog of NCBI NO: 19423862 NR Description: 1-cys peroxiredoxin [Xerophyta viscosa]
  misc_feature (17)..(245): Homolog of NCBI NO: 27261085 NR Description: putative RAB24 protein [Oryza sativa (japonica
  misc_feature (33)..(245): Homolog of NCBI NO: 1710076 NR Description: Rehydrin homolog (Dormancy-associated protein
  misc_feature (17)..(245): Homolog of NCBI NO: 1710078 NR Description: RAB24 protein
  misc_feature (17)..(245): Homolog of NCBI NO: 27261084 NR Description: putative RAB24 protein [Oryza sativa (japonica
  misc_feature (17)..(245): Homolog of NCBI NO: 12247762 NR Description: 1-Cys peroxiredoxin [Triticum turgidum subsp.
  misc_feature (17)..(245): Homolog of NCBI NO: 34539782 NR Description: 1-Cys-peroxiredoxine [Triticum aestivum]
  misc_feature (17)..(245): Homolog of NCBI NO: 1710077 NR Description: Peroxiredoxin (Rehydrin homolog) (B15C)
SSPIASKPAHVGRHATMPGLTIGDTVPNLELDSTHGKIRIHDYVGDGYAIIFSHPADFTPVCTTEMAAMAGYAKEFEKRGVKLLGISCDDVESHRQWTKDVEAYGGKQQQQQATTTKVTFPILADPARDAIRQLNMVDPDEKDAAGRSMPSRALHVVGPDKAVKLSFLYPATTGRNMDEVLRAVDSLLTAAKHGGKVATPANWKPGECAVIAPGVSDEEARKMFPQGFETADLPSKKGYLRFTKV

SEQ ID NO: 109189 - protein, 229 aa, Zea mays subsp. mays
  misc_feature (1)..(229): Ceres Seq. ID no. 12637707
  misc_feature (6)..(166): Pfam Name: AhpC/TSA family Pfam Description: AhpC/TSA family
  misc_feature (1)..(229): Homolog of NCBI NO: 15221082 NR Description: peroxiredoxin; protein id: At1g48130.1
  misc_feature (1)..(229): Homolog of NCBI NO: 6466096 NR Description: 1-Cys peroxiredoxin [Fagopyrum esculentum]
  misc_feature (1)..(229): Homolog of NCBI NO: 19423862 NR Description: 1-cys peroxiredoxin [Xerophyta viscosa]
  misc_feature (1)..(229): Homolog of NCBI NO: 27261085 NR Description: putative RAB24 protein [Oryza sativa (japonica
  misc_feature (17)..(229): Homolog of NCBI NO: 1710076 NR Description: Rehydrin homolog (Dormancy-associated protein
  misc_feature (1)..(229): Homolog of NCBI NO: 1710078 NR Description: RAB24 protein
  misc_feature (1)..(229): Homolog of NCBI NO: 27261084 NR Description: putative RAB24 protein [Oryza sativa (japonica
  misc_feature (1)..(229): Homolog of NCBI NO: 12247762 NR Description: 1-Cys peroxiredoxin [Triticum turgidum subsp.
  misc_feature (1)..(229): Homolog of NCBI NO: 34539782 NR Description: 1-Cys-peroxiredoxine [Triticum aestivum]
  misc_feature (1)..(229): Homolog of NCBI NO: 1710077 NR Description: Peroxiredoxin (Rehydrin homolog) (B15C)
MPGLTIGDTVPNLELDSTHGKIRIHDYVGDGYAIIFSHPADFTPVCTTEMAAMAGYAKEFEKRGVKLLGISCDDVESHRQWTKDVEAYGGKQQQQQATTTKVTFPILADPARDAIRQLNMVDPDEKDAAGRSMPSRALHVVGPDKAVKLSFLYPATTGRNMDEVLRAVDSLLTAAKHGGKVATPANWKPGECAVIAPGVSDEEARKMFPQGFETADLPSKKGYLRFTKV

SEQ ID NO: 109190 - protein, 180 aa, Zea mays subsp. mays
  misc_feature (1)..(180): Ceres Seq. ID no. 12637708
  misc_feature (1)..(117): Pfam Name: AhpC/TSA family Pfam Description: AhpC/TSA family
  misc_feature (1)..(180): Homolog of NCBI NO: 15221082 NR Description: peroxiredoxin; protein id: At1g48130.1
  misc_feature (1)..(180): Homolog of NCBI NO: 6466096 NR Description: 1-Cys peroxiredoxin [Fagopyrum esculentum]
  misc_feature (1)..(180): Homolog of NCBI NO: 19423862 NR Description: 1-cys peroxiredoxin [Xerophyta viscosa]
  misc_feature (1)..(180): Homolog of NCBI NO: 27261085 NR Description: putative RAB24 protein [Oryza sativa (japonica
  misc_feature (1)..(180): Homolog of NCBI NO: 1710076 NR Description: Rehydrin homolog (Dormancy-associated protein
  misc_feature (1)..(180): Homolog of NCBI NO: 1710078 NR Description: RAB24 protein
  misc_feature (1)..(180): Homolog of NCBI NO: 27261084 NR Description: putative RAB24 protein [Oryza sativa (japonica
  misc_feature (1)..(180): Homolog of NCBI NO: 12247762 NR Description: 1-Cys peroxiredoxin [Triticum turgidum subsp.
  misc_feature (1)..(180): Homolog of NCBI NO: 34539782 NR Description: 1-Cys-peroxiredoxine [Triticum aestivum]
  misc_feature (1)..(180): Homolog of NCBI NO: 1710077 NR Description: Peroxiredoxin (Rehydrin homolog) (B15C)
MAAMAGYAKEFEKRGVKLLGISCDDVESHRQWTKDVEAYGGKQQQQQATTTKVTFPILADPARDAIRQLNMVDPDEKDAAGRSMPSRALHVVGPDKAVKLSFLYPATTGRNMDEVLRAVDSLLTAAKHGGKVATPANWKPGECAVIAPGVSDEEARKMFPQGFETADLPSKKGYLRFTKV

SEQ ID NO: 109191 - DNA, 713 bp, Zea mays subsp. mays
  misc_feature (1)..(713): Ceres Seq. ID no. 13580204
aacgccgctcgcgcatcctattgccctcgcgccaccgtcgccgccgctgcagcgagccaccgccctgccgtcgcctgaggtagacaccaagccaccgccatggggcgtatgcacagccgcgggaagggtatctcttcatcggcgctgccgtacaagaggactcctccgatctggctcaagacagctaccaccgaggtggaggagatgattaccaaggctgcgaagaagggccagatgccgtcgcagattggtgttctgctccgtgaccagcacggcatcccgcttgtcaagagcgtgactggtagcaagatcctccgcatcctcaaggcccatgggttggcgccggagatcccggaggatctctacttcctcattaagaaggcggtggcgattaggaagcatttggagaggaacaggaaggacaaggactccaaattcagactcattcttgttgagagcaggatccaccgccttgcccgctactacaagcgtaccaagaagctcccacccacctggaagtacgagtcaactacggcgagcactctggtggcctaagtgatatcctccgatggcttggtctttagcacctatgagcttgttctagatatggatttatgtaattcttgttatgtctggagctggttagatggacaaggaacctcaactttttctatgtttacttggagaatcccataaaccatttttggtttcgc

SEQ ID NO: 109192 - protein, 151 aa, Zea mays subsp. mays
  misc_feature (1)..(151): Ceres Seq. ID no. 13580205
  misc_feature (1)..(151): Homolog of NCBI NO: 19114812 NR Description: 40s ribosomal protein s13 [Schizosaccharomyces
  misc_feature (1)..(151): Homolog of NCBI NO: 34393549 NR Description: putative 40S RIBOSOMAL PROTEIN S13
  misc_feature (1)..(151): Homolog of NCBI NO: 1173198 NR Description: 40S RIBOSOMAL PROTEIN S13
  misc_feature (1)..(151): Homolog of NCBI NO: 11276609 NR Description: ribosomal protein S13-like - Arabidopsis thaliana
  misc_feature (1)..(151): Homolog of NCBI NO: 7440402 NR Description: ribosomal protein S13, cytosolic - Arabidopsis
  misc_feature (1)..(151): Homolog of NCBI NO: 8131699 NR Description: cytoplasmic ribosomal protein S13 [Panax ginseng]
  misc_feature (1)..(151): Homolog of NCBI NO: 14190367 NR Description: AT3g60770/T4C21_180 [Arabidopsis thaliana]
  misc_feature (1)..(151): Homolog of NCBI NO: 18411716 NR Description: 40S ribosomal protein S13 (RPS13A) [Arabidopsis
  misc_feature (1)..(151): Homolog of NCBI NO: 18411224 NR Description: 40S ribosomal protein S13 (RPS13B) [Arabidopsis
  misc_feature (1)..(151): Homolog of NCBI NO: 464705 NR Description: 40S RIBOSOMAL PROTEIN S13
MGRMHSRGKGISSSALPYKRTPPIWLKTATTEVEEMITKAAKKGQMPSQIGVLLRDQHGIPLVKSVTGSKILRILKAHGLAPEIPEDLYFLIKKAVAIRKHLERNRKDKDSKFRLILVESRIHRLARYYKRTKKLPPTWKYESTTASTLVA

SEQ ID NO: 109193 - protein, 148 aa, Zea mays subsp. mays
  misc_feature (1)..(148): Ceres Seq. ID no. 13580206
  misc_feature (1)..(148): Homolog of NCBI NO: 19114812 NR Description: 40s ribosomal protein s13 [Schizosaccharomyces
  misc_feature (1)..(148): Homolog of NCBI NO: 34393549 NR Description: putative 40S RIBOSOMAL PROTEIN S13
  misc_feature (1)..(148): Homolog of NCBI NO: 1173198 NR Description: 40S RIBOSOMAL PROTEIN S13
  misc_feature (1)..(148): Homolog of NCBI NO: 11276609 NR Description: ribosomal protein S13-like - Arabidopsis thaliana
  misc_feature (1)..(148): Homolog of NCBI NO: 7440402 NR Description: ribosomal protein S13, cytosolic - Arabidopsis
  misc_feature (1)..(148): Homolog of NCBI NO: 8131699 NR Description: cytoplasmic ribosomal protein S13 [Panax ginseng]
  misc_feature (1)..(148): Homolog of NCBI NO: 14190367 NR Description: AT3g60770/T4C21_180 [Arabidopsis thaliana]
  misc_feature (1)..(148): Homolog of NCBI NO: 18411716 NR Description: 40S ribosomal protein S13 (RPS13A) [Arabidopsis
  misc_feature (1)..(148): Homolog of NCBI NO: 18411224 NR Description: 40S ribosomal protein S13 (RPS13B) [Arabidopsis
  misc_feature (1)..(148): Homolog of NCBI NO: 464705 NR Description: 40S RIBOSOMAL PROTEIN S13
MHSRGKGISSSALPYKRTPPIWLKTATTEVEEMITKAAKKGQMPSQIGVLLRDQHGIPLVKSVTGSKILRILKAHGLAPEIPEDLYFLIKKAVAIRKHLERNRKDKDSKFRLILVESRIHRLARYYKRTKKLPPTWKYESTTASTLVA

SEQ ID NO: 109194 - protein, 116 aa, Zea mays subsp. mays; identical to SEQ ID NO: 16689
  misc_feature (1)..(116): Ceres Seq. ID no. 13580207
  misc_feature (1)..(116): Homolog of NCBI NO: 464705 NR Description: 40S RIBOSOMAL PROTEIN S13
  misc_feature (1)..(116): Homolog of NCBI NO: 19114812 NR Description: 40s ribosomal protein s13 [Schizosaccharomyces
  misc_feature (1)..(116): Homolog of NCBI NO: 34393549 NR Description: putative 40S RIBOSOMAL PROTEIN S13
  misc_feature (1)..(116): Homolog of NCBI NO: 1173198 NR Description: 40S RIBOSOMAL PROTEIN S13
  misc_feature (1)..(116): Homolog of NCBI NO: 11276609 NR Description: ribosomal protein S13-like - Arabidopsis thaliana
  misc_feature (1)..(116): Homolog of NCBI NO: 7440402 NR Description: ribosomal protein S13, cytosolic - Arabidopsis
  misc_feature (1)..(116): Homolog of NCBI NO: 8131699 NR Description: cytoplasmic ribosomal protein S13 [Panax ginseng]
  misc_feature (1)..(116): Homolog of NCBI NO: 14190367 NR Description: AT3g60770/T4C21_180 [Arabidopsis thaliana]
  misc_feature (1)..(116): Homolog of NCBI NO: 18411716 NR Description: 40S ribosomal protein S13 (RPS13A) [Arabidopsis
  misc_feature (1)..(116): Homolog of NCBI NO: 18411224 NR Description: 40S ribosomal protein S13 (RPS13B) [Arabidopsis

SEQ ID NO: 109195 - DNA, 767 bp, Zea mays subsp. mays
  misc_feature (1)..(767): Ceres Seq. ID no. 13600184
  misc_feature: MA Experiment ID: 108543 Result: Down-regulated in Transcription
  misc_feature: MA Experiment ID: 20000492 Result: Up-regulated in Transcription
  misc_feature: MA Experiment 20000492 PARAMETER Experiment Name: Zm_Hybrid_Seed_Dev_P Parameter: DAP Value: 12
  misc_feature: MA Experiment 20000492 PARAMETER Experiment Name: Zm_Hybrid_Seed_Dev_P Parameter: Organism Value: Zea mays
  misc_feature: MA Experiment 20000492 PARAMETER Experiment Name: Zm_Hybrid_Seed_Dev_P Parameter: Plant Line Value: 35A19
  misc_feature: MA Experiment 20000492 PARAMETER Experiment Name: Zm_Hybrid_Seed_Dev_P Parameter: Tissue Value: Fert Kernel vs. Unfert Floret
ctccgtctccggtctccagtctcgctgcttccacaagtccacaaccgtaccagcaccaccgcgccatggcgtcctccgccgatcccgatgccgccacgccaccatccgcgccgcagccggagcccgcacggaaggcagtccgcgtggtggtgaaggggagcgtcacgggggtggggttccgcgactggacggcgtccacggccgagtcgctcggtctcgccggctgggtccgcaaccgccgtgacggcagtgtggaggccctcctctccggagaccccgcgaagatcgaagacatgataacccgccgcctccccgtcggccccccagccgccaccgtcaccgccgtcgtcccgtccggccgagcccgtggatccgtccaccgggttcgagatcaagttcaccgtctgatccccccgtcccgcgacaggttcgcgtctcgccgcgcgttcttggacggtctattcgtgcactactactgcgaatctgcgattaaagatcagaggcgacatctaatgtaccgtagtctgtttacctgaaaagctccgctatctgcttgggttggaattcatgccagattgtgggtgcaaacctgtttccttactacctagtgtccaagtcggaatattaataagctatgccaggattcagatcgaaatatttctgtctctgagagatgtgttgcgtgacaacttttcgaagactgttgcctgaacaatatctgtgtgtttatccctagactctaatgtacaaacagagtcttatacagt

SEQ ID NO: 109196 - protein, 177 aa, Zea mays subsp. mays
  misc_feature (1)..(177): Ceres Seq. ID no. 13600185
  misc_feature (44)..(108): Pfam Name: Acylphosphatase Pfam Description: Acylphosphatase
  misc_feature (43)..(115): Homolog of NCBI NO: 16265250 NR Description: HYPOTHETICAL PROTEIN [Sinorhizobium meliloti]
  misc_feature (36)..(127): Homolog of NCBI NO: 22985847 NR Description: hypothetical protein [Burkholderia fungorum]
  misc_feature (33)..(115): Homolog of NCBI NO: 17228372 NR Description: probable acylphosphatase [Nostoc sp. PCC 7120]
  misc_feature (44)..(112): Homolog of NCBI NO: 22966087 NR Description: hypothetical protein [Rhodospirillum rubrum]
  misc_feature (43)..(115): Homolog of NCBI NO: 13476419 NR Description: acylphosphatase [Mesorhizobium loti]
  misc_feature (42)..(115): Homolog of NCBI NO: 27380376 NR Description: bsl5265 [Bradyrhizobium japonicum]
  misc_feature (47)..(116): Homolog of NCBI NO: 22965084 NR Description: hypothetical protein [Rhodopseudomonas palustris]
  misc_feature (38)..(132): Homolog of NCBI NO: 29028786 NR Description: At5g03370 [Arabidopsis thaliana]
  misc_feature (1)..(132): Homolog of NCBI NO: 21593449 NR Description: unknown [Arabidopsis thaliana]
  misc_feature (1)..(132): Homolog of NCBI NO: 15242739 NR Description: expressed protein [Arabidopsis thaliana]
PSPVSSLAASTSPQPYQHHRAMASSADPDAATPPSAPQPEPARKAVRVVVKGSVTGVGFRDWTASTAESLGLAGWVRNRRDGSVEALLSGDPAKIEDMITRRLPVGPPAATVTAVVPSGRARGSVHRVRDQVHRLIPPSRDRFASRRAFLDGLFVHYYCESAIKDQRRHLMYRSLFT

SEQ ID NO: 109197 - protein, 156 aa, Zea mays subsp. mays
  misc_feature (1)..(156): Ceres Seq. ID no. 13600186
  misc_feature (23)..(87): Pfam Name: Acylphosphatase Pfam Description: Acylphosphatase
  misc_feature (22)..(94): Homolog of NCBI NO: 16265250 NR Description: HYPOTHETICAL PROTEIN [Sinorhizobium meliloti]
  misc_feature (15)..(106): Homolog of NCBI NO: 22985847 NR Description: hypothetical protein [Burkholderia fungorum]
  misc_feature (12)..(94): Homolog of NCBI NO: 17228372 NR Description: probable acylphosphatase [Nostoc sp. PCC 7120]
  misc_feature (23)..(91): Homolog of NCBI NO: 22966087 NR Description: hypothetical protein [Rhodospirillum rubrum]
  misc_feature (22)..(94): Homolog of NCBI NO: 13476419 NR Description: acylphosphatase [Mesorhizobium loti]
  misc_feature (21)..(94): Homolog of NCBI NO: 27380376 NR Description: bsl5265 [Bradyrhizobium japonicum]
  misc_feature (26)..(95): Homolog of NCBI NO: 22965084 NR Description: hypothetical protein [Rhodopseudomonas palustris]
  misc_feature (17)..(111): Homolog of NCBI NO: 29028786 NR Description: At5g03370 [Arabidopsis thaliana]
  misc_feature (1)..(111): Homolog of NCBI NO: 21593449 NR Description: unknown [Arabidopsis thaliana]
  misc_feature (1)..(111): Homolog of NCBI NO: 15242739 NR Description: expressed protein [Arabidopsis thaliana]
MASSADPDAATPPSAPQPEPARKAVRVVVKGSVTGVGFRDWTASTAESLGLAGWVRNRRDGSVEALLSGDPAKIEDMITRRLPVGPPAATVTAVVPSGRARGSVHRVRDQVHRLIPPSRDRFASRRAFLDGLFVHYYCESAIKDQRRHLMYRSLFT

SEQ ID NO: 109198 - DNA, 818 bp, Zea mays subsp. mays
  misc_feature (1)..(818): Ceres Seq. ID no. 14301952
  misc_feature: MA Experiment ID: 108543 Result: Down-regulated in Transcription
aaatcgtacaaacaccgtttctatacaggccaaggcgacaagcttcgtccagctctgcatcaaagaaggaaggaagttatggaccgcacctactacaagggcggcatcaaggcgtactggaagcgccggggctactaccgcatcgacgccaccgccgcgcagcgccgcccgccgttccccaccgcggagctcggaggtggcgtgggcgtcgcccaggcccagccgccgcaggcgccgccgccggagggtggctcgggccggcgccgttgccgcgggtggcgcgtgcgctgcggccagctgcggcggcggctgctccgcgcgctgtcgccgcgccggtggctcgtgcggctccgcgacgcgtacgtgtccgccatgctgcggctggcgtcctcccccgccgtcgggtacggcgccggcgcgccctactgcggcacggcggccttcgcgcggccggcgcagctcaaggagtacgaacagaaggtgctggtggagatctacaggtccatactcgcgggcggcgggcctggccccatcgccgtcactaccggcagcaacggcgccggtgcgcctgccgccgccacactacggctaccgacggctgctgcttgagcttgagcggcagatgaagcatgtatttattcttcttgcttttactctttatgtcgcgacgttgtaacttcggtgcgcctcacaagcatttcatttcttcttcgtaaattaaggttcctctgaccatggtgtgaaaatgtttgatgaagagggtcattagcatctctacttgctagcaaggcaagatttagtattgattagccgtacac

SEQ ID NO: 109199 - protein, 224 aa, Zea mays subsp. mays
  misc_feature (1)..(224): Ceres Seq. ID no. 14301953
  misc_feature (24)..(75): Pfam Name: Herpesvirus alkaline exonuclease Pfam Description: Herpesvirus alkaline exonuclease
  misc_feature (19)..(189): Homolog of NCBI NO: 13376335 NR Description: hypothetical protein FLJ14280 [Homo sapiens]
NRTNTVSIQAKATSFVQLCIKEGRKLWTAPTTRAASRRTGSAGATTASTPPPRSAARRSPPRSSEVAWASPRPSRRRRRRRRVARAGAVAAGGACAAASCGGGCSARCRRAGGSCGSATRTCPPCCGWRPPPPSGTAPARPTAARRPSRGRRSSRSTNRRCWWRSTGPYSRAAGLAPSPSLPAATAPVRLPPPHYGYRRLLLELERQMKHVFILLAFTLYVATL

SEQ ID NO: 109200 - protein, 207 aa, Zea mays subsp. mays
  misc_feature (1)..(207): Ceres Seq. ID no. 14301954
IVQTPFLYRPRRQASSSSASKKEGSYGPHLLQGRHQGVLEAPGLLPHRRHRRAAPPAVPHRGARRWRGRRPGPAAAGAAAGGWLGPAPLPRVARALRPAAAAAAPRAVAAPVARAAPRRVRVRHAAAGVLPRRRVRRRRALLRHGGLRAAGAAQGVRTEGAGGDLQVHTRGRRAWPHRRHYRQQRRRCACRRHTTATDGCCLSLSGR

SEQ ID NO: 109201 - protein, 202 aa, Zea mays subsp. mays
  misc_feature (1)..(202): Ceres Seq. ID no. 14301955
  misc_feature (88)..(174): Homolog of NCBI NO: 7487567 NR Description: probable mitochondrial carrier protein
  misc_feature (88)..(170): Homolog of NCBI NO: 15228820 NR Description: expressed protein [Arabidopsis thaliana]
KSYKHRFYTGQGDKLRPALHQRRKEVMDRTYYKGGIKAYWKRRGYYRIDATAAQRRPPFPTAELGGGVGVAQAQPPQAPPPEGGSGRRRCRGWRVRCGQLRRRLLRALSPRRWLVRLRDAYVSAMLRLASSPAVGYGAGAPYCGTAAFARPAQLKEYEQKVLVEIYRSILAGGGPGPIAVTTGSNGAGAPAAATLRLPTAAA

SEQ ID NO: 109202 - protein, 176 aa, Zea mays subsp. mays
  misc_feature (1)..(176): Ceres Seq. ID no. 14301956
  misc_feature (62)..(148): Homolog of NCBI NO: 7487567 NR Description: probable mitochondrial carrier protein
  misc_feature (62)..(144): Homolog of NCBI NO: 15228820 NR Description: expressed protein [Arabidopsis thaliana]
MDRTYYKGGIKAYWKRRGYYRIDATAAQRRPPFPTAELGGGVGVAQAQPPQAPPPEGGSGRRRCRGWRVRCGQLRRRLLRALSPRRWLVRLRDAYVSAMLRLASSPAVGYGAGAPYCGTAAFARPAQLKEYEQKVLVEIYRSILAGGGPGPIAVTTGSNGAGAPAAATLRLPTAAA

SEQ ID NO: 109203 - DNA, 1222 bp, Zea mays subsp. mays
  misc_feature (1)..(1222): Ceres Seq. ID no. 14301961
cccctctcggcccggctcgatggggtccggcgtgtcgtcgagcatggcgctggcgctggcgggcttctgcttcagcgtcctcttcatcgtcttcgtctgcacgcgcctcgcctgcgcgctcgtccgccggcgccggcgccaggcccgcgcccgcctcgcggccgccccgccgctcccgcactacgcccacggctacgccgaccccgaccctttcccgtcgttccgcgccgcccgccaccaccaccacgccccgggcctcgatcccgccgccttccccacccgcgcctacgccgccgcacaagcctccgactccgacgacggctcccagtgcgtcatctgtctggcggaatacgaagagggagacgagctccgcgtgctgcctccctgcagccacaccttccacacgggctgtatcagcctgtggctggcgcagaactcgacgtgcccggtctgtagagtctcgctgctcgtgcctgatactagtactacccctgaaagcgaacactctgcaccccatcctcctcctcctcctcatcatcatcatcatctgtccagcatagtgataataagcccaccaagctcccccgaaccgtcgagatcggacccgtgccgatgcctgttcgccagcggtggtgggcactcgtcaagggcggcagaggctcctcctcctcctcctcctcccagacacgagcccgaccaggtcgtatctggtccaccaccggcagcagatggggctagcggctacagctcgccgttgcctgaagttattcaccccgctcctgctcctgaaaccaacgggcagacagtacggaagcaggcgggcagcagatctactaccccgctaggcccctgcaaatagcggccgctcactctgtgtgggtgggtggggtgaacaggtggtgcgtggtaaaagcgaagtagagagaaacaagcgacttgaagaggcctgggttcgttcgtgtacatacgatcgagaaatcgtttcaggtcattcattcatccattcattcatccatgggcacatactgtggtattacggagtattacggtgtacgtgtagtgtgccgcaggagagacgacgcgacggcagcagtgcgttttccatatgcgacgggacgggagcattcgaggagatgatggcaatggcatggttttgtgtactgtacggtaacatttgtcgctgggaattaataataaaaaacccgtggctggctgatgcagc

SEQ ID NO: 109204 - protein, 285 aa, Zea mays subsp. mays
  misc_feature (1)..(285): Ceres Seq. ID no. 14301962
  misc_feature (110)..(151): Pfam Name: Zinc finger, C3HC4 type (RING finger) Pfam Description: Zinc finger, C3HC4 type (RING finger)
  misc_feature (4)..(243): Homolog of NCBI NO: 18092342 NR Description: ring-H2 zinc finger protein [Zea mays]
  misc_feature (85)..(165): Homolog of NCBI NO: 34907968 NR Description: P0446G04.15 [Oryza sativa (japonica
  misc_feature (88)..(189): Homolog of NCBI NO: 8698833 NR Description: EL5 [Oryza sativa (japonica cultivar-group)]
  misc_feature (85)..(267): Homolog of NCBI NO: 27261477 NR Description: Hypothetical protein [Oryza sativa (japonica
  misc_feature (29)..(195): Homolog of NCBI NO: 15237013 NR Description: RING-H2 finger protein RHA3b [Arabidopsis
  misc_feature (25)..(155): Homolog of NCBI NO: 15221638 NR Description: zinc finger (C3HC4-type RING finger) protein
  misc_feature (3)..(158): Homolog of NCBI NO: 34909640 NR Description: P0503C12.20 [Oryza sativa (japonica
  misc_feature (6)..(164): Homolog of NCBI NO: 34909314 NR Description: OSJNBb0021A09.3 [Oryza sativa (japonica
  misc_feature (5)..(172): Homolog of NCBI NO: 28071301 NR Description: P0705A05.3 [Oryza sativa (japonica
  misc_feature (7)..(177): Homolog of NCBI NO: 38567907 NR Description: OSJNBa0088I22.3 [Oryza sativa (japonica
PSRPGSMGSGVSSSMALALAGFCFSVLFIVFVCTRLACALVRRRRRQARARLAAAPPLPHYAHGYADPDPFPSFRAARHHHHAPGLDPAAFPTRAYAAAQASDSDDGSQCVICLAEYEEGDELRVLPPCSHTFHTGCISLWLAQNSTCPVCRVSLLVPDTSTTPESEHSAPHPPPPPHHHHHLSSIVIISPPSSPEPSRSDPCRCLFASGGGHSSRAAEAPPPPPPPRHEPDQVVSGPPPAADGASGYSSPLPEVIHPAPAPETNGQTVRKQAGSRSTTPLGPCK

SEQ ID NO: 109205 - protein, 279 aa, Zea mays subsp. mays
  misc_feature (1)..(279): Ceres Seq. ID no. 14301963
  misc_feature (104)..(145): Pfam Name: Zinc finger, C3HC4 type (RING finger) Pfam Description: Zinc finger, C3HC4 type (RING finger)
  misc_feature (1)..(237): Homolog of NCBI NO: 18092342 NR Description: ring-H2 zinc finger protein [Zea mays]
  misc_feature (79)..(159): Homolog of NCBI NO: 34907968 NR Description: P0446G04.15 [Oryza sativa (japonica
  misc_feature (82)..(183): Homolog of NCBI NO: 8698833 NR Description: EL5 [Oryza sativa (japonica cultivar-group)]
  misc_feature (79)..(261): Homolog of NCBI NO: 27261477 NR Description: Hypothetical protein [Oryza sativa (japonica
  misc_feature (23)..(189): Homolog of NCBI NO: 15237013 NR Description: RING-H2 finger protein RHA3b [Arabidopsis
  misc_feature (19)..(149): Homolog of NCBI NO: 15221638 NR Description: zinc finger (C3HC4-type RING finger) protein
  misc_feature (1)..(152): Homolog of NCBI NO: 34909640 NR Description: P0503C12.20 [Oryza sativa (japonica
  misc_feature (1)..(158): Homolog of NCBI NO: 34909314 NR Description: OSJNBb0021A09.3 [Oryza sativa (japonica
  misc_feature (1)..(166): Homolog of NCBI NO: 28071301 NR Description: P0705A05.3 [Oryza sativa (japonica
  misc_feature (1)..(171): Homolog of NCBI NO: 38567907 NR Description: OSJNBa0088I22.3 [Oryza sativa (japonica
MGSGVSSSMALALAGFCFSVLFIVFVCTRLACALVRRRRRQARARLAAAPPLPHYAHGYADPDPFPSFRAARHHHHAPGLDPAAFPTRAYAAAQASDSDDGSQCVICLAEYEEGDELRVLPPCSHTFHTGCISLWLAQNSTCPVCRVSLLVPDTSTTPESEHSAPHPPPPPHHHHHLSSIVIISPPSSPEPSRSDPCRCLFASGGGHSSRAAEAPPPPPPPRHEPDQVVSGPPPAADGASGYSSPLPEVIHPAPAPETNGQTVRKQAGSRSTTPLGPCK

SEQ ID NO: 109206 - protein, 271 aa, Zea mays subsp. mays
  misc_feature (1)..(271): Ceres Seq. ID no. 14301964
  misc_feature (96)..(137): Pfam Name: Zinc finger, C3HC4 type (RING finger) Pfam Description: Zinc finger, C3HC4 type (RING finger)
  misc_feature (1)..(229): Homolog of NCBI NO: 18092342 NR Description: ring-H2 zinc finger protein [Zea mays]
  misc_feature (71)..(151): Homolog of NCBI NO: 34907968 NR Description: P0446G04.15 [Oryza sativa (japonica
  misc_feature (74)..(175): Homolog of NCBI NO: 8698833 NR Description: EL5 [Oryza sativa (japonica cultivar-group)]
  misc_feature (71)..(253): Homolog of NCBI NO: 27261477 NR Description: Hypothetical protein [Oryza sativa (japonica
  misc_feature (15)..(181): Homolog of NCBI NO: 15237013 NR Description: RING-H2 finger protein RHA3b [Arabidopsis
  misc_feature (11)..(141): Homolog of NCBI NO: 15221638 NR Description: zinc finger (C3HC4-type RING finger) protein
  misc_feature (1)..(144): Homolog of NCBI NO: 34909640 NR Description: P0503C12.20 [Oryza sativa (japonica
  misc_feature (1)..(150): Homolog of NCBI NO: 34909314 NR Description: OSJNBb0021A09.3 [Oryza sativa (japonica
  misc_feature (1)..(158): Homolog of NCBI NO: 28071301 NR Description: P0705A05.3 [Oryza sativa (japonica
  misc_feature (1)..(163): Homolog of NCBI NO: 38567907 NR Description: OSJNBa0088I22.3 [Oryza sativa (japonica
MALALAGFCFSVLFIVFVCTRLACALVRRRRRQARARLAAAPPLPHYAHGYADPDPFPSFRAARHHHHAPGLDPAAFPTRAYAAAQASDSDDGSQCVICLAEYEEGDELRVLPPCSHTFHTGCISLWLAQNSTCPVCRVSLLVPDTSTTPESEHSAPHPPPPPHHHHHLSSIVIISPPSSPEPSRSDPCRCLFASGGGHSSRAAEAPPPPPPPRHEPDQVVSGPPPAADGASGYSSPLPEVIHPAPAPETNGQTVRKQAGSRSTTPLGPCK

SEQ ID NO: 109207 - DNA, 492 bp, Zea mays subsp. mays
  misc_feature (1)..(492): Ceres Seq. ID no. 13635728
atacattttttccatcggaatgtctgatactatgttgggtgaatcctaatggatggttgagcattattggtgtcatattttgtccggtctatgtgtcaaccgtgaagcttttaatccaaatcctttcactctttctgcctctgtcaagtctggggcaggcaaagaagaagaccaaagaagattcgcacatctgcacatattattgngnccanntannnacatagaacgnacaatagngnaccnccaatggcagccnaaatnttttgccnccttatgctccttggcctttctgcaagngctgctacggngacnattttcccanaangctcacgagctccnatagcttcccttcttcccccgtacctcttcaccagcggngncttcggaatgngaaancccaattcttcaancctatagganccnacaggaaatcgcagctggtgatcttacctttatcacccttgttcctcccacaatcatcagccctattac

SEQ ID NO: 109208 - protein, 96 aa, Zea mays subsp. mays
  misc_feature (1)..(96): Ceres Seq. ID no. 13635729
MVEHYWCHILSGLCVNREAFNPNPFTLSASVKSGAGKEEDQRRFAHLHILLXPXXXIEXTIXXXQWQXKXFAXLCSLAFLQXLLRXXFSXXAHELX

SEQ ID NO: 109209 - protein, 73 aa, Zea mays subsp. mays
  misc_feature (1)..(73): Ceres Seq. ID no. 13635730
TFFPSECLILCWVNPNGWLSIIGVIFCPVYVSTVKLLIQILSLFLPLSSLGQAKKKTKEDSHICTYYXXXXXT

SEQ ID NO: 109210 - protein, 56 aa, Zea mays subsp. mays
  misc_feature (1)..(56): Ceres Seq. ID no. 13635731
  misc_feature (1)..(40): Homolog of NCBI NO: 629861 NR Description: zein Zd1, 19K - maize
  misc_feature (1)..(40): Homolog of NCBI NO: 629862 NR Description: zein Zd1, 19K - maize
  misc_feature (1)..(40): Homolog of NCBI NO: 16073 NR Description: zein protein [Acetabularia mediterranea]
  misc_feature (1)..(40): Homolog of NCBI NO: 168693 NR Description: zein
  misc_feature (1)..(40): Homolog of NCBI NO: 168691 NR Description: zein
  misc_feature (1)..(40): Homolog of NCBI NO: 16305125 NR Description: 19kD alpha zein B1 [Zea mays]
  misc_feature (1)..(40): Homolog of NCBI NO: 141608 NR Description: ZEIN-ALPHA PRECURSOR (19 KD) (PMS1)
  misc_feature (1)..(40): Homolog of NCBI NO: 141600 NR Description: ZEIN-ALPHA PRECURSOR (19 KD) (CLONE 19B1)
  misc_feature (1)..(40): Homolog of NCBI NO: 141597 NR Description: ZEIN-ALPHA PRECURSOR (19 KD) (CLONE A30)
  misc_feature (1)..(40): Homolog of NCBI NO: 224509 NR Description: zein E19
MAAXXFCXLMLLGLSAXAATXXIFPXXSRAXIASLLPPYLFTSXXFGMXXPNSSXL

SEQ ID NO: 109211 - DNA, 583 bp, Zea mays subsp. mays
  misc_feature (1)..(583): Ceres Seq. ID no. 12594265
atattcccttcttcttcttcttcttgtcctcctccttcgtcttctccatcttcccgtccttcgatccatcaaaagctggccggccgagacgacgtgcatagctataaataatagcccatagcatcctcaacaaccagacaagaagaaccacgccgccggttgtttgttaatttcttccatggagagcacggagctgaaagtggagatggtggcgttgcatgagaagcgggtacgcagatgcctgtccaaagtgaaagggatcgagcgggtggaggtggaggcgagcctgcagaaggtggtggtgacggggtgcgtgaaccggagcaagatcctcaaggcgctccgccgggtggggctgcgcgccgagccgtggtcaccgcacaacgagctgctcagcgcctacgccgccaccaccaccctcgtcttcaacaactcctacgccttcttctgatcaagtcatctcatcctttatagctagatagctactgtaatctctctctctgcgtgcttggcttgcttggagtttgttgggaacgtgaacgacggacggcgttccacatgtacacaacatgaatggcatttt

SEQ ID NO: 109212 - protein, 90 aa, Zea mays subsp. mays
  misc_feature (1)..(90): Ceres Seq. ID no. 12594266
  misc_feature (5)..(63): Pfam Name: Heavy-metal-associated domain Pfam Description: Heavy-metal-associated domain
  misc_feature (2)..(76): Homolog of NCBI NO: 21397273 NR Description: Putative atfp6-like protein
  misc_feature (15)..(90): Homolog of NCBI NO: 30680279 NR Description: copper chaperone (CCH)-related [Arabidopsis
  misc_feature (1)..(65): Homolog of NCBI NO: 37536458 NR Description: hypothetical protein [Oryza sativa (japonica
  misc_feature (1)..(79): Homolog of NCBI NO: 15223925 NR Description: copper chaperone (CCH)-related
  misc_feature (1)..(69): Homolog of NCBI NO: 25406916 NR Description: hypothetical protein [imported] - Arabidopsis
  misc_feature (1)..(69): Homolog of NCBI NO: 15221451 NR Description: hypothetical protein; protein id: At1g06330.1
  misc_feature (1)..(89): Homolog of NCBI NO: 34902222 NR Description: Hypothetical protein [Oryza sativa (japonica
MESTELKVEMVALHEKRVRRCLSKVKGIERVEVEASLQKVVVTGCVNRSKILKALRRVGLRAEPWSPHNELLSAYAATTTLVFNNSYAFF

SEQ ID NO: 109213 - protein, 81 aa, Zea mays subsp. mays
  misc_feature (1)..(81): Ceres Seq. ID no. 12594267
  misc_feature (1)..(54): Pfam Name: Heavy-metal-associated domain Pfam Description: Heavy-metal-associated domain
  misc_feature (1)..(67): Homolog of NCBI NO: 21397273 NR Description: Putative atfp6-like protein
  misc_feature (6)..(81): Homolog of NCBI NO: 30680279 NR Description: copper chaperone (CCH)-related [Arabidopsis
  misc_feature (1)..(56): Homolog of NCBI NO: 37536458 NR Description: hypothetical protein [Oryza sativa (japonica
  misc_feature (1)..(70): Homolog of NCBI NO: 15223925 NR Description: copper chaperone (CCH)-related
  misc_feature (1)..(60): Homolog of NCBI NO: 25406916 NR Description: hypothetical protein [imported] - Arabidopsis
  misc_feature (1)..(60): Homolog of NCBI NO: 15221451 NR Description: hypothetical protein; protein id: At1g06330.1
  misc_feature (1)..(80): Homolog of NCBI NO: 34902222 NR Description: Hypothetical protein [Oryza sativa (japonica
MVALHEKRVRRCLSKVKGIERVEVEASLQKVVVTGCVNRSKILKALRRVGLRAEPWSPHNELLSAYAATTTLVFNNSYAFF

SEQ ID NO: 109214 - protein, 78 aa, Zea mays subsp. mays
  misc_feature (1)..(78): Ceres Seq. ID no. 12594268
MPVQSERDRAGGGGGEPAEGGGDGVREPEQDPQGAPPGGAARRAVVTAQRAAQRLRRHHHPRLQQLLRLLLIKSSHPL

SEQ ID NO: 109215 - DNA, 923 bp, Zea mays subsp. mays
  misc_feature (1)..(923): Ceres Seq. ID no. 12636928
  misc_feature: MA Experiment ID: 108522 Result: Down-regulated in Transcription
  misc_feature: MA Experiment 108522 PARAMETER Experiment Name: Zm_42deg_Heat_P Parameter: Age (day) Value: 8
  misc_feature: MA Experiment 108522 PARAMETER Experiment Name: Zm_42deg_Heat_P Parameter: Organism Value: Zea mays
  misc_feature: MA Experiment 108522 PARAMETER Experiment Name: Zm_42deg_Heat_P Parameter: Plant Line Value: 35A19
  misc_feature: MA Experiment 108522 PARAMETER Experiment Name: Zm_42deg_Heat_P Parameter: Temperature (deg C) Value: 42 vs. 22
  misc_feature: MA Experiment 108522 PARAMETER Experiment Name: Zm_42deg_Heat_P Parameter: Timepoint (hr) Value: 1
  misc_feature: MA Experiment 108522 PARAMETER Experiment Name: Zm_42deg_Heat_P Parameter: Tissue Value: Aerial
  misc_feature: MA Experiment ID: 108527 Result: Down-regulated in Transcription
  misc_feature: MA Experiment 108527 PARAMETER Experiment Name: Zm_5mM_NO_P Parameter: Age (day) Value: 8
  misc_feature: MA Experiment 108527 PARAMETER Experiment Name: Zm_5mM_NO_P Parameter: Organism Value: Zea mays
  misc_feature: MA Experiment 108527 PARAMETER Experiment Name: Zm_5mM_NO_P Parameter: Plant Line Value: 35A19
  misc_feature: MA Experiment 108527 PARAMETER Experiment Name: Zm_5mM_NO_P Parameter: Timepoint (hr) Value: 6
  misc_feature: MA Experiment 108527 PARAMETER Experiment Name: Zm_5mM_NO_P Parameter: Tissue Value: Aerial
  misc_feature: MA Experiment 108527 PARAMETER Experiment Name: Zm_5mM_NO_P Parameter: Treatment Value: 5mM NO vs. No Treatment
  misc_feature: MA Experiment ID: 108528 Result: Up-regulated in Transcription
  misc_feature: MA Experiment 108528 PARAMETER Experiment Name: Zm_Imbibed_Seeds_P Parameter: Age (day) Value: 5 vs. 2
  misc_feature: MA Experiment 108528 PARAMETER Experiment Name: Zm_Imbibed_Seeds_P Parameter: Organism Value: Zea mays
  misc_feature: MA Experiment 108528 PARAMETER Experiment Name: Zm_Imbibed_Seeds_P Parameter: Plant Line Value: 35A19
  misc_feature: MA Experiment 108528 PARAMETER Experiment Name: Zm_Imbibed_Seeds_P Parameter: Tissue Value: Aerial vs. Embryo
  misc_feature: MA Experiment ID: 108545 Result: Up-regulated in Transcription
  misc_feature: MA Experiment 108545 PARAMETER Experiment Name: Zm_Imbibed_Seeds_P Parameter: Age (day) Value: 3 vs. 2
  misc_feature: MA Experiment 108545 PARAMETER Experiment Name: Zm_Imbibed_Seeds_P Parameter: Organism Value: Zea mays
  misc_feature: MA Experiment 108545 PARAMETER Experiment Name: Zm_Imbibed_Seeds_P Parameter: Plant Line Value: 35A19
  misc_feature: MA Experiment 108545 PARAMETER Experiment Name: Zm_Imbibed_Seeds_P Parameter: Tissue Value: Aerial vs. Embryo
  misc_feature: MA Experiment ID: 108547 Result: Up-regulated in Transcription
  misc_feature: MA Experiment 108547 PARAMETER Experiment Name: Zm_Imbibed_Seeds_P Parameter: Age (day) Value: 4 vs. 2
  misc_feature: MA Experiment 108547 PARAMETER Experiment Name: Zm_Imbibed_Seeds_P Parameter: Organism Value: Zea mays
  misc_feature: MA Experiment 108547 PARAMETER Experiment Name: Zm_Imbibed_Seeds_P Parameter: Plant Line Value: 35A19
  misc_feature: MA Experiment 108547 PARAMETER Experiment Name: Zm_Imbibed_Seeds_P Parameter: Tissue Value: Aerial vs. Embryo
  misc_feature: MA Experiment ID: 108687 Result: Up-regulated in Transcription
  misc_feature: MA Experiment 108687 PARAMETER Experiment Name: Zm_Embryos-Flowers__P Parameter: Tissue Value: Embryo vs. Aerial+
  misc_feature: MA Experiment ID: 108688 Result: Down-regulated in Transcription
  misc_feature: MA Experiment 108688 PARAMETER Experiment Name: Zm_Embryos-Flowers__P Parameter: Tissue Value: Immature Flowers vs. Aerial+
  misc_feature: MA Experiment ID: 20000535 Result: Up-regulated in Transcription
  misc_feature: MA Experiment 20000535 PARAMETER Experiment Name: Zm_Hybrid_Seed_Dev_P Parameter: DAP Value: 30 vs. 12
  misc_feature: MA Experiment 20000535 PARAMETER Experiment Name: Zm_Hybrid_Seed_Dev_P Parameter: Organism Value: Zea mays
  misc_feature: MA Experiment 20000535 PARAMETER Experiment Name: Zm_Hybrid_Seed_Dev_P Parameter: Plant Line Value: 35A19
  misc_feature: MA Experiment 20000535 PARAMETER Experiment Name: Zm_Hybrid_Seed_Dev_P Parameter: Tissue Value: Embryo vs. Unfert Floret
  misc_feature: MA Experiment ID: 20000626 Result: Down-regulated in Transcription
  misc_feature: MA Experiment 20000626 PARAMETER Experiment Name: Zm_Herbicide-Treatments_P Parameter: Timepoint (hr) Value: 12
  misc_feature: MA Experiment 20000626 PARAMETER Experiment Name: Zm_Herbicide-Treatments_P Parameter: Tissue Value: Aerial
  misc_feature: MA Experiment 20000626 PARAMETER Experiment Name: Zm_Herbicide-Treatments_P Parameter: Treatment Value: Roundup vs. No Treatment
ctagaacatcctaatcgaaaatttacattcatcatttcatcagtttgtttatccacacagccattcatgccttgcgtatgttttctctgaaagaacagatgctttcgtaccaatattattcacatatcagtcatgctgtgtgtgtatatctacgtaccattcacctttcagaccattccgatgctgtcaagttatatgcaacacgtacgtgtgtgtcacgcagggggataaagtgtcgataatagcggacgcgtcatcgtacatcaaggaactaaagcagaagatcgcgaagctaagccaagagatggcatcgtcgtctccgcagcacgccactactggtgtctgccaacaacaaccgtcgtcgtcgtcggtgagtgtgggagtcctgctggacaagaagggccgtttcctcgtcagtgtgttcatggacgagagctgcggcccgccgccggccgggctactcgcttccgtcctcgaggccttcgacgacatcggactcacggtgctcgaggctagggctacctgcgctggttcctttcggctagaagctgtaggagaggtgcgatgcgactgcgaacgagtacacattattacaccgcgcgtaccgccgcaaacgcggtagtacgcatgcatgatttaatcacttctttgtcttgcttctttaatctctcttggtttatttgctgctttgtttgttgtcattccaggaagtagtagtagatgggggcctcatcatcgacgcgcacgcggtggagcaagcagtagttcaggcaatcaagaattgccctgcaaattaaactaatcgacctagtcctccaattcgatcgatcgagttgacgatgcgctggtggtggaccacaaagttcatgccaagctagagactccgagctatatatacatactgattcgcatcgtactttttg

SEQ ID NO: 109216 - protein, 105 aa, Zea mays subsp. mays
  misc_feature (1)..(105): Ceres Seq. ID no. 12636929
  misc_feature (1)..(84): Homolog of NCBI NO: 22296306 NR Description: hypothetical protein~similar to Arabidopsis
  misc_feature (1)..(89): Homolog of NCBI NO: 15228867 NR Description: putative protein; protein id: At3g56220.1
  misc_feature (1)..(84): Homolog of NCBI NO: 18405384 NR Description: unknown protein; protein id: At2g40435.1
MASSSPQHATTGVCQQQPSSSSVSVGVLLDKKGRFLVSVFMDESCGPPPAGLLASVLEAFDDIGLTVLEARATCAGSFRLEAVGEVRCDCERVHIITPRVPPQTR

SEQ ID NO: 109217 - protein, 65 aa, Zea mays subsp. mays
  misc_feature (1)..(65): Ceres Seq. ID no. 12636930
  misc_feature (1)..(49): Homolog of NCBI NO: 15228867 NR Description: putative protein; protein id: At3g56220.1
  misc_feature (1)..(44): Homolog of NCBI NO: 18405384 NR Description: unknown protein; protein id: At2g40435.1
  misc_feature (1)..(44): Homolog of NCBI NO: 22296306 NR Description: hypothetical protein~similar to Arabidopsis
MDESCGPPPAGLLASVLEAFDDIGLTVLEARATCAGSFRLEAVGEVRCDCERVHIITPRVPPQTR

SEQ ID NO: 109218 - protein, 54 aa, Zea mays subsp. mays
  misc_feature (1)..(54): Ceres Seq. ID no. 12636931
MFSLKEQMLSYQYYSHISHAVCVYLRTIHLSDHSDAVKLYATRTCVSRRGIKCR

SEQ ID NO: 109219 - DNA, 789 bp, Zea mays subsp. mays
  misc_feature (1)..(789): Ceres Seq. ID no. 15179603
gagaaatcaatcaatcacagatctgttttcgcatctgcatcttcttcgaaacatcaaacaccatggcgatccccttagctaagcttctgatctccgccgttgcggttttcatgctcgtctccgcttcgttcgcgacctctgaaatgccgttcatggtggttcacaagaaagctactctcaacaggctcaaatctggcgccgagcgtgtcctcgtttccttcgatatctataaccaaggatctgcggcggcgtatgatgtgactctgactgacaatacctgggataagaaaacttttgaagttgtgaatggaaacacttcaagaacatgggagagacttgatgcaggaggtattctgtctcactctttcgaattagaggccagggttaaaggacgcttccatggtgctcctgctcttgttactttccacatccccacaaaggcaactctacagcaagcgtactcaactccattactacctctagacatcctcgcagacgtgcctccaacagacctgcttgctctggcaaagaggatgttggcaaaatatggatcactcgtttcagtgatctccatggtggttttgttcgtacacttggtagcaacaccttcatcgaagtccaatgcagcaaaagggagcagcaagaagaaacgctaaattagtgaaacgatggtgagaaaggtttgcatggtgctttgttgtgtttagcagttaagcactgtttcagaacttgtacgaattagagaatatactttaattttggtgtttcagaggactatcttaaagagtt

SEQ ID NO: 109220 - protein, 217 aa, Zea mays subsp. mays
  misc_feature (1)..(217): Ceres Seq. ID no. 15179604
  misc_feature (33)..(214): Pfam Name: Translocon-associated protein beta (TRAPB) Pfam Description: Translocon-associated protein beta (TRAPB)
  misc_feature (27)..(141): Homolog of NCBI NO: 40643038 NR Description: signal sequence receptor beta-like protein
  misc_feature (32)..(141): Homolog of NCBI NO: 27692921 NR Description: similar to RIKEN cDNA 1500032E05
  misc_feature (17)..(141): Homolog of NCBI NO: 34366445 NR Description: hypothetical protein [Homo sapiens]
  misc_feature (33)..(141): Homolog of NCBI NO: 16307352 NR Description: Ssr2 protein [Mus musculus]
  misc_feature (33)..(141): Homolog of NCBI NO: 13384850 NR Description: signal sequence receptor, beta [Mus musculus]
  misc_feature (33)..(141): Homolog of NCBI NO: 12860639 NR Description: unnamed protein product [Mus musculus]
  misc_feature (29)..(216): Homolog of NCBI NO: 9945068 NR Description: rice EST BE041002 corresponds to a region of the
  misc_feature (31)..(216): Homolog of NCBI NO: 34894034 NR Description: P0672D08.29 [Oryza sativa (japonica
  misc_feature (21)..(217): Homolog of NCBI NO: 9757784 NR Description: gene_id:MUA22.2~similar to unknown
  misc_feature (21)..(217): Homolog of NCBI NO: 18417271 NR Description: expressed protein [Arabidopsis thaliana]
EINQSQICFRICIFFETSNTMAIPLAKLLISAVAVFMLVSASFATSEMPFMVVHKKATLNRLKSGAERVLVSFDIYNQGSAAAYDVTLTDNTWDKKTFEVVNGNTSRTWERLDAGGILSHSFELEARVKGRFHGAPALVTFHIPTKATLQQAYSTPLLPLDILADVPPTDLLALAKRMLAKYGSLVSVISMVVLFVHLVATPSSKSNAAKGSSKKKR

SEQ ID NO: 109221 - protein, 197 aa, Zea mays subsp. mays
  misc_feature (1)..(197): Ceres Seq. ID no. 15179605
  misc_feature (13)..(194): Pfam Name: Translocon-associated protein beta (TRAPB) Pfam Description: Translocon-associated protein beta (TRAPB)
  misc_feature (7)..(121): Homolog of NCBI NO: 40643038 NR Description: signal sequence receptor beta-like protein
  misc_feature (12)..(121): Homolog of NCBI NO: 27692921 NR Description: similar to RIKEN cDNA 1500032E05
  misc_feature (1)..(121): Homolog of NCBI NO: 34366445 NR Description: hypothetical protein [Homo sapiens]
  misc_feature (13)..(121): Homolog of NCBI NO: 13384850 NR Description: signal sequence receptor, beta [Mus musculus]
  misc_feature (13)..(121): Homolog of NCBI NO: 16307352 NR Description: Ssr2 protein [Mus musculus]
  misc_feature (13)..(121): Homolog of NCBI NO: 12860639 NR Description: unnamed protein product [Mus musculus]
  misc_feature (9)..(196): Homolog of NCBI NO: 9945068 NR Description: rice EST BE041002 corresponds to a region of the
  misc_feature (11)..(196): Homolog of NCBI NO: 34894034 NR Description: P0672D08.29 [Oryza sativa (japonica
  misc_feature (1)..(197): Homolog of NCBI NO: 9757784 NR Description: gene_id:MUA22.2~similar to unknown
  misc_feature (1)..(197): Homolog of NCBI NO: 18417271 NR Description: expressed protein [Arabidopsis thaliana]
MAIPLAKLLISAVAVFMLVSASFATSEMPFMVVHKKATLNRLKSGAERVLVSFDIYNQGSAAAYDVTLTDNTWDKKTFEVVNGNTSRTWERLDAGGILSHSFELEARVKGRFHGAPALVTFHIPTKATLQQAYSTPLLPLDILADVPPTDLLALAKRMLAKYGSLVSVISMVVLFVHLVATPSSKSNAAKGSSKKKR

SEQ ID NO: 109222 - protein, 181 aa, Zea mays subsp. mays
  misc_feature (1)..(181): Ceres Seq. ID no. 15179606
  misc_feature (1)..(178): Pfam Name: Translocon-associated protein beta (TRAPB) Pfam Description: Translocon-associated protein beta (TRAPB)
  misc_feature (1)..(105): Homolog of NCBI NO: 40643038 NR Description: signal sequence receptor beta-like protein
  misc_feature (1)..(105): Homolog of NCBI NO: 27692921 NR Description: similar to RIKEN cDNA 1500032E05
  misc_feature (1)..(105): Homolog of NCBI NO: 34366445 NR Description: hypothetical protein [Homo sapiens]
  misc_feature (1)..(105): Homolog of NCBI NO: 16307352 NR Description: Ssr2 protein [Mus musculus]
  misc_feature (1)..(105): Homolog of NCBI NO: 13384850 NR Description: signal sequence receptor, beta [Mus musculus]
  misc_feature (1)..(105): Homolog of NCBI NO: 12860639 NR Description: unnamed protein product [Mus musculus]
  misc_feature (1)..(180): Homolog of NCBI NO: 9945068 NR Description: rice EST BE041002 corresponds to a region of the
  misc_feature (1)..(180): Homolog of NCBI NO: 34894034 NR Description: P0672D08.29 [Oryza sativa (japonica
  misc_feature (1)..(181): Homolog of NCBI NO: 9757784 NR Description: gene_id:MUA22.2~similar to unknown
  misc_feature (1)..(181): Homolog of NCBI NO: 18417271 NR Description: expressed protein [Arabidopsis thaliana]
MLVSASFATSEMPFMVVHKKATLNRLKSGAERVLVSFDIYNQGSAAAYDVTLTDNTWDKKTFEVVNGNTSRTWERLDAGGILSHSFELEARVKGRFHGAPALVTFHIPTKATLQQAYSTPLLPLDILADVPPTDLLALAKRMLAKYGSLVSVISMVVLFVHLVATPSSKSNAAKGSSKKKR

SEQ ID NO: 109223 - DNA, 853 bp, Zea mays subsp. mays
  misc_feature (1)..(853): Ceres Seq. ID no. 14309542
gttccccaaggatttcaatctcaaagtctctctctccctcttaagacccaaaaaaaatcatcatctttctaatacggaattatttagggtttattgtcgtttgaatcttcttctactattgccatggatatagaagaaactaatataattgaagttgaaacgaaggtgatgaatctagcgctaaacatggagtctatgaacattctctcaatccgtgtacacaatctgattgaagattttaccgaagacgtgattttacatataagatcacgttacatccgcttggagccacacggcttcacgccaagtcatatctctgaactccttcgtggccaacaagttgatgaatctcaacacataggtgaaaagatcgctaatgaaatcaatcgttcacttagcaatgataaaactctccgagagcctgtcttcgtgaacgtcgaagttgaattcgtcaaagagaggcgtttggttgtgccgtctgatgttcctgcttcgattgaagttttacagaggttggtggaagaacatatagtggatttgaacggaaataaagaagctatgtgttcaatttgcatcgaggatttgtccaagagtcaacaaagcatcattgagatgcctaactgtttgcatatgtttcatcaaaactgtctttttgagtggcttggtcggaaaaactcgtgtccgttgtgccggagattcgtacgacctaggaataggatcaagaaacagaaactcgaaaacgttacagcttcaggggtttcgattatgttgcgaattgttgacactcatccttatgttaattagttcttataagatgaaattgtttacaagtatcatgaattattgactgact

SEQ ID NO: 109224 - protein, 226 aa, Zea mays subsp. mays
  misc_feature (1)..(226): Ceres Seq. ID no. 14309543
  misc_feature (147)..(189): Pfam Name: Zinc finger, C3HC4 type (RING finger) Pfam Description: Zinc finger, C3HC4 type (RING finger)
  misc_feature (52)..(191): Homolog of NCBI NO: 15239807 NR Description: zinc finger (C3HC4-type RING finger) protein
  misc_feature (105)..(190): Homolog of NCBI NO: 15223650 NR Description: zinc finger (C3HC4-type RING finger) protein
  misc_feature (9)..(178): Homolog of NCBI NO: 15240161 NR Description: zinc finger (C3HC4-type RING finger) protein
  misc_feature (9)..(178): Homolog of NCBI NO: 9758709 NR Description: gb|AAD18119.1~gene_id:MNJ8.1~similar to unknown
  misc_feature (99)..(191): Homolog of NCBI NO: 15240170 NR Description: zinc finger (C3HC4-type RING finger) protein
  misc_feature (9)..(191): Homolog of NCBI NO: 9758711 NR Description: contains similarity to RING zinc finger
  misc_feature (9)..(191): Homolog of NCBI NO: 15240166 NR Description: zinc finger (C3HC4-type RING finger) protein
  misc_feature (9)..(191): Homolog of NCBI NO: 15240173 NR Description: zinc finger (C3HC4-type RING finger) protein
  misc_feature (32)..(191): Homolog of NCBI NO: 15240174 NR Description: zinc finger (C3HC4-type RING finger) protein
  misc_feature (1)..(191): Homolog of NCBI NO: 15240137 NR Description: zinc finger (C3HC4-type RING finger) protein
MDIEETNIIEVETKVMNLALNMESMNILSIRVHNLIEDFTEDVILHIRSRYIRLEPHGFTPSHISELLRGQQVDESQHIGEKIANEINRSLSNDKTLREPVFVNVEVEFVKERRLVVPSDVPASIEVLQRLVEEHIVDLNGNKEAMCSICIEDLSKSQQSIIEMPNCLHMFHQNCLFEWLGRKNSCPLCRRFVRPRNRIKKQKLENVTASGVSIMLRIVDTHPYVN

SEQ ID NO: 109225 - protein, 211 aa, Zea mays subsp. mays
  misc_feature (1)..(211): Ceres Seq. ID no. 14309544
  misc_feature (132)..(174): Pfam Name: Zinc finger, C3HC4 type (RING finger) Pfam Description: Zinc finger, C3HC4 type (RING finger)
  misc_feature (37)..(176): Homolog of NCBI NO: 15239807 NR Description: zinc finger (C3HC4-type RING finger) protein
  misc_feature (90)..(175): Homolog of NCBI NO: 15223650 NR Description: zinc finger (C3HC4-type RING finger) protein
  misc_feature (1)..(163): Homolog of NCBI NO: 15240161 NR Description: zinc finger (C3HC4-type RING finger) protein
  misc_feature (1)..(163): Homolog of NCBI NO: 9758709 NR Description: gb|AAD18119.1~gene_id:MNJ8.1~similar to unknown
  misc_feature (84)..(176): Homolog of NCBI NO: 15240170 NR Description: zinc finger (C3HC4-type RING finger) protein
  misc_feature (1)..(176): Homolog of NCBI NO: 9758711 NR Description: contains similarity to RING zinc finger
  misc_feature (1)..(176): Homolog of NCBI NO: 15240166 NR Description: zinc finger (C3HC4-type RING finger) protein
  misc_feature (1)..(176): Homolog of NCBI NO: 15240173 NR Description: zinc finger (C3HC4-type RING finger) protein
  misc_feature (17)..(176): Homolog of NCBI NO: 15240174 NR Description: zinc finger (C3HC4-type RING finger) protein
  misc_feature (1)..(176): Homolog of NCBI NO: 15240137 NR Description: zinc finger (C3HC4-type RING finger) protein
MNLALNMESMNILSIRVHNLIEDFTEDVILHIRSRYIRLEPHGFTPSHISELLRGQQVDESQHIGEKIANEINRSLSNDKTLREPVFVNVEVEFVKERRLVVPSDVPASIEVLQRLVEEHIVDLNGNKEAMCSICIEDLSKSQQSIIEMPNCLHMFHQNCLFEWLGRKNSCPLCRRFVRPRNRIKKQKLENVTASGVSIMLRIVDTHPYVN

SEQ ID NO: 109226 - protein, 205 aa, Zea mays subsp. mays
  misc_feature (1)..(205): Ceres Seq. ID no. 14309545
  misc_feature (126)..(168): Pfam Name: Zinc finger, C3HC4 type (RING finger) Pfam Description: Zinc finger, C3HC4 type (RING finger)
  misc_feature (31)..(170): Homolog of NCBI NO: 15239807 NR Description: zinc finger (C3HC4-type RING finger) protein
  misc_feature (84)..(169): Homolog of NCBI NO: 15223650 NR Description: zinc finger (C3HC4-type RING finger) protein
  misc_feature (1)..(157): Homolog of NCBI NO: 15240161 NR Description: zinc finger (C3HC4-type RING finger) protein
  misc_feature (1)..(157): Homolog of NCBI NO: 9758709 NR Description: gb|AAD18119.1~gene_id:MNJ8.1~similar to unknown
  misc_feature (78)..(170): Homolog of NCBI NO: 15240170 NR Description: zinc finger (C3HC4-type RING finger) protein
  misc_feature (1)..(170): Homolog of NCBI NO: 9758711 NR Description: contains similarity to RING zinc finger
  misc_feature (1)..(170): Homolog of NCBI NO: 15240166 NR Description: zinc finger (C3HC4-type RING finger) protein
  misc_feature (1)..(170): Homolog of NCBI NO: 15240173 NR Description: zinc finger (C3HC4-type RING finger) protein
  misc_feature (11)..(170): Homolog of NCBI NO: 15240174 NR Description: zinc finger (C3HC4-type RING finger) protein
  misc_feature (1)..(170): Homolog of NCBI NO: 15240137 NR Description: zinc finger (C3HC4-type RING finger) protein
MESMNILSIRVHNLIEDFTEDVILHIRSRYIRLEPHGFTPSHISELLRGQQVDESQHIGEKIANEINRSLSNDKTLREPVFVNVEVEFVKERRLVVPSDVPASIEVLQRLVEEHIVDLNGNKEAMCSICIEDLSKSQQSIIEMPNCLHMFHQNCLFEWLGRKNSCPLCRRFVRPRNRIKKQKLENVTASGVSIMLRIVDTHPYVN

SEQ ID NO: 109227 - DNA, 711 bp, Zea mays subsp. mays
  misc_feature (1)..(711): Ceres Seq. ID no. 14309546
atctattattactcacactagtcacaaaccttatcggagtgaagtgaagattggtgggggtagtagcgaaaatggcgtcgattacagcttcttctactttccgctccttgtcaacaaccaaaagccctaacctttcttcgacccatctccttcctctttccaaaaaccacagcagagtttgcatctttacgaaacagaacccccttgggctgaggaagctttcgtcccttggccaaggaggagaagctgtcgcagtcgcagtcgcagtcgcagatgaagagcaacaacagcagcaagaggctgtctctgtccctgtctctccttcagacatgctcaccatgttttttcaggctgatggaactttgaatgacgcagctattcctaatgtcacaaaggccttacaggacatcgacggagtttccaatttaaaggttcaagttgctgaaggtgttgccgttgttgagctttcaaagcaaacaacggttcaagcaacaggagtggcgtcaagcttggtggagactatacaaggagctggctttaagttacaaaccttgaatctgagctttgaagacgaagatgaagttcttgtctaattaaatcatctttctcctcctccatttttgtgattaaagaaacacattaatgttcaattattatttaaaaatgacaatgtgccatattacaaaagtaatgaactctcacttttcttac

SEQ ID NO: 109228 - protein, 173 aa, Zea mays subsp. mays
  misc_feature (1)..(173): Ceres Seq. ID no. 14309547
  misc_feature (1)..(173): Homolog of NCBI NO: 11346179 NR Description: hypothetical protein F2G14_30 - Arabidopsis
  misc_feature (1)..(173): Homolog of NCBI NO: 18417512 NR Description: heavy-metal-associated domain-containing protein
MASITASSTFRSLSTTKSPNLSSTHLLPLSKNHSRVCIFTKQNPLGLRKLSSLGQGGEAVAVAVAVADEEQQQQQEAVSVPVSPSDMLTMFFQADGTLNDAAIPNVTKALQDIDGVSNLKVQVAEGVAVVELSKQTTVQATGVASSLVETIQGAGFKLQTLNLSFEDEDEVLV

SEQ ID NO: 109229 - protein, 87 aa, Zea mays subsp. mays
  misc_feature (1)..(87): Ceres Seq. ID no. 14309548
  misc_feature (1)..(87): Homolog of NCBI NO: 11346179 NR Description: hypothetical protein F2G14_30 - Arabidopsis
  misc_feature (1)..(87): Homolog of NCBI NO: 18417512 NR Description: heavy-metal-associated domain-containing protein
MLTMFFQADGTLNDAAIPNVTKALQDIDGVSNLKVQVAEGVAVVELSKQTTVQATGVASSLVETIQGAGFKLQTLNLSFEDEDEVLV

SEQ ID NO: 109230 - DNA, 530 bp, Zea mays subsp. mays
  misc_feature (1)..(530): Ceres Seq. ID no. 14309595
atccaaagtccaaaacatttaaagaaaccttggactccccagccagaagaagaaccaacatggcacccacaatctataatttttcgtattctaaaaggttttcagagtcattcaattcttcaacatcaaaaaaggagtcatccagttcgaacatccttgctttccactccatagctcaatggaatgctcattataaagccaccaaagaaactaacaagctgatggtacttgatttcacagccacatggtgtggaccttgcaaactcatggaccctgttatcctagagtttgctggaaattacacagatgttgagttcatcaagattgatgtggaggagttaacggaagtgtctcaagcactccaggtccaccaattgccaacattcgtactcgttcagaaaggcaaagttgctgatagagtggtgggggtgaagaaggaggagctgaaaaggtcgattgagaagcacataaaataaataaatatgattatgcactgtaataaaatcaaaatgctcaacaaccaattcaag

SEQ ID NO: 109231 - protein, 157 aa, Zea mays subsp. mays
  misc_feature (1)..(157): Ceres Seq. ID no. 14309596
  misc_feature (51)..(155): Pfam Name: Thioredoxin Pfam Description: Thioredoxin
  misc_feature (46)..(156): Homolog of NCBI NO: 40287476 NR Description: thioredoxin [Capsicum annuum]
  misc_feature (33)..(156): Homolog of NCBI NO: 34897150 NR Description: putative thioredoxin [Oryza sativa (japonica
  misc_feature (47)..(155): Homolog of NCBI NO: 25990392 NR Description: thioredoxin h [Brassica rapa]
  misc_feature (33)..(152): Homolog of NCBI NO: 34394553 NR Description: putative thioredoxin [Oryza sativa (japonica
  misc_feature (33)..(154): Homolog of NCBI NO: 21595244 NR Description: thioredoxin [Arabidopsis thaliana]
  misc_feature (33)..(154): Homolog of NCBI NO: 1388078 NR Description: thioredoxin h
  misc_feature (33)..(154): Homolog of NCBI NO: 15242525 NR Description: thioredoxin H-type 2 (TRX-H-2) [Arabidopsis
  misc_feature (48)..(155): Homolog of NCBI NO: 19548654 NR Description: thioredoxin H [Populus tremula x Populus
  misc_feature (45)..(155): Homolog of NCBI NO: 27466896 NR Description: thioredoxin h [Pisum sativum]
  misc_feature (39)..(155): Homolog of NCBI NO: 33621080 NR Description: thioredoxin H2 [Ipomoea batatas]
PKSKTFKETLDSPARRRTNMAPTIYNFSYSKRFSESFNSSTSKKESSSSNILAFHSIAQWNAHYKATKETNKLMVLDFTATWCGPCKLMDPVILEFAGNYTDVEFIKIDVEELTEVSQALQVHQLPTFVLVQKGKVADRVVGVKKEELKRSIEKHIK

SEQ ID NO: 109232 - protein, 138 aa, Zea mays subsp. mays
  misc_feature (1)..(138): Ceres Seq. ID no. 14309597
  misc_feature (32)..(136): Pfam Name: Thioredoxin Pfam Description: Thioredoxin
  misc_feature (27)..(137): Homolog of NCBI NO: 40287476 NR Description: thioredoxin [Capsicum annuum]
  misc_feature (14)..(137): Homolog of NCBI NO: 34897150 NR Description: putative thioredoxin [Oryza sativa (japonica
  misc_feature (28)..(136): Homolog of NCBI NO: 25990392 NR Description: thioredoxin h [Brassica rapa]
  misc_feature (14)..(133): Homolog of NCBI NO: 34394553 NR Description: putative thioredoxin [Oryza sativa (japonica
  misc_feature (14)..(135): Homolog of NCBI NO: 21595244 NR Description: thioredoxin [Arabidopsis thaliana]
  misc_feature (14)..(135): Homolog of NCBI NO: 1388078 NR Description: thioredoxin h
  misc_feature (14)..(135): Homolog of NCBI NO: 15242525 NR Description: thioredoxin H-type 2 (TRX-H-2) [Arabidopsis
  misc_feature (29)..(136): Homolog of NCBI NO: 19548654 NR Description: thioredoxin H [Populus tremula x Populus
  misc_feature (26)..(136): Homolog of NCBI NO: 27466896 NR Description: thioredoxin h [Pisum sativum]
  misc_feature (20)..(136): Homolog of NCBI NO: 33621080 NR Description: thioredoxin H2 [Ipomoea batatas]
MAPTIYNFSYSKRFSESFNSSTSKKESSSSNILAFHSIAQWNAHYKATKETNKLMVLDFTATWCGPCKLMDPVILEFAGNYTDVEFIKIDVEELTEVSQALQVHQLPTFVLVQKGKVADRVVGVKKEELKRSIEKHIK

SEQ ID NO: 109233 - protein, 84 aa, Zea mays subsp. mays
  misc_feature (1)..(84): Ceres Seq. ID no. 14309598
  misc_feature (1)..(82): Pfam Name: Thioredoxin Pfam Description: Thioredoxin
  misc_feature (1)..(83): Homolog of NCBI NO: 40287476 NR Description: thioredoxin [Capsicum annuum]
  misc_feature (1)..(83): Homolog of NCBI NO: 34897150 NR Description: putative thioredoxin [Oryza sativa (japonica
  misc_feature (1)..(82): Homolog of NCBI NO: 25990392 NR Description: thioredoxin h [Brassica rapa]
  misc_feature (1)..(79): Homolog of NCBI NO: 34394553 NR Description: putative thioredoxin [Oryza sativa (japonica
  misc_feature (1)..(81): Homolog of NCBI NO: 21595244 NR Description: thioredoxin [Arabidopsis thaliana]
  misc_feature (1)..(81): Homolog of NCBI NO: 1388078 NR Description: thioredoxin h
  misc_feature (1)..(81): Homolog of NCBI NO: 15242525 NR Description: thioredoxin H-type 2 (TRX-H-2) [Arabidopsis
  misc_feature (1)..(82): Homolog of NCBI NO: 19548654 NR Description: thioredoxin H [Populus tremula x Populus
  misc_feature (1)..(82): Homolog of NCBI NO: 27466896 NR Description: thioredoxin h [Pisum sativum]
  misc_feature (1)..(82): Homolog of NCBI NO: 33621080 NR Description: thioredoxin H2 [Ipomoea batatas]
MVLDFTATWCGPCKLMDPVILEFAGNYTDVEFIKIDVEELTEVSQALQVHQLPTFVLVQKGKVADRVVGVKKEELKRSIEKHIK

SEQ ID NO: 109234 - DNA, 883 bp, Zea mays subsp. mays
  misc_feature (1)..(883): Ceres Seq. ID no. 14309611
aacctaaattaagggatttgttctaacaaatctctctagaatccaaaagtaagaatcccgtctctctctcatcttcttctcgggaagatcagaaaacagctttttgtgaaattccatccccaagctttgaagatcgcaggaaaattctcgttttgatctgaccgtttctggtgaagaagacaggattctaaaagacaacaacaatgagctctgagcaaaacaacagcacaagcttcccaccaacagagccaaagctctgcgacaacgggtgcggattcttcgggtcaccctccaacatgaacctctgttccaaatgttaccgaagcctacgtgccgaggaagatcaaaccgcagttgcaaaagctgcggtggagaaatcacttaagcttccatcttgcaatctcatcaccgcaccagagccaaaacagcctctggagaccaaaccagcctcgttggaaaccgttgtgattgctgggacgtcttctgttcctcctgtagctacgggacaggacgagggagagccttcgaaacccacacggccgaacaggtgtttcagctgtaacaagaaggttggagttatggggttcaagtgcaagtgcggtagcacgttttgcgggagccataggtacccggagaagcatgagtgtagcttcgatttcaaagaggttggacgcggtgcaatcgcaaaggcgaatcctgtggtcaaggcggataaagtccagaggatttgatttgatgtgatgtgatctgtctatctttcagtttattccgagaatgttgatgtgatgtggtcatgttccatgttgggtttctatgaatcaaaatgaaaattgctgctattggttttctcatgaatcctttttagtgctttttaagtctattg

SEQ ID NO: 109235 - protein, 175 aa, Zea mays subsp. mays
  misc_feature (1)..(175): Ceres Seq. ID no. 14309612
  misc_feature (116)..(156): Pfam Name: AN1-like Zinc finger Pfam Description: AN1-like Zinc finger
  misc_feature (13)..(175): Homolog of NCBI NO: 14596167 NR Description: zinc finger-like protein [Arabidopsis thaliana]
  misc_feature (13)..(175): Homolog of NCBI NO: 15231686 NR Description: zinc finger - like protein [Arabidopsis thaliana]
  misc_feature (12)..(175): Homolog of NCBI NO: 25082726 NR Description: expressed protein [Arabidopsis thaliana]
  misc_feature (13)..(175): Homolog of NCBI NO: 18404102 NR Description: expressed protein [Arabidopsis thaliana]
  misc_feature (12)..(175): Homolog of NCBI NO: 18403408 NR Description: expressed protein [Arabidopsis thaliana]
  misc_feature (15)..(175): Homolog of NCBI NO: 15225894 NR Description: zinc finger protein -related [Arabidopsis
  misc_feature (1)..(175): Homolog of NCBI NO: 15221329 NR Description: expressed protein [Arabidopsis thaliana]
  misc_feature (1)..(175): Homolog of NCBI NO: 8778645 NR Description: F5O11.17 [Arabidopsis thaliana]
  misc_feature (1)..(174): Homolog of NCBI NO: 15235819 NR Description: zinc finger -related protein [Arabidopsis
  misc_feature (1)..(175): Homolog of NCBI NO: 15234402 NR Description: expressed protein [Arabidopsis thaliana]
MSSEQNNSTSFPPTEPKLCDNGCGFFGSPSNMNLCSKCYRSLRAEEDQTAVAKAAVEKSLKLPSCNLITAPEPKQPLETKPASLETVVIAGTSSVPPVATGQDEGEPSKPTRPNRCFSCNKKVGVMGFKCKCGSTFCGSHRYPEKHECSFDFKEVGRGAIAKANPVVKADKVQRI

SEQ ID NO: 109236 - protein, 144 aa, Zea mays subsp. mays
  misc_feature (1)..(144): Ceres Seq. ID no. 14309613
  misc_feature (85)..(125): Pfam Name: AN1-like Zinc finger Pfam Description: AN1-like Zinc finger
  misc_feature (1)..(144): Homolog of NCBI NO: 14596167 NR Description: zinc finger-like protein [Arabidopsis thaliana]
  misc_feature (1)..(144): Homolog of NCBI NO: 15231686 NR Description: zinc finger - like protein [Arabidopsis thaliana]
  misc_feature (1)..(144): Homolog of NCBI NO: 25082726 NR Description: expressed protein [Arabidopsis thaliana]
  misc_feature (1)..(144): Homolog of NCBI NO: 18404102 NR Description: expressed protein [Arabidopsis thaliana]
  misc_feature (1)..(144): Homolog of NCBI NO: 18403408 NR Description: expressed protein [Arabidopsis thaliana]
  misc_feature (1)..(144): Homolog of NCBI NO: 15225894 NR Description: zinc finger protein -related [Arabidopsis
  misc_feature (1)..(144): Homolog of NCBI NO: 15221329 NR Description: expressed protein [Arabidopsis thaliana]
  misc_feature (1)..(144): Homolog of NCBI NO: 8778645 NR Description: F5O11.17 [Arabidopsis thaliana]
  misc_feature (1)..(143): Homolog of NCBI NO: 15235819 NR Description: zinc finger -related protein [Arabidopsis
  misc_feature (1)..(144): Homolog of NCBI NO: 15234402 NR Description: expressed protein [Arabidopsis thaliana]
MNLCSKCYRSLRAEEDQTAVAKAAVEKSLKLPSCNLITAPEPKQPLETKPASLETVVIAGTSSVPPVATGQDEGEPSKPTRPNRCFSCNKKVGVMGFKCKCGSTFCGSHRYPEKHECSFDFKEVGRGAIAKANPVVKADKVQRI

SEQ ID NO: 109237 - DNA, 1438 bp, Zea mays subsp. mays
  misc_feature (1)..(1438): Ceres Seq. ID no. 15179613
attacttaacccattttgccaatcaatcactcttcacttcttcccactcctacttttttcctttctaagcaatctctctctctcatactatctgcacagcactactaacagagctatttgctatattgtaaaaggaagatgtttggacaaagcttcgcggaggatcttgattgtggcaacttctttgacaacatggacgatcttcttgattttcccggtggtgatatcgatgtcggtttcggcataggtgactccgactcttttcctaacatctggactactcatcaggacacatggcctgcagcttctgatcctctcttcgcttccaacacaaactctgactcatcacctgagctctatgttccgtttgaagatattgttaaggtggaaagaccaaaatgctttgtagaggaatccttagttgagaagaaggaagattcgtttttcacaaacacggattcatcatcttctcatagccaattcaggagctcaagtccagtgtcggtactcgaaagcagctcctcatcgtctcatacaaccaacacaacctcacttgtcctccctggaaagcacggtcgtccacgcacaaaacgtcctcgtccacaggtccaggagaaagataaagtcaacgacaatgtctttggggcggattcgcgcctcatcattagaataccaaagcagtttctctctgaccacagcaagatgataaccaagaagaagaagaagaaggccaaggttgtttcttcatcttcttggtcggagattgatcttgaaaccaatggaaacaacaatgtagattcgtgttcttcagagcagaatcctgttaggaaatgtatgcactgtgaggtcaccaagaccccacaatggaggctcgggcctatgggcccaaagacgctttgcaatgcttgcgatgtacgttacaaatcgggaaggcttttcccggagtaccggccagctgctagcccaacgtttactccagctcttcactcaaactcccacaagaaggtggctgaaatgagaaacaagagatgcagcaatggaagctacacaaacgaagagaatgatctgcatgatctggttttgaacaatgcctacattggcataggagtaggaaagagtcagagagtagaaaagttttagctttagaagagatggatgaagaggagcaatcaattgaggaaggggtcaaagttagatgagagttgattgtgttgtattttgtattatttgtagtgtgaatgggcaaaactcttgaaacaaaggaagagtaagttggggaagagcagaagattttgaagatactagagagagagttaggtgttgaattttacattaaatcttcctctcctttttcttcctttcaattctttgtacttttattgtgaggattctttttgtagttgatttgtttagctaaattattatttttgtttttgtt

SEQ ID NO: 109238 - protein, 333 aa, Zea mays subsp. mays
  misc_feature (1)..(333): Ceres Seq. ID no. 15179614
  misc_feature (79)..(297): Homolog of NCBI NO: 37572447 NR Description: AG-motif binding protein-3 [Nicotiana tabacum]
  misc_feature (19)..(297): Homolog of NCBI NO: 15239503 NR Description: GATA zinc finger protein [Arabidopsis thaliana]
  misc_feature (38)..(296): Homolog of NCBI NO: 15223085 NR Description: GATA zinc finger protein [Arabidopsis thaliana]
  misc_feature (115)..(296): Homolog of NCBI NO: 8778844 NR Description: T6D22.9 [Arabidopsis thaliana]
  misc_feature (115)..(315): Homolog of NCBI NO: 12711287 NR Description: GATA-1 zinc finger protein [Nicotiana tabacum]
  misc_feature (21)..(296): Homolog of NCBI NO: 15451574 NR Description: Putative GATA-1 zinc finger protein [Oryza sativa]
  misc_feature (13)..(296): Homolog of NCBI NO: 15223086 NR Description: GATA zinc finger protein [Arabidopsis thaliana]
  misc_feature (3)..(296): Homolog of NCBI NO: 37572451 NR Description: AG-motif binding protein-5 [Nicotiana tabacum]
  misc_feature (3)..(296): Homolog of NCBI NO: 37572443 NR Description: AG-motif binding protein-1 [Nicotiana tabacum]
  misc_feature (1)..(322): Homolog of NCBI NO: 15233101 NR Description: GATA zinc finger protein [Arabidopsis thaliana]
MFGQSFAEDLDCGNFFDNMDDLLDFPGGDIDVGFGIGDSDSFPNIWTTHQDTWPAASDPLFASNTNSDSSPELYVPFEDIVKVERPKCFVEESLVEKKEDSFFTNTDSSSSHSQFRSSSPVSVLESSSSSSHTTNTTSLVLPGKHGRPRTKRPRPQVQEKDKVNDNVFGADSRLIIRIPKQFLSDHSKMITKKKKKKAKVVSSSSWSEIDLETNGNNNVDSCSSEQNPVRKCMHCEVTKTPQWRLGPMGPKTLCNACDVRYKSGRLFPEYRPAASPTFTPALHSNSHKKVAEMRNKRCSNGSYTNEENDLHDLVLNNAYIGIGVGKSQRVEKF

SEQ ID NO: 109239 - protein, 315 aa, Zea mays subsp. mays
  misc_feature (1)..(315): Ceres Seq. ID no. 15179615
  misc_feature (61)..(279): Homolog of NCBI NO: 37572447 NR Description: AG-motif binding protein-3 [Nicotiana tabacum]
  misc_feature (1)..(279): Homolog of NCBI NO: 15239503 NR Description: GATA zinc finger protein [Arabidopsis thaliana]
  misc_feature (20)..(278): Homolog of NCBI NO: 15223085 NR Description: GATA zinc finger protein [Arabidopsis thaliana]
  misc_feature (97)..(278): Homolog of NCBI NO: 8778844 NR Description: T6D22.9 [Arabidopsis thaliana]
  misc_feature (97)..(297): Homolog of NCBI NO: 12711287 NR Description: GATA-1 zinc finger protein [Nicotiana tabacum]
  misc_feature (3)..(278): Homolog of NCBI NO: 15451574 NR Description: Putative GATA-1 zinc finger protein [Oryza sativa]
  misc_feature (1)..(278): Homolog of NCBI NO: 15223086 NR Description: GATA zinc finger protein [Arabidopsis thaliana]
  misc_feature (1)..(278): Homolog of NCBI NO: 37572451 NR Description: AG-motif binding protein-5 [Nicotiana tabacum]
  misc_feature (1)..(278): Homolog of NCBI NO: 37572443 NR Description: AG-motif binding protein-1 [Nicotiana tabacum]
  misc_feature (1)..(304): Homolog of NCBI NO: 15233101 NR Description: GATA zinc finger protein [Arabidopsis thaliana]
MDDLLDFPGGDIDVGFGIGDSDSFPNIWTTHQDTWPAASDPLFASNTNSDSSPELYVPFEDIVKVERPKCFVEESLVEKKEDSFFTNTDSSSSHSQFRSSSPVSVLESSSSSSHTTNTTSLVLPGKHGRPRTKRPRPQVQEKDKVNDNVFGADSRLIIRIPKQFLSDHSKMITKKKKKKAKVVSSSSWSEIDLETNGNNNVDSCSSEQNPVRKCMHCEVTKTPQWRLGPMGPKTLCNACDVRYKSGRLFPEYRPAASPTFTPALHSNSHKKVAEMRNKRCSNGSYTNEENDLHDLVLNNAYIGIGVGKSQRVEKF

SEQ ID NO: 109240 - DNA, 1207 bp, Zea mays subsp. mays
  misc_feature (1)..(1207): Ceres Seq. ID no. 15179585
aacacaaacaagaagcttgcattgttcgtttgctcgatcgttgcagataatggagaaccctgctccgagtatcgtagtgccccccattgccgcacctgtatcagcgaacttcagcagactcgccttccgcaacctgtacatccgacggacgggtccagacagcagggagatggtgactgtggagggaagaagaggctctagtgatcagacaggcgacatgaggtacgtgagtgacttccccgtctacgatggccgtggctccgacgccgtcctggtggctcgcgtgcagggcgtcacaaccacgttcgggaactccaaccagttcttcaccgtcgccttcgaggccggcaggctcaagggctccacgctccttaccgaaggagtggtgacggatggatcagatgaatgggcaatctacggcgggaccggagagtttgctatggcgagaggtgtcgtcaaaagaaggtaccttgccgatagggatggcgccgggaacactgacgagctcagcatgcaggttttctgcccggtgtttggctcatcacagcaaccaaacaagcaggactccagcatctctgtcaccaagattgggttatggggtggcgaaggagggtcggcgcaggacatcacgacgacggagccaccgcagcgcctgcacagcctcaccgttcgtgccggtggcgccgtcgactccatcgagttcacgtatactgacagaggtggccagaggcgcgccgctgggcgatggggtggacttggcggcaaccttcgaacgatcgatcttggcgacgccgaggatgtcagggaggtctcaggaacgtacggcacatttgaaggcgccaccacgctgacctcgttcagaattctcaccagcagcaggacatgggggccatggggcgtcgagaacgggacgcggttctgcatcaccgcgccggtcggcagcagcatcgtggggttctatggacgcgcgaccagcaggctcgtcgctgcgcttggtgtttacctgcgccgactttgatttgatctgaacagcaggctacctactagcaattgcctgctcgatcaattatctttcgtaccctttattattaatataatctcgatcggtcatcgtcctcctatgtcaatgtcaaataaaggtcatgtggtcatcgatattgttggatttatgggcttggtctaattaagaaattcaattaatttctag

SEQ ID NO: 109241 - protein, 338 aa, Zea mays subsp. mays
  misc_feature (1)..(338): Ceres Seq. ID no. 15179586
  misc_feature (204)..(336): Pfam Name: Jacalin-like lectin domain Pfam Description: Jacalin-like lectin domain
  misc_feature (193)..(335): Homolog of NCBI NO: 38344523 NR Description: OSJNBa0016N04.16 [Oryza sativa (japonica
  misc_feature (191)..(336): Homolog of NCBI NO: 34915016 NR Description: putative Mannose-Binding Rice Lectin
  misc_feature (188)..(334): Homolog of NCBI NO: 38344523 NR Description: OSJNBa0016N04.16 [Oryza sativa (japonica
  misc_feature (41)..(336): Homolog of NCBI NO: 21311647 NR Description: hessian fly response gene 1 protein [Triticum
  misc_feature (77)..(335): Homolog of NCBI NO: 7489661 NR Description: benzothiadiazole-induced protein (clone WCI-1) -
  misc_feature (78)..(334): Homolog of NCBI NO: 16151819 NR Description: VER2 [Triticum aestivum]
  misc_feature (26)..(322): Homolog of NCBI NO: 7489384 NR Description: jacalin homolog - barley
  misc_feature (26)..(338): Homolog of NCBI NO: 7489385 NR Description: jakalin homolog - barley
  misc_feature (23)..(338): Homolog of NCBI NO: 9313027 NR Description: beta-glucosidase aggregating factor precursor
  misc_feature (26)..(338): Homolog of NCBI NO: 7489383 NR Description: jacalin homolog - barley
TQTRSLHCSFARSLQIMENPAPSIVVPPIAAPVSANFSRLAFRNLYIRRTGPDSREMVTVEGRRGSSDQTGDMRYVSDFPVYDGRGSDAVLVARVQGVTTTFGNSNQFFTVAFEAGRLKGSTLLTEGVVTDGSDEWAIYGGTGEFAMARGVVKRRYLADRDGAGNTDELSMQVFCPVFGSSQQPNKQDSSISVTKIGLWGGEGGSAQDITTTEPPQRLHSLTVRAGGAVDSIEFTYTDRGGQRRAAGRWGGLGGNLRTIDLGDAEDVREVSGTYGTFEGATTLTSFRILTSSRTWGPWGVENGTRFCITAPVGSSIVGFYGRATSRLVAALGVYLRRL

SEQ ID NO: 109242 - protein, 322 aa, Zea mays subsp. mays
  misc_feature (1)..(322): Ceres Seq. ID no. 15179587
  misc_feature (188)..(320): Pfam Name: Jacalin-like lectin domain Pfam Description: Jacalin-like lectin domain
  misc_feature (177)..(319): Homolog of NCBI NO: 38344523 NR Description: OSJNBa0016N04.16 [Oryza sativa (japonica
  misc_feature (175)..(320): Homolog of NCBI NO: 34915016 NR Description: putative Mannose-Binding Rice Lectin
  misc_feature (172)..(318): Homolog of NCBI NO: 38344523 NR Description: OSJNBa0016N04.16 [Oryza sativa (japonica
  misc_feature (25)..(320): Homolog of NCBI NO: 21311647 NR Description: hessian fly response gene 1 protein [Triticum
  misc_feature (61)..(319): Homolog of NCBI NO: 7489661 NR Description: benzothiadiazole-induced protein (clone WCI-1) -
  misc_feature (62)..(318): Homolog of NCBI NO: 16151819 NR Description: VER2 [Triticum aestivum]
  misc_feature (10)..(306): Homolog of NCBI NO: 7489384 NR Description: jacalin homolog - barley
  misc_feature (10)..(322): Homolog of NCBI NO: 7489385 NR Description: jakalin homolog - barley
  misc_feature (7)..(322): Homolog of NCBI NO: 9313027 NR Description: beta-glucosidase aggregating factor precursor
  misc_feature (10)..(322): Homolog of NCBI NO: 7489383 NR Description: jacalin homolog - barley
MENPAPSIVVPPIAAPVSANFSRLAFRNLYIRRTGPDSREMVTVEGRRGSSDQTGDMRYVSDFPVYDGRGSDAVLVARVQGVTTTFGNSNQFFTVAFEAGRLKGSTLLTEGVVTDGSDEWAIYGGTGEFAMARGVVKRRYLADRDGAGNTDELSMQVFCPVFGSSQQPNKQDSSISVTKIGLWGGEGGSAQDITTTEPPQRLHSLTVRAGGAVDSIEFTYTDRGGQRRAAGRWGGLGGNLRTIDLGDAEDVREVSGTYGTFEGATTLTSFRILTSSRTWGPWGVENGTRFCITAPVGSSIVGFYGRATSRLVAALGVYLRRL

SEQ ID NO: 109243 - protein, 282 aa, Zea mays subsp. mays
  misc_feature (1)..(282): Ceres Seq. ID no. 15179588
  misc_feature (148)..(280): Pfam Name: Jacalin-like lectin domain Pfam Description: Jacalin-like lectin domain
  misc_feature (21)..(279): Homolog of NCBI NO: 7489661 NR Description: benzothiadiazole-induced protein (clone WCI-1) -
  misc_feature (22)..(278): Homolog of NCBI NO: 16151819 NR Description: VER2 [Triticum aestivum]
  misc_feature (1)..(266): Homolog of NCBI NO: 7489384 NR Description: jacalin homolog - barley
  misc_feature (137)..(279): Homolog of NCBI NO: 38344523 NR Description: OSJNBa0016N04.16 [Oryza sativa (japonica
  misc_feature (132)..(278): Homolog of NCBI NO: 38344523 NR Description: OSJNBa0016N04.16 [Oryza sativa (japonica
  misc_feature (1)..(280): Homolog of NCBI NO: 21311647 NR Description: hessian fly response gene 1 protein [Triticum
  misc_feature (135)..(280): Homolog of NCBI NO: 34915016 NR Description: putative Mannose-Binding Rice Lectin
  misc_feature (1)..(282): Homolog of NCBI NO: 7489385 NR Description: jakalin homolog - barley
  misc_feature (1)..(282): Homolog of NCBI NO: 9313027 NR Description: beta-glucosidase aggregating factor precursor
  misc_feature (1)..(282): Homolog of NCBI NO: 7489383 NR Description: jacalin homolog - barley
MVTVEGRRGSSDQTGDMRYVSDFPVYDGRGSDAVLVARVQGVTTTFGNSNQFFTVAFEAGRLKGSTLLTEGVVTDGSDEWAIYGGTGEFAMARGVVKRRYLADRDGAGNTDELSMQVFCPVFGSSQQPNKQDSSISVTKIGLWGGEGGSAQDITTTEPPQRLHSLTVRAGGAVDSIEFTYTDRGGQRRAAGRWGGLGGNLRTIDLGDAEDVREVSGTYGTFEGATTLTSFRILTSSRTWGPWGVENGTRFCITAPVGSSIVGFYGRATSRLVAALGVYLRRL

SEQ ID NO: 109244 - DNA, 862 bp, Zea mays subsp. mays
  misc_feature (1)..(862): Ceres Seq. ID no. 14309561
aatcaatcaagccgagaccaaagttggtggtgtaatccgatcctagtcttcttgtgttcgatttcatctcttcctgtgaatttcagagatatgtcttcaagggagaggctaggttcatctaagcattatagccgaggcatgtcaactagtggttcatcatcatcccggcaccacgagaccatctcttccgcttctgaccaccgggtttcccattccgacgttcttgaaaacaagattgcagctcgagctgctgagattgaccgtctctctagtgacaaccgcaaacttgctgctagctacgtagctctcaaggaagacctatcccttgctgaccgcgaagtccagggactgagagctcacatcgtcaagacagagacagacggcgagattcagatccgaggtgcactcgagaagattgcgaaacttgagggtattgtcaacaacagggataacatcaggagggagctgcaatcagctcacattgaggctcatacattagccagagaacgcgaggagctagctgcacaggtgaaggcggcagtaaaggagttgaagaaggtttgcctcgagtcagagggtctagagtcttcagttcaagagcttgagcggttgaaagaagagcaccagagattaagggaagagtttgatgcagagaagagcggtaacgtagagaaacttgagcaattgaaagagatggagagtaacataatcggagcagtcaaagctattgagaagctgcgaagtgagatcgcaaccgcaaggagtagagcttgagactcaaaagagggtctttctatttagcaaaagaaacaaaactgtgttcctaattttcgcaatatatataacatgagtttattttttc

SEQ ID NO: 109245 - protein, 257 aa, Zea mays subsp. mays
  misc_feature (1)..(257): Ceres Seq. ID no. 14309562
  misc_feature (73)..(257): Pfam Name: Plant protein of unknown function (DUF827) Pfam Description: Plant protein of unknown function (DUF827)
  misc_feature (74)..(256): Homolog of NCBI NO: 18405242 NR Description: myosin -related [Arabidopsis thaliana]
  misc_feature (43)..(257): Homolog of NCBI NO: 7487478 NR Description: hypothetical protein At2g30120 [imported] -
  misc_feature (75)..(257): Homolog of NCBI NO: 28876008 NR Description: hypothetical protein [Oryza sativa (japonica
  misc_feature (75)..(257): Homolog of NCBI NO: 33146484 NR Description: myosin-like protein [Oryza sativa (japonica
  misc_feature (74)..(257): Homolog of NCBI NO: 18400511 NR Description: expressed protein [Arabidopsis thaliana]
  misc_feature (74)..(257): Homolog of NCBI NO: 9294396 NR Description: gb|AAD10662.1~gene_id:MIE1.26~similar to unknown
  misc_feature (73)..(250): Homolog of NCBI NO: 30697468 NR Description: expressed protein [Arabidopsis thaliana]
  misc_feature (73)..(250): Homolog of NCBI NO: 25404669 NR Description: hypothetical protein F5A8.8 [imported] -
  misc_feature (66)..(257): Homolog of NCBI NO: 38605778 NR Description: OSJNBa0044K18.21 [Oryza sativa (japonica
  misc_feature (31)..(257): Homolog of NCBI NO: 15240385 NR Description: hypothetical protein [Arabidopsis thaliana]
NQSSRDQSWWCNPILVFLCSISSLPVNFRDMSSRERLGSSKHYSRGMSTSGSSSSRHHETISSASDHRVSHSDVLENKIAARAAEIDRLSSDNRKLAASYVALKEDLSLADREVQGLRAHIVKTETDGEIQIRGALEKIAKLEGIVNNRDNIRRELQSAHIEAHTLAREREELAAQVKAAVKELKKVCLESEGLESSVQELERLKEEHQRLREEFDAEKSGNVEKLEQLKEMESNIIGAVKAIEKLRSEIATARSRA

SEQ ID NO: 109246 - protein, 227 aa, Zea mays subsp. mays
  misc_feature (1)..(227): Ceres Seq. ID no. 14309563
  misc_feature (43)..(227): Pfam Name: Plant protein of unknown function (DUF827) Pfam Description: Plant protein of unknown function (DUF827)
  misc_feature (44)..(226): Homolog of NCBI NO: 18405242 NR Description: myosin -related [Arabidopsis thaliana]
  misc_feature (13)..(227): Homolog of NCBI NO: 7487478 NR Description: hypothetical protein At2g30120 [imported] -
  misc_feature (45)..(227): Homolog of NCBI NO: 28876008 NR Description: hypothetical protein [Oryza sativa (japonica
  misc_feature (45)..(227): Homolog of NCBI NO: 33146484 NR Description: myosin-like protein [Oryza sativa (japonica
  misc_feature (44)..(227): Homolog of NCBI NO: 18400511 NR Description: expressed protein [Arabidopsis thaliana]
  misc_feature (44)..(227): Homolog of NCBI NO: 9294396 NR Description: gb|AAD10662.1~gene_id:MIE1.26~similar to unknown
  misc_feature (43)..(220): Homolog of NCBI NO: 30697468 NR Description: expressed protein [Arabidopsis thaliana]
  misc_feature (43)..(220): Homolog of NCBI NO: 25404669 NR Description: hypothetical protein F5A8.8 [imported] -
  misc_feature (36)..(227): Homolog of NCBI NO: 38605778 NR Description: OSJNBa0044K18.21 [Oryza sativa (japonica
  misc_feature (1)..(227): Homolog of NCBI NO: 15240385 NR Description: hypothetical protein [Arabidopsis thaliana]
MSSRERLGSSKHYSRGMSTSGSSSSRHHETISSASDHRVSHSDVLENKIAARAAEIDRLSSDNRKLAASYVALKEDLSLADREVQGLRAHIVKTETDGEIQIRGALEKIAKLEGIVNNRDNIRRELQSAHIEAHTLAREREELAAQVKAAVKELKKVCLESEGLESSVQELERLKEEHQRLREEFDAEKSGNVEKLEQLKEMESNIIGAVKAIEKLRSEIATARSRA

SEQ ID NO: 109247 - protein, 211 aa, Zea mays subsp. mays
  misc_feature (1)..(211): Ceres Seq. ID no. 14309564
  misc_feature (27)..(211): Pfam Name: Plant protein of unknown function (DUF827) Pfam Description: Plant protein of unknown function (DUF827)
  misc_feature (28)..(210): Homolog of NCBI NO: 18405242 NR Description: myosin -related [Arabidopsis thaliana]
  misc_feature (1)..(211): Homolog of NCBI NO: 7487478 NR Description: hypothetical protein At2g30120 [imported] -
  misc_feature (29)..(211): Homolog of NCBI NO: 28876008 NR Description: hypothetical protein [Oryza sativa (japonica
  misc_feature (29)..(211): Homolog of NCBI NO: 33146484 NR Description: myosin-like protein [Oryza sativa (japonica
  misc_feature (28)..(211): Homolog of NCBI NO: 18400511 NR Description: expressed protein [Arabidopsis thaliana]
  misc_feature (28)..(211): Homolog of NCBI NO: 9294396 NR Description: gb|AAD10662.1~gene_id:MIE1.26~similar to unknown
  misc_feature (27)..(204): Homolog of NCBI NO: 30697468 NR Description: expressed protein [Arabidopsis thaliana]
  misc_feature (27)..(204): Homolog of NCBI NO: 25404669 NR Description: hypothetical protein F5A8.8 [imported] -
  misc_feature (20)..(211): Homolog of NCBI NO: 38605778 NR Description: OSJNBa0044K18.21 [Oryza sativa (japonica
  misc_feature (1)..(211): Homolog of NCBI NO: 15240385 NR Description: hypothetical protein [Arabidopsis thaliana]
MSTSGSSSSRHHETISSASDHRVSHSDVLENKIAARAAEIDRLSSDNRKLAASYVALKEDLSLADREVQGLRAHIVKTETDGEIQIRGALEKIAKLEGIVNNRDNIRRELQSAHIEAHTLAREREELAAQVKAAVKELKKVCLESEGLESSVQELERLKEEHQRLREEFDAEKSGNVEKLEQLKEMESNIIGAVKAIEKLRSEIATARSRA

SEQ ID NO: 109248 - DNA, 948 bp, Zea mays subsp. mays
  misc_feature (1)..(948): Ceres Seq. ID no. 15179239
atgaaaaccaccctttactgaaaaacaataaaatctaagagaatgaaattttcatattctctatccaaacgatttgtttcccctattttggctatgcagttcctcatcatacatagtgtttcttcattgaaccttaccaatgagtatctcaaccacaaatgcttccttgatcaagggatatataatactggaagtgagtacgaggacagcctcaacattattttacgtagtgttcgtactggtagttattataagaacggtttcatgcgcacaagcaagggtcgtgaacctgctcctgatgctgtcaccgtcatgttccagtgtcgtggtgactcttatgggtctaaatgccgtacatgtgccgacaccgcagtcgcagggtttcgtagaagatgtctaaggaacaaaggaggaataatatggtacgaccaatgttttctctgggttagtgcaatcggtgaagacatgccaatcaatactaattacaagaatattttttctatgtacaacccaaataacgtaagaggggatgcaaaattgtttgccaagagggtggtggattttttctctgagctaacacttaaggttgataaaaataccgaagtcgactctgtcgtcatattttacgcagaagggaaaaagaagcttgggaaaaatacattgtatgcaatggtgcagtgtgtagaactaacaatagattgtaaaagttgtttgacatggagtatcgcaaagcttttcaaaaacgacgacattaaacaaggagggagagttttgggttcgaactgtgaaataagatatgagctatacccttttattaggagttaagcattttttatggtggtgatgaatacatccgcttcataatttccaaattatgttttagttttgtttacttttttttttgctcaaatttaatacatatattaataaatagagtgtttaagaaac

SEQ ID NO: 109249 - protein, 260 aa, Zea mays subsp. mays
  misc_feature (1)..(260): Ceres Seq. ID no. 15179240
  misc_feature (89)..(138): Pfam Name: Domain of unknown function DUF26 Pfam Description: Domain of unknown function DUF26
  misc_feature (48)..(260): Homolog of NCBI NO: 15233239 NR Description: hypothetical protein [Arabidopsis thaliana]
  misc_feature (25)..(258): Homolog of NCBI NO: 9279746 NR Description: contains similarity to receptor protein
  misc_feature (15)..(260): Homolog of NCBI NO: 15233235 NR Description: receptor-like kinase-related [Arabidopsis
  misc_feature (15)..(260): Homolog of NCBI NO: 15233366 NR Description: pollen coat receptor kinase, putative
  misc_feature (1)..(260): Homolog of NCBI NO: 15233238 NR Description: receptor-like protein kinase-related [Arabidopsis
  misc_feature (1)..(260): Homolog of NCBI NO: 15233236 NR Description: receptor-like protein kinase-related [Arabidopsis
  misc_feature (43)..(260): Homolog of NCBI NO: 9279760 NR Description: emb|CAB45834.1~gene_id:MZN24.21~similar to
  misc_feature (4)..(260): Homolog of NCBI NO: 15233368 NR Description: receptor-like protein kinase-related [Arabidopsis
  misc_feature (1)..(260): Homolog of NCBI NO: 15233241 NR Description: receptor-like protein kinase-related [Arabidopsis
  misc_feature (1)..(259): Homolog of NCBI NO: 9279762 NR Description: emb|CAB45834.1~gene_id:MZN24.23~similar to
MKFSYSLSKRFVSPILAMQFLIIHSVSSLNLTNEYLNHKCFLDQGIYNTGSEYEDSLNIILRSVRTGSYYKNGFMRTSKGREPAPDAVTVMFQCRGDSYGSKCRTCADTAVAGFRRRCLRNKGGIIWYDQCFLWVSAIGEDMPINTNYKNIFSMYNPNNVRGDAKLFAKRVVDFFSELTLKVDKNTEVDSVVIFYAEGKKKLGKNTLYAMVQCVELTIDCKSCLTWSIAKLFKNDDIKQGGRVLGSNCEIRYELYPFIRS

SEQ ID NO: 109250 - protein, 243 aa, Zea mays subsp. mays
  misc_feature (1)..(243): Ceres Seq. ID no. 15179241
  misc_feature (72)..(121): Pfam Name: Domain of unknown function DUF26 Pfam Description: Domain of unknown function DUF26
  misc_feature (31)..(243): Homolog of NCBI NO: 15233239 NR Description: hypothetical protein [Arabidopsis thaliana]
  misc_feature (8)..(241): Homolog of NCBI NO: 9279746 NR Description: contains similarity to receptor protein
  misc_feature (1)..(243): Homolog of NCBI NO: 15233235 NR Description: receptor-like kinase-related [Arabidopsis
  misc_feature (1)..(243): Homolog of NCBI NO: 15233366 NR Description: pollen coat receptor kinase, putative
  misc_feature (1)..(243): Homolog of NCBI NO: 15233238 NR Description: receptor-like protein kinase-related [Arabidopsis
  misc_feature (1)..(243): Homolog of NCBI NO: 15233236 NR Description: receptor-like protein kinase-related [Arabidopsis
  misc_feature (26)..(243): Homolog of NCBI NO: 9279760 NR Description: emb|CAB45834.1~gene_id:MZN24.21~similar to
  misc_feature (1)..(243): Homolog of NCBI NO: 15233368 NR Description: receptor-like protein kinase-related [Arabidopsis
  misc_feature (1)..(243): Homolog of NCBI NO: 15233241 NR Description: receptor-like protein kinase-related [Arabidopsis
  misc_feature (1)..(242): Homolog of NCBI NO: 9279762 NR Description: emb|CAB45834.1~gene_id:MZN24.23~similar to
MQFLIIHSVSSLNLTNEYLNHKCFLDQGIYNTGSEYEDSLNIILRSVRTGSYYKNGFMRTSKGREPAPDAVTVMFQCRGDSYGSKCRTCADTAVAGFRRRCLRNKGGIIWYDQCFLWVSAIGEDMPINTNYKNIFSMYNPNNVRGDAKLFAKRVVDFFSELTLKVDKNTEVDSVVIFYAEGKKKLGKNTLYAMVQCVELTIDCKSCLTWSIAKLFKNDDIKQGGRVLGSNCEIRYELYPFIRS

SEQ ID NO: 109251 - protein, 186 aa, Zea mays subsp. mays
  misc_feature (1)..(186): Ceres Seq. ID no. 15179242
  misc_feature (15)..(64): Pfam Name: Domain of unknown function DUF26 Pfam Description: Domain of unknown function DUF26
  misc_feature (1)..(186): Homolog of NCBI NO: 15233239 NR Description: hypothetical protein [Arabidopsis thaliana]
  misc_feature (1)..(184): Homolog of NCBI NO: 9279746 NR Description: contains similarity to receptor protein
  misc_feature (1)..(186): Homolog of NCBI NO: 15233235 NR Description: receptor-like kinase-related [Arabidopsis
  misc_feature (1)..(186): Homolog of NCBI NO: 15233366 NR Description: pollen coat receptor kinase, putative
  misc_feature (1)..(186): Homolog of NCBI NO: 15233238 NR Description: receptor-like protein kinase-related [Arabidopsis
  misc_feature (1)..(186): Homolog of NCBI NO: 15233236 NR Description: receptor-like protein kinase-related [Arabidopsis
  misc_feature (1)..(186): Homolog of NCBI NO: 9279760 NR Description: emb|CAB45834.1~gene_id:MZN24.21~similar to
  misc_feature (1)..(186): Homolog of NCBI NO: 15233368 NR Description: receptor-like protein kinase-related [Arabidopsis
  misc_feature (1)..(186): Homolog of NCBI NO: 15233241 NR Description: receptor-like protein kinase-related [Arabidopsis
  misc_feature (1)..(185): Homolog of NCBI NO: 9279762 NR Description: emb|CAB45834.1~gene_id:MZN24.23~similar to
MRTSKGREPAPDAVTVMFQCRGDSYGSKCRTCADTAVAGFRRRCLRNKGGIIWYDQCFLWVSAIGEDMPINTNYKNIFSMYNPNNVRGDAKLFAKRVVDFFSELTLKVDKNTEVDSVVIFYAEGKKKLGKNTLYAMVQCVELTIDCKSCLTWSIAKLFKNDDIKQGGRVLGSNCEIRYELYPFIRS

SEQ ID NO: 109252 - DNA, 1004 bp, Zea mays subsp. mays
  misc_feature (1)..(1004): Ceres Seq. ID no. 15179607
aatatttgtgtgattcatccaaaccctaaaaagcgggtttaaaggaagggaccattttgtcgttatttctcagaagatgaactcactcgctatccgagtttccaagcttctgagatcctctccgatatctcctcctctaggcaatcaatcccctcttctttcacctaaatcatctgggagtgtagcagtcactgcttggaggtcttggttctcgactggtcccatcgacgaggaagggttggaagaagattttgaagaaaccatctcagaaagacccgccgagcttcagcctcatggtgttgatccccgtaaaggttggggctttcgcggtgtccacagggccatcatttgtgggaaggtagggcaagcaccattacagaagatcttgaggaacgggcggacagtgaccatcttcactgttggaacaggcggcatgtttgatcagaagcttatgggagcaactaaccagcctaaacctgctcagtggcatagaatcgctgtccacaacgaagtgcttggctcttacgctgtccaaaagctcgctaaaaactcgtcggtttatgtcgaaggtgatattgagactagagtgtataatgacagcatcagcagtgaagtgaagagtatccctgagatttgcattcgtcgtgatggcaagattcggctgatcaaatacggggaaagcgttagcaagatctctttcgatgagctaaaagaaggattgatttagtcggagcaagaatatccctgtggccggaggacacactgattcaacgttttggttgtccattgtgagagagcactgagttttttcttatgaatattaaggccatttatgtaattgtcgatcaaaactaagctagttctgcgtctgttccttagtataagctgctcgtcaccaaacacattttgtcgggatggtttttatcatagctgtactactgccgatcagtaatttagcctgctaaattacaaatttgatgaagactctttttttgttctcatac

SEQ ID NO: 109253 - protein, 216 aa, Zea mays subsp. mays
  misc_feature (1)..(216): Ceres Seq. ID no. 15179608
  misc_feature (86)..(192): Pfam Name: Single-strand binding protein family Pfam Description: Single-strand binding protein family
  misc_feature (86)..(197): Homolog of NCBI NO: 23014489 NR Description: hypothetical protein [Magnetospirillum
  misc_feature (84)..(197): Homolog of NCBI NO: 38638180 NR Description: Ssb [Erwinia amylovora]
  misc_feature (84)..(207): Homolog of NCBI NO: 37525024 NR Description: hypothetical protein
  misc_feature (8)..(212): Homolog of NCBI NO: 34911652 NR Description: P0510C12.16 [Oryza sativa (japonica
  misc_feature (60)..(212): Homolog of NCBI NO: 15229675 NR Description: hypothetical protein [Arabidopsis thaliana]
  misc_feature (192)..(213): Homolog of NCBI NO: 3600051 NR Description: contains similarity to the single-strand binding
  misc_feature (120)..(192): Homolog of NCBI NO: 3600051 NR Description: contains similarity to the single-strand binding
  misc_feature (192)..(213): Homolog of NCBI NO: 7487337 NR Description: hypothetical protein T22B4.40 - Arabidopsis
  misc_feature (1)..(192): Homolog of NCBI NO: 7487337 NR Description: hypothetical protein T22B4.40 - Arabidopsis
  misc_feature (1)..(216): Homolog of NCBI NO: 30681642 NR Description: expressed protein [Arabidopsis thaliana]
MNSLAIRVSKLLRSSPISPPLGNQSPLLSPKSSGSVAVTAWRSWFSTGPIDEEGLEEDFEETISERPAELQPHGVDPRKGWGFRGVHRAIICGKVGQAPLQKILRNGRTVTIFTVGTGGMFDQKLMGATNQPKPAQWHRIAVHNEVLGSYAVQKLAKNSSVYVEGDIETRVYNDSISSEVKSIPEICIRRDGKIRLIKYGESVSKISFDELKEGLI

SEQ ID NO: 109254 - DNA, 901 bp, Zea mays subsp. mays
  misc_feature (1)..(901): Ceres Seq. ID no. 15179570
gtattagaaaaagatttgaacatgagtgagcatcatcattttgcgtttgtgcacggtgcagggcatggaggatggtgttggtacaagctcgccaattcactgagagagaatggacataaggccacctgcatcgacctcaagggcgctgggatcaacctaactgatccaaacactgtctcctctcttgatgactacaaccagcctctctatgacttcctctcccaacttcccctcgaccaaaaggtcattctggtgagccacagcgttggaggagggagcatgacggctgccatgtgccagtatccttccaaagtctccatggctgtttacgtcgcagcagccatggtcaaacctggtaccataattcccccaattctcaaggaagtactaaagatatgttcagggatgatagagacggaagctgagaagatatgggacttcacttttggaaatggacccgagaatctccccacaagtatgatgatgaaacctgagtatgtccgggacaagtattacaacgagagccccatggaggattacacactggctaccacacttctgcgtccagcccctgtcatggcatttgcaggcatagtggatatccctgcagcaccagaggctgacaaaatcccaagggtctacattaagacaggcaaggacaatatgttccagtcaagtcgtcaagacttaatggttaccctgtggcctcctgctcaatacttccttcttgaagagagtgatcactctgcatttttctcccaacctgaagctctctacaaaatcctccttgaagcagcctcctctatctctccctgattactctttacacatctatttggaactcctttaactcttatctttttaatagttacttgaataaactggatcatattcatatcat

SEQ ID NO: 109255 - protein, 271 aa, Zea mays subsp. mays
  misc_feature (1)..(271): Ceres Seq. ID no. 15179571
  misc_feature (42)..(264): Pfam Name: alpha/beta hydrolase fold Pfam Description: alpha/beta hydrolase fold
  misc_feature (14)..(266): Homolog of NCBI NO: 21595837 NR Description: polyneuridine aldehyde esterase, putative
  misc_feature (14)..(266): Homolog of NCBI NO: 15218463 NR Description: hydrolase, alpha/beta fold family [Arabidopsis
  misc_feature (13)..(269): Homolog of NCBI NO: 15228391 NR Description: hydrolase, alpha/beta fold family [Arabidopsis
  misc_feature (14)..(266): Homolog of NCBI NO: 30681236 NR Description: hydrolase family [Arabidopsis thaliana]
  misc_feature (10)..(271): Homolog of NCBI NO: 15230077 NR Description: hydrolase, alpha/beta fold family [Arabidopsis
  misc_feature (14)..(266): Homolog of NCBI NO: 25518661 NR Description: hypothetical protein F12G12.19 - Arabidopsis
  misc_feature (14)..(266): Homolog of NCBI NO: 7485010 NR Description: host response protein homolog T5L19.30 -
  misc_feature (13)..(267): Homolog of NCBI NO: 15235844 NR Description: esterase/lipase/thioesterase family [Arabidopsis
  misc_feature (13)..(267): Homolog of NCBI NO: 15866583 NR Description: hypothetical protein [Capsella rubella]
  misc_feature (8)..(271): Homolog of NCBI NO: 15237165 NR Description: hydrolase, alpha/beta fold family [Arabidopsis
VLEKDLNMSEHHHFAFVHGAGHGGWCWYKLANSLRENGHKATCIDLKGAGINLTDPNTVSSLDDYNQPLYDFLSQLPLDQKVILVSHSVGGGSMTAAMCQYPSKVSMAVYVAAAMVKPGTIIPPILKEVLKICSGMIETEAEKIWDFTFGNGPENLPTSMMMKPEYVRDKYYNESPMEDYTLATTLLRPAPVMAFAGIVDIPAAPEADKIPRVYIKTGKDNMFQSSRQDLMVTLWPPAQYFLLEESDHSAFFSQPEALYKILLEAASSISP

SEQ ID NO: 109256 - protein, 264 aa, Zea mays subsp. mays
  misc_feature (1)..(264): Ceres Seq. ID no. 15179572
  misc_feature (35)..(257): Pfam Name: alpha/beta hydrolase fold Pfam Description: alpha/beta hydrolase fold
  misc_feature (7)..(259): Homolog of NCBI NO: 30681236 NR Description: hydrolase family [Arabidopsis thaliana]
  misc_feature (7)..(259): Homolog of NCBI NO: 7485010 NR Description: host response protein homolog T5L19.30 -
  misc_feature (3)..(264): Homolog of NCBI NO: 15230077 NR Description: hydrolase, alpha/beta fold family [Arabidopsis
  misc_feature (7)..(259): Homolog of NCBI NO: 25518661 NR Description: hypothetical protein F12G12.19 - Arabidopsis
  misc_feature (7)..(259): Homolog of NCBI NO: 21595837 NR Description: polyneuridine aldehyde esterase, putative
  misc_feature (7)..(259): Homolog of NCBI NO: 15218463 NR Description: hydrolase, alpha/beta fold family [Arabidopsis
  misc_feature (6)..(262): Homolog of NCBI NO: 15228391 NR Description: hydrolase, alpha/beta fold family [Arabidopsis
  misc_feature (6)..(260): Homolog of NCBI NO: 15235844 NR Description: esterase/lipase/thioesterase family [Arabidopsis
  misc_feature (6)..(260): Homolog of NCBI NO: 15866583 NR Description: hypothetical protein [Capsella rubella]
  misc_feature (1)..(264): Homolog of NCBI NO: 15237165 NR Description: hydrolase, alpha/beta fold family [Arabidopsis
MSEHHHFAFVHGAGHGGWCWYKLANSLRENGHKATCIDLKGAGINLTDPNTVSSLDDYNQPLYDFLSQLPLDQKVILVSHSVGGGSMTAAMCQYPSKVSMAVYVAAAMVKPGTIIPPILKEVLKICSGMIETEAEKIWDFTFGNGPENLPTSMMMKPEYVRDKYYNESPMEDYTLATTLLRPAPVMAFAGIVDIPAAPEADKIPRVYIKTGKDNMFQSSRQDLMVTLWPPAQYFLLEESDHSAFFSQPEALYKILLEAASSISP

SEQ ID NO: 109257 - protein, 178 aa, Zea mays subsp. mays
  misc_feature (1)..(178): Ceres Seq. ID no. 15179573
  misc_feature (1)..(171): Pfam Name: alpha/beta hydrolase fold Pfam Description: alpha/beta hydrolase fold
  misc_feature (1)..(173): Homolog of NCBI NO: 30681236 NR Description: hydrolase family [Arabidopsis thaliana]
  misc_feature (1)..(173): Homolog of NCBI NO: 7485010 NR Description: host response protein homolog T5L19.30 -
  misc_feature (1)..(178): Homolog of NCBI NO: 15230077 NR Description: hydrolase, alpha/beta fold family [Arabidopsis
  misc_feature (1)..(173): Homolog of NCBI NO: 25518661 NR Description: hypothetical protein F12G12.19 - Arabidopsis
  misc_feature (1)..(173): Homolog of NCBI NO: 21595837 NR Description: polyneuridine aldehyde esterase, putative
  misc_feature (1)..(173): Homolog of NCBI NO: 15218463 NR Description: hydrolase, alpha/beta fold family [Arabidopsis
  misc_feature (1)..(176): Homolog of NCBI NO: 15228391 NR Description: hydrolase, alpha/beta fold family [Arabidopsis
  misc_feature (1)..(174): Homolog of NCBI NO: 15235844 NR Description: esterase/lipase/thioesterase family [Arabidopsis
  misc_feature (1)..(174): Homolog of NCBI NO: 15866583 NR Description: hypothetical protein [Capsella rubella]
  misc_feature (1)..(178): Homolog of NCBI NO: 15237165 NR Description: hydrolase, alpha/beta fold family [Arabidopsis
MTAAMCQYPSKVSMAVYVAAAMVKPGTIIPPILKEVLKICSGMIETEAEKIWDFTFGNGPENLPTSMMMKPEYVRDKYYNESPMEDYTLATTLLRPAPVMAFAGIVDIPAAPEADKIPRVYIKTGKDNMFQSSRQDLMVTLWPPAQYFLLEESDHSAFFSQPEALYKILLEAASSISP

SEQ ID NO: 109258 - DNA, 1456 bp, Zea mays subsp. mays
  misc_feature (1)..(1456): Ceres Seq. ID no. 15179618
gcctctctcattaacgagtgctcttcgccactactctccgattcatataacctttatcttagatcgttgcataatgtcaaagactggctctctggatctcgcctccaaccttggtggaaacatcgataagtccgatgttctcaccgccgtcgaaaagtatgagcagtatcatgtcttccatggaggtgacgaggaagagcgaaaagccaattacactgacatggttaataagtactatgaccttgctactagcttttatgagtatggttggggagagtccttccactttgcacacagatggaagggcgaatcacttcgagagagtatcaaacgtcacgagcactttcttgctcttcagcttggcgttaaaccaggacaaaaggtactggatgtaggatgtggaattggtggaccactgagagaaattgcacgattcagcaattcatctgttactgggctcaacaataatgaataccagatcaccagaggcaaggaactaaaccgacttgcaggtgtcgacaagacatgtaactttgtcaaggctgacttcatgaagatgccattccctgaaaacacttttgatgcagtttatgctattgaggcaacctgccacgcacctgatgcatatggatgctacaaagagatattcagagtgctaaagcccggacaatgtttcgctgcctatgagtggtgcatgactgatgcatttgaccctgctaacgcccagcatcagaaaataaaggcagagatagagattggagatggtctccctgacattaggctgacttcaaaatgcctcgaagccctgaaacaggccggttttgaagtaagtatctgactacagatccctctctatttccaaacgtaaaacattttaactataattagtactattatcatcggctttggatataaggtgatatgggaaaaggatctggcggaggactcgccagtcccatggtacttacctctggacaaaaaccacttctcgctcagtagcttccgcctaacagctgttggacggttcataaccaaaaacatggtgaaggtccttgagtacataagacttgcacctaaaggaagccaaagggtgtcagattttctggagaaggccgcagaaggattagtcgacggtggaaggagggagattttcacgccaatgtatttcttcttggcccggaagccagagtgagcggatgagagatgctaagtgaagctgaccaaatttctcactttgctttttgtttgtttgttctagttcatgtccttttgttgcagtgtttttcgcatatcttttaatttcttaaaaaagaaaaccttgtcacaccaaacttgttctggatggttcttagtgtgtcacgtgccgctgcactctgttactgagtcacatgcacatgcgcatgcgcaaaagatctttgaatcccaatctctttcaattttagatctcagtaaactc

SEQ ID NO: 109259 - protein, 278 aa, Zea mays subsp. mays
  misc_feature (1)..(278): Ceres Seq. ID no. 15179619
  misc_feature (81)..(268): Pfam Name: ubiE/COQ5 methyltransferase family Pfam Description: ubiE/COQ5 methyltransferase family
  misc_feature (65)..(276): Homolog of NCBI NO: 40742208 NR Description: hypothetical protein AN7146.2 [Aspergillus
  misc_feature (49)..(278): Homolog of NCBI NO: 6323635 NR Description: ergosterol synthesis; Erg6p [Saccharomyces
  misc_feature (25)..(276): Homolog of NCBI NO: 34393309 NR Description: cycloartenol-C24-methyltransferase
  misc_feature (25)..(276): Homolog of NCBI NO: 3560474 NR Description: S-adenosyl-methionine-sterol-C- methyltransferase
  misc_feature (25)..(276): Homolog of NCBI NO: 7443715 NR Description: sterol 24-C-methyltransferase (EC 2.1.1.41) -
  misc_feature (25)..(276): Homolog of NCBI NO: 7443716 NR Description: sterol 24-C-methyltransferase (EC 2.1.1.41)
  misc_feature (25)..(276): Homolog of NCBI NO: 7443719 NR Description: sterol 24-C-methyltransferase (EC 2.1.1.41) -
  misc_feature (26)..(276): Homolog of NCBI NO: 7443720 NR Description: probable sterol 24-C-methyltransferase (EC
  misc_feature (31)..(276): Homolog of NCBI NO: 15240691 NR Description: 24-sterol C-methyltransferase [Arabidopsis
  misc_feature (31)..(276): Homolog of NCBI NO: 21434843 NR Description: cephalopod [Arabidopsis thaliana]
PLSLTSALRHYSPIHITFILDRCIMSKTGSLDLASNLGGNIDKSDVLTAVEKYEQYHVFHGGDEEERKANYTDMVNKYYDLATSFYEYGWGESFHFAHRWKGESLRESIKRHEHFLALQLGVKPGQKVLDVGCGIGGPLREIARFSNSSVTGLNNNEYQITRGKELNRLAGVDKTCNFVKADFMKMPFPENTFDAVYAIEATCHAPDAYGCYKEIFRVLKPGQCFAAYEWCMTDAFDPANAQHQKIKAEIEIGDGLPDIRLTSKCLEALKQAGFEVSI

SEQ ID NO: 109260 - protein, 254 aa, Zea mays subsp. mays
  misc_feature (1)..(254): Ceres Seq. ID no. 15179620
  misc_feature (57)..(244): Pfam Name: ubiE/COQ5 methyltransferase family Pfam Description: ubiE/COQ5 methyltransferase family
  misc_feature (41)..(252): Homolog of NCBI NO: 40742208 NR Description: hypothetical protein AN7146.2 [Aspergillus
  misc_feature (25)..(254): Homolog of NCBI NO: 6323635 NR Description: ergosterol synthesis; Erg6p [Saccharomyces
  misc_feature (1)..(252): Homolog of NCBI NO: 34393309 NR Description: cycloartenol-C24-methyltransferase
  misc_feature (1)..(252): Homolog of NCBI NO: 3560474 NR Description: S-adenosyl-methionine-sterol-C- methyltransferase
  misc_feature (1)..(252): Homolog of NCBI NO: 7443715 NR Description: sterol 24-C-methyltransferase (EC 2.1.1.41) -
  misc_feature (1)..(252): Homolog of NCBI NO: 7443716 NR Description: sterol 24-C-methyltransferase (EC 2.1.1.41)
  misc_feature (1)..(252): Homolog of NCBI NO: 7443719 NR Description: sterol 24-C-methyltransferase (EC 2.1.1.41) -
  misc_feature (2)..(252): Homolog of NCBI NO: 7443720 NR Description: probable sterol 24-C-methyltransferase (EC
  misc_feature (7)..(252): Homolog of NCBI NO: 15240691 NR Description: 24-sterol C-methyltransferase [Arabidopsis
  misc_feature (7)..(252): Homolog of NCBI NO: 21434843 NR Description: cephalopod [Arabidopsis thaliana]
MSKTGSLDLASNLGGNIDKSDVLTAVEKYEQYHVFHGGDEEERKANYTDMVNKYYDLATSFYEYGWGESFHFAHRWKGESLRESIKRHEHFLALQLGVKPGQKVLDVGCGIGGPLREIARFSNSSVTGLNNNEYQITRGKELNRLAGVDKTCNFVKADFMKMPFPENTFDAVYAIEATCHAPDAYGCYKEIFRVLKPGQCFAAYEWCMTDAFDPANAQHQKIKAEIEIGDGLPDIRLTSKCLEALKQAGFEVSI

SEQ ID NO: 109261 - protein, 205 aa, Zea mays subsp. mays
  misc_feature (1)..(205): Ceres Seq. ID no. 15179621
  misc_feature (8)..(195): Pfam Name: ubiE/COQ5 methyltransferase family Pfam Description: ubiE/COQ5 methyltransferase family
  misc_feature (1)..(203): Homolog of NCBI NO: 40742208 NR Description: hypothetical protein AN7146.2 [Aspergillus
  misc_feature (1)..(205): Homolog of NCBI NO: 6323635 NR Description: ergosterol synthesis; Erg6p [Saccharomyces
  misc_feature (1)..(203): Homolog of NCBI NO: 34393309 NR Description: cycloartenol-C24-methyltransferase
  misc_feature (1)..(203): Homolog of NCBI NO: 3560474 NR Description: S-adenosyl-methionine-sterol-C- methyltransferase
  misc_feature (1)..(203): Homolog of NCBI NO: 7443715 NR Description: sterol 24-C-methyltransferase (EC 2.1.1.41) -
  misc_feature (1)..(203): Homolog of NCBI NO: 7443716 NR Description: sterol 24-C-methyltransferase (EC 2.1.1.41)
  misc_feature (1)..(203): Homolog of NCBI NO: 7443719 NR Description: sterol 24-C-methyltransferase (EC 2.1.1.41) -
  misc_feature (1)..(203): Homolog of NCBI NO: 7443720 NR Description: probable sterol 24-C-methyltransferase (EC
  misc_feature (1)..(203): Homolog of NCBI NO: 15240691 NR Description: 24-sterol C-methyltransferase [Arabidopsis
  misc_feature (1)..(203): Homolog of NCBI NO: 21434843 NR Description: cephalopod [Arabidopsis thaliana]
MVNKYYDLATSFYEYGWGESFHFAHRWKGESLRESIKRHEHFLALQLGVKPGQKVLDVGCGIGGPLREIARFSNSSVTGLNNNEYQITRGKELNRLAGVDKTCNFVKADFMKMPFPENTFDAVYAIEATCHAPDAYGCYKEIFRVLKPGQCFAAYEWCMTDAFDPANAQHQKIKAEIEIGDGLPDIRLTSKCLEALKQAGFEVSI

SEQ ID NO: 109262 - DNA, 918 bp, Zea mays subsp. mays
  misc_feature (1)..(918): Ceres Seq. ID no. 15175175
aatcctttctcgtgtcctttcttcctcctctctctctagaaaattctcaatgaacatactgaacaggttcggtttaggatcaggcgggcaaaggagtacggatccgtctccgatcgctcaaggacccgacgacgactctccggcgccgggaaaccactttgcccaattcgccgccggatgcttctggggcgtggagctggcgtttcagaggctcccgggggtgactcagacagaggttggatacacacaagggatcacccacaatccttcgtacgaggacgtctgttccgaaaccacgggacacgccgaggtcgtcagggttcagtacgatcccaaagactgcacctttgagtctctccttgacttgttctggtccaggcatgatcccaccaccttgaatcgccaggggaatgatgtgggaacccgataccgatctgggatctacttctacacaccagagcaggagaaactagcgcgggagtcactagaacgccaccagcagaaaatggagaggaagatcatgactgagatcttacctgctaagaaattctacagagccgaggagcagcagcaacagtatctgtccaagagtggaaggtacggcatggggcagtcctgtgccaaaggctgcaccgacccaatccgctgctacggctaaaaacctgagctcctcgggttctgaggatgttatgaacttttgtgtaaaagctatgtaacgcataatttaccgtttgtacgattattttcttgatgtttctcaaattattgaatgaataagagaatcttatggacaaaagaaagagtccaatggatatagccatgggctaaatggtaggacacttggtttcttattgtcaaattgtgcatggttgtatacatcttgtaagaccatttgtaatgtatttagctgttttctct

SEQ ID NO: 109263 - protein, 218 aa, Zea mays subsp. mays
  misc_feature (1)..(218): Ceres Seq. ID no. 15175176
  misc_feature (53)..(205): Pfam Name: Peptide methionine sulfoxide reductase Pfam Description: Peptide methionine sulfoxide reductase
  misc_feature (18)..(218): Homolog of NCBI NO: 1709690 NR Description: Peptide methionine sulfoxide reductase
  misc_feature (18)..(218): Homolog of NCBI NO: 15234942 NR Description: protein-methionine-S-oxide reductase [Arabidopsis
  misc_feature (35)..(218): Homolog of NCBI NO: 15240795 NR Description: peptide methionine sulfoxide reductase-related
  misc_feature (18)..(218): Homolog of NCBI NO: 21593143 NR Description: protein-methionine-S-oxide reductase [Arabidopsis
  misc_feature (6)..(218): Homolog of NCBI NO: 12230349 NR Description: Peptide methionine sulfoxide reductase
  misc_feature (34)..(218): Homolog of NCBI NO: 26451744 NR Description: putative peptide methionine sulfoxide reductase
  misc_feature (17)..(218): Homolog of NCBI NO: 18424492 NR Description: peptide methionine sulfoxide reductase - like
  misc_feature (17)..(218): Homolog of NCBI NO: 25308493 NR Description: protein-methionine-S-oxide reductase (EC 1.8.4.6)
  misc_feature (17)..(218): Homolog of NCBI NO: 15240796 NR Description: peptide methionine sulfoxide reductase (msr)
  misc_feature (17)..(218): Homolog of NCBI NO: 21592658 NR Description: peptide methionine sulfoxide reductase (msr)
ILSRVLSSSSLSRKFSMNILNRFGLGSGGQRSTDPSPIAQGPDDDSPAPGNHFAQFAAGCFWGVELAFQRLPGVTQTEVGYTQGITHNPSYEDVCSETTGHAEVVRVQYDPKDCTFESLLDLFWSRHDPTTLNRQGNDVGTRYRSGIYFYTPEQEKLARESLERHQQKMERKIMTEILPAKKFYRAEEQQQQYLSKSGRYGMGQSCAKGCTDPIRCYG

SEQ ID NO: 109264 - protein, 202 aa, Zea mays subsp. mays
  misc_feature (1)..(202): Ceres Seq. ID no. 15175177
  misc_feature (37)..(189): Pfam Name: Peptide methionine sulfoxide reductase Pfam Description: Peptide methionine sulfoxide reductase
  misc_feature (19)..(202): Homolog of NCBI NO: 15240795 NR Description: peptide methionine sulfoxide reductase-related
  misc_feature (2)..(202): Homolog of NCBI NO: 21593143 NR Description: protein-methionine-S-oxide reductase [Arabidopsis
  misc_feature (1)..(202): Homolog of NCBI NO: 12230349 NR Description: Peptide methionine sulfoxide reductase
  misc_feature (18)..(202): Homolog of NCBI NO: 26451744 NR Description: putative peptide methionine sulfoxide reductase
  misc_feature (2)..(202): Homolog of NCBI NO: 1709690 NR Description: Peptide methionine sulfoxide reductase
  misc_feature (2)..(202): Homolog of NCBI NO: 15234942 NR Description: protein-methionine-S-oxide reductase [Arabidopsis
  misc_feature (1)..(202): Homolog of NCBI NO: 18424492 NR Description: peptide methionine sulfoxide reductase - like
  misc_feature (1)..(202): Homolog of NCBI NO: 25308493 NR Description: protein-methionine-S-oxide reductase (EC 1.8.4.6)
  misc_feature (1)..(202): Homolog of NCBI NO: 15240796 NR Description: peptide methionine sulfoxide reductase (msr)
  misc_feature (1)..(202): Homolog of NCBI NO: 21592658 NR Description: peptide methionine sulfoxide reductase (msr)
MNILNRFGLGSGGQRSTDPSPIAQGPDDDSPAPGNHFAQFAAGCFWGVELAFQRLPGVTQTEVGYTQGITHNPSYEDVCSETTGHAEVVRVQYDPKDCTFESLLDLFWSRHDPTTLNRQGNDVGTRYRSGIYFYTPEQEKLARESLERHQQKMERKIMTEILPAKKFYRAEEQQQQYLSKSGRYGMGQSCAKGCTDPIRCYG

SEQ ID NO: 109265 - DNA, 615 bp, Zea mays subsp. mays
  misc_feature (1)..(615): Ceres Seq. ID no. 15174151
aaaagttgggagaagaatcgaagatgggagattcgaggtcatttgcggatggattcaaggggttctgggaggagaggttgtcgttcctggagaattacacgaggttcaccaaacgcgatgcgcctcttccttcttggtcttcctccgacgtcgaggagtttatagcttccgatcccgttcatggacccaccctgaaaacagctagggaagctgcgacttatggtgttgctggagctgcacttggagctctatctaccgccgcttttgcctggaaatactctaggagtccgcatggtgctgcattgtccttcttaggaggaggtgtttttggttggacctttgggcaagaagtggcgaaccacagcttgcaactctataagctggacacaatggcggctcaaattaagttcatggaatggtgggagcgcaagactcagtgaaggggtcttgaatccagaataacaaagacgcgtgctatcttgcaaacagcttgaaatgcaataaatagtttaaatccatttccaaactttatcttttcaagctttttattacgttctcaatcttggaacatgtttgttttcctttgtctcaataatacaacatgccccagagtgt

SEQ ID NO: 109266 - protein, 145 aa, Zea mays subsp. mays
  misc_feature (1)..(145): Ceres Seq. ID no. 15174152
  misc_feature (8)..(145): Homolog of NCBI NO: 18390902 NR Description: expressed protein [Arabidopsis thaliana]
KLGEESKMGDSRSFADGFKGFWEERLSFLENYTRFTKRDAPLPSWSSSDVEEFIASDPVHGPTLKTAREAATYGVAGAALGALSTAAFAWKYSRSPHGAALSFLGGGVFGWTFGQEVANHSLQLYKLDTMAAQIKFMEWWERKTQ

SEQ ID NO: 109267 - protein, 138 aa, Zea mays subsp. mays
  misc_feature (1)..(138): Ceres Seq. ID no. 15174153
  misc_feature (1)..(138): Homolog of NCBI NO: 18390902 NR Description: expressed protein [Arabidopsis thaliana]
MGDSRSFADGFKGFWEERLSFLENYTRFTKRDAPLPSWSSSDVEEFIASDPVHGPTLKTAREAATYGVAGAALGALSTAAFAWKYSRSPHGAALSFLGGGVFGWTFGQEVANHSLQLYKLDTMAAQIKFMEWWERKTQ

SEQ ID NO: 109268 - DNA, 1541 bp, Zea mays subsp. mays
  misc_feature (1)..(1541): Ceres Seq. ID no. 15179578
agaactttcgggttgcgtgtccttatttataaatggttttcaactttttactcaccagagattttgattaatactttgagaaattcgaatgctctgttttgttttctcgggaaaattatcagagtgagataaagatcagaggaaagatgagagccggcgcgagtggaaacaacgtttcggagactataaacgcagccgctagtgcgtttgcttcctctgatgatcgtgttcatcaccaaccttctccgattcataagaagcgaagatggtgggatcgcttcatatgtttcagaccttcaacacaaagaagaaaacgaatagggaaagccgctcttgctcctgaaccggttcataccgattccacatccaattccggttatcgttcggttatgacggctcttcctttcatagctccaccttcatctcctgcttccttcttccaatcagaacctccttccgctacgcagtcgcctgtagggatcctctcctttagtcctctaccttctaacaacaacaacaacaacaacaacaacgagcgtccttcgatattcgccatcggaccttacgctcacgagcctcagctggtgtctcctccggttttctctacttacaccaccgaaccatcttccgctccggttacgccgcctctcgatgagtctttctacttaaccaccactactccttcttcgcctgaagtccctttcgctcagctctttaactccaacactaactatggtctcaggtctccagtgtctaactatgagtttcagttttaccaacttcctcctggtagtccactcgctcagcttatctcgcccagctcggttatgtccggttcgggtccagcttctccttttcctgacggagtcactcacttccaagtctctgatccaccaaagctgttgagccctggtaagctgcatttctccaaggctgttacgactcctaaagagcagaagaagattgcgagaccgaataaaccggtttcttttgatcttgatgcggatcatttcattagatgtgtagatcagaagctaagaacaacgttccctgaagcatctgcgtcgtctcatcaagaagcagcgcagtattcctctctcgggccgaataaggagttcgattttggtacggatgagaaacatttgagcgttgatgatgatgaacatagcgcttcgaccaagaacaacaacgattggtccttccctgtgatgcaatcaggtgcacttagctgacttctagttatatagattctgaatttcgaaatcgatttggacataagccagcacacaaagatcttgttcaagattcaagaacgaaaacgaaaacgagttagtgatcttattacccttgtttttaacagaagtatgatgttcttacatagaagcctttagatgattatgttcaggatcttatggatagtttctcgtctctctttttggttttgtaataaatagttgacgttgtcagttgttgtatttggctgtctttatgtagatttttttttttcaatttgtgcatataatatatttgatcgcatttat

SEQ ID NO: 109269 - protein, 361 aa, Zea mays subsp. mays
  misc_feature (1)..(361): Ceres Seq. ID no. 15179579
  misc_feature (15)..(239): Homolog of NCBI NO: 34894046 NR Description: P0436E04.7 [Oryza sativa (japonica
  misc_feature (37)..(287): Homolog of NCBI NO: 15223134 NR Description: expressed protein [Arabidopsis thaliana]
  misc_feature (37)..(261): Homolog of NCBI NO: 7486810 NR Description: hypothetical protein M7J2.10 - Arabidopsis
  misc_feature (6)..(261): Homolog of NCBI NO: 30686949 NR Description: proline-rich protein family [Arabidopsis
  misc_feature (8)..(261): Homolog of NCBI NO: 15237154 NR Description: expressed protein [Arabidopsis thaliana]
  misc_feature (72)..(361): Homolog of NCBI NO: 25404436 NR Description: hypothetical protein F24D7.9 [imported] -
  misc_feature (1)..(361): Homolog of NCBI NO: 18407879 NR Description: expressed protein [Arabidopsis thaliana]
MRAGASGNNVSETINAAASAFASSDDRVHHQPSPIHKKRRWWDRFICFRPSTQRRKRIGKAALAPEPVHTDSTSNSGYRSVMTALPFIAPPSSPASFFQSEPPSATQSPVGILSFSPLPSNNNNNNNNNERPSIFAIGPYAHEPQLVSPPVFSTYTTEPSSAPVTPPLDESFYLTTTTPSSPEVPFAQLFNSNTNYGLRSPVSNYEFQFYQLPPGSPLAQLISPSSVMSGSGPASPFPDGVTHFQVSDPPKLLSPGKLHFSKAVTTPKEQKKIARPNKPVSFDLDADHFIRCVDQKLRTTFPEASASSHQEAAQYSSLGPNKEFDFGTDEKHLSVDDDEHSASTKNNNDWSFPVMQSGALS

SEQ ID NO: 109270 - protein, 280 aa, Zea mays subsp. mays
  misc_feature (1)..(280): Ceres Seq. ID no. 15179580
  misc_feature (1)..(158): Homolog of NCBI NO: 34894046 NR Description: P0436E04.7 [Oryza sativa (japonica
  misc_feature (1)..(206): Homolog of NCBI NO: 15223134 NR Description: expressed protein [Arabidopsis thaliana]
  misc_feature (1)..(180): Homolog of NCBI NO: 7486810 NR Description: hypothetical protein M7J2.10 - Arabidopsis
  misc_feature (1)..(180): Homolog of NCBI NO: 30686949 NR Description: proline-rich protein family [Arabidopsis
  misc_feature (1)..(180): Homolog of NCBI NO: 15237154 NR Description: expressed protein [Arabidopsis thaliana]
  misc_feature (1)..(280): Homolog of NCBI NO: 25404436 NR Description: hypothetical protein F24D7.9 [imported] -
  misc_feature (1)..(280): Homolog of NCBI NO: 18407879 NR Description: expressed protein [Arabidopsis thaliana]
MTALPFIAPPSSPASFFQSEPPSATQSPVGILSFSPLPSNNNNNNNNNERPSIFAIGPYAHEPQLVSPPVFSTYTTEPSSAPVTPPLDESFYLTTTTPSSPEVPFAQLFNSNTNYGLRSPVSNYEFQFYQLPPGSPLAQLISPSSVMSGSGPASPFPDGVTHFQVSDPPKLLSPGKLHFSKAVTTPKEQKKIARPNKPVSFDLDADHFIRCVDQKLRTTFPEASASSHQEAAQYSSLGPNKEFDFGTDEKHLSVDDDEHSASTKNNNDWSFPVMQSGALS

SEQ ID NO: 109271 - DNA, 791 bp, Zea mays subsp. mays
  misc_feature (1)..(791): Ceres Seq. ID no. 14309426
gttccttcccatgctagctaagtaacaccaataacatttatttactaaagcttatattacaaagagagaaatgaagaaagctacggcattgatgaaacatgtcgttgcattgttgagttccgcagcaaaggcgaaatctatagccataaagaataaaacaagtgctttcaagacaagactcctcatgttgtcccttgtgaaacatgagaagctcgggttccgttcaatttccaacaagatccacaacctcctagggcattcagatcaagagcaagactacgaccatgaacaagacaatagcaaggctataatcctctacaacaacggggaagtggctcactgtgagagttatgacgtacaaggcgaggaatgtgacaagtatcctgatctgaggcacacgttgttcgaaggtgaggaggattttggggacttggaggaaggccaaggaagttctgtcatagatatggtgaggaactcgaagaaagaagaaggagagagtttcaagctagaagatgagatcgaccatgttgcggatctcttcatttcaaggtttcataagcagatgaagcttcagaaactcttgtcctttaagaggtatcaagaaatgctagcccgaggcacataaaatcacacacctatatatatttatacacgttggcatagatatgaagaatagattcatattacgatttgtgctaacgttcatattttgtgttgtcaatcataaatccttccagcctctcatttttaggataaaatatcatgatctatttaatatgatttcagttatt

SEQ ID NO: 109272 - protein, 184 aa, Zea mays subsp. mays
  misc_feature (1)..(184): Ceres Seq. ID no. 14309427
  misc_feature (8)..(165): Homolog of NCBI NO: 30060391 NR Description: P0666G10.9 [Oryza sativa (japonica
  misc_feature (1)..(174): Homolog of NCBI NO: 15215582 NR Description: AT5g13880/MAC12_16 [Arabidopsis thaliana]
  misc_feature (1)..(174): Homolog of NCBI NO: 18417222 NR Description: expressed protein [Arabidopsis thaliana]
  misc_feature (1)..(174): Homolog of NCBI NO: 10177654 NR Description: gene_id:MAC12.16~unknown protein [Arabidopsis
  misc_feature (3)..(182): Homolog of NCBI NO: 38346641 NR Description: OSJNBa0072D21.11 [Oryza sativa (japonica
  misc_feature (1)..(184): Homolog of NCBI NO: 15238843 NR Description: expressed protein [Arabidopsis thaliana]
MKKATALMKHVVALLSSAAKAKSIAIKNKTSAFKTRLLMLSLVKHEKLGFRSISNKIHNLLGHSDQEQDYDHEQDNSKAIILYNNGEVAHCESYDVQGEECDKYPDLRHTLFEGEEDFGDLEEGQGSSVIDMVRNSKKEEGESFKLEDEIDHVADLFISRFHKQMKLQKLLSFKRYQEMLARGT

SEQ ID NO: 109273 - protein, 177 aa, Zea mays subsp. mays
  misc_feature (1)..(177): Ceres Seq. ID no. 14309428
  misc_feature (1)..(158): Homolog of NCBI NO: 30060391 NR Description: P0666G10.9 [Oryza sativa (japonica
  misc_feature (1)..(167): Homolog of NCBI NO: 15215582 NR Description: AT5g13880/MAC12_16 [Arabidopsis thaliana]
  misc_feature (1)..(167): Homolog of NCBI NO: 18417222 NR Description: expressed protein [Arabidopsis thaliana]
  misc_feature (1)..(167): Homolog of NCBI NO: 10177654 NR Description: gene_id:MAC12.16~unknown protein [Arabidopsis
  misc_feature (1)..(175): Homolog of NCBI NO: 38346641 NR Description: OSJNBa0072D21.11 [Oryza sativa (japonica
  misc_feature (1)..(177): Homolog of NCBI NO: 15238843 NR Description: expressed protein [Arabidopsis thaliana]
MKHVVALLSSAAKAKSIAIKNKTSAFKTRLLMLSLVKHEKLGFRSISNKIHNLLGHSDQEQDYDHEQDNSKAIILYNNGEVAHCESYDVQGEECDKYPDLRHTLFEGEEDFGDLEEGQGSSVIDMVRNSKKEEGESFKLEDEIDHVADLFISRFHKQMKLQKLLSFKRYQEMLARGT

SEQ ID NO: 109274 - protein, 146 aa, Zea mays subsp. mays
  misc_feature (1)..(146): Ceres Seq. ID no. 14309429
  misc_feature (1)..(127): Homolog of NCBI NO: 30060391 NR Description: P0666G10.9 [Oryza sativa (japonica
  misc_feature (1)..(136): Homolog of NCBI NO: 15215582 NR Description: AT5g13880/MAC12_16 [Arabidopsis thaliana]
  misc_feature (1)..(136): Homolog of NCBI NO: 18417222 NR Description: expressed protein [Arabidopsis thaliana]
  misc_feature (1)..(136): Homolog of NCBI NO: 10177654 NR Description: gene_id:MAC12.16~unknown protein [Arabidopsis
  misc_feature (1)..(144): Homolog of NCBI NO: 38346641 NR Description: OSJNBa0072D21.11 [Oryza sativa (japonica
  misc_feature (1)..(146): Homolog of NCBI NO: 15238843 NR Description: expressed protein [Arabidopsis thaliana]
MLSLVKHEKLGFRSISNKIHNLLGHSDQEQDYDHEQDNSKAIILYNNGEVAHCESYDVQGEECDKYPDLRHTLFEGEEDFGDLEEGQGSSVIDMVRNSKKEEGESFKLEDEIDHVADLFISRFHKQMKLQKLLSFKRYQEMLARGT

SEQ ID NO: 109275 - DNA, 1085 bp, Zea mays subsp. mays
  misc_feature (1)..(1085): Ceres Seq. ID no. 15175178
agaactctctttctctcacaaagacactcgtctcaaaggatctctgaaacctaaaaaaacaagttggatctgagctatatttcttaaaagattcttctctcacgactaaaaaaatcaacacagtcatgtcggttttacttcctctgtgtctggttctctccatgattacctattcaaatgctgcgtattgtgtatgcaaagacgggaacgagcaagtgcttcagaaagccatagattatgcatgtggagcaggagctgactgctctcagatccagcagaacggagcttgtttccagcctaacaccgtcaaaaaccactgcgacgtcgccgtcaacagttactaccagaagaaagcttcctccggtgccacctgtgactttaacggcgccgccgttatctctacctcccctccgtcaactgcttcaagctgtttaactggttccagctctagtgggaccccgtccactgggactcccaccacaggaaccccaagcactggaacaccaaccacaggaaccccaagcactgggacaccaaccacggggactccaaccagtggcttcccatccaccgggactccgtcgaccgggacacctactgccggaatgccaaccacggggactccttccactggcatgccaaattccggcacgccagcaaacggaatgccaacttcgtcttcatcttccgtgttccctggcactactcttggaccgaccgggagcgggggattcggcgatccgaacgctggagagaagatctcagtccgaactaacactgccttcttctttctaaccggtgtagctattatgcttgtggtttaaaaaacagtcacggttgggctgagattttgccaacggcttatgggggttgcgcaaatcggatagagctgctatatctctttttttttcgttcacttttgtcttttgtagggttcgaactggggtttactattaggtttggccgagagacatcatgcaagtagctagctagtaatatttcttttattttgtaaattcggaggatgagatgcccttttgtttctttgaatcgtttatcttttagtacgtaccatcattctctcc

SEQ ID NO: 109276 - protein, 232 aa, Zea mays subsp. mays
  misc_feature (1)..(232): Ceres Seq. ID no. 15175179
  misc_feature (77)..(200): Pfam Name: Equine herpesvirus glycoprotein gp2 Pfam Description: Equine herpesvirus glycoprotein gp2
  misc_feature (1)..(153): Homolog of NCBI NO: 22325443 NR Description: glycosyl hydrolase family 17 [Arabidopsis
  misc_feature (1)..(190): Homolog of NCBI NO: 30697478 NR Description: glycosyl hydrolase family 17 [Arabidopsis
  misc_feature (16)..(190): Homolog of NCBI NO: 8778409 NR Description: F16A14.5 [Arabidopsis thaliana]
  misc_feature (1)..(175): Homolog of NCBI NO: 22775658 NR Description: glycosyl hydrolase family 17-like protein
  misc_feature (1)..(160): Homolog of NCBI NO: 18394637 NR Description: glycosyl hydrolase family 17 [Arabidopsis
  misc_feature (1)..(190): Homolog of NCBI NO: 30683485 NR Description: expressed protein [Arabidopsis thaliana]
  misc_feature (1)..(175): Homolog of NCBI NO: 15222715 NR Description: glycosyl hydrolase family 17 [Arabidopsis
  misc_feature (1)..(215): Homolog of NCBI NO: 25404810 NR Description: unknown protein, 45065-49536 [imported] -
  misc_feature (1)..(232): Homolog of NCBI NO: 21553768 NR Description: unknown [Arabidopsis thaliana]
  misc_feature (1)..(232): Homolog of NCBI NO: 18409239 NR Description: expressed protein [Arabidopsis thaliana]
MSVLLPLCLVLSMITYSNAAYCVCKDGNEQVLQKAIDYACGAGADCSQIQQNGACFQPNTVKNHCDVAVNSYYQKKASSGATCDFNGAAVISTSPPSTASSCLTGSSSSGTPSTGTPTTGTPSTGTPTTGTPSTGTPTTGTPTSGFPSTGTPSTGTPTAGMPTTGTPSTGMPNSGTPANGMPTSSSSSVFPGTTLGPTGSGGFGDPNAGEKISVRTNTAFFFLTGVAIMLVV

SEQ ID NO: 109277 - protein, 220 aa, Zea mays subsp. mays
  misc_feature (1)..(220): Ceres Seq. ID no. 15175180
  misc_feature (65)..(188): Pfam Name: Equine herpesvirus glycoprotein gp2 Pfam Description: Equine herpesvirus glycoprotein gp2
  misc_feature (1)..(141): Homolog of NCBI NO: 22325443 NR Description: glycosyl hydrolase family 17 [Arabidopsis
  misc_feature (1)..(178): Homolog of NCBI NO: 30697478 NR Description: glycosyl hydrolase family 17 [Arabidopsis
  misc_feature (4)..(178): Homolog of NCBI NO: 8778409 NR Description: F16A14.5 [Arabidopsis thaliana]
  misc_feature (1)..(163): Homolog of NCBI NO: 22775658 NR Description: glycosyl hydrolase family 17-like protein
  misc_feature (1)..(148): Homolog of NCBI NO: 18394637 NR Description: glycosyl hydrolase family 17 [Arabidopsis
  misc_feature (1)..(178): Homolog of NCBI NO: 30683485 NR Description: expressed protein [Arabidopsis thaliana]
  misc_feature (1)..(163): Homolog of NCBI NO: 15222715 NR Description: glycosyl hydrolase family 17 [Arabidopsis
  misc_feature (1)..(203): Homolog of NCBI NO: 25404810 NR Description: unknown protein, 45065-49536 [imported] -
  misc_feature (1)..(220): Homolog of NCBI NO: 21553768 NR Description: unknown [Arabidopsis thaliana]
  misc_feature (1)..(220): Homolog of NCBI NO: 18409239 NR Description: expressed protein [Arabidopsis thaliana]
MITYSNAAYCVCKDGNEQVLQKAIDYACGAGADCSQIQQNGACFQPNTVKNHCDVAVNSYYQKKASSGATCDFNGAAVISTSPPSTASSCLTGSSSSGTPSTGTPTTGTPSTGTPTTGTPSTGTPTTGTPTSGFPSTGTPSTGTPTAGMPTTGTPSTGMPNSGTPANGMPTSSSSSVFPGTTLGPTGSGGFGDPNAGEKISVRTNTAFFFLTGVAIMLVV

SEQ ID NO: 109278 - DNA, 925 bp, Zea mays subsp. mays
  misc_feature (1)..(925): Ceres Seq. ID no. 14309404
accttaccaagactgagctctcaatggcggccttctcgatgactctgtcaaatccgaaggctttctcagctgctccacgaagactttctccgatcaacgcctccgctccctcttccaccactttccgattgaacaccaaatctaccgtcaacttcatcaagtttccgtctttaaccgcatcatctctcctcctccatacatcttccaccaagagaaaccgccgcagctgcttatcggttcaatccagtgctgagcctttagcggagccacaatcgaagataacgcataaggtgtatttcgatataagtgttgggaacccagttgggaaattggctgggaggattgttattggtttgtttggtgatgatgttccccaaactgttgagaacttccgtgctctttgcacaggtgagaaggggtttggctacaagggctcaacattccaccgtgtcatccgagatttcatgattcagggtggagactttgacaagggcaatggaactggaggtaaaagtgtatatggtcggacatttaaggatgagaatttcaatttatcccatgtcggacccggagttgtgagtatggcaaatgctggccctaatacaaatggaagtcagttcttcatctgcactgttaagacttcatggttggacgggaggcatgtggtgttcgggcaagttatagaaggaatggatgtcgtgaggctgatagaggaacaagagacagatagaggagaccgtcccagaaagaaagtggtcattgcagactgtggtcaacttccaatgtctgaagcttaagtaacaacatccaaaaccccaaaaccttgtgacaatgagattgagttgtattatgcgtttgcaatttttacacgctttcttttgtgaaatggatacaagtccctttataataatatcaatttcagttc

SEQ ID NO: 109279 - protein, 264 aa, Zea mays subsp. mays
  misc_feature (1)..(264): Ceres Seq. ID no. 14309405
  misc_feature (88)..(261): Homolog of NCBI NO: 34902534 NR Description: putative peptidyl-prolyl cis-trans isomerase,
  misc_feature (67)..(261): Homolog of NCBI NO: 11762200 NR Description: AT3g62030 [Arabidopsis thaliana]
  misc_feature (67)..(261): Homolog of NCBI NO: 15228674 NR Description: peptidylprolyl isomerase ROC4 [Arabidopsis
  misc_feature (67)..(261): Homolog of NCBI NO: 21555831 NR Description: peptidylprolyl isomerase ROC4 [Arabidopsis
  misc_feature (90)..(234): Homolog of NCBI NO: 9945069 NR Description: similar to Arabidopsis thaliana Peptidyl-prolyl
  misc_feature (68)..(261): Homolog of NCBI NO: 37788308 NR Description: cyclophilin-like protein [Triticum aestivum]
  misc_feature (12)..(261): Homolog of NCBI NO: 37788312 NR Description: cyclophilin-like protein [Triticum aestivum]
  misc_feature (8)..(264): Homolog of NCBI NO: 9955556 NR Description: peptidylprolyl isomerase-like protein
  misc_feature (8)..(264): Homolog of NCBI NO: 15240008 NR Description: peptidyl-prolyl isomerase protein [Arabidopsis
  misc_feature (8)..(264): Homolog of NCBI NO: 21593963 NR Description: peptidylprolyl isomerase-like protein
LTKTELSMAAFSMTLSNPKAFSAAPRRLSPINASAPSSTTFRLNTKSTVNFIKFPSLTASSLLLHTSSTKRNRRSCLSVQSSAEPLAEPQSKITHKVYFDISVGNPVGKLAGRIVIGLFGDDVPQTVENFRALCTGEKGFGYKGSTFHRVIRDFMIQGGDFDKGNGTGGKSVYGRTFKDENFNLSHVGPGVVSMANAGPNTNGSQFFICTVKTSWLDGRHVVFGQVIEGMDVVRLIEEQETDRGDRPRKKVVIADCGQLPMSEA

SEQ ID NO: 109280 - protein, 257 aa, Zea mays subsp. mays
  misc_feature (1)..(257): Ceres Seq. ID no. 14309406
  misc_feature (81)..(254): Homolog of NCBI NO: 34902534 NR Description: putative peptidyl-prolyl cis-trans isomerase,
  misc_feature (60)..(254): Homolog of NCBI NO: 11762200 NR Description: AT3g62030 [Arabidopsis thaliana]
  misc_feature (60)..(254): Homolog of NCBI NO: 15228674 NR Description: peptidylprolyl isomerase ROC4 [Arabidopsis
  misc_feature (60)..(254): Homolog of NCBI NO: 21555831 NR Description: peptidylprolyl isomerase ROC4 [Arabidopsis
  misc_feature (83)..(227): Homolog of NCBI NO: 9945069 NR Description: similar to Arabidopsis thaliana Peptidyl-prolyl
  misc_feature (61)..(254): Homolog of NCBI NO: 37788308 NR Description: cyclophilin-like protein [Triticum aestivum]
  misc_feature (5)..(254): Homolog of NCBI NO: 37788312 NR Description: cyclophilin-like protein [Triticum aestivum]
  misc_feature (1)..(257): Homolog of NCBI NO: 9955556 NR Description: peptidylprolyl isomerase-like protein
  misc_feature (1)..(257): Homolog of NCBI NO: 15240008 NR Description: peptidyl-prolyl isomerase protein [Arabidopsis
  misc_feature (1)..(257): Homolog of NCBI NO: 21593963 NR Description: peptidylprolyl isomerase-like protein
MAAFSMTLSNPKAFSAAPRRLSPINASAPSSTTFRLNTKSTVNFIKFPSLTASSLLLHTSSTKRNRRSCLSVQSSAEPLAEPQSKITHKVYFDISVGNPVGKLAGRIVIGLFGDDVPQTVENFRALCTGEKGFGYKGSTFHRVIRDFMIQGGDFDKGNGTGGKSVYGRTFKDENFNLSHVGPGVVSMANAGPNTNGSQFFICTVKTSWLDGRHVVFGQVIEGMDVVRLIEEQETDRGDRPRKKVVIADCGQLPMSEA

SEQ ID NO: 109281 - protein, 252 aa, Zea mays subsp. mays
  misc_feature (1)..(252): Ceres Seq. ID no. 14309407
  misc_feature (55)..(249): Homolog of NCBI NO: 11762200 NR Description: AT3g62030 [Arabidopsis thaliana]
  misc_feature (55)..(249): Homolog of NCBI NO: 15228674 NR Description: peptidylprolyl isomerase ROC4 [Arabidopsis
  misc_feature (55)..(249): Homolog of NCBI NO: 21555831 NR Description: peptidylprolyl isomerase ROC4 [Arabidopsis
  misc_feature (78)..(222): Homolog of NCBI NO: 9945069 NR Description: similar to Arabidopsis thaliana Peptidyl-prolyl
  misc_feature (56)..(249): Homolog of NCBI NO: 37788308 NR Description: cyclophilin-like protein [Triticum aestivum]
  misc_feature (1)..(249): Homolog of NCBI NO: 37788312 NR Description: cyclophilin-like protein [Triticum aestivum]
  misc_feature (1)..(252): Homolog of NCBI NO: 9955556 NR Description: peptidylprolyl isomerase-like protein
  misc_feature (1)..(252): Homolog of NCBI NO: 15240008 NR Description: peptidyl-prolyl isomerase protein [Arabidopsis
  misc_feature (1)..(252): Homolog of NCBI NO: 21593963 NR Description: peptidylprolyl isomerase-like protein
  misc_feature (76)..(249): Homolog of NCBI NO: 34902534 NR Description: putative peptidyl-prolyl cis-trans isomerase,
MTLSNPKAFSAAPRRLSPINASAPSSTTFRLNTKSTVNFIKFPSLTASSLLLHTSSTKRNRRSCLSVQSSAEPLAEPQSKITHKVYFDISVGNPVGKLAGRIVIGLFGDDVPQTVENFRALCTGEKGFGYKGSTFHRVIRDFMIQGGDFDKGNGTGGKSVYGRTFKDENFNLSHVGPGVVSMANAGPNTNGSQFFICTVKTSWLDGRHVVFGQVIEGMDVVRLIEEQETDRGDRPRKKVVIADCGQLPMSEA

SEQ ID NO: 109282 - DNA, 879 bp, Zea mays subsp. mays
  misc_feature (1)..(879): Ceres Seq. ID no. 15175425
agggtttgaagtttgagagagagagagagagagagagagatgagtgcttcgaggtttatcaagtgtgtcaccgtcggcgacggcgctgtcggaaagacttgtctgctcatctcctacactagcaacactttccccacggactatgtgccaactgtgtttgataatttcagcgcgaatgtgattgtggatgggaacactatcaacttgggattgtgggatactgcagggcaagaggactacaatagactaagaccattgagctatcgcggcgcagatgtcttcttactcgctttctcccttgtcagcaaagctagctatgaaaatgtttctaaaaagtgggtacctgaactgagacattatgctcctggtgttccaatcatcctcgtcggaaccaagcttgatcttcgagatgacaagcaattctttgttgagcaccctggtgctgtgcctatctctactgctcagggtgaagaactgaagaaggtgattggggcacctgcttatattgaatgcagtgcaaaaacacaacagaatgtaaaagcggtgtttgatgcggctatcaaggtagttctccaaccacccaaaaacaagaagaggaagaagagaaagtctcagaaagcttgttctatattgtgattcaatagagacagaagaaccaacaggaggattgaagagcttcacttgtttgttttcctcaagaaaggaggaatatgttgttgtagtctttaaaaaaaatcagaagtagtaccaagtatttgtattattgtttgcattttgatctgtaaatataccactgaatactttatttctttgttttctagactcgcacgaatggtttagagattattctccaataaaagtttttatgaggtttcagcc

SEQ ID NO: 109283 - protein, 198 aa, Zea mays subsp. mays
  misc_feature (1)..(198): Ceres Seq. ID no. 15175426
  misc_feature (8)..(179): Pfam Name: Ras family Pfam Description: Ras family
  misc_feature (2)..(198): Homolog of NCBI NO: 14165241 NR Description: putative Rop family GTPase ROP4 [Oryza sativa]
  misc_feature (2)..(198): Homolog of NCBI NO: 5902930 NR Description: small GTP-binding protein OsRac3 [Oryza sativa]
  misc_feature (1)..(198): Homolog of NCBI NO: 4097565 NR Description: ATGP3 [Arabidopsis thaliana]
  misc_feature (1)..(198): Homolog of NCBI NO: 4097583 NR Description: NTGP3 [Nicotiana tabacum]
  misc_feature (1)..(198): Homolog of NCBI NO: 34421680 NR Description: RAC-like G-protein Rac1 [Gossypium hirsutum]
  misc_feature (1)..(198): Homolog of NCBI NO: 38524283 NR Description: putative RACD protein [Hordeum vulgare subsp.
  misc_feature (1)..(198): Homolog of NCBI NO: 1732519 NR Description: Rho1Ps homolog [Arabidopsis thaliana]
  misc_feature (1)..(198): Homolog of NCBI NO: 7438393 NR Description: small GTP binding protein, rac-type - turnip
  misc_feature (1)..(198): Homolog of NCBI NO: 28393687 NR Description: putative Rho1Ps homolog Rac protein [Arabidopsis
  misc_feature (1)..(198): Homolog of NCBI NO: 15236247 NR Description: Rho1Ps homolog Rac-like protein [Arabidopsis
MSASRFIKCVTVGDGAVGKTCLLISYTSNTFPTDYVPTVFDNFSANVIVDGNTINLGLWDTAGQEDYNRLRPLSYRGADVFLLAFSLVSKASYENVSKKWVPELRHYAPGVPIILVGTKLDLRDDKQFFVEHPGAVPISTAQGEELKKVIGAPAYIECSAKTQQNVKAVFDAAIKVVLQPPKNKKRKKRKSQKACSIL

SEQ ID NO: 109284 - DNA, 985 bp, Zea mays subsp. mays
  misc_feature (1)..(985): Ceres Seq. ID no. 15175257
agtgtccattttttgcaaaagtagaaactgagagcatcttcaattattaacacttacagaggagagagaaggagagccaaatggtaagagagagtatgggagaagagtccgaggcttttgccacgacggcgccgttagctccagtgaccggtgagcgaaaagtaaggaacgacttggaggaaacattaccaaaaccatatttggcaagagcactagtagctccagatacagagcatccgaatggatcagaaggtcatgacagcaaaggcatgagtgttatgcaacaacatgttgcttttttcgaccaaaacggcgatggaatcgtctatccttgggagacttatgcgggattccgtgacctcggtttcaacccaatctcttctgttttttgggccatattcataaactttgcgtttagctacgttacacttccgagttggttgccatcaccactattgcctgtttatatcgacaacattcacaaagccaagcatgggagtgattcaagcacctatgataccgaaggaaggtacgtcccggttaatctcgagaacatctttagcaaatatgcgttaacggctccaaataaaataacattaaaagagctttggaacttaaccgagggaaaccgaatggcaatcgatccttttggatggcttgcgaataaagttgaatggctactagtctatcttcttgcaaaggatgaggaagggttcgtgtctaaagaagctgtgagaggtgtctttgatgcaagtttctttgaatactgtgctaaaaagaataaagagaaggccgattctcgcaagcaagactaagcatttaatttgcttatcttttaaatttgtccgtttgtattattatgctctcaatcttaattaggaaaaggacagaaaacaaaaactctatgtggaataaaacgtttgtgttcttggatatattgttgtgtaatatttgttgaataaataaaatgagattttcatcaatt

SEQ ID NO: 109285 - protein, 244 aa, Zea mays subsp. mays; identical to SEQ ID NO: 61216
  misc_feature (1)..(244): Ceres Seq. ID no. 15175258
  misc_feature (59)..(232): Pfam Name: Caleosin related protein Pfam Description: Caleosin related protein
  misc_feature (6)..(244): Homolog of NCBI NO: 15226103 NR Description: RD20 protein [Arabidopsis thaliana]

SEQ ID NO: 109286 - protein, 239 aa, Zea mays subsp. mays; identical to SEQ ID NO: 61217
  misc_feature (1)..(239): Ceres Seq. ID no. 15175259
  misc_feature (54)..(227): Pfam Name: Caleosin related protein Pfam Description: Caleosin related protein
  misc_feature (1)..(239): Homolog of NCBI NO: 15226103 NR Description: RD20 protein [Arabidopsis thaliana]

SEQ ID NO: 109287 - protein, 181 aa, Zea mays subsp. mays; identical to SEQ ID NO: 61218
  misc_feature (1)..(181): Ceres Seq. ID no. 15175260
  misc_feature (1)..(169): Pfam Name: Caleosin related protein Pfam Description: Caleosin related protein
  misc_feature (1)..(181): Homolog of NCBI NO: 15226103 NR Description: RD20 protein [Arabidopsis thaliana]

SEQ ID NO: 109288 - DNA, 723 bp, Zea mays subsp. mays
  misc_feature (1)..(723): Ceres Seq. ID no. 14309497
aaataacaaaacgagcaggagttcgatcgccggcggtaatcagaatgaaggaagacattcagaaaatggtggccgtagggctcgtgtggggagccaccaacgccctgatccgccgcggagcactcgcctgggataaaaaatcatcatcatcttcgacgacaacgcagtctcctccgcctcttcagatcccatccaacttcagccgcaaaatcctcgcctctctccgcgactggatcaacctcctcctcttctggcaatactccgttcctttcctcgtaaacctctccgcctccgccgcgttcttcgccctcctcggcgagtccccgatctccatcgccgttccggtcaccaacgccacgaccttcgccgcaaccgccgcgttcggggttcttttgggggaggaaactcaaatcggacttgctttggtaggtacgagctttattgtatttggaatctggctttgcgttggtcactgatcagatcgatactgatctgatctgatctgagctgtgtgattggaacattctagaagcgtcactctgtttcctgtgagatatagaattgctttcattcttgttctagcagagatagatagggagagtgcttattaaactgaatatggcatggtcgctgcaatgtgcaactatagcaagttgcagctagttgttcgttttgatgtcgtgggactgatataactagtaatcccaagctagttacttctct

SEQ ID NO: 109289 - protein, 157 aa, Zea mays subsp. mays
  misc_feature (1)..(157): Ceres Seq. ID no. 14309498
  misc_feature (86)..(155): Homolog of NCBI NO: 28829061 NR Description: similar to putative protein
  misc_feature (15)..(155): Homolog of NCBI NO: 15239774 NR Description: expressed protein [Arabidopsis thaliana]
ITKRAGVRSPAVIRMKEDIQKMVAVGLVWGATNALIRRGALAWDKKSSSSSTTTQSPPPLQIPSNFSRKILASLRDWINLLLFWQYSVPFLVNLSASAAFFALLGESPISIAVPVTNATTFAATAAFGVLLGEETQIGLALVGTSFIVFGIWLCVGH

SEQ ID NO: 109290 - protein, 143 aa, Zea mays subsp. mays
  misc_feature (1)..(143): Ceres Seq. ID no. 14309499
  misc_feature (72)..(141): Homolog of NCBI NO: 28829061 NR Description: similar to putative protein
  misc_feature (1)..(141): Homolog of NCBI NO: 15239774 NR Description: expressed protein [Arabidopsis thaliana]
MKEDIQKMVAVGLVWGATNALIRRGALAWDKKSSSSSTTTQSPPPLQIPSNFSRKILASLRDWINLLLFWQYSVPFLVNLSASAAFFALLGESPISIAVPVTNATTFAATAAFGVLLGEETQIGLALVGTSFIVFGIWLCVGH

SEQ ID NO: 109291 - protein, 136 aa, Zea mays subsp. mays
  misc_feature (1)..(136): Ceres Seq. ID no. 14309500
  misc_feature (65)..(134): Homolog of NCBI NO: 28829061 NR Description: similar to putative protein
  misc_feature (1)..(134): Homolog of NCBI NO: 15239774 NR Description: expressed protein [Arabidopsis thaliana]
MVAVGLVWGATNALIRRGALAWDKKSSSSSTTTQSPPPLQIPSNFSRKILASLRDWINLLLFWQYSVPFLVNLSASAAFFALLGESPISIAVPVTNATTFAATAAFGVLLGEETQIGLALVGTSFIVFGIWLCVGH

SEQ ID NO: 109292 - DNA, 1034 bp, Zea mays subsp. mays
  misc_feature (1)..(1034): Ceres Seq. ID no. 14309495
atttttcttttgattgaccggcggcgatggacgcattgagagcttcttacggtgactcttcatcggactcggatactgatgatctctctccggctgctgaaaatcacggcgaggtatcaacctctggaaaacacgggaaggagtcgatttctctgcctcctccgccgctttcgcttctcgaatccattggatccacaggttctttggatgtctactcaacgaagactgtgactagagtaaggaactttcctcatgtcgatggaaactacgccttgcatgtttacatccctgtttttataccactattggcgaagaaggagattgcctgtgttttaaagagggttgcatcacttgttccccatcttcatttggtcgaagctgatattccactcagcattctttgcaacgatgaccagaagcttgaccatgctttggggagagagttccacataagcttgggaagaagcgttcctcttcgtgttcatcagattaactctctggtttctatgcttaggcaaaaacttcagttacacaagagatattggattgattttaataagtggcaagtctttgtgaatgacgactctactcgttctttcctctctctggaaatcaccacttctggactatccgagataagcaagcaaattgatgctgttaatgaagtttacaagcttcacaatcttccagagttttacaaggatccgcgaccacatatctccttggtctgggcgttgggtgatattagaacttccttaaagggagctgttgacggggaactgaagaagcttagagctggtggttgcgtgcagaatcgtatattcacctctaagttttctggaatcgagtgtaagataggaaacaaaacacacaaaatatgtaaactcccagatgaataatatctctgtatcacaatacctatcaggtatgcatttgtaacggcatagaagcatgagtttactatttttatttgggtggtccaatagtccctgtgcttaggaaaagagagataatgaacagtctttgtgcttcgg

SEQ ID NO: 109293 - protein, 290 aa, Zea mays subsp. mays
  misc_feature (1)..(290): Ceres Seq. ID no. 14309496
  misc_feature (139)..(281): Homolog of NCBI NO: 27694652 NR Description: Similar to expressed sequence AA960436 [Xenopus
  misc_feature (139)..(253): Homolog of NCBI NO: 34851290 NR Description: similar to expressed sequence AA960436 [Rattus
  misc_feature (9)..(123): Homolog of NCBI NO: 34851290 NR Description: similar to expressed sequence AA960436 [Rattus
  misc_feature (9)..(112): Homolog of NCBI NO: 13375797 NR Description: hypothetical protein FLJ13154 [Homo sapiens]
  misc_feature (140)..(280): Homolog of NCBI NO: 13375797 NR Description: hypothetical protein FLJ13154 [Homo sapiens]
  misc_feature (9)..(112): Homolog of NCBI NO: 13325194 NR Description: hypothetical protein FLJ13154 [Homo sapiens]
  misc_feature (140)..(280): Homolog of NCBI NO: 13325194 NR Description: hypothetical protein FLJ13154 [Homo sapiens]
  misc_feature (9)..(117): Homolog of NCBI NO: 19527176 NR Description: expressed sequence AA960436 [Mus musculus]
  misc_feature (136)..(280): Homolog of NCBI NO: 19527176 NR Description: expressed sequence AA960436 [Mus musculus]
  misc_feature (1)..(290): Homolog of NCBI NO: 18423246 NR Description: expressed protein [Arabidopsis thaliana]
MDALRASYGDSSSDSDTDDLSPAAENHGEVSTSGKHGKESISLPPPPLSLLESIGSTGSLDVYSTKTVTRVRNFPHVDGNYALHVYIPVFIPLLAKKEIACVLKRVASLVPHLHLVEADIPLSILCNDDQKLDHALGREFHISLGRSVPLRVHQINSLVSMLRQKLQLHKRYWIDFNKWQVFVNDDSTRSFLSLEITTSGLSEISKQIDAVNEVYKLHNLPEFYKDPRPHISLVWALGDIRTSLKGAVDGELKKLRAGGCVQNRIFTSKFSGIECKIGNKTHKICKLPDE

SEQ ID NO: 109294 - DNA, 1129 bp, Zea mays subsp. mays
  misc_feature (1)..(1129): Ceres Seq. ID no. 14309480
attttccagactctccaccttcgatctatagatcctcttcttcaccaccggagagctcagccgtcgcactgaatccaatcaaccgagaaagcaatctctagatctgtcgtctccttcacatcttcttccagagatgtataataacatgggacctcagcctgggatgccaatgcctcaggcagttcctcagcctaacccttttgggaatgccttctctggtcctggctctggacttatcagaagtggcttgggagcttatggggagaagattttcggatccagctctgagtatgtgcagagcaacataactcgttacttctccgatcctcaatactattttcaagtgaatgaccaatatgtgaggaacaagttgaagattgttctgcttcctttccttcacaggggacactggactagaatctcagagccagttgggggtagactttcatacaagcccccgatatatgatattaatgcaccagacttatacattccacttatggcatttggcacatacgttgttcttgctggtttgtcactaggactctatgggaagttttctccggaagctctgaactggctttttgtcaaaggaatggttggctggtttttgcaagtcatgctgctgaagataacattgctttcattgggtagcggcgaagcacccctcttggatatcgtggcatatgctggctatactttcacgggtctctgcttagctgttcttggcaagatcatctggggatactcttactatgctctacttccgtggacctgcttgtgcagcggggttttcctagtgaagacgatgaagcgagttctctttgcggaagctaggagttatgactcgagcaggcatcactacctcttgatctttgtagctttagcacagtttcctcttttgatctggcttggtaacattagtgtcaattggctcttttgaaatgcactacgtttaagatgttgtgaaaagaaaaaacacctctgatgttatgttagcagaatttgagtttttatttatttctgggtttagacttttgtcaaacataaatatatgatgaaagaaaagtgtgatctcaagtacacatctctttttttatcttttgttttgaatgtcagtttcttgact

SEQ ID NO: 109295 - protein, 269 aa, Zea mays subsp. mays
  misc_feature (1)..(269): Ceres Seq. ID no. 14309481
  misc_feature (1)..(260): Homolog of NCBI NO: 28277968 NR Description: Similar to Yip1p-interacting factor [Danio rerio]
  misc_feature (1)..(260): Homolog of NCBI NO: 39795597 NR Description: Unknown (protein for MGC:76182) [Silurana
  misc_feature (10)..(260): Homolog of NCBI NO: 14043299 NR Description: Similar to RIKEN cDNA 9430029K10 gene [Homo
  misc_feature (129)..(263): Homolog of NCBI NO: 10241632 NR Description: putative protein [Oryza sativa (indica
  misc_feature (1)..(263): Homolog of NCBI NO: 38346458 NR Description: OSJNBa0019G23.6 [Oryza sativa (japonica
  misc_feature (1)..(268): Homolog of NCBI NO: 9755388 NR Description: F17F8.24 [Arabidopsis thaliana]
  misc_feature (1)..(268): Homolog of NCBI NO: 18397705 NR Description: expressed protein [Arabidopsis thaliana]
  misc_feature (11)..(269): Homolog of NCBI NO: 33589682 NR Description: At3g59500 [Arabidopsis thaliana]
  misc_feature (11)..(269): Homolog of NCBI NO: 11282553 NR Description: hypothetical protein T16L24.50 - Arabidopsis
  misc_feature (1)..(269): Homolog of NCBI NO: 30695009 NR Description: expressed protein [Arabidopsis thaliana]
MYNNMGPQPGMPMPQAVPQPNPFGNAFSGPGSGLIRSGLGAYGEKIFGSSSEYVQSNITRYFSDPQYYFQVNDQYVRNKLKIVLLPFLHRGHWTRISEPVGGRLSYKPPIYDINAPDLYIPLMAFGTYVVLAGLSLGLYGKFSPEALNWLFVKGMVGWFLQVMLLKITLLSLGSGEAPLLDIVAYAGYTFTGLCLAVLGKIIWGYSYYALLPWTCLCSGVFLVKTMKRVLFAEARSYDSSRHHYLLIFVALAQFPLLIWLGNISVNWLF

SEQ ID NO: 109296 - protein, 265 aa, Zea mays subsp. mays
  misc_feature (1)..(265): Ceres Seq. ID no. 14309482
  misc_feature (1)..(256): Homolog of NCBI NO: 28277968 NR Description: Similar to Yip1p-interacting factor [Danio rerio]
  misc_feature (1)..(256): Homolog of NCBI NO: 39795597 NR Description: Unknown (protein for MGC:76182) [Silurana
  misc_feature (6)..(256): Homolog of NCBI NO: 14043299 NR Description: Similar to RIKEN cDNA 9430029K10 gene [Homo
  misc_feature (125)..(259): Homolog of NCBI NO: 10241632 NR Description: putative protein [Oryza sativa (indica
  misc_feature (1)..(259): Homolog of NCBI NO: 38346458 NR Description: OSJNBa0019G23.6 [Oryza sativa (japonica
  misc_feature (1)..(264): Homolog of NCBI NO: 9755388 NR Description: F17F8.24 [Arabidopsis thaliana]
  misc_feature (1)..(264): Homolog of NCBI NO: 18397705 NR Description: expressed protein [Arabidopsis thaliana]
  misc_feature (7)..(265): Homolog of NCBI NO: 33589682 NR Description: At3g59500 [Arabidopsis thaliana]
  misc_feature (7)..(265): Homolog of NCBI NO: 11282553 NR Description: hypothetical protein T16L24.50 - Arabidopsis
  misc_feature (1)..(265): Homolog of NCBI NO: 30695009 NR Description: expressed protein [Arabidopsis thaliana]
MGPQPGMPMPQAVPQPNPFGNAFSGPGSGLIRSGLGAYGEKIFGSSSEYVQSNITRYFSDPQYYFQVNDQYVRNKLKIVLLPFLHRGHWTRISEPVGGRLSYKPPIYDINAPDLYIPLMAFGTYVVLAGLSLGLYGKFSPEALNWLFVKGMVGWFLQVMLLKITLLSLGSGEAPLLDIVAYAGYTFTGLCLAVLGKIIWGYSYYALLPWTCLCSGVFLVKTMKRVLFAEARSYDSSRHHYLLIFVALAQFPLLIWLGNISVNWLF

SEQ ID NO: 109297 - protein, 259 aa, Zea mays subsp. mays
  misc_feature (1)..(259): Ceres Seq. ID no. 14309483
  misc_feature (1)..(250): Homolog of NCBI NO: 28277968 NR Description: Similar to Yip1p-interacting factor [Danio rerio]
  misc_feature (1)..(250): Homolog of NCBI NO: 39795597 NR Description: Unknown (protein for MGC:76182) [Silurana
  misc_feature (1)..(250): Homolog of NCBI NO: 14043299 NR Description: Similar to RIKEN cDNA 9430029K10 gene [Homo
  misc_feature (119)..(253): Homolog of NCBI NO: 10241632 NR Description: putative protein [Oryza sativa (indica
  misc_feature (1)..(253): Homolog of NCBI NO: 38346458 NR Description: OSJNBa0019G23.6 [Oryza sativa (japonica
  misc_feature (1)..(258): Homolog of NCBI NO: 9755388 NR Description: F17F8.24 [Arabidopsis thaliana]
  misc_feature (1)..(258): Homolog of NCBI NO: 18397705 NR Description: expressed protein [Arabidopsis thaliana]
  misc_feature (1)..(259): Homolog of NCBI NO: 33589682 NR Description: At3g59500 [Arabidopsis thaliana]
  misc_feature (1)..(259): Homolog of NCBI NO: 11282553 NR Description: hypothetical protein T16L24.50 - Arabidopsis
  misc_feature (1)..(259): Homolog of NCBI NO: 30695009 NR Description: expressed protein [Arabidopsis thaliana]
MPMPQAVPQPNPFGNAFSGPGSGLIRSGLGAYGEKIFGSSSEYVQSNITRYFSDPQYYFQVNDQYVRNKLKIVLLPFLHRGHWTRISEPVGGRLSYKPPIYDINAPDLYIPLMAFGTYVVLAGLSLGLYGKFSPEALNWLFVKGMVGWFLQVMLLKITLLSLGSGEAPLLDIVAYAGYTFTGLCLAVLGKIIWGYSYYALLPWTCLCSGVFLVKTMKRVLFAEARSYDSSRHHYLLIFVALAQFPLLIWLGNISVNWLF

SEQ ID NO: 109298 - DNA, 748 bp, Zea mays subsp. mays
  misc_feature (1)..(748): Ceres Seq. ID no. 14309476
aaaactcactcctcaaacctctctctcatcttcaagctattcgatcaatggcagcgacaatggcgacatcagcaaaatgcatgtccctaaacacatctcttcctaaagccctaaaccaaaccaaacccatctgttcctcaaaacccttcatctccctcccatccccaccaaaacccaccgtctctctcgccgtcactagcaccgccctcgccggagccgtgttctcttccctcagctactcggaacccgctttcgccgctcaccagatcgctcagctggcagcggcggctcaaggtagcgacaaccgcggcctagctctcctcctcccgatcgtcccggccatcggatgggtactcttcaacatcctccagccagctcttaaccagatcaacaagatgcgcgctagcaaaggagtcgtcgtgggtcttggcatcggtggtggtctcgctgcgtcagggcttttgactatgaccccggaggcctccgctagtatggtcaacgagatggcggcggtggcggaagctgcggcgaaagttgaagacaacaggggacagttgttgttgttcgtggttgcgccggctctgctttgggttctttacaatatattgcagcctgctttgaaccaactcaacaaaatgaggaataagtaataatcttattgtttacatgtaatcattgttgggattcaaaatgtaaaattaatcatttgtttcatggacagattctctggttaaattttggacagact

SEQ ID NO: 109299 - protein, 215 aa, Zea mays subsp. mays
  misc_feature (1)..(215): Ceres Seq. ID no. 14309477
  misc_feature (100)..(133): Pfam Name: Photosystem II protein Y (PsbY) Pfam Description: Photosystem II protein Y (PsbY)
  misc_feature (138)..(215): Homolog of NCBI NO: 6093830 NR Description: Photosystem II core complex proteins psbY,
  misc_feature (16)..(215): Homolog of NCBI NO: 6093830 NR Description: Photosystem II core complex proteins psbY,
  misc_feature (20)..(214): Homolog of NCBI NO: 21593330 NR Description: unknown [Arabidopsis thaliana]
  misc_feature (16)..(214): Homolog of NCBI NO: 15220530 NR Description: F12A21.13 [Arabidopsis thaliana]
NSLLKPLSHLQAIRSMAATMATSAKCMSLNTSLPKALNQTKPICSSKPFISLPSPPKPTVSLAVTSTALAGAVFSSLSYSEPAFAAHQIAQLAAAAQGSDNRGLALLLPIVPAIGWVLFNILQPALNQINKMRASKGVVVGLGIGGGLAASGLLTMTPEASASMVNEMAAVAEAAAKVEDNRGQLLLFVVAPALLWVLYNILQPALNQLNKMRNK

SEQ ID NO: 109300 - protein, 200 aa, Zea mays subsp. mays
  misc_feature (1)..(200): Ceres Seq. ID no. 14309478
  misc_feature (85)..(118): Pfam Name: Photosystem II protein Y (PsbY) Pfam Description: Photosystem II protein Y (PsbY)
  misc_feature (123)..(200): Homolog of NCBI NO: 6093830 NR Description: Photosystem II core complex proteins psbY,
  misc_feature (1)..(200): Homolog of NCBI NO: 6093830 NR Description: Photosystem II core complex proteins psbY,
  misc_feature (5)..(199): Homolog of NCBI NO: 21593330 NR Description: unknown [Arabidopsis thaliana]
  misc_feature (1)..(199): Homolog of NCBI NO: 15220530 NR Description: F12A21.13 [Arabidopsis thaliana]
MAATMATSAKCMSLNTSLPKALNQTKPICSSKPFISLPSPPKPTVSLAVTSTALAGAVFSSLSYSEPAFAAHQIAQLAAAAQGSDNRGLALLLPIVPAIGWVLFNILQPALNQINKMRASKGVVVGLGIGGGLAASGLLTMTPEASASMVNEMAAVAEAAAKVEDNRGQLLLFVVAPALLWVLYNILQPALNQLNKMRNK

SEQ ID NO: 109301 - protein, 196 aa, Zea mays subsp. mays
  misc_feature (1)..(196): Ceres Seq. ID no. 14309479
  misc_feature (81)..(114): Pfam Name: Photosystem II protein Y (PsbY) Pfam Description: Photosystem II protein Y (PsbY)
  misc_feature (119)..(196): Homolog of NCBI NO: 6093830 NR Description: Photosystem II core complex proteins psbY,
  misc_feature (1)..(196): Homolog of NCBI NO: 6093830 NR Description: Photosystem II core complex proteins psbY,
  misc_feature (1)..(195): Homolog of NCBI NO: 21593330 NR Description: unknown [Arabidopsis thaliana]
  misc_feature (1)..(195): Homolog of NCBI NO: 15220530 NR Description: F12A21.13 [Arabidopsis thaliana]
MATSAKCMSLNTSLPKALNQTKPICSSKPFISLPSPPKPTVSLAVTSTALAGAVFSSLSYSEPAFAAHQIAQLAAAAQGSDNRGLALLLPIVPAIGWVLFNILQPALNQINKMRASKGVVVGLGIGGGLAASGLLTMTPEASASMVNEMAAVAEAAAKVEDNRGQLLLFVVAPALLWVLYNILQPALNQLNKMRNK

SEQ ID NO: 109302 - DNA, 754 bp, Zea mays subsp. mays
  misc_feature (1)..(754): Ceres Seq. ID no. 14309452
gggatcgatctctctttctctgaaacattttggaaacttctaggtaaggcttcttcattccaaagcaagaccacaatttttcttcatggccaccggagaggagaaacctgttatggtcgtcggtatcgacgaaagcgagcagagcacttacgccttggagtggaccctcgatcgtttcttcactccctacgctcctaattttcctttcaagctcttcatcgtccacgccaaacctaacgccgtctctgccgttggtcttgctggtcccggagctgcggaggttctgccttatgttgataccgatttgaagcatattgctgccagggttatcgagatggctaaaggtatctgtcagagcaaatcggttaatggcgctatgttcgaagtttttgaaggtgatgcaagaagtatactgtgcgatgttgtggataaacatcatgcttctcttcttgtcgtgggaagccatggttatggagctatcaagagggcggttctagggagcgtgagcgactactgtgctcatcatgctcattgctcggtgatgatcgtgaagaagcctaagatcaagcactgatgatcacctaaacccaagctgttatatcagtcaaagcaaagcaaagtctcatctgcatagtcgtcagtttcggtgaaatgaaataaaattgtgaaacgatccaatctatatattaatattcgtgtgtaaattggttattgtattcataaactattttatatattgacgtttgataatact

SEQ ID NO: 109303 - protein, 162 aa, Zea mays subsp. mays
  misc_feature (1)..(162): Ceres Seq. ID no. 14309453
  misc_feature (10)..(156): Pfam Name: Universal stress protein family Pfam Description: Universal stress protein family
  misc_feature (10)..(156): Homolog of NCBI NO: 5669654 NR Description: ER6 protein [Lycopersicon esculentum]
  misc_feature (1)..(119): Homolog of NCBI NO: 15239780 NR Description: hypothetical protein [Arabidopsis thaliana]
  misc_feature (10)..(159): Homolog of NCBI NO: 21594903 NR Description: ethylene-responsive protein, putative
  misc_feature (10)..(159): Homolog of NCBI NO: 30681955 NR Description: ethylene-responsive protein -related [Arabidopsis
  misc_feature (10)..(159): Homolog of NCBI NO: 18399413 NR Description: ethylene-responsive protein -related [Arabidopsis
  misc_feature (2)..(161): Homolog of NCBI NO: 20067187 NR Description: putative universal stress protein USP1
  misc_feature (2)..(161): Homolog of NCBI NO: 22831145 NR Description: universal stress protein USP1-like protein
  misc_feature (12)..(162): Homolog of NCBI NO: 38016525 NR Description: fiber protein Fb19 [Gossypium barbadense]
  misc_feature (1)..(161): Homolog of NCBI NO: 21555580 NR Description: unknown [Arabidopsis thaliana]
  misc_feature (1)..(161): Homolog of NCBI NO: 18407428 NR Description: expressed protein [Arabidopsis thaliana]
MATGEEKPVMVVGIDESEQSTYALEWTLDRFFTPYAPNFPFKLFIVHAKPNAVSAVGLAGPGAAEVLPYVDTDLKHIAARVIEMAKGICQSKSVNGAMFEVFEGDARSILCDVVDKHHASLLVVGSHGYGAIKRAVLGSVSDYCAHHAHCSVMIVKKPKIKH

SEQ ID NO: 109304 - protein, 153 aa, Zea mays subsp. mays
  misc_feature (1)..(153): Ceres Seq. ID no. 14309454
  misc_feature (1)..(147): Pfam Name: Universal stress protein family Pfam Description: Universal stress protein family
  misc_feature (1)..(147): Homolog of NCBI NO: 5669654 NR Description: ER6 protein [Lycopersicon esculentum]
  misc_feature (1)..(110): Homolog of NCBI NO: 15239780 NR Description: hypothetical protein [Arabidopsis thaliana]
  misc_feature (1)..(150): Homolog of NCBI NO: 21594903 NR Description: ethylene-responsive protein, putative
  misc_feature (1)..(150): Homolog of NCBI NO: 30681955 NR Description: ethylene-responsive protein -related [Arabidopsis
  misc_feature (1)..(150): Homolog of NCBI NO: 18399413 NR Description: ethylene-responsive protein -related [Arabidopsis
  misc_feature (1)..(152): Homolog of NCBI NO: 20067187 NR Description: putative universal stress protein USP1
  misc_feature (1)..(152): Homolog of NCBI NO: 22831145 NR Description: universal stress protein USP1-like protein
  misc_feature (3)..(153): Homolog of NCBI NO: 38016525 NR Description: fiber protein Fb19 [Gossypium barbadense]
  misc_feature (1)..(152): Homolog of NCBI NO: 21555580 NR Description: unknown [Arabidopsis thaliana]
  misc_feature (1)..(152): Homolog of NCBI NO: 18407428 NR Description: expressed protein [Arabidopsis thaliana]
MVVGIDESEQSTYALEWTLDRFFTPYAPNFPFKLFIVHAKPNAVSAVGLAGPGAAEVLPYVDTDLKHIAARVIEMAKGICQSKSVNGAMFEVFEGDARSILCDVVDKHHASLLVVGSHGYGAIKRAVLGSVSDYCAHHAHCSVMIVKKPKIKH

SEQ ID NO: 109305 - DNA, 820 bp, Zea mays subsp. mays
  misc_feature (1)..(820): Ceres Seq. ID no. 14309331
actcttcaaagtctccgccagacacttctccatcaaaactcctctcacacaatggccacttccttccctaccttgacaccttttcttttcatcctccttctctccatcccctccgttcttgaagcagctcatcaccacacggcggcgccggctccggctgtagactgttcgatgctcatactcaacatggctgattgtttgtcctttgtttccgctggaggcacggaggccaagccggctagttcgtgttgcaacggccttaagacggtgctcaagactgacgcagagtgtctatgtgaggcgtttaaaagcagtgcttctctaggagttactttgaacatgactaaagcagctacacttcccgctgcatgcaagcttcacgctccttctatggctgcttgtggattgtccgccgctcctactatggctccaggtcttgctccaggaggagctgctggacccgacttaagttttctatctccaaacccatctccagggaaccgcggatcttccttgcttcccttctccttcaccaccgtactcggtgctatgtccttcgtattgttattcttgtctcgtgtctgaagaagccagctagatttggttgtatgaaatggctttgggtttgggttttcgtgactttagttttgcgtgtcttttgagtctacttctgttttagaccatgtcggtttctgttcgtagtttatttaatcttaattacgtttcacattggtccttttatctaagaacatctctgatccctcgtatactgatggctacttattaaatttcgagttttcctaaaacaatttctttggtt

SEQ ID NO: 109306 - protein, 194 aa, Zea mays subsp. mays; identical to SEQ ID NO: 55836
  misc_feature (1)..(194): Ceres Seq. ID no. 14309332
  misc_feature (56)..(134): Pfam Name: Protease inhibitor/seed storage/LTP family Pfam Description: Protease inhibitor/seed storage/LTP family
  misc_feature (18)..(192): Homolog of NCBI NO: 21618136 NR Description: nonspecific lipid-transfer protein-like protein
  misc_feature (47)..(161): Homolog of NCBI NO: 15220327 NR Description: protease inhibitor/seed storage/lipid transfer
  misc_feature (49)..(171): Homolog of NCBI NO: 30680828 NR Description: protease inhibitor/seed storage/lipid transfer
  misc_feature (22)..(149): Homolog of NCBI NO: 18415958 NR Description: lipid transfer protein family [Arabidopsis
  misc_feature (49)..(192): Homolog of NCBI NO: 7487610 NR Description: hypothetical protein T3F12.2 - Arabidopsis
  misc_feature (22)..(186): Homolog of NCBI NO: 30682659 NR Description: lipid transfer protein family [Arabidopsis
  misc_feature (31)..(181): Homolog of NCBI NO: 27765012 NR Description: At2g13820 [Arabidopsis thaliana]
  misc_feature (31)..(181): Homolog of NCBI NO: 15225509 NR Description: protease inhibitor/seed storage/lipid transfer
  misc_feature (18)..(192): Homolog of NCBI NO: 10176956 NR Description: contains similarity to nonspecific lipid-transfer
  misc_feature (18)..(192): Homolog of NCBI NO: 18424785 NR Description: protease inhibitor/seed storage/lipid transfer

SEQ ID NO: 109307 - protein, 177 aa, Zea mays subsp. mays; identical to SEQ ID NO: 55837
  misc_feature (1)..(177): Ceres Seq. ID no. 14309333
  misc_feature (39)..(117): Pfam Name: Protease inhibitor/seed storage/LTP family Pfam Description: Protease inhibitor/seed storage/LTP family
  misc_feature (30)..(144): Homolog of NCBI NO: 15220327 NR Description: protease inhibitor/seed storage/lipid transfer
  misc_feature (32)..(154): Homolog of NCBI NO: 30680828 NR Description: protease inhibitor/seed storage/lipid transfer
  misc_feature (5)..(132): Homolog of NCBI NO: 18415958 NR Description: lipid transfer protein family [Arabidopsis
  misc_feature (32)..(175): Homolog of NCBI NO: 7487610 NR Description: hypothetical protein T3F12.2 - Arabidopsis
  misc_feature (5)..(169): Homolog of NCBI NO: 30682659 NR Description: lipid transfer protein family [Arabidopsis
  misc_feature (14)..(164): Homolog of NCBI NO: 27765012 NR Description: At2g13820 [Arabidopsis thaliana]
  misc_feature (14)..(164): Homolog of NCBI NO: 15225509 NR Description: protease inhibitor/seed storage/lipid transfer
  misc_feature (1)..(175): Homolog of NCBI NO: 10176956 NR Description: contains similarity to nonspecific lipid-transfer
  misc_feature (1)..(175): Homolog of NCBI NO: 18424785 NR Description: protease inhibitor/seed storage/lipid transfer
  misc_feature (1)..(175): Homolog of NCBI NO: 21618136 NR Description: nonspecific lipid-transfer protein-like protein

SEQ ID NO: 109308 - protein, 137 aa, Zea mays subsp. mays; identical to SEQ ID NO: 55838
  misc_feature (1)..(137): Ceres Seq. ID no. 14309334
  misc_feature (1)..(77): Pfam Name: Protease inhibitor/seed storage/LTP family Pfam Description: Protease inhibitor/seed storage/LTP family
  misc_feature (1)..(104): Homolog of NCBI NO: 15220327 NR Description: protease inhibitor/seed storage/lipid transfer
  misc_feature (1)..(114): Homolog of NCBI NO: 30680828 NR Description: protease inhibitor/seed storage/lipid transfer
  misc_feature (1)..(92): Homolog of NCBI NO: 18415958 NR Description: lipid transfer protein family [Arabidopsis
  misc_feature (1)..(135): Homolog of NCBI NO: 7487610 NR Description: hypothetical protein T3F12.2 - Arabidopsis
  misc_feature (1)..(129): Homolog of NCBI NO: 30682659 NR Description: lipid transfer protein family [Arabidopsis
  misc_feature (1)..(124): Homolog of NCBI NO: 27765012 NR Description: At2g13820 [Arabidopsis thaliana]
  misc_feature (1)..(124): Homolog of NCBI NO: 15225509 NR Description: protease inhibitor/seed storage/lipid transfer
  misc_feature (1)..(135): Homolog of NCBI NO: 10176956 NR Description: contains similarity to nonspecific lipid-transfer
  misc_feature (1)..(135): Homolog of NCBI NO: 18424785 NR Description: protease inhibitor/seed storage/lipid transfer
  misc_feature (1)..(135): Homolog of NCBI NO: 21618136 NR Description: nonspecific lipid-transfer protein-like protein

SEQ ID NO: 109309 - DNA, 791 bp, Zea mays subsp. mays
  misc_feature (1)..(791): Ceres Seq. ID no. 15179459
aggacaataagtttaaagccatcaaatccaaaaaaaaatatttgttttaataatctaagcttcatcaatggcgaatcaagcagctatagcatttttctttttcgttttggcggtcttctccaacttggagctctcgtcttctacgcttttccatggcaaggtctcttgccttgactgccaccgcggtttcgacttctcaggcgttaaggttctcctaaagtgcgaaggcgagaagaaacacataaccacgatggcgacttcagacggatctttccggtcagtgcttccgaccaatgacagaaaacactccatgaactgtcttgcaaagctcttgggaggtcctgagcaactttatgctcataaacacaacatggtctctgaactggttaagtcaaaacacgataccaaggttcttactacctcaaacccactttccttctctctctcatgccctaaaccaactggagataatgtcggaaacatgataggagattcgaagactgttaattttcctgggacaggaggttttggattcccacctgctagcttctttcccttcttaccaatcattggcatcccatgattttaattaaatgtgcttgataagacgggggacgtatttattcataaatgttgttgtttatgtgaatttaagtgagcgaacaaaattgtttttgttttgtgagatataattaaggtttgtttatgtgataagaaaatgttggttatcggcttcttggatccgttgctttgtaccatgtttgtgataataataaagattgcattagtcc

SEQ ID NO: 109310 - protein, 171 aa, Zea mays subsp. mays; identical to SEQ ID NO: 56196
  misc_feature (1)..(171): Ceres Seq. ID no. 15179460
  misc_feature (7)..(171): Homolog of NCBI NO: 30683502 NR Description: expressed protein [Arabidopsis thaliana]
  misc_feature (1)..(171): Homolog of NCBI NO: 21594030 NR Description: unknown [Arabidopsis thaliana]
  misc_feature (1)..(171): Homolog of NCBI NO: 18420486 NR Description: expressed protein [Arabidopsis thaliana]

SEQ ID NO: 109311 - protein, 110 aa, Zea mays subsp. mays; identical to SEQ ID NO: 56197
  misc_feature (1)..(110): Ceres Seq. ID no. 15179461
  misc_feature (1)..(110): Homolog of NCBI NO: 30683502 NR Description: expressed protein [Arabidopsis thaliana]
  misc_feature (1)..(110): Homolog of NCBI NO: 21594030 NR Description: unknown [Arabidopsis thaliana]
  misc_feature (1)..(110): Homolog of NCBI NO: 18420486 NR Description: expressed protein [Arabidopsis thaliana]

SEQ ID NO: 109312 - protein, 90 aa, Zea mays subsp. mays; identical to SEQ ID NO: 56198
  misc_feature (1)..(90): Ceres Seq. ID no. 15179462
  misc_feature (1)..(90): Homolog of NCBI NO: 30683502 NR Description: expressed protein [Arabidopsis thaliana]
  misc_feature (1)..(90): Homolog of NCBI NO: 21594030 NR Description: unknown [Arabidopsis thaliana]
  misc_feature (1)..(90): Homolog of NCBI NO: 18420486 NR Description: expressed protein [Arabidopsis thaliana]

SEQ ID NO: 109313 - DNA, 645 bp, Zea mays subsp. mays
  misc_feature (1)..(645): Ceres Seq. ID no. 15174145
aggaaacccttacatcagttaataatatctctaaacaatatgaacgacatgatgggtggatcttctcatgcggctccggcaccttcaccgtcggcgtttttccaacatcgccgacgtcatcacggtggcatgatgcacatgaccttcttctgggggaaaaacacggaggttctattcgacggatggccagggaccagtctgaccatgtattgggtctgcctagcctccattttcgtcacttccgcattgtcagagtggatttcgcgatgcggggtcatgaaagtcggtccagctagctttggcggcgggctagtccagacgttggtttacaccgtgagggcttgtttgtcttatttgatcatgctggccgtgatgtcattcaatggaggagtcttcttggctgcaatggctggttttggattagggtttatgatttttggaagtaggtcttttaaggacactggaagtaataacaatcacaccgaaattcaatcacattgttgattgattctttgtaggctttatttttcccccgtttaaataataataacgaaaaaaaattatttcaagattttaagattttagtattttttttgtctaagatataattggattttgtttacggtcatgttgattcaataaatt

SEQ ID NO: 109314 - protein, 167 aa, Zea mays subsp. mays
  misc_feature (1)..(167): Ceres Seq. ID no. 15174146
  misc_feature (45)..(158): Pfam Name: Ctr copper transporter family Pfam Description: Ctr copper transporter family
  misc_feature (35)..(146): Homolog of NCBI NO: 25408576 NR Description: hypothetical protein At2g37920 [imported] -
  misc_feature (35)..(153): Homolog of NCBI NO: 18496856 NR Description: COPT4 [Arabidopsis thaliana]
  misc_feature (35)..(153): Homolog of NCBI NO: 30687312 NR Description: COPT4 protein [Arabidopsis thaliana]
  misc_feature (23)..(157): Homolog of NCBI NO: 11288418 NR Description: copper transport protein [imported] - Arabidopsis
  misc_feature (12)..(157): Homolog of NCBI NO: 15237802 NR Description: copper transport protein [Arabidopsis thaliana]
  misc_feature (26)..(162): Homolog of NCBI NO: 30683324 NR Description: copper transport protein -related protein
  misc_feature (23)..(163): Homolog of NCBI NO: 15232677 NR Description: copper transport protein - like protein
  misc_feature (34)..(167): Homolog of NCBI NO: 18496854 NR Description: copper transporter-like protein COPT3
  misc_feature (14)..(167): Homolog of NCBI NO: 21592951 NR Description: copper transport protein-like [Arabidopsis
  misc_feature (14)..(167): Homolog of NCBI NO: 15237804 NR Description: copper transport protein - like [Arabidopsis
RKPLHQLIISLNNMNDMMGGSSHAAPAPSPSAFFQHRRRHHGGMMHMTFFWGKNTEVLFDGWPGTSLTMYWVCLASIFVTSALSEWISRCGVMKVGPASFGGGLVQTLVYTVRACLSYLIMLAVMSFNGGVFLAAMAGFGLGFMIFGSRSFKDTGSNNNHTEIQSHC

SEQ ID NO: 109315 - protein, 154 aa, Zea mays subsp. mays
  misc_feature (1)..(154): Ceres Seq. ID no. 15174147
  misc_feature (32)..(145): Pfam Name: Ctr copper transporter family Pfam Description: Ctr copper transporter family
  misc_feature (22)..(133): Homolog of NCBI NO: 25408576 NR Description: hypothetical protein At2g37920 [imported] -
  misc_feature (22)..(140): Homolog of NCBI NO: 18496856 NR Description: COPT4 [Arabidopsis thaliana]
  misc_feature (22)..(140): Homolog of NCBI NO: 30687312 NR Description: COPT4 protein [Arabidopsis thaliana]
  misc_feature (10)..(144): Homolog of NCBI NO: 11288418 NR Description: copper transport protein [imported] - Arabidopsis
  misc_feature (1)..(144): Homolog of NCBI NO: 15237802 NR Description: copper transport protein [Arabidopsis thaliana]
  misc_feature (13)..(149): Homolog of NCBI NO: 30683324 NR Description: copper transport protein -related protein
  misc_feature (10)..(150): Homolog of NCBI NO: 15232677 NR Description: copper transport protein - like protein
  misc_feature (21)..(154): Homolog of NCBI NO: 18496854 NR Description: copper transporter-like protein COPT3
  misc_feature (1)..(154): Homolog of NCBI NO: 21592951 NR Description: copper transport protein-like [Arabidopsis
  misc_feature (1)..(154): Homolog of NCBI NO: 15237804 NR Description: copper transport protein - like [Arabidopsis
MNDMMGGSSHAAPAPSPSAFFQHRRRHHGGMMHMTFFWGKNTEVLFDGWPGTSLTMYWVCLASIFVTSALSEWISRCGVMKVGPASFGGGLVQTLVYTVRACLSYLIMLAVMSFNGGVFLAAMAGFGLGFMIFGSRSFKDTGSNNNHTEIQSHC

SEQ ID NO: 109316 - protein, 151 aa, Zea mays subsp. mays
  misc_feature (1)..(151): Ceres Seq. ID no. 15174148
  misc_feature (29)..(142): Pfam Name: Ctr copper transporter family Pfam Description: Ctr copper transporter family
  misc_feature (19)..(130): Homolog of NCBI NO: 25408576 NR Description: hypothetical protein At2g37920 [imported] -
  misc_feature (19)..(137): Homolog of NCBI NO: 18496856 NR Description: COPT4 [Arabidopsis thaliana]
  misc_feature (19)..(137): Homolog of NCBI NO: 30687312 NR Description: COPT4 protein [Arabidopsis thaliana]
  misc_feature (7)..(141): Homolog of NCBI NO: 11288418 NR Description: copper transport protein [imported] - Arabidopsis
  misc_feature (1)..(141): Homolog of NCBI NO: 15237802 NR Description: copper transport protein [Arabidopsis thaliana]
  misc_feature (10)..(146): Homolog of NCBI NO: 30683324 NR Description: copper transport protein -related protein
  misc_feature (7)..(147): Homolog of NCBI NO: 15232677 NR Description: copper transport protein - like protein
  misc_feature (18)..(151): Homolog of NCBI NO: 18496854 NR Description: copper transporter-like protein COPT3
  misc_feature (1)..(151): Homolog of NCBI NO: 21592951 NR Description: copper transport protein-like [Arabidopsis
  misc_feature (1)..(151): Homolog of NCBI NO: 15237804 NR Description: copper transport protein - like [Arabidopsis
MMGGSSHAAPAPSPSAFFQHRRRHHGGMMHMTFFWGKNTEVLFDGWPGTSLTMYWVCLASIFVTSALSEWISRCGVMKVGPASFGGGLVQTLVYTVRACLSYLIMLAVMSFNGGVFLAAMAGFGLGFMIFGSRSFKDTGSNNNHTEIQSHC

SEQ ID NO: 109317 - DNA, 866 bp, Zea mays subsp. mays
  misc_feature (1)..(866): Ceres Seq. ID no. 14309445
gtacttgggacttggaagaaagattcatggcttgtgttcagaacacactctacttcgttgcagctatacttcttattcaccagaagacggtcacctccgatttcctctctcctctgctctctcctatgttcgatgatatatgcaaggaagtgcaatgtgggaaagggaaatgcaaagcatctttaaacgcaacttttatgcatgaatgtgagtgtgataatggttggaagcagattgatcataacctcaagtttctcccttgcgtcacccccaactgtacctttgatctaacttgcggtgaagcagcttctccagcacagcccaaaacgcttcccaaggacaccaatgcttcatttttcgatatttgtcactgggtggattgtggaggagggttttgcaataagacaaatccgtttttatacagctgcaattgccgtgaaggttacaacaatcttatgaacatcaccacatttccttgctttaagcaatgtgcacttggaatggactgcttgaatcttgggatccctttgtccaacgcatcatcgtcttctccacctgctctgcctgatagcagcaagaatcaagcaacaggattgaatataagaggatcatcgttatggtttataacatatttgctctgtgtctccctagcaccatggaggttgctctgtatttgatcacttttattctgtgtgtttcacattttgtatacggatattgttcggtactgttttgtatttctttgtttctattctatcttactcatctattcttttttttttgtctaccacaaatactactgcaggcccggcccagtaaaatttattgcctaaaagcaaaataaaaaatgggcgttcgatggatcg

SEQ ID NO: 109318 - protein, 224 aa, Zea mays subsp. mays
  misc_feature (1)..(224): Ceres Seq. ID no. 14309446
  misc_feature (122)..(188): Homolog of NCBI NO: 37534418 NR Description: hypothetical protein [Oryza sativa (japonica
  misc_feature (16)..(92): Homolog of NCBI NO: 34902622 NR Description: Unknown protein [Oryza sativa (japonica
  misc_feature (47)..(204): Homolog of NCBI NO: 37534414 NR Description: putative protein C prepropeptide
  misc_feature (122)..(224): Homolog of NCBI NO: 22328632 NR Description: hypothetical protein [Arabidopsis thaliana]
  misc_feature (9)..(120): Homolog of NCBI NO: 22328632 NR Description: hypothetical protein [Arabidopsis thaliana]
TWDLEERFMACVQNTLYFVAAILLIHQKTVTSDFLSPLLSPMFDDICKEVQCGKGKCKASLNATFMHECECDNGWKQIDHNLKFLPCVTPNCTFDLTCGEAASPAQPKTLPKDTNASFFDICHWVDCGGGFCNKTNPFLYSCNCREGYNNLMNITTFPCFKQCALGMDCLNLGIPLSNASSSSPPALPDSSKNQATGLNIRGSSLWFITYLLCVSLAPWRLLCI

SEQ ID NO: 109319 - protein, 216 aa, Zea mays subsp. mays
  misc_feature (1)..(216): Ceres Seq. ID no. 14309447
  misc_feature (114)..(180): Homolog of NCBI NO: 37534418 NR Description: hypothetical protein [Oryza sativa (japonica
  misc_feature (8)..(84): Homolog of NCBI NO: 34902622 NR Description: Unknown protein [Oryza sativa (japonica
  misc_feature (39)..(196): Homolog of NCBI NO: 37534414 NR Description: putative protein C prepropeptide
  misc_feature (114)..(216): Homolog of NCBI NO: 22328632 NR Description: hypothetical protein [Arabidopsis thaliana]
  misc_feature (1)..(112): Homolog of NCBI NO: 22328632 NR Description: hypothetical protein [Arabidopsis thaliana]
MACVQNTLYFVAAILLIHQKTVTSDFLSPLLSPMFDDICKEVQCGKGKCKASLNATFMHECECDNGWKQIDHNLKFLPCVTPNCTFDLTCGEAASPAQPKTLPKDTNASFFDICHWVDCGGGFCNKTNPFLYSCNCREGYNNLMNITTFPCFKQCALGMDCLNLGIPLSNASSSSPPALPDSSKNQATGLNIRGSSLWFITYLLCVSLAPWRLLCI

SEQ ID NO: 109320 - protein, 183 aa, Zea mays subsp. mays
  misc_feature (1)..(183): Ceres Seq. ID no. 14309448
  misc_feature (81)..(147): Homolog of NCBI NO: 37534418 NR Description: hypothetical protein [Oryza sativa (japonica
  misc_feature (1)..(51): Homolog of NCBI NO: 34902622 NR Description: Unknown protein [Oryza sativa (japonica
  misc_feature (6)..(163): Homolog of NCBI NO: 37534414 NR Description: putative protein C prepropeptide
  misc_feature (81)..(183): Homolog of NCBI NO: 22328632 NR Description: hypothetical protein [Arabidopsis thaliana]
  misc_feature (1)..(79): Homolog of NCBI NO: 22328632 NR Description: hypothetical protein [Arabidopsis thaliana]
MFDDICKEVQCGKGKCKASLNATFMHECECDNGWKQIDHNLKFLPCVTPNCTFDLTCGEAASPAQPKTLPKDTNASFFDICHWVDCGGGFCNKTNPFLYSCNCREGYNNLMNITTFPCFKQCALGMDCLNLGIPLSNASSSSPPALPDSSKNQATGLNIRGSSLWFITYLLCVSLAPWRLLCI

SEQ ID NO: 109321 - DNA, 769 bp, Zea mays subsp. mays
  misc_feature (1)..(769): Ceres Seq. ID no. 15179949
agactctttcatttgctcttttctttgtgtactaacattttcatttgttcaaatccatttgctcctttagacaccgatctccttcatggctccgattgctgtcggtagtgttttaccagacggaaaaatcttcctctttgacgagaacgatcagctccagacggtcaccgttcactctctcttggctggtaagaaggtcattctctttggtgtccccggtgctttcacttccgcctgcagcttgcagcatgtgcctagtttcattgagaaagcggaccagctgaaagcaaagggtgttaatgagatcatttgctatggcatgaatgatccgtatgtgatgaaagcatggggaaagacattcccagagaacaagcatgtcaagtttgtctcagacggctcaggagaatacacaaagctcctcggactggagcttgaccttaaggacaagggtcttggtattaggacaaggagatttgctatgttgctcgataacctcaaggtgactgtcgccaacattgaaacaggtggcgagttcacggtttctagcgccgaggatatcctcaaggctctctaagaaactaccatctgaaagtagaggatctctagcccgattttcagaataagaagttggcatagtaaattggttttagttgtttaattcctctttctaattataataacgtagtaatttttgaaagcgcggtttgtttccaaagtttaataaaacttttaatgaatttttcaataagtagtttattgatttaggaac

SEQ ID NO: 109322 - protein, 162 aa, Zea mays subsp. mays; identical to SEQ ID NO: 55931
  misc_feature (1)..(162): Ceres Seq. ID no. 15179950
  misc_feature (6)..(160): Pfam Name: AhpC/TSA family Pfam Description: AhpC/TSA family
  misc_feature (1)..(162): Homolog of NCBI NO: 4928472 NR Description: type 2 peroxiredoxin [Brassica rapa subsp.
  misc_feature (1)..(162): Homolog of NCBI NO: 30841938 NR Description: thioredoxin peroxidase 1 [Lycopersicon esculentum]
  misc_feature (1)..(162): Homolog of NCBI NO: 18654477 NR Description: thioredoxin peroxidase [Capsicum annuum]
  misc_feature (1)..(162): Homolog of NCBI NO: 19548660 NR Description: peroxiredoxin [Populus tremula x Populus
  misc_feature (1)..(162): Homolog of NCBI NO: 4704732 NR Description: peroxiredoxin TPx2 [Arabidopsis thaliana]
  misc_feature (1)..(162): Homolog of NCBI NO: 21553913 NR Description: peroxiredoxin, putative [Arabidopsis thaliana]
  misc_feature (1)..(162): Homolog of NCBI NO: 18406870 NR Description: peroxiredoxin -related [Arabidopsis thaliana]
  misc_feature (1)..(162): Homolog of NCBI NO: 21593881 NR Description: type 2 peroxiredoxin, putative [Arabidopsis
  misc_feature (1)..(162): Homolog of NCBI NO: 15218876 NR Description: type 2 peroxiredoxin -related [Arabidopsis
  misc_feature (1)..(162): Homolog of NCBI NO: 15218877 NR Description: type 2 peroxiredoxin -related [Arabidopsis

SEQ ID NO: 109323 - protein, 84 aa, Zea mays subsp. mays; identical to SEQ ID NO: 55933
  misc_feature (1)..(84): Ceres Seq. ID no. 15179951
  misc_feature (1)..(82): Pfam Name: AhpC/TSA family Pfam Description: AhpC/TSA family
  misc_feature (1)..(84): Homolog of NCBI NO: 30841938 NR Description: thioredoxin peroxidase 1 [Lycopersicon esculentum]
  misc_feature (1)..(84): Homolog of NCBI NO: 18654477 NR Description: thioredoxin peroxidase [Capsicum annuum]
  misc_feature (1)..(84): Homolog of NCBI NO: 19548660 NR Description: peroxiredoxin [Populus tremula x Populus
  misc_feature (1)..(84): Homolog of NCBI NO: 4704732 NR Description: peroxiredoxin TPx2 [Arabidopsis thaliana]
  misc_feature (1)..(84): Homolog of NCBI NO: 21553913 NR Description: peroxiredoxin, putative [Arabidopsis thaliana]
  misc_feature (1)..(84): Homolog of NCBI NO: 18406870 NR Description: peroxiredoxin -related [Arabidopsis thaliana]
  misc_feature (1)..(84): Homolog of NCBI NO: 21593881 NR Description: type 2 peroxiredoxin, putative [Arabidopsis
  misc_feature (1)..(84): Homolog of NCBI NO: 15218876 NR Description: type 2 peroxiredoxin -related [Arabidopsis
  misc_feature (1)..(84): Homolog of NCBI NO: 15218877 NR Description: type 2 peroxiredoxin -related [Arabidopsis
  misc_feature (1)..(84): Homolog of NCBI NO: 4928472 NR Description: type 2 peroxiredoxin [Brassica rapa subsp.

SEQ ID NO: 109324 - DNA, 843 bp, Zea mays subsp. mays
  misc_feature (1)..(843): Ceres Seq. ID no. 15179179
  misc_feature: MA Experiment ID: 108689 Result: Down-regulated in Transcription
  misc_feature: MA Experiment 108689 PARAMETER Experiment Name: Zm_Drought_Roots_P Parameter: Age (day) Value: 9
  misc_feature: MA Experiment 108689 PARAMETER Experiment Name: Zm_Drought_Roots_P Parameter: Organism Value: Zea mays
  misc_feature: MA Experiment 108689 PARAMETER Experiment Name: Zm_Drought_Roots_P Parameter: Plant Line Value: 35A19
  misc_feature: MA Experiment 108689 PARAMETER Experiment Name: Zm_Drought_Roots_P Parameter: Timepoint (hr) Value: 24
  misc_feature: MA Experiment 108689 PARAMETER Experiment Name: Zm_Drought_Roots_P Parameter: Tissue Value: Roots
  misc_feature: MA Experiment 108689 PARAMETER Experiment Name: Zm_Drought_Roots_P Parameter: Treatment Value: Drought vs. No Drought
  misc_feature: MA Experiment ID: 20000492 Result: Up-regulated in Transcription
  misc_feature: MA Experiment 20000492 PARAMETER Experiment Name: Zm_Hybrid_Seed_Dev_P Parameter: DAP Value: 12
  misc_feature: MA Experiment 20000492 PARAMETER Experiment Name: Zm_Hybrid_Seed_Dev_P Parameter: Organism Value: Zea mays
  misc_feature: MA Experiment 20000492 PARAMETER Experiment Name: Zm_Hybrid_Seed_Dev_P Parameter: Plant Line Value: 35A19
  misc_feature: MA Experiment 20000492 PARAMETER Experiment Name: Zm_Hybrid_Seed_Dev_P Parameter: Tissue Value: Fert Kernel vs. Unfert Floret
  misc_feature: MA Experiment ID: 20000626 Result: Up-regulated in Transcription
  misc_feature: MA Experiment 20000626 PARAMETER Experiment Name: Zm_Herbicide-Treatments_P Parameter: Timepoint (hr) Value: 12
  misc_feature: MA Experiment 20000626 PARAMETER Experiment Name: Zm_Herbicide-Treatments_P Parameter: Tissue Value: Aerial
  misc_feature: MA Experiment 20000626 PARAMETER Experiment Name: Zm_Herbicide-Treatments_P Parameter: Treatment Value: Roundup vs. No Treatment
tatttttggacaaattaataaggtggggtattacagggggactgatgtttaccacttatttttagctttagtgttcacaaatgtattctttatgagtttttgacatgtgcagcctaatatggaacggctattttcagagtttatagaatcctgtacttggctgttaccattcccacatagcatttcattccgatttaggggctgtagtggttgaattactttcatggacaggcaccaaggacaaacagtgaagttcccagaaacatgtctgatgcagtgccagctacagatttcagaaagggaccagtggcaattgaaaaccaagtggctacaccaacaggcacaactgaagttatcattccttgcaattatataggctttgtctgtggaaacaatggcagtgaaattgaagaaatagagaagatgtcaggtgcttcaattacagttcatgatcctaaagctggcgacgcaaactcaaaagttgttatatgcggggatcccgaagaaacaaagaaggcacagagcctgattcatgccttcatattctgtggtctgtatcaaacataattgatgacttgatcactgtgcagtaccatcgtcgtttatgttcttgaatctagagtagttcccatgggcagatttcagcccttgattggatgtacatgtaccgtcgctaccggggtggatgtaggtagggctgatgcatgccttgtacaaacaacgccgatgtacatttctgtagtcctgtgttttagtttgggggaatggcaccatggaatgtgatgggttggctgcccggacctctgtggaatgtttaaccccaagccatcattggttttcatg

SEQ ID NO: 109325 - protein, 100 aa, Zea mays subsp. mays
  misc_feature (1)..(100): Ceres Seq. ID no. 15179180
  misc_feature (29)..(77): Pfam Name: KH domain Pfam Description: KH domain
  misc_feature (1)..(96): Homolog of NCBI NO: 28261403 NR Description: HEN4 [Arabidopsis thaliana]
  misc_feature (1)..(96): Homolog of NCBI NO: 22328051 NR Description: KH domain protein [Arabidopsis thaliana]
  misc_feature (11)..(96): Homolog of NCBI NO: 15217969 NR Description: KH domain protein [Arabidopsis thaliana]
MSDAVPATDFRKGPVAIENQVATPTGTTEVIIPCNYIGFVCGNNGSEIEEIEKMSGASITVHDPKAGDANSKVVICGDPEETKKAQSLIHAFIFCGLYQT

SEQ ID NO: 109326 - protein, 50 aa, Zea mays subsp. mays
  misc_feature (1)..(50): Ceres Seq. ID no. 15179181
MDRHQGQTVKFPETCLMQCQLQISERDQWQLKTKWLHQQAQLKLSFLAII

SEQ ID NO: 109327 - protein, 50 aa, Zea mays subsp. mays
  misc_feature (1)..(50): Ceres Seq. ID no. 15179182
MGRFQPLIGCTCTVATGVDVGRADACLVQTTPMYISVVLCFSLGEWHHGM

SEQ ID NO: 109328 - DNA, 1046 bp, Zea mays subsp. mays
  misc_feature (1)..(1046): Ceres Seq. ID no. 14309438
cttcacttttagtctctaacgttttcctcattcttcttcttctttttttttttttgcttcgggttcaagtcagctatggtggctatgtcctctgcttctggttctgctctttgtttcactgatgcttctagttctcccgctatcagacgtgatcttggatctttctgtcttcctcctagcacaatcacctttggatttgtcgataagcctattataaatcttcagcgactcagattatctcggttgaagcctcgagcagcaaacgctactgctgtggagaatggtaagcaggattctgacgaagtcccaactccagtggtcatagtcgaccaagattctgaccctgatgcaaccgtcgttgaagtaacatttggagaccgtctcggagctctacttgatactatgaatgccctaaaaaacttgggtctgaatgtcgtcaaggctaatgtctacctcgattcgtctggcaaacacaacaaatttgccattactaaagcggatagtggaagaaaagtagaagaccctgagttgctcgaggccatccgtctcactgtcataaacaatttgcttgagtttcatcctgaatcaagttctcagttggcaatgggagcagcttttggtgttcttccaccaactgaacaggttgatgtggacattgcaacacatatcaaaattgaagatgatggaccagaccgcagtttactgtacatagaaacagcggataggcctggactattagttgagctggtgaagatgattacagatatcagcgtagctgtcgaatctggagagttcgacaccgagggtttgttggctaaggttaagttccacgtaagttacagaaacaaagccctaatcaagcctcttcagcaggttcttgccaatagtctgaggtacttcttgaggcgtccatctactaacgactccagtttctgaaatgtcatttataagaaagaaaacaaaaaaacacaaaattgaaatatcatttcacatgaatacttatttttttacattttaccaaaataaactgcttcgttttagtggcc

SEQ ID NO: 109329 - protein, 286 aa, Zea mays subsp. mays
  misc_feature (1)..(286): Ceres Seq. ID no. 14309439
  misc_feature (208)..(277): Pfam Name: ACT domain Pfam Description: ACT domain
  misc_feature (206)..(262): Homolog of NCBI NO: 15221589 NR Description: uridylyltransferase-related [Arabidopsis
  misc_feature (80)..(194): Homolog of NCBI NO: 15221589 NR Description: uridylyltransferase-related [Arabidopsis
  misc_feature (206)..(262): Homolog of NCBI NO: 25370627 NR Description: protein F4N2.2 [imported] - Arabidopsis thaliana
  misc_feature (80)..(194): Homolog of NCBI NO: 25370627 NR Description: protein F4N2.2 [imported] - Arabidopsis thaliana
  misc_feature (61)..(286): Homolog of NCBI NO: 21592963 NR Description: unknown [Arabidopsis thaliana]
  misc_feature (61)..(286): Homolog of NCBI NO: 15238305 NR Description: ACT domain-containing protein [Arabidopsis
  misc_feature (2)..(286): Homolog of NCBI NO: 18394414 NR Description: expressed protein [Arabidopsis thaliana]
MVAMSSASGSALCFTDASSSPAIRRDLGSFCLPPSTITFGFVDKPIINLQRLRLSRLKPRAANATAVENGKQDSDEVPTPVVIVDQDSDPDATVVEVTFGDRLGALLDTMNALKNLGLNVVKANVYLDSSGKHNKFAITKADSGRKVEDPELLEAIRLTVINNLLEFHPESSSQLAMGAAFGVLPPTEQVDVDIATHIKIEDDGPDRSLLYIETADRPGLLVELVKMITDISVAVESGEFDTEGLLAKVKFHVSYRNKALIKPLQQVLANSLRYFLRRPSTNDSSF

SEQ ID NO: 109330 - protein, 283 aa, Zea mays subsp. mays
  misc_feature (1)..(283): Ceres Seq. ID no. 14309440
  misc_feature (205)..(274): Pfam Name: ACT domain Pfam Description: ACT domain
  misc_feature (203)..(259): Homolog of NCBI NO: 15221589 NR Description: uridylyltransferase-related [Arabidopsis
  misc_feature (77)..(191): Homolog of NCBI NO: 15221589 NR Description: uridylyltransferase-related [Arabidopsis
  misc_feature (203)..(259): Homolog of NCBI NO: 25370627 NR Description: protein F4N2.2 [imported] - Arabidopsis thaliana
  misc_feature (77)..(191): Homolog of NCBI NO: 25370627 NR Description: protein F4N2.2 [imported] - Arabidopsis thaliana
  misc_feature (58)..(283): Homolog of NCBI NO: 21592963 NR Description: unknown [Arabidopsis thaliana]
  misc_feature (58)..(283): Homolog of NCBI NO: 15238305 NR Description: ACT domain-containing protein [Arabidopsis
  misc_feature (1)..(283): Homolog of NCBI NO: 18394414 NR Description: expressed protein [Arabidopsis thaliana]
MSSASGSALCFTDASSSPAIRRDLGSFCLPPSTITFGFVDKPIINLQRLRLSRLKPRAANATAVENGKQDSDEVPTPVVIVDQDSDPDATVVEVTFGDRLGALLDTMNALKNLGLNVVKANVYLDSSGKHNKFAITKADSGRKVEDPELLEAIRLTVINNLLEFHPESSSQLAMGAAFGVLPPTEQVDVDIATHIKIEDDGPDRSLLYIETADRPGLLVELVKMITDISVAVESGEFDTEGLLAKVKFHVSYRNKALIKPLQQVLANSLRYFLRRPSTNDSSF

SEQ ID NO: 109331 - protein, 177 aa, Zea mays subsp. mays
  misc_feature (1)..(177): Ceres Seq. ID no. 14309441
  misc_feature (99)..(168): Pfam Name: ACT domain Pfam Description: ACT domain
  misc_feature (97)..(153): Homolog of NCBI NO: 15221589 NR Description: uridylyltransferase-related [Arabidopsis
  misc_feature (1)..(85): Homolog of NCBI NO: 15221589 NR Description: uridylyltransferase-related [Arabidopsis
  misc_feature (97)..(153): Homolog of NCBI NO: 25370627 NR Description: protein F4N2.2 [imported] - Arabidopsis thaliana
  misc_feature (1)..(85): Homolog of NCBI NO: 25370627 NR Description: protein F4N2.2 [imported] - Arabidopsis thaliana
  misc_feature (1)..(177): Homolog of NCBI NO: 21592963 NR Description: unknown [Arabidopsis thaliana]
  misc_feature (1)..(177): Homolog of NCBI NO: 15238305 NR Description: ACT domain-containing protein [Arabidopsis
  misc_feature (1)..(177): Homolog of NCBI NO: 18394414 NR Description: expressed protein [Arabidopsis thaliana]
MNALKNLGLNVVKANVYLDSSGKHNKFAITKADSGRKVEDPELLEAIRLTVINNLLEFHPESSSQLAMGAAFGVLPPTEQVDVDIATHIKIEDDGPDRSLLYIETADRPGLLVELVKMITDISVAVESGEFDTEGLLAKVKFHVSYRNKALIKPLQQVLANSLRYFLRRPSTNDSSF

SEQ ID NO: 109332 - DNA, 1087 bp, Zea mays subsp. mays
  misc_feature (1)..(1087): Ceres Seq. ID no. 14309434
atcaaacaacaccctccaagtgctctctcagatagggatctcaacgcagcagcagcacaaaccctaatttcgagaaagaggagattcgatttctaaaaaaatggcgtacgcttctcgtttcctctccagatctaagcagctacaagggagtttagtcattttgcagcagcaccatgctattcccgtccgcgcttttgccaaggaagctgctcgtcctacttttaaaggagatgagatgttgaagggtgtctttacggagatcaagaacaaatttctggctgcagttgatattctccgtaaggagaagatcacccttgatcctgaagaccctgctgcggtcaaacagtatgctaatgtcatgaagaccatcaggcaaaaggcagacatgttctccgaatctcaacgcatcaaatatgatattgagaacgagactaaggagatcccagatgctcgtgcttacctcttgaagttgaaggatatccgcaccaggagggggcttactgatgagcttggtgctgaggccatgatgttcgaggctttggagaaagttgaaaaggatataaagaagcctctcttgagaagcgacaagaaaggaatggatcttttggttgctgaattcgagaaaggcaacaaaaagcttgggattaggaaagaagatcttcctaaatacgaggagaacttggagctgagcattgctaaagctcagttggatgagctgaagagtgatgctcttggagcaatggaatctcagaaaaagaaggaggagttcaaggatgaggagatgccagacgtgaaatcgttggacatccgtaactttatgtaaggtttgatgatgatcctaagaagaagcattttgagattttcttgcaagaaaagcagaagaaagatctctctcgctcttttttattgttcccttttgttgtttttggttaataaggtcggtctctcaccatggactcgaaatataataccaaatggtcttaactttctttctggttattaatacgcttgtgatttttagaaacaaacgtgggtttcatgtttctgataatggtgatataaatgaaactcgagattacatttaaat

SEQ ID NO: 109333 - protein, 240 aa, Zea mays subsp. mays
  misc_feature (1)..(240): Ceres Seq. ID no. 14309435
  misc_feature (1)..(220): Homolog of NCBI NO: 30681554 NR Description: ATP synthase -related [Arabidopsis thaliana]
  misc_feature (1)..(240): Homolog of NCBI NO: 21592716 NR Description: putative ATP synthase [Arabidopsis thaliana]
  misc_feature (1)..(240): Homolog of NCBI NO: 15227104 NR Description: ATP synthase -related [Arabidopsis thaliana]
MAYASRFLSRSKQLQGSLVILQQHHAIPVRAFAKEAARPTFKGDEMLKGVFTEIKNKFLAAVDILRKEKITLDPEDPAAVKQYANVMKTIRQKADMFSESQRIKYDIENETKEIPDARAYLLKLKDIRTRRGLTDELGAEAMMFEALEKVEKDIKKPLLRSDKKGMDLLVAEFEKGNKKLGIRKEDLPKYEENLELSIAKAQLDELKSDALGAMESQKKKEEFKDEEMPDVKSLDIRNFM

SEQ ID NO: 109334 - protein, 195 aa, Zea mays subsp. mays
  misc_feature (1)..(195): Ceres Seq. ID no. 14309436
  misc_feature (1)..(175): Homolog of NCBI NO: 30681554 NR Description: ATP synthase -related [Arabidopsis thaliana]
  misc_feature (1)..(195): Homolog of NCBI NO: 21592716 NR Description: putative ATP synthase [Arabidopsis thaliana]
  misc_feature (1)..(195): Homolog of NCBI NO: 15227104 NR Description: ATP synthase -related [Arabidopsis thaliana]
MLKGVFTEIKNKFLAAVDILRKEKITLDPEDPAAVKQYANVMKTIRQKADMFSESQRIKYDIENETKEIPDARAYLLKLKDIRTRRGLTDELGAEAMMFEALEKVEKDIKKPLLRSDKKGMDLLVAEFEKGNKKLGIRKEDLPKYEENLELSIAKAQLDELKSDALGAMESQKKKEEFKDEEMPDVKSLDIRNFM

SEQ ID NO: 109335 - protein, 154 aa, Zea mays subsp. mays
  misc_feature (1)..(154): Ceres Seq. ID no. 14309437
  misc_feature (1)..(134): Homolog of NCBI NO: 30681554 NR Description: ATP synthase -related [Arabidopsis thaliana]
  misc_feature (1)..(154): Homolog of NCBI NO: 21592716 NR Description: putative ATP synthase [Arabidopsis thaliana]
  misc_feature (1)..(154): Homolog of NCBI NO: 15227104 NR Description: ATP synthase -related [Arabidopsis thaliana]
MKTIRQKADMFSESQRIKYDIENETKEIPDARAYLLKLKDIRTRRGLTDELGAEAMMFEALEKVEKDIKKPLLRSDKKGMDLLVAEFEKGNKKLGIRKEDLPKYEENLELSIAKAQLDELKSDALGAMESQKKKEEFKDEEMPDVKSLDIRNFM

SEQ ID NO: 109336 - DNA, 670 bp, Zea mays subsp. mays
  misc_feature (1)..(670): Ceres Seq. ID no. 14309430
aaaaaaaaaaaatctcaaatctccttccactataaccatcagtaaaatctttcagccagcgcaaaccttcatcccgtgcaatggaaaccaccggaaaagtgaagaaggcttttggaggaagaaaagccggtggcccaaaaaccaaatcggtttcgaaatcgatcaaagccggtctccagttccccgtcggaagaatcacacgtttcctgaagaagggacggtacgctcagagactcggtggtggagctccggtctacatggccgccgttcttgagtacctcgcagccgaagttcttgagcttgctggtaacgcagcgagagacaacaagaagtcgaggatcattccgaggcatcttcttttggcgattaggaacgatgaagagttggggaagcttctgagtggagttacgatcgctcacggtggtgtgttgccgaacattaactctgttctattgcctaagaagtctgctaaatcgactgaggaagttgcgtccaagtcgccagctaaatctccgaagaaagcttaaatgtgctcgactttggtttcgttcaccagtttagttaatgtgttcgggtgctttgtgttgagtttggtggatgtatatgtaaaaatatctatcttttttaattatgtattttggatttgatgtctcttcaggtccaactttcc

SEQ ID NO: 109337 - protein, 148 aa, Zea mays subsp. mays
  misc_feature (1)..(148): Ceres Seq. ID no. 14309431
  misc_feature (6)..(128): Pfam Name: Core histone H2A/H2B/H3/H4 Pfam Description: Core histone H2A/H2B/H3/H4
  misc_feature (6)..(148): Homolog of NCBI NO: 121974 NR Description: HISTONE H2A.2.1
  misc_feature (1)..(148): Homolog of NCBI NO: 122006 NR Description: HISTONE H2A
  misc_feature (6)..(148): Homolog of NCBI NO: 121982 NR Description: HISTONE H2A.2.2
  misc_feature (1)..(148): Homolog of NCBI NO: 122003 NR Description: HISTONE H2A
  misc_feature (5)..(148): Homolog of NCBI NO: 729671 NR Description: Histone H2A
  misc_feature (5)..(148): Homolog of NCBI NO: 34914498 NR Description: putative histone H2A [Oryza sativa (japonica
  misc_feature (1)..(148): Homolog of NCBI NO: 7649159 NR Description: histone H2A [Euphorbia esula]
  misc_feature (1)..(148): Homolog of NCBI NO: 27529852 NR Description: H2A histone [Nicotiana tabacum]
  misc_feature (1)..(148): Homolog of NCBI NO: 122007 NR Description: Histone H2A
  misc_feature (1)..(148): Homolog of NCBI NO: 15238549 NR Description: histone H2A, putative [Arabidopsis thaliana]
METTGKVKKAFGGRKAGGPKTKSVSKSIKAGLQFPVGRITRFLKKGRYAQRLGGGAPVYMAAVLEYLAAEVLELAGNAARDNKKSRIIPRHLLLAIRNDEELGKLLSGVTIAHGGVLPNINSVLLPKKSAKSTEEVASKSPAKSPKKA

SEQ ID NO: 109338 - protein, 90 aa, Zea mays subsp. mays
  misc_feature (1)..(90): Ceres Seq. ID no. 14309432
KKKNLKSPSTITISKIFQPAQTFIPCNGNHRKSEEGFWRKKSRWPKNQIGFEIDQSRSPVPRRKNHTFPEEGTVRSETRWWSSGLHGRRS

SEQ ID NO: 109339 - protein, 89 aa, Zea mays subsp. mays
  misc_feature (1)..(89): Ceres Seq. ID no. 14309433
  misc_feature (1)..(69): Pfam Name: Core histone H2A/H2B/H3/H4 Pfam Description: Core histone H2A/H2B/H3/H4
  misc_feature (1)..(89): Homolog of NCBI NO: 121974 NR Description: HISTONE H2A.2.1
  misc_feature (1)..(89): Homolog of NCBI NO: 122006 NR Description: HISTONE H2A
  misc_feature (1)..(89): Homolog of NCBI NO: 121982 NR Description: HISTONE H2A.2.2
  misc_feature (1)..(89): Homolog of NCBI NO: 122003 NR Description: HISTONE H2A
  misc_feature (1)..(89): Homolog of NCBI NO: 729671 NR Description: Histone H2A
  misc_feature (1)..(89): Homolog of NCBI NO: 34914498 NR Description: putative histone H2A [Oryza sativa (japonica
  misc_feature (1)..(89): Homolog of NCBI NO: 7649159 NR Description: histone H2A [Euphorbia esula]
  misc_feature (1)..(89): Homolog of NCBI NO: 27529852 NR Description: H2A histone [Nicotiana tabacum]
  misc_feature (1)..(89): Homolog of NCBI NO: 122007 NR Description: Histone H2A
  misc_feature (1)..(89): Homolog of NCBI NO: 15238549 NR Description: histone H2A, putative [Arabidopsis thaliana]
MAAVLEYLAAEVLELAGNAARDNKKSRIIPRHLLLAIRNDEELGKLLSGVTIAHGGVLPNINSVLLPKKSAKSTEEVASKSPAKSPKKA

SEQ ID NO: 109340 - DNA, 762 bp, Zea mays subsp. mays
  misc_feature (1)..(762): Ceres Seq. ID no. 14309169
aaaaaaaaaaatgcttctaatagtttggtcgacgacacgagaggatctctctacccagctctctccgatcgaagcagtcaatttccaatcggagaagatgcagcagaggaaaacgacggcggcggcggcgggtaggccaagtggtaccgatggatctgatttctcgtaccggatggtggttgactctcgttacacgaaggtcactaaagggagatctcgtctccgtcttttgatccttgttcaggctacaatttatctaattggactgtcgtgtgcattcatgacaagtactaaaaatgaggagaggaacacccttggaattgcatctgcttctattggcttactctttgcattcattggagattttggttgcagacgcagcagagtaaaccttttgaggctctacacggctgcctccaccgttgtcatggttctttctctgttttctgctgttaggagcagattaacaatggaggaacggaatagttctggaacagcagctaaccttgagctcttagggttcatttctgctcaattgggagcggtggtgcagatattagcaatcatcgttacgggttcccttgtcaataatatgtccccacctacgaagacagaatagacaagacaagagagtttgtggtactggcatgtgtgattctgctaaatgaggaagacatttagaaatttgaagttttcagttctaccaaatgaatagttgtttacttcagtatcttctttcattattcaaaagacatttttaat

SEQ ID NO: 109341 - protein, 205 aa, Zea mays subsp. mays
  misc_feature (1)..(205): Ceres Seq. ID no. 14309170
  misc_feature (30)..(203): Homolog of NCBI NO: 37535924 NR Description: unknown protein [Oryza sativa (japonica
  misc_feature (33)..(203): Homolog of NCBI NO: 18423288 NR Description: expressed protein [Arabidopsis thaliana]
KKKMLLIVWSTTREDLSTQLSPIEAVNFQSEKMQQRKTTAAAAGRPSGTDGSDFSYRMVVDSRYTKVTKGRSRLRLLILVQATIYLIGLSCAFMTSTKNEERNTLGIASASIGLLFAFIGDFGCRRSRVNLLRLYTAASTVVMVLSLFSAVRSRLTMEERNSSGTAANLELLGFISAQLGAVVQILAIIVTGSLVNNMSPPTKTE

SEQ ID NO: 109342 - protein, 202 aa, Zea mays subsp. mays
  misc_feature (1)..(202): Ceres Seq. ID no. 14309171
  misc_feature (27)..(200): Homolog of NCBI NO: 37535924 NR Description: unknown protein [Oryza sativa (japonica
  misc_feature (30)..(200): Homolog of NCBI NO: 18423288 NR Description: expressed protein [Arabidopsis thaliana]
MLLIVWSTTREDLSTQLSPIEAVNFQSEKMQQRKTTAAAAGRPSGTDGSDFSYRMVVDSRYTKVTKGRSRLRLLILVQATIYLIGLSCAFMTSTKNEERNTLGIASASIGLLFAFIGDFGCRRSRVNLLRLYTAASTVVMVLSLFSAVRSRLTMEERNSSGTAANLELLGFISAQLGAVVQILAIIVTGSLVNNMSPPTKTE

SEQ ID NO: 109343 - protein, 173 aa, Zea mays subsp. mays
  misc_feature (1)..(173): Ceres Seq. ID no. 14309172
  misc_feature (1)..(171): Homolog of NCBI NO: 37535924 NR Description: unknown protein [Oryza sativa (japonica
  misc_feature (1)..(171): Homolog of NCBI NO: 18423288 NR Description: expressed protein [Arabidopsis thaliana]
MQQRKTTAAAAGRPSGTDGSDFSYRMVVDSRYTKVTKGRSRLRLLILVQATIYLIGLSCAFMTSTKNEERNTLGIASASIGLLFAFIGDFGCRRSRVNLLRLYTAASTVVMVLSLFSAVRSRLTMEERNSSGTAANLELLGFISAQLGAVVQILAIIVTGSLVNNMSPPTKTE

SEQ ID NO: 109344 - DNA, 889 bp, Zea mays subsp. mays
  misc_feature (1)..(889): Ceres Seq. ID no. 14309152
ttttaggctcgtgaaaaaaaccctactctcctctcctcttttaccccttccaaaaattacgccggcggcgaagccaaaactcttttaaggctagcagagaggatcgtgagcatggcggaaggagctaacaacgggacgaggcgcccaaggccgaacctactaatcacggggactcccggtaccggtaaatcgacgacggcttctgctctggcggaagccacgaacttccgttacatctgcgtcggagatctggtcaaagagaagaacttgcacgatggttgggacgatcagttcgagtgccacgtcattaacgaagacctggtgtgtgatgagcttgaagatgtaatagaaggaggaggtgtcattgtagattaccacggctgtgacttctttcccgagcgttggtttgatcgtgttgtcgtccttcaaactgagaactctgtcttgtatgatcgtttaaccaagaggggttattcgggaaccaagcttactaacaacatcgagtgcgagatcttccaagtcctgctcgaagaagctagagatagttaccaagaggagattgtcatcgcgctgcaaagtgacacaatcgaagatatctctgacaatgtcgcaagtttgacggaatggattaccacatggcatggcactggcagccctgagaaatgttgatgacaatgcatcttgcaatttactagtttcttttgatgggttctgtgtcggccacgcttgcaatttgtatactaatattctgaaagacaatgcagctgttgcactcagcttatgtatgttccctttgatacttattaaaagaaagcttgtcttatcttccctcatcatgttgtaatgttcagagtgacatatgttgtatgttattaccgtattagtcact

SEQ ID NO: 109345 - protein, 185 aa, Zea mays subsp. mays
  misc_feature (1)..(185): Ceres Seq. ID no. 14309153
  misc_feature (14)..(176): Homolog of NCBI NO: 34853506 NR Description: similar to RIKEN cDNA 4921516M08 [Rattus
  misc_feature (14)..(176): Homolog of NCBI NO: 28076975 NR Description: RIKEN cDNA 4921516M08 [Mus musculus]
  misc_feature (14)..(176): Homolog of NCBI NO: 33303797 NR Description: TAF9 RNA polymerase II, TATA box binding protein
  misc_feature (14)..(176): Homolog of NCBI NO: 7706212 NR Description: adrenal gland protein AD-004
  misc_feature (14)..(176): Homolog of NCBI NO: 6457370 NR Description: unknown protein [Oryctolagus sp.]
  misc_feature (6)..(117): Homolog of NCBI NO: 15239296 NR Description: expressed protein [Arabidopsis thaliana]
  misc_feature (8)..(70): Homolog of NCBI NO: 34902744 NR Description: hypothetical protein~similar to Arabidopsis
  misc_feature (71)..(181): Homolog of NCBI NO: 34902744 NR Description: hypothetical protein~similar to Arabidopsis
  misc_feature (8)..(181): Homolog of NCBI NO: 34395293 NR Description: putative adrenal gland protein AD-004
  misc_feature (6)..(176): Homolog of NCBI NO: 10177726 NR Description: gene_id:K9B18.5~ref|NP_057367.1~similar to
MAEGANNGTRRPRPNLLITGTPGTGKSTTASALAEATNFRYICVGDLVKEKNLHDGWDDQFECHVINEDLVCDELEDVIEGGGVIVDYHGCDFFPERWFDRVVVLQTENSVLYDRLTKRGYSGTKLTNNIECEIFQVLLEEARDSYQEEIVIALQSDTIEDISDNVASLTEWITTWHGTGSPEKC

SEQ ID NO: 109346 - DNA, 746 bp, Zea mays subsp. mays
  misc_feature (1)..(746): Ceres Seq. ID no. 14309410
aaaagtcaaaacactctagtcagcaatgtggagcgtcaccggagctttgtgcgtggcggtgcctaccgccgccgcattccgtccaaaaccctttctcgtctcctctaaccttctccccaaccagacgaagaagctccatctctctcctcggcagcctccggctctatcatcacatttctcctcgtcttctttcaaaaccgccgctacttccgttcaacaacagtcagatgataaaaagggggagaagggcactaagtactacttccttgttgcaaacgctaagttcatgctcgacgaggaggagcactttcaggagcaactgtttgaacgtcttagatactacggagagcgtgacaaggaacaagacttctggctcgtcattgagcctaggttcctcgacaagttccccaacatcactcagagactccgtcgccctgctgttgctcttgtttccaccaatggcccctggatcacgtttatgaagttgagattggatcgagttctagctgaatcatttgaagcttcatctctggatgaagccttggcctctagtcctacaactctagagttcgaccagcctggaaactgggtggctccgtacccaaagtatgaacctggatggtgggacaccttcttgcccaaagcaaaacaagaatctctagcatagaactttgtccacctttgtcttagtgctttgtagtttgtattactgagcttcttgtgttatccaaatatgattgcaactc

SEQ ID NO: 109347 - protein, 213 aa, Zea mays subsp. mays; identical to SEQ ID NO: 55964
  misc_feature (1)..(213): Ceres Seq. ID no. 14309411
  misc_feature (76)..(176): Homolog of NCBI NO: 33865445 NR Description: conserved hypothetical protein [Synechococcus sp.
  misc_feature (78)..(175): Homolog of NCBI NO: 16329384 NR Description: hypothetical protein [Synechocystis sp. PCC 6803]
  misc_feature (78)..(178): Homolog of NCBI NO: 17227712 NR Description: hypothetical protein [Nostoc sp. PCC 7120]
  misc_feature (67)..(178): Homolog of NCBI NO: 23129763 NR Description: hypothetical protein [Nostoc punctiforme]
  misc_feature (78)..(178): Homolog of NCBI NO: 23042740 NR Description: hypothetical protein [Trichodesmium erythraeum
  misc_feature (1)..(211): Homolog of NCBI NO: 15237144 NR Description: unknown protein (sp|P72777) -related [Arabidopsis
  misc_feature (78)..(168): Homolog of NCBI NO: 37520451 NR Description: hypothetical protein [Gloeobacter violaceus]

SEQ ID NO: 109348 - protein, 159 aa, Zea mays subsp. mays; identical to SEQ ID NO: 55965
  misc_feature (1)..(159): Ceres Seq. ID no. 14309412

SEQ ID NO: 109349 - protein, 126 aa, Zea mays subsp. mays; identical to SEQ ID NO: 55966
  misc_feature (1)..(126): Ceres Seq. ID no. 14309413
  misc_feature (1)..(81): Homolog of NCBI NO: 37520451 NR Description: hypothetical protein [Gloeobacter violaceus]
  misc_feature (1)..(89): Homolog of NCBI NO: 33865445 NR Description: conserved hypothetical protein [Synechococcus sp.
  misc_feature (1)..(88): Homolog of NCBI NO: 16329384 NR Description: hypothetical protein [Synechocystis sp. PCC 6803]
  misc_feature (1)..(91): Homolog of NCBI NO: 17227712 NR Description: hypothetical protein [Nostoc sp. PCC 7120]
  misc_feature (1)..(91): Homolog of NCBI NO: 23129763 NR Description: hypothetical protein [Nostoc punctiforme]
  misc_feature (1)..(91): Homolog of NCBI NO: 23042740 NR Description: hypothetical protein [Trichodesmium erythraeum
  misc_feature (1)..(124): Homolog of NCBI NO: 15237144 NR Description: unknown protein (sp|P72777) -related [Arabidopsis

SEQ ID NO: 109350 - DNA, 1615 bp, Zea mays subsp. mays
  misc_feature (1)..(1615): Ceres Seq. ID no. 15179094
aaaaaatatcgaggaagaacttcttcttcttctggtgttattgagctctttctctcttggcctcgcctcgcctctgaccacttcgctcctcgggcattaggtactttgtaagtatctgttgatatttctctgcaaagttttcaaaatgggagactcagaaaatgctcaccaaccttccaaaaagagaggtgctttgaaacagctgtctcgcgagaatccggatgatgatgatgatattggttcagctgaacttgagagtggcactttcaagaaggccagtgatgaggtgttggcgaccagaagaattgtcaaaatcaagcgcaaagagccatcatcagctgcaccaccagccgcagcatccaacccattcgccggaattcaattgctccctactgcacctgcttcaaccggttttggaacaaatgctcctctggctgagtctaaagtggctcctgctgaagctgtagttgacgacaaccaaaaggcagttgatgctgaagacggcgatgaagttgacagtaagaagaaggttgatgtcacagatgaagtctctgtaaagtctaaagtaaaggatgttgatgataatgagtgtggaaagacatctgatgctggtgtagaccaggcggtctcgggtgttagcaacgctgtggaaggagcagcacaaactgaggatcctcttgagaaggaatcaggaggtgatcagactgatataaaagaaaaagaaggcgaaggaagcgttgaagcagctaagaacggtgatgatgataataataacggctctttgagttcgttccagcagcattcgagtagcaaaaacgcattcaccggacttgccggcacacagtcctctggttcttccttctcatttggtgtggtgtctcaggatggtagttctggacctctcttcggctttggcctctcaaacagcaacaacacttcttccctcttcggtgcatctggatcttccattatcaagaagagcgaaggcactgggtttcctccaaagcaagaggtttccacagaaacaggggaagagaacgagaaagtcgccttctcagctgactcgatcatgtttgaatatcttgatgggggatggagggagcgtggcaaaggagaagtcaaggtcaacgtttcaagcaatggcggtaaagcaaggctggttatgagagctaaaggaaactacaggttgatccttaacgcgagtctctacccggagatgaaacttgcaagcatggacaagaaaggaatcacgttcgcttgtgtgaatagtgaaggccgagaaggtctctctacgtttgcactcaagttcaaagatccaacaatcgttgatgagtttcgcgtagctgttgacaaacataaagaaagtaaaccagtagaaacggctcctccgctgaagacacctgagaactctccaacggctacagatgctgcctgaagtgaaaggtaaaagaaaaacactgaagaaactctcctctttaccttttgtgtctttactttcaagtagttgaattttgaggcagagaaaactagagattcgaacaagtttgtttgttgttgttttcattttaaacagttgttgagactttctggttagcataagacttaaaaaatctgc

SEQ ID NO: 109351 - protein, 429 aa, Zea mays subsp. mays
  misc_feature (1)..(429): Ceres Seq. ID no. 15179095
  misc_feature (289)..(407): Pfam Name: RanBP1 domain Pfam Description: RanBP1 domain
  misc_feature (137)..(426): Homolog of NCBI NO: 8039801 NR Description: Ran-binding protein 2 (RanBP2) (Nuclear pore
  misc_feature (77)..(429): Homolog of NCBI NO: 21355293 NR Description: CG10225-PA [Drosophila melanogaster]
  misc_feature (182)..(426): Homolog of NCBI NO: 2293556 NR Description: Ran binding protein 2 [Homo sapiens]
  misc_feature (363)..(428): Homolog of NCBI NO: 26451646 NR Description: unknown protein [Arabidopsis thaliana]
  misc_feature (1)..(274): Homolog of NCBI NO: 21536684 NR Description: unknown [Arabidopsis thaliana]
  misc_feature (1)..(274): Homolog of NCBI NO: 18400970 NR Description: expressed protein [Arabidopsis thaliana]
  misc_feature (38)..(428): Homolog of NCBI NO: 21536684 NR Description: unknown [Arabidopsis thaliana]
  misc_feature (38)..(428): Homolog of NCBI NO: 18400970 NR Description: expressed protein [Arabidopsis thaliana]
  misc_feature (165)..(427): Homolog of NCBI NO: 22655290 NR Description: unknown protein [Arabidopsis thaliana]
  misc_feature (1)..(427): Homolog of NCBI NO: 18403992 NR Description: expressed protein [Arabidopsis thaliana]
MGDSENAHQPSKKRGALKQLSRENPDDDDDIGSAELESGTFKKASDEVLATRRIVKIKRKEPSSAAPPAAASNPFAGIQLLPTAPASTGFGTNAPLAESKVAPAEAVVDDNQKAVDAEDGDEVDSKKKVDVTDEVSVKSKVKDVDDNECGKTSDAGVDQAVSGVSNAVEGAAQTEDPLEKESGGDQTDIKEKEGEGSVEAAKNGDDDNNNGSLSSFQQHSSSKNAFTGLAGTQSSGSSFSFGVVSQDGSSGPLFGFGLSNSNNTSSLFGASGSSIIKKSEGTGFPPKQEVSTETGEENEKVAFSADSIMFEYLDGGWRERGKGEVKVNVSSNGGKARLVMRAKGNYRLILNASLYPEMKLASMDKKGITFACVNSEGREGLSTFALKFKDPTIVDEFRVAVDKHKESKPVETAPPLKTPENSPTATDAA

SEQ ID NO: 109352 - DNA, 700 bp, Zea mays subsp. mays
  misc_feature (1)..(700): Ceres Seq. ID no. 14309400
atcatttcagactctctctctctctccattcttcagctcagagagagagagagagagatggcgagttccatttcttcgatgtcaacacgtttttgtttcatccttaacaacaatggtagtcacaaaccaaacccatggctctatcaaccatcgttaagctcgaacagtctcatattctattcaaagcatcatcctcatcgtcgtccactatcttcttcttcccagattcccgtcgtagagactgatgaaggcgacgacaaagatggccttacattcagtggttgcagcggatgcgggaaggaggtgaaggagaatggttgcaacggcgacggacggattcaaggaggcattgccactgtccctggcttcggttggtggcccattaaggcttaccggccttgtcccggtttcgttgaggccggaggtagataccgccgcatagggcagagcatggatgaggttgcctttggtcgcggtgactctaaatcctccaccgattcctagctttatggctcaggtaaaaaattgcaaacatataccagtttttaattggactattgaaacatattcagattttcaatttagagaaagtcttatgtaacattacaaagtaaatgtttaaatagaattttgcacaaatgatgtttaaatagttgtttgagactgtcttgcagagcaatagatctcttgctttgcttct

SEQ ID NO: 109353 - protein, 167 aa, Zea mays subsp. mays
  misc_feature (1)..(167): Ceres Seq. ID no. 14309401
  misc_feature (47)..(166): Homolog of NCBI NO: 34904394 NR Description: unnamed protein product [Oryza sativa (japonica
  misc_feature (20)..(165): Homolog of NCBI NO: 18422170 NR Description: expressed protein [Arabidopsis thaliana]
  misc_feature (20)..(165): Homolog of NCBI NO: 9757952 NR Description: dbj|BAA92898.1~gene_id:MJC20.18~similar to
IISDSLSLSILQLREREREMASSISSMSTRFCFILNNNGSHKPNPWLYQPSLSSNSLIFYSKHHPHRRPLSSSSQIPVVETDEGDDKDGLTFSGCSGCGKEVKENGCNGDGRIQGGIATVPGFGWWPIKAYRPCPGFVEAGGRYRRIGQSMDEVAFGRGDSKSSTDS

SEQ ID NO: 109354 - protein, 148 aa, Zea mays subsp. mays
  misc_feature (1)..(148): Ceres Seq. ID no. 14309402
  misc_feature (28)..(147): Homolog of NCBI NO: 34904394 NR Description: unnamed protein product [Oryza sativa (japonica
  misc_feature (1)..(146): Homolog of NCBI NO: 18422170 NR Description: expressed protein [Arabidopsis thaliana]
  misc_feature (1)..(146): Homolog of NCBI NO: 9757952 NR Description: dbj|BAA92898.1~gene_id:MJC20.18~similar to
MASSISSMSTRFCFILNNNGSHKPNPWLYQPSLSSNSLIFYSKHHPHRRPLSSSSQIPVVETDEGDDKDGLTFSGCSGCGKEVKENGCNGDGRIQGGIATVPGFGWWPIKAYRPCPGFVEAGGRYRRIGQSMDEVAFGRGDSKSSTDS

SEQ ID NO: 109355 - protein, 141 aa, Zea mays subsp. mays
  misc_feature (1)..(141): Ceres Seq. ID no. 14309403
  misc_feature (21)..(140): Homolog of NCBI NO: 34904394 NR Description: unnamed protein product [Oryza sativa (japonica
  misc_feature (1)..(139): Homolog of NCBI NO: 18422170 NR Description: expressed protein [Arabidopsis thaliana]
  misc_feature (1)..(139): Homolog of NCBI NO: 9757952 NR Description: dbj|BAA92898.1~gene_id:MJC20.18~similar to
MSTRFCFILNNNGSHKPNPWLYQPSLSSNSLIFYSKHHPHRRPLSSSSQIPVVETDEGDDKDGLTFSGCSGCGKEVKENGCNGDGRIQGGIATVPGFGWWPIKAYRPCPGFVEAGGRYRRIGQSMDEVAFGRGDSKSSTDS

SEQ ID NO: 109356 - DNA, 1159 bp, Zea mays subsp. mays
  misc_feature (1)..(1159): Ceres Seq. ID no. 15178828
gagattatcatattattaaagattgagaatatacaactgtagcattgatctgagcaaactcgtttcttctatcatacactcttttgaccttaaacctcaaagattgctgatgaagccatgtgatggatgtctacgttctccccagtttctacgttttccggctgatgggttctctgcgtttcgcagttactccctgtcgaggagcagattcatggccgcttcctccacggatccgatggttggagaggaggcaaacggtggtgttacaatgcttccggctgttgaagacaagtacggtggcgtgatgacggagatgagtcgtcccatggatccttctgccttctctgcacttctcagatcctctctctctaactggactcttcagggaaagaagggagtgtggatcaaattgccgaggcagcttatcggtcttgctgaaactgctgttaaggagggattctggtttcatcacgcggagaaaaactacttgatgcttgtgtattggattcccaaacaagaccatacccttccttccaatgcatctcaccgtgttggcatagccgcctttgttctaaaccacaagaaagaggtgctagtggttcaagagaagacaggaagatttaaaggccaaggtatctggaagttccccaccggagtagtcaatgagggagaatacatccatgatggctcggtcagagaggtgaaagaggagacaggagtggatacagagtttgtccaagtattggctttcagacagacccacaaagctttctttgaaaagtcagatctgttcttcgtctgcatgatgaagcctctttctctggagatcaatgcacaagagtctgagatagaggcagctcagtggatgccatggggggaatacaacaagcaaccattcgtacagaaccatgagctgttaaggtatatgacagacatttgctctgctaaaaccaacggacactacgaaggcttcactcctctccccgtctctgcacctgatctacaaggcaacttgtacttcaacaaccgcgacctcagttctcgccaataacattcttttcccacaagaagcaaatcaaagttgttttctctgctctatgttaagcattttgacatttgaattatcttaagcgaaaacatttgcattcaatgctattcg

SEQ ID NO: 109357 - protein, 313 aa, Zea mays subsp. mays
  misc_feature (1)..(313): Ceres Seq. ID no. 15178829
  misc_feature (146)..(279): Pfam Name: NUDIX domain Pfam Description: NUDIX domain
  misc_feature (53)..(305): Homolog of NCBI NO: 18422772 NR Description: MutT/nudix family protein [Arabidopsis thaliana]
  misc_feature (53)..(305): Homolog of NCBI NO: 8809607 NR Description: mutT domain protein-like [Arabidopsis thaliana]
  misc_feature (53)..(305): Homolog of NCBI NO: 21928133 NR Description: AT5g47240/MQL5_10 [Arabidopsis thaliana]
  misc_feature (53)..(305): Homolog of NCBI NO: 21593371 NR Description: mutT domain protein-like [Arabidopsis thaliana]
  misc_feature (54)..(308): Homolog of NCBI NO: 7486814 NR Description: hypothetical protein M7J2.190 - Arabidopsis
  misc_feature (204)..(308): Homolog of NCBI NO: 30686884 NR Description: MutT/nudix family protein [Arabidopsis thaliana]
  misc_feature (54)..(204): Homolog of NCBI NO: 30686884 NR Description: MutT/nudix family protein [Arabidopsis thaliana]
  misc_feature (54)..(308): Homolog of NCBI NO: 38564312 NR Description: At4g25434 [Arabidopsis thaliana]
  misc_feature (53)..(312): Homolog of NCBI NO: 9758793 NR Description: MutT domain protein-like [Arabidopsis thaliana]
  misc_feature (36)..(312): Homolog of NCBI NO: 18422823 NR Description: MutT/nudix family protein [Arabidopsis thaliana]
MKPCDGCLRSPQFLRFPADGFSAFRSYSLSRSRFMAASSTDPMVGEEANGGVTMLPAVEDKYGGVMTEMSRPMDPSAFSALLRSSLSNWTLQGKKGVWIKLPRQLIGLAETAVKEGFWFHHAEKNYLMLVYWIPKQDHTLPSNASHRVGIAAFVLNHKKEVLVVQEKTGRFKGQGIWKFPTGVVNEGEYIHDGSVREVKEETGVDTEFVQVLAFRQTHKAFFEKSDLFFVCMMKPLSLEINAQESEIEAAQWMPWGEYNKQPFVQNHELLRYMTDICSAKTNGHYEGFTPLPVSAPDLQGNLYFNNRDLSSRQ

SEQ ID NO: 109358 - protein, 279 aa, Zea mays subsp. mays
  misc_feature (1)..(279): Ceres Seq. ID no. 15178830
  misc_feature (112)..(245): Pfam Name: NUDIX domain Pfam Description: NUDIX domain
  misc_feature (19)..(271): Homolog of NCBI NO: 18422772 NR Description: MutT/nudix family protein [Arabidopsis thaliana]
  misc_feature (19)..(271): Homolog of NCBI NO: 8809607 NR Description: mutT domain protein-like [Arabidopsis thaliana]
  misc_feature (19)..(271): Homolog of NCBI NO: 21928133 NR Description: AT5g47240/MQL5_10 [Arabidopsis thaliana]
  misc_feature (19)..(271): Homolog of NCBI NO: 21593371 NR Description: mutT domain protein-like [Arabidopsis thaliana]
  misc_feature (20)..(274): Homolog of NCBI NO: 7486814 NR Description: hypothetical protein M7J2.190 - Arabidopsis
  misc_feature (170)..(274): Homolog of NCBI NO: 30686884 NR Description: MutT/nudix family protein [Arabidopsis thaliana]
  misc_feature (20)..(170): Homolog of NCBI NO: 30686884 NR Description: MutT/nudix family protein [Arabidopsis thaliana]
  misc_feature (20)..(274): Homolog of NCBI NO: 38564312 NR Description: At4g25434 [Arabidopsis thaliana]
  misc_feature (19)..(278): Homolog of NCBI NO: 9758793 NR Description: MutT domain protein-like [Arabidopsis thaliana]
  misc_feature (2)..(278): Homolog of NCBI NO: 18422823 NR Description: MutT/nudix family protein [Arabidopsis thaliana]
MAASSTDPMVGEEANGGVTMLPAVEDKYGGVMTEMSRPMDPSAFSALLRSSLSNWTLQGKKGVWIKLPRQLIGLAETAVKEGFWFHHAEKNYLMLVYWIPKQDHTLPSNASHRVGIAAFVLNHKKEVLVVQEKTGRFKGQGIWKFPTGVVNEGEYIHDGSVREVKEETGVDTEFVQVLAFRQTHKAFFEKSDLFFVCMMKPLSLEINAQESEIEAAQWMPWGEYNKQPFVQNHELLRYMTDICSAKTNGHYEGFTPLPVSAPDLQGNLYFNNRDLSSRQ

SEQ ID NO: 109359 - protein, 271 aa, Zea mays subsp. mays
  misc_feature (1)..(271): Ceres Seq. ID no. 15178831
  misc_feature (104)..(237): Pfam Name: NUDIX domain Pfam Description: NUDIX domain
  misc_feature (11)..(263): Homolog of NCBI NO: 18422772 NR Description: MutT/nudix family protein [Arabidopsis thaliana]
  misc_feature (11)..(263): Homolog of NCBI NO: 8809607 NR Description: mutT domain protein-like [Arabidopsis thaliana]
  misc_feature (11)..(263): Homolog of NCBI NO: 21928133 NR Description: AT5g47240/MQL5_10 [Arabidopsis thaliana]
  misc_feature (11)..(263): Homolog of NCBI NO: 21593371 NR Description: mutT domain protein-like [Arabidopsis thaliana]
  misc_feature (12)..(266): Homolog of NCBI NO: 7486814 NR Description: hypothetical protein M7J2.190 - Arabidopsis
  misc_feature (162)..(266): Homolog of NCBI NO: 30686884 NR Description: MutT/nudix family protein [Arabidopsis thaliana]
  misc_feature (12)..(162): Homolog of NCBI NO: 30686884 NR Description: MutT/nudix family protein [Arabidopsis thaliana]
  misc_feature (12)..(266): Homolog of NCBI NO: 38564312 NR Description: At4g25434 [Arabidopsis thaliana]
  misc_feature (11)..(270): Homolog of NCBI NO: 9758793 NR Description: MutT domain protein-like [Arabidopsis thaliana]
  misc_feature (1)..(270): Homolog of NCBI NO: 18422823 NR Description: MutT/nudix family protein [Arabidopsis thaliana]
MVGEEANGGVTMLPAVEDKYGGVMTEMSRPMDPSAFSALLRSSLSNWTLQGKKGVWIKLPRQLIGLAETAVKEGFWFHHAEKNYLMLVYWIPKQDHTLPSNASHRVGIAAFVLNHKKEVLVVQEKTGRFKGQGIWKFPTGVVNEGEYIHDGSVREVKEETGVDTEFVQVLAFRQTHKAFFEKSDLFFVCMMKPLSLEINAQESEIEAAQWMPWGEYNKQPFVQNHELLRYMTDICSAKTNGHYEGFTPLPVSAPDLQGNLYFNNRDLSSRQ

SEQ ID NO: 109360 - DNA, 744 bp, Zea mays subsp. mays
  misc_feature (1)..(744): Ceres Seq. ID no. 14309388
aacctttattaaaacagagctcactctctctctctctctctctctagctccaatgggcttccccgtaggctacacagaggtcttcctcccgaagctcttcgtacaaacactctcaatcctcagtctcatcagaaccgtcgtcttctccctcttccgcttcttgggcctctccgacttcctcgaaatggaccaaacctggcccgactacacatcttacccgacccgaacacccgagctccgctcccccttctccgccctcctcatccgcgagatcttacccgtcatcaagttcgaagacgtgacgacctcttccggcgaagatctgccggagagctgcgccgtctgcctctacgagttcgaaggagagcaagagatccggtggctgagaaactgcagacatatattccaccggagctgtctcgaccgttggatggatcacgatcagaagacgtgtcctctctgtagaacgccgtttgttccggacgagatgcaagaagagtttaatcaacggctgtgggctgcttctggtgttcatgattttcacagtgagtactgtcccgtgacggaactatagagagacagagagacagcttccttccctcctcctttgtgtctttttttttttgacttttcacccctgtacttttaaattttctttttttcaccccttgctaacattagatttgccacgcttttatgtgtgtatgtaaatatacatatgaatgagatgagcaataaacattg

SEQ ID NO: 109361 - protein, 190 aa, Zea mays subsp. mays
  misc_feature (1)..(190): Ceres Seq. ID no. 14309389
  misc_feature (112)..(154): Pfam Name: Zinc finger, C3HC4 type (RING finger) Pfam Description: Zinc finger, C3HC4 type (RING finger)
  misc_feature (90)..(161): Homolog of NCBI NO: 18411282 NR Description: zinc finger (C3HC4-type RING finger) protein
  misc_feature (18)..(183): Homolog of NCBI NO: 11358776 NR Description: RING-H2 finger protein RHA1a [imported] -
  misc_feature (18)..(183): Homolog of NCBI NO: 15233352 NR Description: RING-H2 finger protein, putative [Arabidopsis
  misc_feature (18)..(175): Homolog of NCBI NO: 15233350 NR Description: RING-H2 finger protein RHA1b [Arabidopsis
  misc_feature (18)..(175): Homolog of NCBI NO: 11358777 NR Description: RING-H2 finger protein RHA1b [imported] -
  misc_feature (24)..(190): Homolog of NCBI NO: 32488512 NR Description: OSJNBa0011J08.19 [Oryza sativa (japonica
  misc_feature (18)..(175): Homolog of NCBI NO: 15238072 NR Description: RING-H2 zinc finger protein, putative
  misc_feature (18)..(175): Homolog of NCBI NO: 21554155 NR Description: RING zinc finger protein-like [Arabidopsis
  misc_feature (18)..(175): Homolog of NCBI NO: 15222553 NR Description: RING-H2 finger protein, putative [Arabidopsis
  misc_feature (18)..(190): Homolog of NCBI NO: 15233117 NR Description: BRH1 RING finger protein [Arabidopsis thaliana]
TFIKTELTLSLSLSLAPMGFPVGYTEVFLPKLFVQTLSILSLIRTVVFSLFRFLGLSDFLEMDQTWPDYTSYPTRTPELRSPFSALLIREILPVIKFEDVTTSSGEDLPESCAVCLYEFEGEQEIRWLRNCRHIFHRSCLDRWMDHDQKTCPLCRTPFVPDEMQEEFNQRLWAASGVHDFHSEYCPVTEL

SEQ ID NO: 109362 - protein, 173 aa, Zea mays subsp. mays
  misc_feature (1)..(173): Ceres Seq. ID no. 14309390
  misc_feature (95)..(137): Pfam Name: Zinc finger, C3HC4 type (RING finger) Pfam Description: Zinc finger, C3HC4 type (RING finger)
  misc_feature (73)..(144): Homolog of NCBI NO: 18411282 NR Description: zinc finger (C3HC4-type RING finger) protein
  misc_feature (1)..(166): Homolog of NCBI NO: 11358776 NR Description: RING-H2 finger protein RHA1a [imported] -
  misc_feature (1)..(166): Homolog of NCBI NO: 15233352 NR Description: RING-H2 finger protein, putative [Arabidopsis
  misc_feature (1)..(158): Homolog of NCBI NO: 15233350 NR Description: RING-H2 finger protein RHA1b [Arabidopsis
  misc_feature (1)..(158): Homolog of NCBI NO: 11358777 NR Description: RING-H2 finger protein RHA1b [imported] -
  misc_feature (7)..(173): Homolog of NCBI NO: 32488512 NR Description: OSJNBa0011J08.19 [Oryza sativa (japonica
  misc_feature (1)..(158): Homolog of NCBI NO: 15238072 NR Description: RING-H2 zinc finger protein, putative
  misc_feature (1)..(158): Homolog of NCBI NO: 21554155 NR Description: RING zinc finger protein-like [Arabidopsis
  misc_feature (1)..(158): Homolog of NCBI NO: 15222553 NR Description: RING-H2 finger protein, putative [Arabidopsis
  misc_feature (1)..(173): Homolog of NCBI NO: 15233117 NR Description: BRH1 RING finger protein [Arabidopsis thaliana]
MGFPVGYTEVFLPKLFVQTLSILSLIRTVVFSLFRFLGLSDFLEMDQTWPDYTSYPTRTPELRSPFSALLIREILPVIKFEDVTTSSGEDLPESCAVCLYEFEGEQEIRWLRNCRHIFHRSCLDRWMDHDQKTCPLCRTPFVPDEMQEEFNQRLWAASGVHDFHSEYCPVTEL

SEQ ID NO: 109363 - protein, 129 aa, Zea mays subsp. mays
  misc_feature (1)..(129): Ceres Seq. ID no. 14309391
  misc_feature (51)..(93): Pfam Name: Zinc finger, C3HC4 type (RING finger) Pfam Description: Zinc finger, C3HC4 type (RING finger)
  misc_feature (1)..(114): Homolog of NCBI NO: 15233350 NR Description: RING-H2 finger protein RHA1b [Arabidopsis
  misc_feature (1)..(114): Homolog of NCBI NO: 11358777 NR Description: RING-H2 finger protein RHA1b [imported] -
  misc_feature (1)..(129): Homolog of NCBI NO: 32488512 NR Description: OSJNBa0011J08.19 [Oryza sativa (japonica
  misc_feature (1)..(114): Homolog of NCBI NO: 15238072 NR Description: RING-H2 zinc finger protein, putative
  misc_feature (1)..(122): Homolog of NCBI NO: 11358776 NR Description: RING-H2 finger protein RHA1a [imported] -
  misc_feature (1)..(122): Homolog of NCBI NO: 15233352 NR Description: RING-H2 finger protein, putative [Arabidopsis
  misc_feature (29)..(100): Homolog of NCBI NO: 18411282 NR Description: zinc finger (C3HC4-type RING finger) protein
  misc_feature (1)..(114): Homolog of NCBI NO: 21554155 NR Description: RING zinc finger protein-like [Arabidopsis
  misc_feature (1)..(114): Homolog of NCBI NO: 15222553 NR Description: RING-H2 finger protein, putative [Arabidopsis
  misc_feature (1)..(129): Homolog of NCBI NO: 15233117 NR Description: BRH1 RING finger protein [Arabidopsis thaliana]
MDQTWPDYTSYPTRTPELRSPFSALLIREILPVIKFEDVTTSSGEDLPESCAVCLYEFEGEQEIRWLRNCRHIFHRSCLDRWMDHDQKTCPLCRTPFVPDEMQEEFNQRLWAASGVHDFHSEYCPVTEL

SEQ ID NO: 109364 - DNA, 1048 bp, Zea mays subsp. mays
  misc_feature (1)..(1048): Ceres Seq. ID no. 15177686
taaatcaacctccatgtccgatatatatctagcagagaagcaactcaaagttttaattttctagtagactagttttttttttttctcgtggatcattatctaagaagagaggaaatgttgggaatttttagcggagctatagtatcattgccggaagagctggtggccgccggcagcagaactccgtcgccgaagacaacaggagcggctctagtcaacaagtttgtcgagaaaaacccatccgctgtgaccgtacaagtcggagactatgtgcagcttgcgtacacccaccacaaagagagtcctctccggccaaggtcatttggggctaaggatgagatattctgcttgttccaaggctcacttgacaacctaggaagcttgaagcagcaatacgggcttgctaagaatacaaatgaggttcttttggtcattgaggcttacaagactctccgtgacagagctccataccctgccaaccatgtagtggctcatctaagtggcgacttcgcctttgtggtcttcgataaatcaacatccactctgtttgtagcttctgacctagaaggtaaggttccattgtattgggggataacagctgatgggtatgtggcatttgctgatgatgttgagttgctaaaaggtgcttgtggcaagtctcttgcttctttccctcaaggctgcttttactcgactgcgttaggtgggctaaggagctttgagaaccctaagaacaagatcactgccattcctgctaaagaggaagaaatttggggagccaccttcaaggtggaaggagcaacagttcttgcagattgaaaatcgaaactcttcaacagcaaaaaaataaaataaatcatgctgtgaaaacaagaagctgttctatgagttctttaagctatcaaccaaaacaagaagctgttctatgagttctttaagctatgtgatgatgtgatgatgtgtgtagtgttatctctctctcttgtcttttgcttctttgtatagccagcgtctgtttcttcctgttttaactgtattcgtcctaaat

SEQ ID NO: 109365 - protein, 234 aa, Zea mays subsp. mays
  misc_feature (1)..(234): Ceres Seq. ID no. 15177687
  misc_feature (1)..(227): Homolog of NCBI NO: 32352176 NR Description: hypothetical protein [Oryza sativa (japonica
  misc_feature (1)..(227): Homolog of NCBI NO: 30017570 NR Description: unknown protein [Oryza sativa (japonica
  misc_feature (1)..(230): Homolog of NCBI NO: 15239993 NR Description: aluminum-induced protein-related [Arabidopsis
  misc_feature (1)..(230): Homolog of NCBI NO: 20340249 NR Description: aluminum-induced protein-like protein
  misc_feature (2)..(222): Homolog of NCBI NO: 7489671 NR Description: hypothetical protein wali7 - wheat (fragment)
  misc_feature (1)..(233): Homolog of NCBI NO: 13958130 NR Description: aluminium induced protein [Avicennia marina]
  misc_feature (1)..(233): Homolog of NCBI NO: 34541994 NR Description: Al-induced protein [Gossypium hirsutum]
  misc_feature (1)..(233): Homolog of NCBI NO: 7488881 NR Description: hypothetical protein ARG10 - mung bean
  misc_feature (1)..(227): Homolog of NCBI NO: 7488440 NR Description: aluminum-induced protein - rape
  misc_feature (1)..(234): Homolog of NCBI NO: 15239658 NR Description: aluminium-induced protein - like [Arabidopsis
MLGIFSGAIVSLPEELVAAGSRTPSPKTTGAALVNKFVEKNPSAVTVQVGDYVQLAYTHHKESPLRPRSFGAKDEIFCLFQGSLDNLGSLKQQYGLAKNTNEVLLVIEAYKTLRDRAPYPANHVVAHLSGDFAFVVFDKSTSTLFVASDLEGKVPLYWGITADGYVAFADDVELLKGACGKSLASFPQGCFYSTALGGLRSFENPKNKITAIPAKEEEIWGATFKVEGATVLAD

SEQ ID NO: 109366 - DNA, 1042 bp, Zea mays subsp. mays
  misc_feature (1)..(1042): Ceres Seq. ID no. 15174327
aaaagcttcactgtaactctcccacaaccatttaaaacgccattacatttcaaccactcttttcatctctctctctcttctctttgaatctccgacatgacagacgacagagtttacccggcgtcgaaacctcccggcgcagcagccaccgccaacccaactttcccggcgaataaagctcagctctacaacgcaaaccgccccgcttaccgtcaaccagcctcccgccgccgcacgcatagccgcggatgctgctgccgctgctgctgctggacgactttcgtgatcatcctcctgatcctcctcgccgccgccgcgtccgccgtcgtgtacctaatctaccgtcctcgacaaccgagcttcaccgtctcttccctcaaagtctcctctctcaacttcacctccgccaaccacctcaccaccgccatatccctctccgtcatcgccaagaacccgaacaaaaacgtcgggttcaactacgacgtcaccgacatcacggtctacaaaacctctccaggagacgatgacgtcgtcatcggcaaaggctcgatcccgtcgtttgtccacgggaagaagaacacgactctgctgaaatcgacgatcgggagtcccccgggagatcttgatgagctgtcggcggggaagcttaagggagagctgaaggcgaagaaagcggtggcgattaagattgtgcttgatacgaaggtgaaggtgaagatggggtctgtgaaaagtcctaagtcggggattagggttacttgcgaagggattaaagcggcggctccgtccgggaagaaggcgacgacggctgctacctccgccgctaagtgtaaggttgatcttaggatcaagatctggaaattcactttttaaccgctgggtaaaaaaggaaatgtaattcacgttcgtagtttttttttcatctttccattgtttcaattttcgtttcttcttaatttgatttcatatacagctcttcgattcccgtaagactttttttttttggtttatgtaaatgaggtataatatatttgttgtgttc

SEQ ID NO: 109367 - protein, 258 aa, Zea mays subsp. mays
  misc_feature (1)..(258): Ceres Seq. ID no. 15174328
  misc_feature (1)..(223): Homolog of NCBI NO: 15242167 NR Description: hypothetical protein [Arabidopsis thaliana]
  misc_feature (34)..(255): Homolog of NCBI NO: 34909192 NR Description: P0425G02.19 [Oryza sativa (japonica
  misc_feature (1)..(251): Homolog of NCBI NO: 15239459 NR Description: hypothetical protein [Arabidopsis thaliana]
  misc_feature (1)..(251): Homolog of NCBI NO: 10178216 NR Description: gb|AAF23842.1~gene_id:MLF18.15~similar to unknown
  misc_feature (8)..(231): Homolog of NCBI NO: 34903552 NR Description: P0001B06.28 [Oryza sativa (japonica
  misc_feature (14)..(258): Homolog of NCBI NO: 34914304 NR Description: B1151A10.19 [Oryza sativa (japonica
  misc_feature (12)..(258): Homolog of NCBI NO: 21536796 NR Description: unknown [Arabidopsis thaliana]
  misc_feature (12)..(258): Homolog of NCBI NO: 15239804 NR Description: expressed protein [Arabidopsis thaliana]
  misc_feature (1)..(258): Homolog of NCBI NO: 11762174 NR Description: At1g17620 [Arabidopsis thaliana]
  misc_feature (1)..(258): Homolog of NCBI NO: 18394509 NR Description: expressed protein [Arabidopsis thaliana]
MTDDRVYPASKPPGAAATANPTFPANKAQLYNANRPAYRQPASRRRTHSRGCCCRCCCWTTFVIILLILLAAAASAVVYLIYRPRQPSFTVSSLKVSSLNFTSANHLTTAISLSVIAKNPNKNVGFNYDVTDITVYKTSPGDDDVVIGKGSIPSFVHGKKNTTLLKSTIGSPPGDLDELSAGKLKGELKAKKAVAIKIVLDTKVKVKMGSVKSPKSGIRVTCEGIKAAAPSGKKATTAATSAAKCKVDLRIKIWKFTF

SEQ ID NO: 109368 - DNA, 1079 bp, Zea mays subsp. mays
  misc_feature (1)..(1079): Ceres Seq. ID no. 15178850
attttcttctctctgtaaaataaaaataaacttaaaataaacaaaacagacaaaataaacattttggttttgtttttgggtattaatacttcttttttgtttgctttcctcgtaaaacccatgacccctttcttcctctcttgcttctaatcttcaagaaaaatgccttcttttgcttttggatctcatcaccatttggccaatcccactgactcgccgtacaccgtcgaaattagcatcgacggcgactcctccgacttagattccttgtctgaggtcgacttagagagcggcggtgtgacgaagctgcattccggtggtggtaagaagaggaggacgaggaggagaaagaagaagaagaaaaggaagaagaaagagagtagagattgcaggatctgccatctgcctttagagactactaaaaaagcagatgaggaaggtgaagattctgatgaacaagaagaacaaggtgaagaagaagatgaagcaagagacggtgaagaagaggaagagtattatggtttgcctttgcaattgggttgttcttgtaaaggtgatttgggtgtagctcacagtaagtgtgctgaaacttggttcaagatcaaaggaaacatgacatgtgagatatgcggggcaatggctataaacgtagctggggaacagtcaaacccagagagcaccgcctctacacattcacaagtggctgcaggacaaactcagagtagtcagacagagccaaggggaatctggcatggtcgccgtgtaatgaacttcttacttgccgctatggtctttgccttcattgtctcttggctttttcacttcaaagtcctcaagtgaaacaaactccatccatcccaccctctctctcttctcctggctcttgagccgcttgcaatcacttcatcaaatccctcctgttgcctgattgttcgttcacacgttttgtagctgtaaaaacttgttagtttttagattgttgttgtcacttgtgagctttacatcttcttgtataatatccatctctactcaggcttggtctaaacttgtgtgcaatcaagactagggtcttagctctt

SEQ ID NO: 109369 - protein, 225 aa, Zea mays subsp. mays
  misc_feature (1)..(225): Ceres Seq. ID no. 15178851
  misc_feature (76)..(156): Pfam Name: Zinc finger, C3HC4 type (RING finger) Pfam Description: Zinc finger, C3HC4 type (RING finger)
  misc_feature (51)..(170): Homolog of NCBI NO: 21593046 NR Description: unknown [Arabidopsis thaliana]
  misc_feature (51)..(170): Homolog of NCBI NO: 18406816 NR Description: zinc finger (C3HC4-type RING finger) protein
  misc_feature (103)..(163): Homolog of NCBI NO: 29725746 NR Description: hypothetical protein [Arabidopsis thaliana]
  misc_feature (120)..(223): Homolog of NCBI NO: 15224415 NR Description: zinc finger (C3HC4-type RING finger) protein
  misc_feature (120)..(223): Homolog of NCBI NO: 34908318 NR Description: P0529H11.12 [Oryza sativa (japonica
  misc_feature (52)..(223): Homolog of NCBI NO: 15239254 NR Description: zinc finger (C3HC4-type RING finger) protein
  misc_feature (1)..(85): Homolog of NCBI NO: 9759231 NR Description: gb|AAD32776.1~gene_id:K19M22.19~similar to
  misc_feature (120)..(225): Homolog of NCBI NO: 9759231 NR Description: gb|AAD32776.1~gene_id:K19M22.19~similar to
  misc_feature (1)..(225): Homolog of NCBI NO: 15237796 NR Description: zinc finger (C3HC4-type RING finger) protein
  misc_feature (1)..(225): Homolog of NCBI NO: 21537129 NR Description: unknown [Arabidopsis thaliana]
MPSFAFGSHHHLANPTDSPYTVEISIDGDSSDLDSLSEVDLESGGVTKLHSGGGKKRRTRRRKKKKKRKKKESRDCRICHLPLETTKKADEEGEDSDEQEEQGEEEDEARDGEEEEEYYGLPLQLGCSCKGDLGVAHSKCAETWFKIKGNMTCEICGAMAINVAGEQSNPESTASTHSQVAAGQTQSSQTEPRGIWHGRRVMNFLLAAMVFAFIVSWLFHFKVLK

SEQ ID NO: 109370 - DNA, 1134 bp, Zea mays subsp. mays
  misc_feature (1)..(1134): Ceres Seq. ID no. 15174329
ataaaactaagaggaagatgaagacttatttacttctccttctcatcttctcactcctcttatcatattcctccggccagcaatgcggtcgtcaagcccaaggagcactctgccccaacggtctatgctgcagcgagtacggatggtgcggcaccaccgaagcttactgtgggcgtggttgccaaagccagtgcactcccactcctcccactcccactcccactcctcctagtcccacccctcctaggcccactccacctggtcccagcggggatctttcgggcatcatttcaagagatcagttctataaaatgcttaagcacatgaacgataacgcttgtcctgctagagggttcttcacttacgacgccttcatcaccgccgctaagtttttccctagtttcgggaacaccggagaccttgccacaaggaagaaggagatcgcagccttcttcggccaaacttcccacgaaaccactggtgggtggacggatgcaccagacggagcaaatacatggggctactgtttcaaggacgaaattggcaaaagcaatccctactgtgatagcaacaacctcgagtggccatgcgcacctggccaattttactacggaagaggaccaatgatgctgtcttggaactacaattatggacagtgcgggagagacctaggactcgacttactacgcaggccagctattgcgtccagcgacccagtgatcgctttcgaaaccgcaatttggttctggatgactcctcaggctcctaaaccgtcttgccacgatgtgatcaccgaccagtggcagccgtcggctgccgacatttcagcggggagattaccaggttatggagtgattaccaatatcattaacggtggattagagtgtgctggtcgcaatgtcgcacaggtcgaagatcggatatcgttttatacgaggtattgtggcatgtttggtgttgatcctggaagtaatgttgactgtgacaaacaaaggccgtttagtgaaggaattaacgttttcttggatgctgctatctaataaggagtgttaaaaaaaaaaaagagtgttaatgcagctttgttgtatccatgcaataagagaatatcaaactaaataaaactccttttatgat

SEQ ID NO: 109371 - protein, 345 aa, Zea mays subsp. mays
  misc_feature (1)..(345): Ceres Seq. ID no. 15174330
  misc_feature (25)..(64): Pfam Name: Chitin recognition protein Pfam Description: Chitin recognition protein
  misc_feature (30)..(337): Homolog of NCBI NO: 7798656 NR Description: class I chitinase [Halimolobos perplexa var.
  misc_feature (6)..(345): Homolog of NCBI NO: 18399632 NR Description: glycosyl hydrolase family 19 (basic
  misc_feature (1)..(345): Homolog of NCBI NO: 5689130 NR Description: basic endochitinase [Arabidopsis thaliana]
  misc_feature (1)..(345): Homolog of NCBI NO: 5689102 NR Description: basic endochitinase [Arabidopsis thaliana]
  misc_feature (1)..(345): Homolog of NCBI NO: 5689110 NR Description: basic endochitinase [Arabidopsis thaliana]
  misc_feature (1)..(345): Homolog of NCBI NO: 320556 NR Description: chitinase (EC 3.2.1.14) precursor, basic -
  misc_feature (1)..(345): Homolog of NCBI NO: 5689134 NR Description: basic endochitinase [Arabis gemmifera]
  misc_feature (1)..(345): Homolog of NCBI NO: 5689118 NR Description: basic endochitinase [Arabidopsis thaliana]
  misc_feature (5)..(345): Homolog of NCBI NO: 7798646 NR Description: class I chitinase [Arabis fecunda]
  misc_feature (27)..(345): Homolog of NCBI NO: 6048743 NR Description: chitinase [Brassica juncea]
KTKRKMKTYLLLLLIFSLLLSYSSGQQCGRQAQGALCPNGLCCSEYGWCGTTEAYCGRGCQSQCTPTPPTPTPTPPSPTPPRPTPPGPSGDLSGIISRDQFYKMLKHMNDNACPARGFFTYDAFITAAKFFPSFGNTGDLATRKKEIAAFFGQTSHETTGGWTDAPDGANTWGYCFKDEIGKSNPYCDSNNLEWPCAPGQFYYGRGPMMLSWNYNYGQCGRDLGLDLLRRPAIASSDPVIAFETAIWFWMTPQAPKPSCHDVITDQWQPSAADISAGRLPGYGVITNIINGGLECAGRNVAQVEDRISFYTRYCGMFGVDPGSNVDCDKQRPFSEGINVFLDAAI

SEQ ID NO: 109372 - protein, 340 aa, Zea mays subsp. mays
  misc_feature (1)..(340): Ceres Seq. ID no. 15174331
  misc_feature (20)..(59): Pfam Name: Chitin recognition protein Pfam Description: Chitin recognition protein
  misc_feature (25)..(332): Homolog of NCBI NO: 7798656 NR Description: class I chitinase [Halimolobos perplexa var.
  misc_feature (1)..(340): Homolog of NCBI NO: 18399632 NR Description: glycosyl hydrolase family 19 (basic
  misc_feature (1)..(340): Homolog of NCBI NO: 5689130 NR Description: basic endochitinase [Arabidopsis thaliana]
  misc_feature (1)..(340): Homolog of NCBI NO: 5689102 NR Description: basic endochitinase [Arabidopsis thaliana]
  misc_feature (1)..(340): Homolog of NCBI NO: 5689110 NR Description: basic endochitinase [Arabidopsis thaliana]
  misc_feature (1)..(340): Homolog of NCBI NO: 320556 NR Description: chitinase (EC 3.2.1.14) precursor, basic -
  misc_feature (1)..(340): Homolog of NCBI NO: 5689134 NR Description: basic endochitinase [Arabis gemmifera]
  misc_feature (1)..(340): Homolog of NCBI NO: 5689118 NR Description: basic endochitinase [Arabidopsis thaliana]
  misc_feature (1)..(340): Homolog of NCBI NO: 7798646 NR Description: class I chitinase [Arabis fecunda]
  misc_feature (22)..(340): Homolog of NCBI NO: 6048743 NR Description: chitinase [Brassica juncea]
MKTYLLLLLIFSLLLSYSSGQQCGRQAQGALCPNGLCCSEYGWCGTTEAYCGRGCQSQCTPTPPTPTPTPPSPTPPRPTPPGPSGDLSGIISRDQFYKMLKHMNDNACPARGFFTYDAFITAAKFFPSFGNTGDLATRKKEIAAFFGQTSHETTGGWTDAPDGANTWGYCFKDEIGKSNPYCDSNNLEWPCAPGQFYYGRGPMMLSWNYNYGQCGRDLGLDLLRRPAIASSDPVIAFETAIWFWMTPQAPKPSCHDVITDQWQPSAADISAGRLPGYGVITNIINGGLECAGRNVAQVEDRISFYTRYCGMFGVDPGSNVDCDKQRPFSEGINVFLDAAI

SEQ ID NO: 109373 - protein, 242 aa, Zea mays subsp. mays
  misc_feature (1)..(242): Ceres Seq. ID no. 15174332
  misc_feature (1)..(234): Homolog of NCBI NO: 7798656 NR Description: class I chitinase [Halimolobos perplexa var.
  misc_feature (1)..(242): Homolog of NCBI NO: 18399632 NR Description: glycosyl hydrolase family 19 (basic
  misc_feature (1)..(242): Homolog of NCBI NO: 5689130 NR Description: basic endochitinase [Arabidopsis thaliana]
  misc_feature (1)..(242): Homolog of NCBI NO: 5689102 NR Description: basic endochitinase [Arabidopsis thaliana]
  misc_feature (1)..(242): Homolog of NCBI NO: 5689110 NR Description: basic endochitinase [Arabidopsis thaliana]
  misc_feature (1)..(242): Homolog of NCBI NO: 320556 NR Description: chitinase (EC 3.2.1.14) precursor, basic -
  misc_feature (1)..(242): Homolog of NCBI NO: 5689134 NR Description: basic endochitinase [Arabis gemmifera]
  misc_feature (1)..(242): Homolog of NCBI NO: 5689118 NR Description: basic endochitinase [Arabidopsis thaliana]
  misc_feature (1)..(242): Homolog of NCBI NO: 7798646 NR Description: class I chitinase [Arabis fecunda]
  misc_feature (1)..(242): Homolog of NCBI NO: 6048743 NR Description: chitinase [Brassica juncea]
MLKHMNDNACPARGFFTYDAFITAAKFFPSFGNTGDLATRKKEIAAFFGQTSHETTGGWTDAPDGANTWGYCFKDEIGKSNPYCDSNNLEWPCAPGQFYYGRGPMMLSWNYNYGQCGRDLGLDLLRRPAIASSDPVIAFETAIWFWMTPQAPKPSCHDVITDQWQPSAADISAGRLPGYGVITNIINGGLECAGRNVAQVEDRISFYTRYCGMFGVDPGSNVDCDKQRPFSEGINVFLDAAI

SEQ ID NO: 109374 - DNA, 1920 bp, Zea mays subsp. mays
  misc_feature (1)..(1920): Ceres Seq. ID no. 15177463
agaacaaatatgagtctagactgtgatctcactgttctagaagagctaacatcaaatgcgaagcaaatacaagacgatgtattgaccaagatactcaaagctaacgcgaacacagtgtacctcggacgttttctccaggggagtgcggataaagagctgttcaagaagaacgtacccgtggtgagctatgaagatcttaagccttatctcgaccgtgtcgcaaacggagaaccctcggatgtcatttcgggggaacccatcactgcgtttttagtgagctctggaacttcaagtgggaatcaaaagatatttcctgcgaacaacatcttctttaagaatattcaaatcttctatacgctaggctatctcgttatgtccaagcatttcaatggttataagcaaggaaaggtgattaggtttacgttcattcatccgacatccacaactccttgtggtttgcctcttgctcctacggtaactagcttcacaaagagtgaattttttaggagcctgccaaaaaatagtccaagcccctaccagatcatactgtgtccggacgccaaacagagtatgtactgtcaacttctctgtggtcttgtccagagagatgaggttgtaagtgttggtgctgtgttcgcttctgttttggttcaagttatccattttcttgaaaattactggaaagagttggctagtaatatcagatgtggtcatgtcagcgagtggatcaccgaccttagctgtagagagaccgtcactaccatccttgttgagccaaatccagaattggcagatctaatcgaaaacgagtgccgacaagaatcttggcaaggtatagtttcacgactttggcctaaagcctaatgcattgatgctatttttacaggaagcatggctcaatacatcccagcattggagttctacactaataaactgcctctagtctctaaatcttatgcatcttctgaagcatttttcgggttaaatttggaacctctaagcaaacatgtgtcctacacatttctacccaacatgtcatacttcgagttcatagatgtcgatggaggaaccgagggcgagattgttgatcttgtgaatgtgaagttgggtcaccactatgagcccttggtcacaaacttttcaggtttacacagatgtagagtgggggatgttttaaaggtcactggtttttacaatatggcacctcagttcagatttgtacgtagaaaaaatgcggctttaagcgttcacctagagtcaacgactgaagaagatcttttaaaagcgttggctcgtgcgacactagttcttgaatcttcggatttagtgatcatgggtttcacatgctatgccgatatctccactgttccgggtcactatgttttttacttggaactcaaatcaaaagtcaacaataataatagcactaatgttctatcacttgataacaaggtattggtggaatgttgttgtgtcatggaggaatcattgaatagtttttataggctcttcaggagcaaaaatggttcgattggagctccagagataagagtggtgcaagagggaacgtttggttctctcatggagttttttgtctcccgaggtgcttctataactcaatacaagacacctatatgcataaactctgctgaggctttaaaggttcttgaagacaaggttcttgctcggttcttcagtgacaaatcccctccttatctgatcctggcgtgatgatgaccaccaccaaaaaaaactacatcaccctaataatgaagcaataaatttgtctggtgagtggtatgagtgttttataattccttgttgtttaattatgtcttgtgtgctttttctcttttgtcgtcatgtttactgttgtgggtgtttcagttaaatgtgattgatgcattcttatgttttttg

SEQ ID NO: 109375 - protein, 287 aa, Zea mays subsp. mays
  misc_feature (1)..(287): Ceres Seq. ID no. 15177464
  misc_feature (9)..(287): Pfam Name: GH3 auxin-responsive promoter Pfam Description: GH3 auxin-responsive promoter
  misc_feature (10)..(287): Homolog of NCBI NO: 15240608 NR Description: auxin-responsive - like protein [Arabidopsis
  misc_feature (2)..(287): Homolog of NCBI NO: 30684377 NR Description: auxin reponsive - like protein [Arabidopsis
  misc_feature (10)..(287): Homolog of NCBI NO: 15240613 NR Description: auxin reponsive - like protein [Arabidopsis
  misc_feature (7)..(287): Homolog of NCBI NO: 15217844 NR Description: auxin-regulated GH3 protein -related [Arabidopsis
  misc_feature (10)..(287): Homolog of NCBI NO: 15220661 NR Description: GH3-related auxin-regulated protein [Arabidopsis
  misc_feature (13)..(287): Homolog of NCBI NO: 15240601 NR Description: auxin-responsive - like protein [Arabidopsis
  misc_feature (4)..(154): Homolog of NCBI NO: 15221934 NR Description: Nt-gh3 deduced protein -related [Arabidopsis
  misc_feature (202)..(287): Homolog of NCBI NO: 15221934 NR Description: Nt-gh3 deduced protein -related [Arabidopsis
  misc_feature (4)..(287): Homolog of NCBI NO: 15221933 NR Description: Nt-gh3 deduced protein -related [Arabidopsis
  misc_feature (4)..(287): Homolog of NCBI NO: 15242095 NR Description: auxin-responsive GH3-related protein [Arabidopsis
RTNMSLDCDLTVLEELTSNAKQIQDDVLTKILKANANTVYLGRFLQGSADKELFKKNVPVVSYEDLKPYLDRVANGEPSDVISGEPITAFLVSSGTSSGNQKIFPANNIFFKNIQIFYTLGYLVMSKHFNGYKQGKVIRFTFIHPTSTTPCGLPLAPTVTSFTKSEFFRSLPKNSPSPYQIILCPDAKQSMYCQLLCGLVQRDEVVSVGAVFASVLVQVIHFLENYWKELASNIRCGHVSEWITDLSCRETVTTILVEPNPELADLIENECRQESWQGIVSRLWPKA

SEQ ID NO: 109376 - protein, 284 aa, Zea mays subsp. mays
  misc_feature (1)..(284): Ceres Seq. ID no. 15177465
  misc_feature (6)..(284): Pfam Name: GH3 auxin-responsive promoter Pfam Description: GH3 auxin-responsive promoter
  misc_feature (7)..(284): Homolog of NCBI NO: 15240608 NR Description: auxin-responsive - like protein [Arabidopsis
  misc_feature (1)..(284): Homolog of NCBI NO: 30684377 NR Description: auxin reponsive - like protein [Arabidopsis
  misc_feature (7)..(284): Homolog of NCBI NO: 15240613 NR Description: auxin reponsive - like protein [Arabidopsis
  misc_feature (4)..(284): Homolog of NCBI NO: 15217844 NR Description: auxin-regulated GH3 protein -related [Arabidopsis
  misc_feature (7)..(284): Homolog of NCBI NO: 15220661 NR Description: GH3-related auxin-regulated protein [Arabidopsis
  misc_feature (10)..(284): Homolog of NCBI NO: 15240601 NR Description: auxin-responsive - like protein [Arabidopsis
  misc_feature (1)..(151): Homolog of NCBI NO: 15221934 NR Description: Nt-gh3 deduced protein -related [Arabidopsis
  misc_feature (199)..(284): Homolog of NCBI NO: 15221934 NR Description: Nt-gh3 deduced protein -related [Arabidopsis
  misc_feature (1)..(284): Homolog of NCBI NO: 15221933 NR Description: Nt-gh3 deduced protein -related [Arabidopsis
  misc_feature (1)..(284): Homolog of NCBI NO: 15242095 NR Description: auxin-responsive GH3-related protein [Arabidopsis
MSLDCDLTVLEELTSNAKQIQDDVLTKILKANANTVYLGRFLQGSADKELFKKNVPVVSYEDLKPYLDRVANGEPSDVISGEPITAFLVSSGTSSGNQKIFPANNIFFKNIQIFYTLGYLVMSKHFNGYKQGKVIRFTFIHPTSTTPCGLPLAPTVTSFTKSEFFRSLPKNSPSPYQIILCPDAKQSMYCQLLCGLVQRDEVVSVGAVFASVLVQVIHFLENYWKELASNIRCGHVSEWITDLSCRETVTTILVEPNPELADLIENECRQESWQGIVSRLWPKA

SEQ ID NO: 109377 - protein, 279 aa, Zea mays subsp. mays
  misc_feature (1)..(279): Ceres Seq. ID no. 15177466
  misc_feature (1)..(258): Pfam Name: GH3 auxin-responsive promoter Pfam Description: GH3 auxin-responsive promoter
  misc_feature (1)..(274): Homolog of NCBI NO: 15221933 NR Description: Nt-gh3 deduced protein -related [Arabidopsis
  misc_feature (1)..(269): Homolog of NCBI NO: 15240601 NR Description: auxin-responsive - like protein [Arabidopsis
  misc_feature (1)..(275): Homolog of NCBI NO: 15240608 NR Description: auxin-responsive - like protein [Arabidopsis
  misc_feature (1)..(275): Homolog of NCBI NO: 15240613 NR Description: auxin reponsive - like protein [Arabidopsis
  misc_feature (1)..(64): Homolog of NCBI NO: 15217844 NR Description: auxin-regulated GH3 protein -related [Arabidopsis
  misc_feature (1)..(269): Homolog of NCBI NO: 15220661 NR Description: GH3-related auxin-regulated protein [Arabidopsis
  misc_feature (55)..(275): Homolog of NCBI NO: 15217844 NR Description: auxin-regulated GH3 protein -related [Arabidopsis
  misc_feature (1)..(275): Homolog of NCBI NO: 30684377 NR Description: auxin reponsive - like protein [Arabidopsis
  misc_feature (1)..(274): Homolog of NCBI NO: 15221934 NR Description: Nt-gh3 deduced protein -related [Arabidopsis
  misc_feature (1)..(272): Homolog of NCBI NO: 15242095 NR Description: auxin-responsive GH3-related protein [Arabidopsis
MAQYIPALEFYTNKLPLVSKSYASSEAFFGLNLEPLSKHVSYTFLPNMSYFEFIDVDGGTEGEIVDLVNVKLGHHYEPLVTNFSGLHRCRVGDVLKVTGFYNMAPQFRFVRRKNAALSVHLESTTEEDLLKALARATLVLESSDLVIMGFTCYADISTVPGHYVFYLELKSKVNNNNSTNVLSLDNKVLVECCCVMEESLNSFYRLFRSKNGSIGAPEIRVVQEGTFGSLMEFFVSRGASITQYKTPICINSAEALKVLEDKVLARFFSDKSPPYLILA

SEQ ID NO: 109378 - DNA, 903 bp, Zea mays subsp. mays
  misc_feature (1)..(903): Ceres Seq. ID no. 15179471
agaaaccgttcgtctcccccccctctctatctctctctagatggctcgttccctctcccttccactttctctctctaaaaaccgactcacagcagctgcagcctccttcctcccttcatcgcacctcttatccatccgatctcaatcctccgaccgtcgcggcgatctgtacgaattcgacatcgccgcgtcgcaatcgccctcggatccgttaattcagaagctagaggacgccgttcaccggatagtcgtccgaagatcggcacccgattggctcccgtttgttcccggtgcgtcgtactgggtccctcctcctggatctggatctcagactcacgggatcgctcagctcgtcgcgaagctggctaatccgttaacggacgaagaatctctctccaccaattcgtctcgcggatggccttcctctgattatttccttaaaggtaaaaaggcctagctttgtggtgtaacaggtgtgcagcctctattgatggagactaagaccgaggcgacttcaaatacagagtctcactccgaggatgaggaagggtaaagagaatgctactttgaagaatcaaccggcgcgtttgggtgggttgttacttaaactaaagatagaagaaataatgaagctagatctattggatctgtagattgttatgaatatgagccggggtgattctgatgacgactgaaccaagtcaagtgcaaagactcgccatatagactgctttactaatcctgaaatgtaaaaaaaaaagaataatagtagttagttgtagccattttacctctgtttagtgtaatcttttccttttttaaaaagctgttgtatatatttctgtttcattgctctttcagttatgtaaccagtttatgataaactcgaatgaataaaagggg

SEQ ID NO: 109379 - protein, 138 aa, Zea mays subsp. mays
  misc_feature (1)..(138): Ceres Seq. ID no. 15179472
  misc_feature (1)..(136): Homolog of NCBI NO: 38346553 NR Description: OSJNBa0035M09.14 [Oryza sativa (japonica
  misc_feature (45)..(133): Homolog of NCBI NO: 18398961 NR Description: expressed protein [Arabidopsis thaliana]
  misc_feature (45)..(133): Homolog of NCBI NO: 14423398 NR Description: Unknown protein [Arabidopsis thaliana]
  misc_feature (111)..(136): Homolog of NCBI NO: 38175698 NR Description: unknown protein [Oryza sativa (japonica
  misc_feature (1)..(109): Homolog of NCBI NO: 38175698 NR Description: unknown protein [Oryza sativa (japonica
  misc_feature (1)..(138): Homolog of NCBI NO: 21592720 NR Description: unknown [Arabidopsis thaliana]
  misc_feature (1)..(138): Homolog of NCBI NO: 18412160 NR Description: expressed protein [Arabidopsis thaliana]
  misc_feature (1)..(138): Homolog of NCBI NO: 25364101 NR Description: hypothetical protein F9K20.6 [imported] -
  misc_feature (1)..(135): Homolog of NCBI NO: 30685027 NR Description: expressed protein [Arabidopsis thaliana]
  misc_feature (1)..(138): Homolog of NCBI NO: 18394407 NR Description: expressed protein [Arabidopsis thaliana]
MARSLSLPLSLSKNRLTAAAASFLPSSHLLSIRSQSSDRRGDLYEFDIAASQSPSDPLIQKLEDAVHRIVVRRSAPDWLPFVPGASYWVPPPGSGSQTHGIAQLVAKLANPLTDEESLSTNSSRGWPSSDYFLKGKKA

SEQ ID NO: 109380 - protein, 70 aa, Zea mays subsp. mays
  misc_feature (1)..(70): Ceres Seq. ID no. 15179473
KPFVSPPSLSLSRWLVPSPFHFLSLKTDSQQLQPPSSLHRTSYPSDLNPPTVAAICTNSTSPRRNRPRIR

SEQ ID NO: 109381 - DNA, 1358 bp, Zea mays subsp. mays
  misc_feature (1)..(1358): Ceres Seq. ID no. 15179609
aacaaaaagagagaagaaacatctctcctctctttgaacaagaacatcaagaacaatggcttgtactaatctaacaacaatgtgggtttcatcaaaactatctatttctgattcctcttccttgtccttccgttctattctcaacccacttcctctcccaaaccacaactcatctccttcaagatcttcctctgtctctccaatccagtcctctcttcgtgagctccgagaccgtatcgactcagtcaaaaacactcagaagatcactgaagccatgaagcttgtcgctgcagcaaaagtcaggagagctcaggaagctgtggtcaacggccgaccattctcagaaaccctagttgaagttctttacaacatcaacgaacagcttcaaaccgatgatatagatgtgcccttaaccaaaatcagaccggttaagaaagttgcactcgttgttgtaacaggagaccgaggattatgcggtggattcaacaacttcatcatcaagaaagcagaggcaaggatcaaagagcttcaaggcctaggtcttgactacacagtcattagcgtggggaaaaagggaaactcttatttcctccgtcgtccttacatccccgtcgacaagtacctcgaagccggaaccttaccgaccgcgaaagaagctcaagctgtagctgatgatgtcttctctctgtttataagcgaagaggtcgacaaagtcgagctcttgtacacaaagtttgtctctttggtcaaatcagaacccgtgatccacacgctactgcctctatctcccaaaggagagatctgtgacattaatgggaactgtgtggacgctgctgaagacgagctcttcaggttaacgaccaaagaagggaaacttactgttgaaagagagacttttcggacaccaactgctgatttctcaccgatcttgcagttcgagcaagaccctgttcagattcttgatgctttgttgcctctgtatcttaacagtcagattctaagggctttacaggagtcattggcgagtgagcttgcagctagaatgagtgcaatgagtagtgcttcagataatgcttctgatcttaagaagtcgctttctatggtgtataatagaaagcgtcaagctaagatcactggtgagatccttgagattgttgctggagctaatgcacaggcttgatttgtttggaacctctttgatatatgagccgactcttcctttttttttttttttgcgtttttggtgttataatgtttaatttgtcaagaactcgtaatgatgtttttataaataatgcagttacaagcataattcggttgtatttgttttggcctttcattggataaatatttaattt

SEQ ID NO: 109382 - protein, 374 aa, Zea mays subsp. mays
  misc_feature (1)..(374): Ceres Seq. ID no. 15179610
  misc_feature (52)..(373): Pfam Name: ATP synthase Pfam Description: ATP synthase
  misc_feature (40)..(372): Homolog of NCBI NO: 228698 NR Description: CF1 ATP synthase:SUBUNIT=gamma
  misc_feature (50)..(372): Homolog of NCBI NO: 114638 NR Description: ATP synthase gamma chain, chloroplast precursor
  misc_feature (5)..(372): Homolog of NCBI NO: 15218281 NR Description: ATP synthase gamma-subunit -related [Arabidopsis
  misc_feature (1)..(374): Homolog of NCBI NO: 27818005 NR Description: putative ATP synthase gamma chain 1, chloroplast
  misc_feature (48)..(372): Homolog of NCBI NO: 755801 NR Description: ATP synthase [Spinacia oleracea]
  misc_feature (22)..(372): Homolog of NCBI NO: 114643 NR Description: ATP synthase gamma chain, chloroplast precursor
  misc_feature (74)..(373): Homolog of NCBI NO: 5708095 NR Description: ATP synthase gamma chain, chloroplast precursor
  misc_feature (1)..(369): Homolog of NCBI NO: 114640 NR Description: ATP synthase gamma chain, chloroplast precursor
  misc_feature (1)..(372): Homolog of NCBI NO: 231610 NR Description: ATP synthase gamma chain, chloroplast precursor
  misc_feature (1)..(373): Homolog of NCBI NO: 18412632 NR Description: ATP synthase gamma chain 1, chloroplast
MACTNLTTMWVSSKLSISDSSSLSFRSILNPLPLPNHNSSPSRSSSVSPIQSSLRELRDRIDSVKNTQKITEAMKLVAAAKVRRAQEAVVNGRPFSETLVEVLYNINEQLQTDDIDVPLTKIRPVKKVALVVVTGDRGLCGGFNNFIIKKAEARIKELQGLGLDYTVISVGKKGNSYFLRRPYIPVDKYLEAGTLPTAKEAQAVADDVFSLFISEEVDKVELLYTKFVSLVKSEPVIHTLLPLSPKGEICDINGNCVDAAEDELFRLTTKEGKLTVERETFRTPTADFSPILQFEQDPVQILDALLPLYLNSQILRALQESLASELAARMSAMSSASDNASDLKKSLSMVYNRKRQAKITGEILEIVAGANAQA

SEQ ID NO: 109383 - protein, 366 aa, Zea mays subsp. mays
  misc_feature (1)..(366): Ceres Seq. ID no. 15179611
  misc_feature (44)..(365): Pfam Name: ATP synthase Pfam Description: ATP synthase
  misc_feature (32)..(364): Homolog of NCBI NO: 228698 NR Description: CF1 ATP synthase:SUBUNIT=gamma
  misc_feature (42)..(364): Homolog of NCBI NO: 114638 NR Description: ATP synthase gamma chain, chloroplast precursor
  misc_feature (1)..(364): Homolog of NCBI NO: 15218281 NR Description: ATP synthase gamma-subunit -related [Arabidopsis
  misc_feature (1)..(366): Homolog of NCBI NO: 27818005 NR Description: putative ATP synthase gamma chain 1, chloroplast
  misc_feature (40)..(364): Homolog of NCBI NO: 755801 NR Description: ATP synthase [Spinacia oleracea]
  misc_feature (14)..(364): Homolog of NCBI NO: 114643 NR Description: ATP synthase gamma chain, chloroplast precursor
  misc_feature (66)..(365): Homolog of NCBI NO: 5708095 NR Description: ATP synthase gamma chain, chloroplast precursor
  misc_feature (1)..(361): Homolog of NCBI NO: 114640 NR Description: ATP synthase gamma chain, chloroplast precursor
  misc_feature (1)..(364): Homolog of NCBI NO: 231610 NR Description: ATP synthase gamma chain, chloroplast precursor
  misc_feature (1)..(365): Homolog of NCBI NO: 18412632 NR Description: ATP synthase gamma chain 1, chloroplast
MWVSSKLSISDSSSLSFRSILNPLPLPNHNSSPSRSSSVSPIQSSLRELRDRIDSVKNTQKITEAMKLVAAAKVRRAQEAVVNGRPFSETLVEVLYNINEQLQTDDIDVPLTKIRPVKKVALVVVTGDRGLCGGFNNFIIKKAEARIKELQGLGLDYTVISVGKKGNSYFLRRPYIPVDKYLEAGTLPTAKEAQAVADDVFSLFISEEVDKVELLYTKFVSLVKSEPVIHTLLPLSPKGEICDINGNCVDAAEDELFRLTTKEGKLTVERETFRTPTADFSPILQFEQDPVQILDALLPLYLNSQILRALQESLASELAARMSAMSSASDNASDLKKSLSMVYNRKRQAKITGEILEIVAGANAQA

SEQ ID NO: 109384 - protein, 301 aa, Zea mays subsp. mays
  misc_feature (1)..(301): Ceres Seq. ID no. 15179612
  misc_feature (1)..(300): Pfam Name: ATP synthase Pfam Description: ATP synthase
  misc_feature (1)..(299): Homolog of NCBI NO: 228698 NR Description: CF1 ATP synthase:SUBUNIT=gamma
  misc_feature (1)..(299): Homolog of NCBI NO: 114638 NR Description: ATP synthase gamma chain, chloroplast precursor
  misc_feature (1)..(299): Homolog of NCBI NO: 15218281 NR Description: ATP synthase gamma-subunit -related [Arabidopsis
  misc_feature (1)..(301): Homolog of NCBI NO: 27818005 NR Description: putative ATP synthase gamma chain 1, chloroplast
  misc_feature (1)..(299): Homolog of NCBI NO: 755801 NR Description: ATP synthase [Spinacia oleracea]
  misc_feature (1)..(299): Homolog of NCBI NO: 114643 NR Description: ATP synthase gamma chain, chloroplast precursor
  misc_feature (1)..(300): Homolog of NCBI NO: 5708095 NR Description: ATP synthase gamma chain, chloroplast precursor
  misc_feature (1)..(296): Homolog of NCBI NO: 114640 NR Description: ATP synthase gamma chain, chloroplast precursor
  misc_feature (1)..(299): Homolog of NCBI NO: 231610 NR Description: ATP synthase gamma chain, chloroplast precursor
  misc_feature (1)..(300): Homolog of NCBI NO: 18412632 NR Description: ATP synthase gamma chain 1, chloroplast
MKLVAAAKVRRAQEAVVNGRPFSETLVEVLYNINEQLQTDDIDVPLTKIRPVKKVALVVVTGDRGLCGGFNNFIIKKAEARIKELQGLGLDYTVISVGKKGNSYFLRRPYIPVDKYLEAGTLPTAKEAQAVADDVFSLFISEEVDKVELLYTKFVSLVKSEPVIHTLLPLSPKGEICDINGNCVDAAEDELFRLTTKEGKLTVERETFRTPTADFSPILQFEQDPVQILDALLPLYLNSQILRALQESLASELAARMSAMSSASDNASDLKKSLSMVYNRKRQAKITGEILEIVAGANAQA

SEQ ID NO: 109385 - DNA, 774 bp, Zea mays subsp. mays
  misc_feature (1)..(774): Ceres Seq. ID no. 14309373
aaacataaacaggacttgttcaagtgtcagatatttcgagaagaagaagaagagatggagagggagccgacaagagtgatggtggctgtgaatgaatcgacgatcaaagggaagccccacccttcgataagcagcaaaagagctttcgaatggactctggagaagatgatccgatccaacacatccgatttcaagattctcttgctccatgtacatgttgtcgacgaagacggttttgatgaggtagacagcatatatgcctctcccgatgatttcaaagagtctaacaagtctaaaggtcttcaccttctcgagtttttcgttaaaaaatgtcatgagattggggttagttgcgaggcatggatcaagaaaggtgatcccaaggatgtgatctgccaagaagtcagccgggtccgaccagatcttcttgttttgggaagccgtggtcttggccgcttccaaaaggtctttgttgggaccgtgagtgggttctgtgtgaaacatgctgagtgtccagtcctcacgatcaaacgcaacgccgatgaaactcccagtgatcttgctgatgactaaaccaactacattctaaacattccttccttccaaaatgataaataaactcttcattgatcctatcccattgtgtgcttttgtgtgtccaagtttatgattaataatattagtatgtgtgtgaagtctgctatgtttctgttgtcagtgatactgataatgcaactaaactttcaatttcttttaatcatttctaaattgaat

SEQ ID NO: 109386 - protein, 190 aa, Zea mays subsp. mays
  misc_feature (1)..(190): Ceres Seq. ID no. 14309374
  misc_feature (23)..(177): Pfam Name: Universal stress protein family Pfam Description: Universal stress protein family
  misc_feature (45)..(183): Homolog of NCBI NO: 30681321 NR Description: ER6 protein -related [Arabidopsis thaliana]
  misc_feature (25)..(178): Homolog of NCBI NO: 34914610 NR Description: P0520B06.18 [Oryza sativa (japonica
  misc_feature (14)..(186): Homolog of NCBI NO: 30694813 NR Description: expressed protein [Arabidopsis thaliana]
  misc_feature (14)..(186): Homolog of NCBI NO: 30694811 NR Description: expressed protein [Arabidopsis thaliana]
  misc_feature (14)..(180): Homolog of NCBI NO: 18408994 NR Description: expressed protein [Arabidopsis thaliana]
  misc_feature (22)..(190): Homolog of NCBI NO: 19387249 NR Description: putative ethylene-responsive protein
  misc_feature (19)..(190): Homolog of NCBI NO: 15241464 NR Description: expressed protein [Arabidopsis thaliana]
  misc_feature (27)..(190): Homolog of NCBI NO: 21536534 NR Description: putative ethylene-responsive protein [Arabidopsis
  misc_feature (19)..(190): Homolog of NCBI NO: 18395845 NR Description: expressed protein [Arabidopsis thaliana]
  misc_feature (18)..(190): Homolog of NCBI NO: 6016711 NR Description: unknown protein [Arabidopsis thaliana]
KHKQDLFKCQIFREEEEEMEREPTRVMVAVNESTIKGKPHPSISSKRAFEWTLEKMIRSNTSDFKILLLHVHVVDEDGFDEVDSIYASPDDFKESNKSKGLHLLEFFVKKCHEIGVSCEAWIKKGDPKDVICQEVSRVRPDLLVLGSRGLGRFQKVFVGTVSGFCVKHAECPVLTIKRNADETPSDLADD

SEQ ID NO: 109387 - protein, 172 aa, Zea mays subsp. mays
  misc_feature (1)..(172): Ceres Seq. ID no. 14309375
  misc_feature (5)..(159): Pfam Name: Universal stress protein family Pfam Description: Universal stress protein family
  misc_feature (27)..(165): Homolog of NCBI NO: 30681321 NR Description: ER6 protein -related [Arabidopsis thaliana]
  misc_feature (7)..(160): Homolog of NCBI NO: 34914610 NR Description: P0520B06.18 [Oryza sativa (japonica
  misc_feature (1)..(168): Homolog of NCBI NO: 30694813 NR Description: expressed protein [Arabidopsis thaliana]
  misc_feature (1)..(168): Homolog of NCBI NO: 30694811 NR Description: expressed protein [Arabidopsis thaliana]
  misc_feature (1)..(162): Homolog of NCBI NO: 18408994 NR Description: expressed protein [Arabidopsis thaliana]
  misc_feature (4)..(172): Homolog of NCBI NO: 19387249 NR Description: putative ethylene-responsive protein
  misc_feature (1)..(172): Homolog of NCBI NO: 15241464 NR Description: expressed protein [Arabidopsis thaliana]
  misc_feature (9)..(172): Homolog of NCBI NO: 21536534 NR Description: putative ethylene-responsive protein [Arabidopsis
  misc_feature (1)..(172): Homolog of NCBI NO: 18395845 NR Description: expressed protein [Arabidopsis thaliana]
  misc_feature (1)..(172): Homolog of NCBI NO: 6016711 NR Description: unknown protein [Arabidopsis thaliana]
MEREPTRVMVAVNESTIKGKPHPSISSKRAFEWTLEKMIRSNTSDFKILLLHVHVVDEDGFDEVDSIYASPDDFKESNKSKGLHLLEFFVKKCHEIGVSCEAWIKKGDPKDVICQEVSRVRPDLLVLGSRGLGRFQKVFVGTVSGFCVKHAECPVLTIKRNADETPSDLADD

SEQ ID NO: 109388 - protein, 164 aa, Zea mays subsp. mays
  misc_feature (1)..(164): Ceres Seq. ID no. 14309376
  misc_feature (1)..(151): Pfam Name: Universal stress protein family Pfam Description: Universal stress protein family
  misc_feature (1)..(154): Homolog of NCBI NO: 18408994 NR Description: expressed protein [Arabidopsis thaliana]
  misc_feature (1)..(164): Homolog of NCBI NO: 19387249 NR Description: putative ethylene-responsive protein
  misc_feature (1)..(164): Homolog of NCBI NO: 15241464 NR Description: expressed protein [Arabidopsis thaliana]
  misc_feature (19)..(157): Homolog of NCBI NO: 30681321 NR Description: ER6 protein -related [Arabidopsis thaliana]
  misc_feature (1)..(160): Homolog of NCBI NO: 30694813 NR Description: expressed protein [Arabidopsis thaliana]
  misc_feature (1)..(160): Homolog of NCBI NO: 30694811 NR Description: expressed protein [Arabidopsis thaliana]
  misc_feature (1)..(152): Homolog of NCBI NO: 34914610 NR Description: P0520B06.18 [Oryza sativa (japonica
  misc_feature (1)..(164): Homolog of NCBI NO: 21536534 NR Description: putative ethylene-responsive protein [Arabidopsis
  misc_feature (1)..(164): Homolog of NCBI NO: 18395845 NR Description: expressed protein [Arabidopsis thaliana]
  misc_feature (1)..(164): Homolog of NCBI NO: 6016711 NR Description: unknown protein [Arabidopsis thaliana]
MVAVNESTIKGKPHPSISSKRAFEWTLEKMIRSNTSDFKILLLHVHVVDEDGFDEVDSIYASPDDFKESNKSKGLHLLEFFVKKCHEIGVSCEAWIKKGDPKDVICQEVSRVRPDLLVLGSRGLGRFQKVFVGTVSGFCVKHAECPVLTIKRNADETPSDLADD

SEQ ID NO: 109389 - DNA, 750 bp, Zea mays subsp. mays
  misc_feature (1)..(750): Ceres Seq. ID no. 14309365
agaggaaataaaatatcttgaatcttagagaagaaggaaaagagaagagaagatgacgaccgagaagaaagagatggaagtggtgaaaggtctagacttggagaggtacatgggccgttggtacgaggttgcttctttcccttccaggttccaacccaagaacggtgcagacactcgcgccacctacacccttaaccccgacgggaccgtgaaagtcttgaacgagacgtgggacggaggcaagagaggtttcatccaaggctcagctttcaaaaccgatcctaagagcgacgaggccaagttcaaagtcaggttctacgtccctcctttcctccctatcattcccgttaccggcgactactgggtgctgtatatcgatcctgagtaccagcatgccgtcattggccagccttcaaggagttatctctggatcctgagcaggacggcgcacgtggaggaagagacatacaagcagctggtggagaaggcggtggagcaagggtatgatgttagcaagcttcgcaagacagctcagagtgacacaccacccgagtccgacgctgctcctgacgacaccaagggtatttggtggatcaaatctatcttcggcaaatagttacctgacacattaaaagacttgtttcacctccttgtacttgctctgtctatgtaatatactaccccttttgtttactccagtaatgaacgtcctacttttgttggtttttaaacatctaaatctatttgcgt

SEQ ID NO: 109390 - protein, 187 aa, Zea mays subsp. mays
  misc_feature (1)..(187): Ceres Seq. ID no. 14309366
  misc_feature (18)..(164): Pfam Name: Lipocalin / cytosolic fatty-acid binding protein family Pfam Description: Lipocalin / cytosolic fatty-acid binding
  misc_feature (9)..(156): Homolog of NCBI NO: 23058021 NR Description: hypothetical protein [Pseudomonas fluorescens
  misc_feature (1)..(159): Homolog of NCBI NO: 21233298 NR Description: outer membrane lipoprotein Blc
  misc_feature (1)..(159): Homolog of NCBI NO: 21244675 NR Description: outer membrane lipoprotein Blc
  misc_feature (5)..(156): Homolog of NCBI NO: 21231866 NR Description: outer membrane lipoprotein
  misc_feature (5)..(156): Homolog of NCBI NO: 21243293 NR Description: outer membrane lipoprotein Blc
  misc_feature (1)..(156): Homolog of NCBI NO: 13474785 NR Description: outer membrane lipoprotein [Mesorhizobium loti]
  misc_feature (1)..(156): Homolog of NCBI NO: 13473955 NR Description: outer membrane lipoprotein [Mesorhizobium loti]
  misc_feature (7)..(187): Homolog of NCBI NO: 18650668 NR Description: temperature stress-induced lipocalin [Triticum
  misc_feature (8)..(187): Homolog of NCBI NO: 21553811 NR Description: outer membrane lipoprotein-like [Arabidopsis
  misc_feature (3)..(187): Homolog of NCBI NO: 15242942 NR Description: outer membrane lipo protein - like [Arabidopsis
MTTEKKEMEVVKGLDLERYMGRWYEVASFPSRFQPKNGADTRATYTLNPDGTVKVLNETWDGGKRGFIQGSAFKTDPKSDEAKFKVRFYVPPFLPIIPVTGDYWVLYIDPEYQHAVIGQPSRSYLWILSRTAHVEEETYKQLVEKAVEQGYDVSKLRKTAQSDTPPESDAAPDDTKGIWWIKSIFGK

SEQ ID NO: 109391 - protein, 180 aa, Zea mays subsp. mays
  misc_feature (1)..(180): Ceres Seq. ID no. 14309367
  misc_feature (11)..(157): Pfam Name: Lipocalin / cytosolic fatty-acid binding protein family Pfam Description: Lipocalin / cytosolic fatty-acid binding
  misc_feature (2)..(149): Homolog of NCBI NO: 23058021 NR Description: hypothetical protein [Pseudomonas fluorescens
  misc_feature (1)..(152): Homolog of NCBI NO: 21233298 NR Description: outer membrane lipoprotein Blc
  misc_feature (1)..(152): Homolog of NCBI NO: 21244675 NR Description: outer membrane lipoprotein Blc
  misc_feature (1)..(149): Homolog of NCBI NO: 21231866 NR Description: outer membrane lipoprotein
  misc_feature (1)..(149): Homolog of NCBI NO: 21243293 NR Description: outer membrane lipoprotein Blc
  misc_feature (1)..(149): Homolog of NCBI NO: 13474785 NR Description: outer membrane lipoprotein [Mesorhizobium loti]
  misc_feature (1)..(149): Homolog of NCBI NO: 13473955 NR Description: outer membrane lipoprotein [Mesorhizobium loti]
  misc_feature (1)..(180): Homolog of NCBI NO: 18650668 NR Description: temperature stress-induced lipocalin [Triticum
  misc_feature (1)..(180): Homolog of NCBI NO: 21553811 NR Description: outer membrane lipoprotein-like [Arabidopsis
  misc_feature (1)..(180): Homolog of NCBI NO: 15242942 NR Description: outer membrane lipo protein - like [Arabidopsis
MEVVKGLDLERYMGRWYEVASFPSRFQPKNGADTRATYTLNPDGTVKVLNETWDGGKRGFIQGSAFKTDPKSDEAKFKVRFYVPPFLPIIPVTGDYWVLYIDPEYQHAVIGQPSRSYLWILSRTAHVEEETYKQLVEKAVEQGYDVSKLRKTAQSDTPPESDAAPDDTKGIWWIKSIFGK

SEQ ID NO: 109392 - protein, 168 aa, Zea mays subsp. mays
  misc_feature (1)..(168): Ceres Seq. ID no. 14309368
  misc_feature (1)..(145): Pfam Name: Lipocalin / cytosolic fatty-acid binding protein family Pfam Description: Lipocalin / cytosolic fatty-acid binding
  misc_feature (1)..(137): Homolog of NCBI NO: 23058021 NR Description: hypothetical protein [Pseudomonas fluorescens
  misc_feature (1)..(140): Homolog of NCBI NO: 21233298 NR Description: outer membrane lipoprotein Blc
  misc_feature (1)..(140): Homolog of NCBI NO: 21244675 NR Description: outer membrane lipoprotein Blc
  misc_feature (1)..(137): Homolog of NCBI NO: 21231866 NR Description: outer membrane lipoprotein
  misc_feature (1)..(137): Homolog of NCBI NO: 21243293 NR Description: outer membrane lipoprotein Blc
  misc_feature (1)..(137): Homolog of NCBI NO: 13474785 NR Description: outer membrane lipoprotein [Mesorhizobium loti]
  misc_feature (1)..(137): Homolog of NCBI NO: 13473955 NR Description: outer membrane lipoprotein [Mesorhizobium loti]
  misc_feature (1)..(168): Homolog of NCBI NO: 18650668 NR Description: temperature stress-induced lipocalin [Triticum
  misc_feature (1)..(168): Homolog of NCBI NO: 21553811 NR Description: outer membrane lipoprotein-like [Arabidopsis
  misc_feature (1)..(168): Homolog of NCBI NO: 15242942 NR Description: outer membrane lipo protein - like [Arabidopsis
MGRWYEVASFPSRFQPKNGADTRATYTLNPDGTVKVLNETWDGGKRGFIQGSAFKTDPKSDEAKFKVRFYVPPFLPIIPVTGDYWVLYIDPEYQHAVIGQPSRSYLWILSRTAHVEEETYKQLVEKAVEQGYDVSKLRKTAQSDTPPESDAAPDDTKGIWWIKSIFGK

SEQ ID NO: 109393 - DNA, 1072 bp, Zea mays subsp. mays
  misc_feature (1)..(1072): Ceres Seq. ID no. 14309361
aaaaagatgaaactcgcaggtctgaaatcgatcgagaacgcgcacgaagattccgtttgggcggcgacatgggttccggcgacggaagaacgaccggcgttgcttcttaccggatctctagacgagacggtgaagctatggagagcggacgagctggatctagtgaggactaacacaggacactccttgggagtagcagctgtggcggcgcatccttccggaatcatcgcagcttcttcttccctcgatagcttcgtccgtgtcttcgatgttgacacgaatgccaccatcgctgttctcgaagctcctccttctgaggtttggggtatgcaatttgaacctaagggtacaatccttgctgttgctggtggaagtagtgcctcggtcaagctttgggacactgcgagctggagactaatctcaactctctcaatcccacgtccagaagcaccaaagccttctgataaaaccagcagcaagaagttcgttctctctgtggcttggtctcccaacgggaaacgtctagcttgtggttcaatggatggcacgatctgcgtctttgatgttgatcgctctaagcttcttcaccagcttgaaggacacaacatgcctgtaaggtcccttgtgttctcccctgtagacccgagagtcctcttctccggatcagatgatgggcatgtgaacgtgcacgacgcagaagggaaaacgcttgtggggtccatgtcggggcacacgagctgggtgctgagcgttgatgctagccctgacggtggagctatagcaacggggtcgagtgataggactgtgaggctgtgggatcttaagatgagagcggctattcagacaatgagcaatcataatgaccaggtttggtctgttgcgtttagaccacctggtggaaccggtgtccgtgctggtcgtctcgctagtgtctctgacgacaagagtgtatcgctctatgattactcatgaaaaaagtcctgttgtttcttacttttatgcatttacaatgtaatctgcaagagtttttttttttttctgttggttcaaactttgcttgagagcttattat

SEQ ID NO: 109394 - protein, 323 aa, Zea mays subsp. mays
  misc_feature (1)..(323): Ceres Seq. ID no. 14309362
  misc_feature (278)..(321): Pfam Name: WD domain, G-beta repeat Pfam Description: WD domain, G-beta repeat
  misc_feature (35)..(321): Homolog of NCBI NO: 13173173 NR Description: unknown protein i8 [Aedes aegypti]
  misc_feature (35)..(321): Homolog of NCBI NO: 19335618 NR Description: unknown protein [Aedes aegypti]
  misc_feature (12)..(289): Homolog of NCBI NO: 26345856 NR Description: unnamed protein product [Mus musculus]
  misc_feature (12)..(321): Homolog of NCBI NO: 33150742 NR Description: G protein beta subunit-like protein [Homo sapiens]
  misc_feature (12)..(321): Homolog of NCBI NO: 12849020 NR Description: unnamed protein product [Mus musculus]
  misc_feature (12)..(321): Homolog of NCBI NO: 13277350 NR Description: meiotic recombination protein REC14 [Mus
  misc_feature (12)..(321): Homolog of NCBI NO: 13376840 NR Description: recombination protein REC14 [Homo sapiens]
  misc_feature (12)..(321): Homolog of NCBI NO: 37590940 NR Description: Unknown (protein for MGC:75826) [Silurana
  misc_feature (12)..(321): Homolog of NCBI NO: 38541742 NR Description: Unknown (protein for MGC:77675) [Danio rerio]
  misc_feature (3)..(323): Homolog of NCBI NO: 15233721 NR Description: transducin / WD-40 repeat protein family
KKMKLAGLKSIENAHEDSVWAATWVPATEERPALLLTGSLDETVKLWRADELDLVRTNTGHSLGVAAVAAHPSGIIAASSSLDSFVRVFDVDTNATIAVLEAPPSEVWGMQFEPKGTILAVAGGSSASVKLWDTASWRLISTLSIPRPEAPKPSDKTSSKKFVLSVAWSPNGKRLACGSMDGTICVFDVDRSKLLHQLEGHNMPVRSLVFSPVDPRVLFSGSDDGHVNVHDAEGKTLVGSMSGHTSWVLSVDASPDGGAIATGSSDRTVRLWDLKMRAAIQTMSNHNDQVWSVAFRPPGGTGVRAGRLASVSDDKSVSLYDYS

SEQ ID NO: 109395 - protein, 321 aa, Zea mays subsp. mays
  misc_feature (1)..(321): Ceres Seq. ID no. 14309363
  misc_feature (276)..(319): Pfam Name: WD domain, G-beta repeat Pfam Description: WD domain, G-beta repeat
  misc_feature (33)..(319): Homolog of NCBI NO: 13173173 NR Description: unknown protein i8 [Aedes aegypti]
  misc_feature (33)..(319): Homolog of NCBI NO: 19335618 NR Description: unknown protein [Aedes aegypti]
  misc_feature (10)..(287): Homolog of NCBI NO: 26345856 NR Description: unnamed protein product [Mus musculus]
  misc_feature (10)..(319): Homolog of NCBI NO: 33150742 NR Description: G protein beta subunit-like protein [Homo sapiens]
  misc_feature (10)..(319): Homolog of NCBI NO: 12849020 NR Description: unnamed protein product [Mus musculus]
  misc_feature (10)..(319): Homolog of NCBI NO: 13277350 NR Description: meiotic recombination protein REC14 [Mus
  misc_feature (10)..(319): Homolog of NCBI NO: 13376840 NR Description: recombination protein REC14 [Homo sapiens]
  misc_feature (10)..(319): Homolog of NCBI NO: 37590940 NR Description: Unknown (protein for MGC:75826) [Silurana
  misc_feature (10)..(319): Homolog of NCBI NO: 38541742 NR Description: Unknown (protein for MGC:77675) [Danio rerio]
  misc_feature (1)..(321): Homolog of NCBI NO: 15233721 NR Description: transducin / WD-40 repeat protein family
MKLAGLKSIENAHEDSVWAATWVPATEERPALLLTGSLDETVKLWRADELDLVRTNTGHSLGVAAVAAHPSGIIAASSSLDSFVRVFDVDTNATIAVLEAPPSEVWGMQFEPKGTILAVAGGSSASVKLWDTASWRLISTLSIPRPEAPKPSDKTSSKKFVLSVAWSPNGKRLACGSMDGTICVFDVDRSKLLHQLEGHNMPVRSLVFSPVDPRVLFSGSDDGHVNVHDAEGKTLVGSMSGHTSWVLSVDASPDGGAIATGSSDRTVRLWDLKMRAAIQTMSNHNDQVWSVAFRPPGGTGVRAGRLASVSDDKSVSLYDYS

SEQ ID NO: 109396 - protein, 214 aa, Zea mays subsp. mays
  misc_feature (1)..(214): Ceres Seq. ID no. 14309364
  misc_feature (169)..(212): Pfam Name: WD domain, G-beta repeat Pfam Description: WD domain, G-beta repeat
  misc_feature (1)..(212): Homolog of NCBI NO: 13173173 NR Description: unknown protein i8 [Aedes aegypti]
  misc_feature (1)..(212): Homolog of NCBI NO: 19335618 NR Description: unknown protein [Aedes aegypti]
  misc_feature (1)..(180): Homolog of NCBI NO: 26345856 NR Description: unnamed protein product [Mus musculus]
  misc_feature (1)..(212): Homolog of NCBI NO: 33150742 NR Description: G protein beta subunit-like protein [Homo sapiens]
  misc_feature (1)..(212): Homolog of NCBI NO: 12849020 NR Description: unnamed protein product [Mus musculus]
  misc_feature (1)..(212): Homolog of NCBI NO: 13277350 NR Description: meiotic recombination protein REC14 [Mus
  misc_feature (1)..(212): Homolog of NCBI NO: 13376840 NR Description: recombination protein REC14 [Homo sapiens]
  misc_feature (1)..(212): Homolog of NCBI NO: 37590940 NR Description: Unknown (protein for MGC:75826) [Silurana
  misc_feature (1)..(212): Homolog of NCBI NO: 38541742 NR Description: Unknown (protein for MGC:77675) [Danio rerio]
  misc_feature (1)..(214): Homolog of NCBI NO: 15233721 NR Description: transducin / WD-40 repeat protein family
MQFEPKGTILAVAGGSSASVKLWDTASWRLISTLSIPRPEAPKPSDKTSSKKFVLSVAWSPNGKRLACGSMDGTICVFDVDRSKLLHQLEGHNMPVRSLVFSPVDPRVLFSGSDDGHVNVHDAEGKTLVGSMSGHTSWVLSVDASPDGGAIATGSSDRTVRLWDLKMRAAIQTMSNHNDQVWSVAFRPPGGTGVRAGRLASVSDDKSVSLYDYS

SEQ ID NO: 109397 - DNA, 1084 bp, Zea mays subsp. mays
  misc_feature (1)..(1084): Ceres Seq. ID no. 14309357
acatttcattttcattcatcctctcgcttctgacctgacctgacctaaatcatcatcatcgaaaatggtttccgcgcgtgaggagttcgtgtacatggccaagctcgccgagcaagccgagcgctacgaggagatggtggagttcatggagaaagtgtccgcctccgtcgacggcgacgagctcaccgtcgaggagcgtaacctcctctccgtcgcctacaagaacgtgatcggcgcgcggcgcgcctcgtggcgcatcatatcgtcgatcgagcagaaggaggagagccgcggcaacgacgaccacgtggcggcgatccgcgattacagggggaagatcgagacggagctcacggggatctgcgaggggatactgaagctgctggactcgaggctggtccccgccgcagcgtcgggggactcgaaggtgttttatctgaagatgaagggggattaccataggtacttggctgagtttaagaccggtcaagagaggaaagacgccgctgagaatactctctccgcttacaaatctgctcaggatattgcgaatgcagagctcgctccaactcacccaatccgtctaggtctggcattgaacttctctgtgttctactacgagatcttaaactctcctgatcgtgcctgcagcctcgctaaacaggcctttgatgacgcgattgcggagttggacactctaggtgaagagtcgtacaaagacagcaccttgatcatgcagcttctccgtgacaacctcactctctggacatccgacatgcaggatgatgctgcggatgaggagatcaaggaagagtcggctccaaagccagctgaggaacagcagtaatcaaatctttttgactgaactgctgttttctaggggtttggaacttttattcattcatcgtaatccctagcaagttggaccatcagtcatcatcttttatctctttgcctgattttctccttttttatttgttgttgttctatctttttttttttgtcttctgggatatgtctatttcaatgtctgcaatcgaaccttgctttgtgtgtttctattcaatttgaaaggctctgtcct

SEQ ID NO: 109398 - protein, 260 aa, Zea mays subsp. mays
  misc_feature (1)..(260): Ceres Seq. ID no. 14309358
  misc_feature (5)..(242): Pfam Name: 14-3-3 protein Pfam Description: 14-3-3 protein
  misc_feature (3)..(260): Homolog of NCBI NO: 1702986 NR Description: 14-3-3-like protein GF14 chi (General regulatory
  misc_feature (3)..(260): Homolog of NCBI NO: 18413181 NR Description: 14-3-3 protein GF14 chi (grf1) [Arabidopsis
  misc_feature (1)..(260): Homolog of NCBI NO: 1361987 NR Description: 14-3-3 protein homolog GF14 chi chain -
  misc_feature (3)..(260): Homolog of NCBI NO: 8099063 NR Description: 14-3-3 protein [Populus x canescens]
  misc_feature (1)..(260): Homolog of NCBI NO: 20340229 NR Description: 14-3-3-like protein [Thellungiella halophila]
  misc_feature (3)..(258): Homolog of NCBI NO: 14532442 NR Description: At1g35160/T32G9_30 [Arabidopsis thaliana]
  misc_feature (3)..(260): Homolog of NCBI NO: 18399524 NR Description: 14-3-3 protein GF14 phi (grf4) [Arabidopsis
  misc_feature (1)..(260): Homolog of NCBI NO: 487791 NR Description: GF14omega isoform
  misc_feature (1)..(260): Homolog of NCBI NO: 18411901 NR Description: 14-3-3 protein GF14 omega (grf2) [Arabidopsis
  misc_feature (2)..(260): Homolog of NCBI NO: 13447104 NR Description: GF14 omega [Brassica napus]
MVSAREEFVYMAKLAEQAERYEEMVEFMEKVSASVDGDELTVEERNLLSVAYKNVIGARRASWRIISSIEQKEESRGNDDHVAAIRDYRGKIETELTGICEGILKLLDSRLVPAAASGDSKVFYLKMKGDYHRYLAEFKTGQERKDAAENTLSAYKSAQDIANAELAPTHPIRLGLALNFSVFYYEILNSPDRACSLAKQAFDDAIAELDTLGEESYKDSTLIMQLLRDNLTLWTSDMQDDAADEEIKEESAPKPAEEQQ

SEQ ID NO: 109399 - protein, 250 aa, Zea mays subsp. mays
  misc_feature (1)..(250): Ceres Seq. ID no. 14309359
  misc_feature (1)..(232): Pfam Name: 14-3-3 protein Pfam Description: 14-3-3 protein
  misc_feature (1)..(250): Homolog of NCBI NO: 1702986 NR Description: 14-3-3-like protein GF14 chi (General regulatory
  misc_feature (1)..(250): Homolog of NCBI NO: 18413181 NR Description: 14-3-3 protein GF14 chi (grf1) [Arabidopsis
  misc_feature (1)..(250): Homolog of NCBI NO: 1361987 NR Description: 14-3-3 protein homolog GF14 chi chain -
  misc_feature (1)..(250): Homolog of NCBI NO: 8099063 NR Description: 14-3-3 protein [Populus x canescens]
  misc_feature (1)..(250): Homolog of NCBI NO: 20340229 NR Description: 14-3-3-like protein [Thellungiella halophila]
  misc_feature (1)..(248): Homolog of NCBI NO: 14532442 NR Description: At1g35160/T32G9_30 [Arabidopsis thaliana]
  misc_feature (1)..(250): Homolog of NCBI NO: 18399524 NR Description: 14-3-3 protein GF14 phi (grf4) [Arabidopsis
  misc_feature (1)..(250): Homolog of NCBI NO: 487791 NR Description: GF14omega isoform
  misc_feature (1)..(250): Homolog of NCBI NO: 18411901 NR Description: 14-3-3 protein GF14 omega (grf2) [Arabidopsis
  misc_feature (1)..(250): Homolog of NCBI NO: 13447104 NR Description: GF14 omega [Brassica napus]
MAKLAEQAERYEEMVEFMEKVSASVDGDELTVEERNLLSVAYKNVIGARRASWRIISSIEQKEESRGNDDHVAAIRDYRGKIETELTGICEGILKLLDSRLVPAAASGDSKVFYLKMKGDYHRYLAEFKTGQERKDAAENTLSAYKSAQDIANAELAPTHPIRLGLALNFSVFYYEILNSPDRACSLAKQAFDDAIAELDTLGEESYKDSTLIMQLLRDNLTLWTSDMQDDAADEEIKEESAPKPAEEQQ

SEQ ID NO: 109400 - protein, 237 aa, Zea mays subsp. mays
  misc_feature (1)..(237): Ceres Seq. ID no. 14309360
  misc_feature (1)..(219): Pfam Name: 14-3-3 protein Pfam Description: 14-3-3 protein
  misc_feature (1)..(237): Homolog of NCBI NO: 487791 NR Description: GF14omega isoform
  misc_feature (1)..(237): Homolog of NCBI NO: 18411901 NR Description: 14-3-3 protein GF14 omega (grf2) [Arabidopsis
  misc_feature (1)..(237): Homolog of NCBI NO: 18413181 NR Description: 14-3-3 protein GF14 chi (grf1) [Arabidopsis
  misc_feature (1)..(237): Homolog of NCBI NO: 8099063 NR Description: 14-3-3 protein [Populus x canescens]
  misc_feature (1)..(235): Homolog of NCBI NO: 14532442 NR Description: At1g35160/T32G9_30 [Arabidopsis thaliana]
  misc_feature (1)..(237): Homolog of NCBI NO: 18399524 NR Description: 14-3-3 protein GF14 phi (grf4) [Arabidopsis
  misc_feature (1)..(237): Homolog of NCBI NO: 20340229 NR Description: 14-3-3-like protein [Thellungiella halophila]
  misc_feature (1)..(237): Homolog of NCBI NO: 1361987 NR Description: 14-3-3 protein homolog GF14 chi chain -
  misc_feature (1)..(237): Homolog of NCBI NO: 1702986 NR Description: 14-3-3-like protein GF14 chi (General regulatory
  misc_feature (1)..(237): Homolog of NCBI NO: 13447104 NR Description: GF14 omega [Brassica napus]
MVEFMEKVSASVDGDELTVEERNLLSVAYKNVIGARRASWRIISSIEQKEESRGNDDHVAAIRDYRGKIETELTGICEGILKLLDSRLVPAAASGDSKVFYLKMKGDYHRYLAEFKTGQERKDAAENTLSAYKSAQDIANAELAPTHPIRLGLALNFSVFYYEILNSPDRACSLAKQAFDDAIAELDTLGEESYKDSTLIMQLLRDNLTLWTSDMQDDAADEEIKEESAPKPAEEQQ

SEQ ID NO: 109401 - DNA, 967 bp, Zea mays subsp. mays
  misc_feature (1)..(967): Ceres Seq. ID no. 14309353
aattaacttttcttttttcattgttgtgttctctctctctttctctcgctggagaaaaatgttggctatatttcacgaggcctttgctcacccgccggaggaactctacagtccggcgtctgagaaatgctctaaacagcccaaacttccagaagaaaccttagacgacttcttgtctcgtcactctgacaacactttctccatgtctttcggaaaagcagctgttcttgcttacgttcgtccctctgcttccttctcagtccaccagaggttgttctgtgggtttgatgacatctactgtctcttctttgggagcttgaacaatctgtgtcagctaaacaagcaatatggtctgaccaagacaacaaacgaggccatgtttgtgattgaagcttataggactcttagagacagaggtccttatccagctgatcaggttgtcaaggatttagacggtagctttgcctttgttgtttatgatagcaaagctggttctgtcttcacggccctggggtctgatggaggagtgaagctgttttggggaatagctgctgatggatctgttgtgatatcagatgatttggatgttatcaaagagggttgtgctaaatcttttgctccttttcctactggatgtatgttccacagtgaaggagggttaatgagctttgagcatccgatgaacaagataaaggcgatgccgagagtggacagtgaaggagtcctatgtggtgctaacttcaaggtggatgtgtacacgcgtgttaacagtatccctcgtcgaggaagtgaagccaattggtctctctgaatgccttgcattctctcaacttcctaaatgatactttcctttccgcactttcatgctccgttcttgttcttctctacttctgttatggaataagccatgaataaaaactgtgaatagctttcgaggttctatataaaaataaatttctcagcgctc

SEQ ID NO: 109402 - protein, 269 aa, Zea mays subsp. mays
  misc_feature (1)..(269): Ceres Seq. ID no. 14309354
  misc_feature (20)..(269): Homolog of NCBI NO: 7486256 NR Description: hypothetical protein F27G19.50 - Arabidopsis
  misc_feature (20)..(269): Homolog of NCBI NO: 18416995 NR Description: expressed protein [Arabidopsis thaliana]
INFSFFIVVFSLSFSRWRKMLAIFHEAFAHPPEELYSPASEKCSKQPKLPEETLDDFLSRHSDNTFSMSFGKAAVLAYVRPSASFSVHQRLFCGFDDIYCLFFGSLNNLCQLNKQYGLTKTTNEAMFVIEAYRTLRDRGPYPADQVVKDLDGSFAFVVYDSKAGSVFTALGSDGGVKLFWGIAADGSVVISDDLDVIKEGCAKSFAPFPTGCMFHSEGGLMSFEHPMNKIKAMPRVDSEGVLCGANFKVDVYTRVNSIPRRGSEANWSL

SEQ ID NO: 109403 - protein, 250 aa, Zea mays subsp. mays
  misc_feature (1)..(250): Ceres Seq. ID no. 14309355
  misc_feature (1)..(250): Homolog of NCBI NO: 7486256 NR Description: hypothetical protein F27G19.50 - Arabidopsis
  misc_feature (1)..(250): Homolog of NCBI NO: 18416995 NR Description: expressed protein [Arabidopsis thaliana]
MLAIFHEAFAHPPEELYSPASEKCSKQPKLPEETLDDFLSRHSDNTFSMSFGKAAVLAYVRPSASFSVHQRLFCGFDDIYCLFFGSLNNLCQLNKQYGLTKTTNEAMFVIEAYRTLRDRGPYPADQVVKDLDGSFAFVVYDSKAGSVFTALGSDGGVKLFWGIAADGSVVISDDLDVIKEGCAKSFAPFPTGCMFHSEGGLMSFEHPMNKIKAMPRVDSEGVLCGANFKVDVYTRVNSIPRRGSEANWSL

SEQ ID NO: 109404 - protein, 202 aa, Zea mays subsp. mays
  misc_feature (1)..(202): Ceres Seq. ID no. 14309356
  misc_feature (1)..(202): Homolog of NCBI NO: 7486256 NR Description: hypothetical protein F27G19.50 - Arabidopsis
  misc_feature (1)..(202): Homolog of NCBI NO: 18416995 NR Description: expressed protein [Arabidopsis thaliana]
MSFGKAAVLAYVRPSASFSVHQRLFCGFDDIYCLFFGSLNNLCQLNKQYGLTKTTNEAMFVIEAYRTLRDRGPYPADQVVKDLDGSFAFVVYDSKAGSVFTALGSDGGVKLFWGIAADGSVVISDDLDVIKEGCAKSFAPFPTGCMFHSEGGLMSFEHPMNKIKAMPRVDSEGVLCGANFKVDVYTRVNSIPRRGSEANWSL

SEQ ID NO: 109405 - DNA, 802 bp, Zea mays subsp. mays
  misc_feature (1)..(802): Ceres Seq. ID no. 15178333
tctgcctctgcctctcagtttaccaaaaccctagtttcaaagctttactctccagaaatggctttctgcaaaaatctcggtggtctattgaggcaaggtgcggtttctcagacagggaatgtacccgttcagtctatgctcgggtctctccggtacatgtctaccaagctctttgtcggtggtctctcatggggaactgatgaccagtcattgagggaggctttctccaacttcggtgaagtgatcgattctaaggtcattgttgatagggaaaccggaaggtcaagggggtttggatttgtcaatttctctgatgagagtgctgctaatgctgcaatttcagagatggacggaaaggaactgaatggacgcaacatccgagtgaatgttgctaacgatagaccaagtgctccccgggcttatggaggtggtggcggctacggtggaggtggtggtggctatggaggaggtggtgatggaggcggttactaaacagaggagcttcttgtgataagaagaattgatctttctgtttgtttttttttattatttaaatcgagcttgtgctagtacaaaacctgaatgggatttgttgagactctagtagtcagtactcttatctaagacacggcttttcactcagtttgtgttagcttcaaatattgtccgttaataattctggaggaaagccgaattgagagtatgagcagttatcatctgttttagaattatacccgatctgacttgagatttgagttcttgtaaaaggaagtgtattcttcaatttgagtttatcttttcg

SEQ ID NO: 109406 - protein, 163 aa, Zea mays subsp. mays; identical to SEQ ID NO: 51848
  misc_feature (1)..(163): Ceres Seq. ID no. 15178334
  misc_feature (57)..(128): Pfam Name: RNA recognition motif. (a.k.a. RRM, RBD, or RNP domain) Pfam Description: RNA recognition motif. (a.k.a. RRM, RBD, or RNP
  misc_feature (20)..(162): Homolog of NCBI NO: 15239505 NR Description: RNA-binding protein, putative [Arabidopsis
  misc_feature (20)..(145): Homolog of NCBI NO: 7489099 NR Description: RNA-binding protein RGP-3 - wood tobacco
  misc_feature (20)..(163): Homolog of NCBI NO: 7439995 NR Description: RNA binding protein 3 - wood tobacco
  misc_feature (20)..(163): Homolog of NCBI NO: 7439994 NR Description: glycine-rich RNA-binding protein - garden pea
  misc_feature (20)..(153): Homolog of NCBI NO: 21553972 NR Description: glycine-rich RNA binding protein, putative
  misc_feature (20)..(153): Homolog of NCBI NO: 15229525 NR Description: RNA-binding protein, putative [Arabidopsis
  misc_feature (40)..(162): Homolog of NCBI NO: 322514 NR Description: glycine-rich RNA-binding protein (clone A81) -
  misc_feature (20)..(162): Homolog of NCBI NO: 30682622 NR Description: glycine-rich RNA-binding protein (AtGRP2)
  misc_feature (20)..(162): Homolog of NCBI NO: 15236359 NR Description: glycine-rich RNA-binding protein (AtGRP2)
  misc_feature (20)..(163): Homolog of NCBI NO: 2826811 NR Description: AtGRP2 [Arabidopsis thaliana]

SEQ ID NO: 109407 - protein, 144 aa, Zea mays subsp. mays; identical to SEQ ID NO: 51849
  misc_feature (1)..(144): Ceres Seq. ID no. 15178335
  misc_feature (38)..(109): Pfam Name: RNA recognition motif. (a.k.a. RRM, RBD, or RNP domain) Pfam Description: RNA recognition motif. (a.k.a. RRM, RBD, or RNP
  misc_feature (1)..(143): Homolog of NCBI NO: 15239505 NR Description: RNA-binding protein, putative [Arabidopsis
  misc_feature (1)..(126): Homolog of NCBI NO: 7489099 NR Description: RNA-binding protein RGP-3 - wood tobacco
  misc_feature (1)..(144): Homolog of NCBI NO: 7439995 NR Description: RNA binding protein 3 - wood tobacco
  misc_feature (1)..(144): Homolog of NCBI NO: 7439994 NR Description: glycine-rich RNA-binding protein - garden pea
  misc_feature (1)..(134): Homolog of NCBI NO: 21553972 NR Description: glycine-rich RNA binding protein, putative
  misc_feature (1)..(134): Homolog of NCBI NO: 15229525 NR Description: RNA-binding protein, putative [Arabidopsis
  misc_feature (21)..(143): Homolog of NCBI NO: 322514 NR Description: glycine-rich RNA-binding protein (clone A81) -
  misc_feature (1)..(143): Homolog of NCBI NO: 30682622 NR Description: glycine-rich RNA-binding protein (AtGRP2)
  misc_feature (1)..(143): Homolog of NCBI NO: 15236359 NR Description: glycine-rich RNA-binding protein (AtGRP2)
  misc_feature (1)..(144): Homolog of NCBI NO: 2826811 NR Description: AtGRP2 [Arabidopsis thaliana]

SEQ ID NO: 109408 - protein, 118 aa, Zea mays subsp. mays; identical to SEQ ID NO: 51850
  misc_feature (1)..(118): Ceres Seq. ID no. 15178336
  misc_feature (12)..(83): Pfam Name: RNA recognition motif. (a.k.a. RRM, RBD, or RNP domain) Pfam Description: RNA recognition motif. (a.k.a. RRM, RBD, or RNP
  misc_feature (1)..(117): Homolog of NCBI NO: 15239505 NR Description: RNA-binding protein, putative [Arabidopsis
  misc_feature (1)..(100): Homolog of NCBI NO: 7489099 NR Description: RNA-binding protein RGP-3 - wood tobacco
  misc_feature (1)..(118): Homolog of NCBI NO: 7439995 NR Description: RNA binding protein 3 - wood tobacco
  misc_feature (1)..(118): Homolog of NCBI NO: 7439994 NR Description: glycine-rich RNA-binding protein - garden pea
  misc_feature (1)..(108): Homolog of NCBI NO: 21553972 NR Description: glycine-rich RNA binding protein, putative
  misc_feature (1)..(108): Homolog of NCBI NO: 15229525 NR Description: RNA-binding protein, putative [Arabidopsis
  misc_feature (1)..(117): Homolog of NCBI NO: 322514 NR Description: glycine-rich RNA-binding protein (clone A81) -
  misc_feature (1)..(117): Homolog of NCBI NO: 30682622 NR Description: glycine-rich RNA-binding protein (AtGRP2)
  misc_feature (1)..(117): Homolog of NCBI NO: 15236359 NR Description: glycine-rich RNA-binding protein (AtGRP2)
  misc_feature (1)..(118): Homolog of NCBI NO: 2826811 NR Description: AtGRP2 [Arabidopsis thaliana]

SEQ ID NO: 109409 - DNA, 756 bp, Zea mays subsp. mays
  misc_feature (1)..(756): Ceres Seq. ID no. 14309350
attcttccttcacagcacttcttctctaacgaacaaatctttcttcatatctttctctcaaacacaaacgatggctcaggaaggtgttgctgctgctgcgaatggtgctacagtggtggagaagtctgttaccttcactgcctacaagccccagctgatcgtggaggctcagaaggtcggtgacgctgtcgctttctacaaggatgtgtttggtgcgacggagactggacactctctttaccctaagcgtaaggctgaccaagagctccctcacgttgtctccgctgagattaacctcgctggtgctaccgtcgttgtctccgacgtctctgttcactctggctctaatgtgaagacggggactgtgtctgcactcctcgaaactgatgacgtggaagctgccgttgcgaaagctgtagccgccggagctgtgaaagtggaggaggtctcggagggggaagctgagggttgggtgaagggaaaggtgactgacccgttcggtttcacctggatctttgtttctccggtggacaaggatgacaaggaagaaaacaaagaggtggtctaactgtcgtcgtcgtcgtcggatctgatcgttcgtcggtttctgaacaaaccttctattatcctttttttatgcttttgtagtttgtcttttgtggaatctccggtatcagtaaaccgggtcggttaacttatgacttttgttgagtttaatttcacccttttgacataagacttggtgaaataaaacgg

SEQ ID NO: 109410 - protein, 188 aa, Zea mays subsp. mays
  misc_feature (1)..(188): Ceres Seq. ID no. 14309351
  misc_feature (62)..(170): Pfam Name: Glyoxalase/Bleomycin resistance Pfam Description: Glyoxalase/Bleomycin resistance
  misc_feature (25)..(180): Homolog of NCBI NO: 28565534 NR Description: early tobacco anther 1 [Nicotiana tabacum]
  misc_feature (24)..(187): Homolog of NCBI NO: 18422918 NR Description: expressed protein [Arabidopsis thaliana]
FFLHSTSSLTNKSFFISFSQTQTMAQEGVAAAANGATVVEKSVTFTAYKPQLIVEAQKVGDAVAFYKDVFGATETGHSLYPKRKADQELPHVVSAEINLAGATVVVSDVSVHSGSNVKTGTVSALLETDDVEAAVAKAVAAGAVKVEEVSEGEAEGWVKGKVTDPFGFTWIFVSPVDKDDKEENKEVV

SEQ ID NO: 109411 - protein, 165 aa, Zea mays subsp. mays
  misc_feature (1)..(165): Ceres Seq. ID no. 14309352
  misc_feature (39)..(147): Pfam Name: Glyoxalase/Bleomycin resistance Pfam Description: Glyoxalase/Bleomycin resistance
  misc_feature (2)..(157): Homolog of NCBI NO: 28565534 NR Description: early tobacco anther 1 [Nicotiana tabacum]
  misc_feature (1)..(164): Homolog of NCBI NO: 18422918 NR Description: expressed protein [Arabidopsis thaliana]
MAQEGVAAAANGATVVEKSVTFTAYKPQLIVEAQKVGDAVAFYKDVFGATETGHSLYPKRKADQELPHVVSAEINLAGATVVVSDVSVHSGSNVKTGTVSALLETDDVEAAVAKAVAAGAVKVEEVSEGEAEGWVKGKVTDPFGFTWIFVSPVDKDDKEENKEVV

SEQ ID NO: 109412 - DNA, 798 bp, Zea mays subsp. mays
  misc_feature (1)..(798): Ceres Seq. ID no. 14309346
agattcggtcgctaataatatttggagtcgggaggggtgacctgagatattcacgacacaaaacaaatcatcatcatgtggagaagaatcgtctcctctggtctcaaaaccctagcctccgatgtcgccgctgcttctcctcgtcgatccgtagccaccaccaccgtgagacccttgaggttctacctcgcatccaatcccgcttcttcttcccttttacctcgccatttcagctccgaatcagtggagaccgttgggaagaagaaggtggaggatgttatgcccattgctactggacatgaaaaggaggagcttgaagctgaacttgaggggaggaggctgcttgacattgacttccctgaaggtccttttggaactaaggaagctcctgctatcgtaaagtcctactatgacaagcgaattgtgggatgccctggtggtgaaggcgaggatgaacacgatgttgtgtggttctggctggagaaaggaaagtcttttgaatgccccgtttgcactcagtactttgagctggaagtggttggtccaggtggacctcccgatggtcacggtgatgaagacgatgagcaccaccactgattccggcttctcccttgctgcgagttttgctttttttttttttattattttttactggaataaaaaacatatgctgctggtgagacagttaaaaatgtttttgatccttttggaacaacacttcggtatcggaagttgtcaaaatgcctaaaccgttgttttacttttgtaccaattcttgaatcagagttattcctgcct

SEQ ID NO: 109413 - protein, 173 aa, Zea mays subsp. mays
  misc_feature (1)..(173): Ceres Seq. ID no. 14309347
  misc_feature (62)..(158): Pfam Name: Cytochrome c oxidase subunit Vb Pfam Description: Cytochrome c oxidase subunit Vb
  misc_feature (72)..(152): Homolog of NCBI NO: 17017988 NR Description: cytochrome c oxidase subunit Vb precursor
  misc_feature (72)..(152): Homolog of NCBI NO: 117102 NR Description: CYTOCHROME C OXIDASE POLYPEPTIDE VB (VI)
  misc_feature (72)..(152): Homolog of NCBI NO: 223590 NR Description: oxidase IV,cytochrome
  misc_feature (125)..(172): Homolog of NCBI NO: 5903035 NR Description: Similar to gb|D85381 cytochrome c oxidase subunit precursor from Oryza sativa. ESTs gb|R30504 and gb|AA598195 come
  misc_feature (1)..(111): Homolog of NCBI NO: 7484634 NR Description: probable cytochrome-c oxidase (EC 1.9.3.1) Vb
  misc_feature (1)..(173): Homolog of NCBI NO: 34912592 NR Description: cytochrome c oxidase subunit Vb precursor
  misc_feature (41)..(173): Homolog of NCBI NO: 5803264 NR Description: ESTs AU057456(S21460),AU057455(S21460) correspond a region of the predicted gene.~Similar to cytochrome c oxidase
  misc_feature (1)..(172): Homolog of NCBI NO: 15220092 NR Description: cytochrome c oxidase subunit -related
  misc_feature (1)..(172): Homolog of NCBI NO: 21592567 NR Description: cytochrome c oxidase subunit, putative
  misc_feature (1)..(173): Homolog of NCBI NO: 15232644 NR Description: cytochrome c oxidase subunit Vb -related
MWRRIVSSGLKTLASDVAAASPRRSVATTTVRPLRFYLASNPASSSLLPRHFSSESVETVGKKKVEDVMPIATGHEKEELEAELEGRRLLDIDFPEGPFGTKEAPAIVKSYYDKRIVGCPGGEGEDEHDVVWFWLEKGKSFECPVCTQYFELEVVGPGGPPDGHGDEDDEHHH

SEQ ID NO: 109414 - protein, 112 aa, Zea mays subsp. mays
  misc_feature (1)..(112): Ceres Seq. ID no. 14309348
MTSELWDALVVKARMNTMLCGSGWRKESLLNAPFALSTLSWKWLVQVDLPMVTVMKTMSTTTDSGFSLAASFAFFFFIIFYWNKKHMLLVRQLKMFLILLEQHFGIGSCQNA

SEQ ID NO: 109415 - protein, 105 aa, Zea mays subsp. mays; identical to SEQ ID NO: 55756
  misc_feature (1)..(105): Ceres Seq. ID no. 14309349
  misc_feature (1)..(90): Pfam Name: Cytochrome c oxidase subunit Vb Pfam Description: Cytochrome c oxidase subunit Vb
  misc_feature (4)..(84): Homolog of NCBI NO: 17017988 NR Description: cytochrome c oxidase subunit Vb precursor
  misc_feature (4)..(84): Homolog of NCBI NO: 117102 NR Description: CYTOCHROME C OXIDASE POLYPEPTIDE VB (VI)
  misc_feature (4)..(84): Homolog of NCBI NO: 223590 NR Description: oxidase IV,cytochrome
  misc_feature (57)..(104): Homolog of NCBI NO: 5903035 NR Description: Similar to gb|D85381 cytochrome c oxidase subunit precursor from Oryza sativa. ESTs gb|R30504 and gb|AA598195 come
  misc_feature (1)..(43): Homolog of NCBI NO: 7484634 NR Description: probable cytochrome-c oxidase (EC 1.9.3.1) Vb
  misc_feature (1)..(105): Homolog of NCBI NO: 34912592 NR Description: cytochrome c oxidase subunit Vb precursor
  misc_feature (1)..(105): Homolog of NCBI NO: 5803264 NR Description: ESTs AU057456(S21460),AU057455(S21460) correspond a region of the predicted gene.~Similar to cytochrome c oxidase
  misc_feature (1)..(104): Homolog of NCBI NO: 15220092 NR Description: cytochrome c oxidase subunit -related
  misc_feature (1)..(104): Homolog of NCBI NO: 21592567 NR Description: cytochrome c oxidase subunit, putative
  misc_feature (1)..(105): Homolog of NCBI NO: 15232644 NR Description: cytochrome c oxidase subunit Vb -related

SEQ ID NO: 109416 - DNA, 797 bp, Zea mays subsp. mays
  misc_feature (1)..(797): Ceres Seq. ID no. 14309339
aatcggagcttggaagggttgagacttgagcgagcgagcgagagatgagcaactacgcgattccactttcttcttcgtcctctctctccaatgcctatcatcaaccttctcgtgtttgcttcgttttccgcaatcctcgttccaattttgagtttcgcgggacacgactaagtggtggggttcgaagaacctctttaaagtgcaattgctgcagcaaagggaagggaggtacaggtgaaaacgaaaacagaaatgtgttggatgctttctttttgggaaaggcactagctgaggttatcaacgagcgaattgagtccactgttggcgaagttttgggtaacattgggaggtttcaagctgagcaacagaagcaagttcaggagattcagggagaggtacttgaaagagccaagaaagctaaggaaagagcagctagagaatccatggaggcacaaggactcgtaccggaatccacaaacacaaacccaaagccggctgctggtgttgttgcctctgttgtaacccctacctcgatcgttgaaagcaaggctataagaaatgatgaaaagctgtctggtttctccggatcttcaatgggggacgatatggatagctcgagttctagcgacgaagacgaagacagtgtctaagcgattgttcctagaccaatttcaagatttggtgatagatgcagacttgtttgaaaccgttgagaacatcttcgttgatatatgtacttaaaatgatgtttgagaataaataaccttgatattaattatgtggatttttaaaagggc

SEQ ID NO: 109417 - protein, 201 aa, Zea mays subsp. mays
  misc_feature (1)..(201): Ceres Seq. ID no. 14309340
  misc_feature (71)..(129): Homolog of NCBI NO: 17232006 NR Description: hypothetical protein [Nostoc sp. PCC 7120]
  misc_feature (71)..(129): Homolog of NCBI NO: 23130619 NR Description: hypothetical protein [Nostoc punctiforme]
  misc_feature (1)..(197): Homolog of NCBI NO: 15235625 NR Description: expressed protein [Arabidopsis thaliana]
  misc_feature (1)..(197): Homolog of NCBI NO: 21553912 NR Description: unknown [Arabidopsis thaliana]
  misc_feature (71)..(156): Homolog of NCBI NO: 16330265 NR Description: unknown protein [Synechocystis sp. PCC 6803]
MSNYAIPLSSSSSLSNAYHQPSRVCFVFRNPRSNFEFRGTRLSGGVRRTSLKCNCCSKGKGGTGENENRNVLDAFFLGKALAEVINERIESTVGEVLGNIGRFQAEQQKQVQEIQGEVLERAKKAKERAARESMEAQGLVPESTNTNPKPAAGVVASVVTPTSIVESKAIRNDEKLSGFSGSSMGDDMDSSSSSDEDEDSV

SEQ ID NO: 109418 - DNA, 1274 bp, Zea mays subsp. mays
  misc_feature (1)..(1274): Ceres Seq. ID no. 15180051
aacacaccaatctctcgccagaaaacacagaggatctcaatctcagatcgagagagaatgggtttctcttcccaagaaaacccttcttctctttacttcttcttcttctgtctctgtctctccacagtctctgcttacacaaacacaagcagcaacaatggtgtggaaggaggaagaagagagctagcttcttggagatgcaattggtttagagggagttgggtttatgatgtaacgtacccactttacgatccttacaaatgtccattcatagatccacagtttaactgcaagaagtatggtcgtcccgacaatctttatcttaagtatcgatggcaaccttcctcttgctctctccccagattcaatgggttgtatttcttgaggaagatgagagggaagaagataatgttcgttggagattcactaagcacaaatatgtggcaatctcttgcttgtctaattcacgcttgggttcctaacgctcgttacactcttcttcgccaaaagggtctcgcttccctcaccttcgaggactacggagtgacgttgaagctatacagaacacagttcttagtggatttagatgccgagaacgttggaagagtgcttaagcttgattccattaagcaaggcaaaatgtggagaggcatggacgtcttgattttcaacagttggcattggtggacccatatcgatcacatccagccgtgggactacatggaagatgggaaccgattgtacaaagacatgaacagactggtcgcttattacaaaggaatgaccacttgggctcgatgggttaatgcattcgtcaatccatctaagaccaaggttttcttcaatggtgtttctcctgtccattacgatggaagggattggggagagccaatgaagtcatgtaagagtcagacacaaccattctacgggaggaagtatccaggagggccaccagtggcttgggtgattttaaacaaagtgtttaggagattgaagaaaccagtctattggctcgacataaccggtctatctcagcttcgtaaagatgctcatccttctgcttacagtgggaaccatcctggtaatgactgtagccactggtgtcttcctggtctacctgatacttggaacgtactcttttactctgctcttttttcttgaagtctattttgttttatcatcaatgtataagttaccgaatagtctatttctttagttaattaactttgaattgtggtcgcttgattcttgactgaaataacgttttagatacc

SEQ ID NO: 109419 - protein, 386 aa, Zea mays subsp. mays
  misc_feature (1)..(386): Ceres Seq. ID no. 15180052
  misc_feature (51)..(381): Homolog of NCBI NO: 15228743 NR Description: expressed protein [Arabidopsis thaliana]
  misc_feature (66)..(386): Homolog of NCBI NO: 15219157 NR Description: hypothetical protein [Arabidopsis thaliana]
  misc_feature (67)..(385): Homolog of NCBI NO: 15224585 NR Description: expressed protein [Arabidopsis thaliana]
  misc_feature (49)..(384): Homolog of NCBI NO: 25366741 NR Description: F28N24.24 protein - Arabidopsis thaliana
  misc_feature (58)..(384): Homolog of NCBI NO: 18403435 NR Description: expressed protein [Arabidopsis thaliana]
  misc_feature (48)..(386): Homolog of NCBI NO: 34911864 NR Description: OSJNBb0032K15.9 [Oryza sativa (japonica
  misc_feature (49)..(384): Homolog of NCBI NO: 18396930 NR Description: expressed protein [Arabidopsis thaliana]
  misc_feature (62)..(386): Homolog of NCBI NO: 28393769 NR Description: unknown protein [Arabidopsis thaliana]
  misc_feature (62)..(386): Homolog of NCBI NO: 21593142 NR Description: unknown [Arabidopsis thaliana]
  misc_feature (20)..(386): Homolog of NCBI NO: 18406003 NR Description: expressed protein [Arabidopsis thaliana]
NTPISRQKTQRISISDRERMGFSSQENPSSLYFFFFCLCLSTVSAYTNTSSNNGVEGGRRELASWRCNWFRGSWVYDVTYPLYDPYKCPFIDPQFNCKKYGRPDNLYLKYRWQPSSCSLPRFNGLYFLRKMRGKKIMFVGDSLSTNMWQSLACLIHAWVPNARYTLLRQKGLASLTFEDYGVTLKLYRTQFLVDLDAENVGRVLKLDSIKQGKMWRGMDVLIFNSWHWWTHIDHIQPWDYMEDGNRLYKDMNRLVAYYKGMTTWARWVNAFVNPSKTKVFFNGVSPVHYDGRDWGEPMKSCKSQTQPFYGRKYPGGPPVAWVILNKVFRRLKKPVYWLDITGLSQLRKDAHPSAYSGNHPGNDCSHWCLPGLPDTWNVLFYSALFS

SEQ ID NO: 109420 - protein, 367 aa, Zea mays subsp. mays
  misc_feature (1)..(367): Ceres Seq. ID no. 15180053
  misc_feature (32)..(362): Homolog of NCBI NO: 15228743 NR Description: expressed protein [Arabidopsis thaliana]
  misc_feature (47)..(367): Homolog of NCBI NO: 15219157 NR Description: hypothetical protein [Arabidopsis thaliana]
  misc_feature (48)..(366): Homolog of NCBI NO: 15224585 NR Description: expressed protein [Arabidopsis thaliana]
  misc_feature (30)..(365): Homolog of NCBI NO: 25366741 NR Description: F28N24.24 protein - Arabidopsis thaliana
  misc_feature (39)..(365): Homolog of NCBI NO: 18403435 NR Description: expressed protein [Arabidopsis thaliana]
  misc_feature (29)..(367): Homolog of NCBI NO: 34911864 NR Description: OSJNBb0032K15.9 [Oryza sativa (japonica
  misc_feature (30)..(365): Homolog of NCBI NO: 18396930 NR Description: expressed protein [Arabidopsis thaliana]
  misc_feature (43)..(367): Homolog of NCBI NO: 28393769 NR Description: unknown protein [Arabidopsis thaliana]
  misc_feature (43)..(367): Homolog of NCBI NO: 21593142 NR Description: unknown [Arabidopsis thaliana]
  misc_feature (1)..(367): Homolog of NCBI NO: 18406003 NR Description: expressed protein [Arabidopsis thaliana]
MGFSSQENPSSLYFFFFCLCLSTVSAYTNTSSNNGVEGGRRELASWRCNWFRGSWVYDVTYPLYDPYKCPFIDPQFNCKKYGRPDNLYLKYRWQPSSCSLPRFNGLYFLRKMRGKKIMFVGDSLSTNMWQSLACLIHAWVPNARYTLLRQKGLASLTFEDYGVTLKLYRTQFLVDLDAENVGRVLKLDSIKQGKMWRGMDVLIFNSWHWWTHIDHIQPWDYMEDGNRLYKDMNRLVAYYKGMTTWARWVNAFVNPSKTKVFFNGVSPVHYDGRDWGEPMKSCKSQTQPFYGRKYPGGPPVAWVILNKVFRRLKKPVYWLDITGLSQLRKDAHPSAYSGNHPGNDCSHWCLPGLPDTWNVLFYSALFS

SEQ ID NO: 109421 - protein, 256 aa, Zea mays subsp. mays
  misc_feature (1)..(256): Ceres Seq. ID no. 15180054
  misc_feature (1)..(251): Homolog of NCBI NO: 15228743 NR Description: expressed protein [Arabidopsis thaliana]
  misc_feature (1)..(256): Homolog of NCBI NO: 15219157 NR Description: hypothetical protein [Arabidopsis thaliana]
  misc_feature (1)..(255): Homolog of NCBI NO: 15224585 NR Description: expressed protein [Arabidopsis thaliana]
  misc_feature (1)..(254): Homolog of NCBI NO: 25366741 NR Description: F28N24.24 protein - Arabidopsis thaliana
  misc_feature (1)..(254): Homolog of NCBI NO: 18403435 NR Description: expressed protein [Arabidopsis thaliana]
  misc_feature (1)..(256): Homolog of NCBI NO: 34911864 NR Description: OSJNBb0032K15.9 [Oryza sativa (japonica
  misc_feature (1)..(254): Homolog of NCBI NO: 18396930 NR Description: expressed protein [Arabidopsis thaliana]
  misc_feature (1)..(256): Homolog of NCBI NO: 28393769 NR Description: unknown protein [Arabidopsis thaliana]
  misc_feature (1)..(256): Homolog of NCBI NO: 21593142 NR Description: unknown [Arabidopsis thaliana]
  misc_feature (1)..(256): Homolog of NCBI NO: 18406003 NR Description: expressed protein [Arabidopsis thaliana]
MRGKKIMFVGDSLSTNMWQSLACLIHAWVPNARYTLLRQKGLASLTFEDYGVTLKLYRTQFLVDLDAENVGRVLKLDSIKQGKMWRGMDVLIFNSWHWWTHIDHIQPWDYMEDGNRLYKDMNRLVAYYKGMTTWARWVNAFVNPSKTKVFFNGVSPVHYDGRDWGEPMKSCKSQTQPFYGRKYPGGPPVAWVILNKVFRRLKKPVYWLDITGLSQLRKDAHPSAYSGNHPGNDCSHWCLPGLPDTWNVLFYSALFS

SEQ ID NO: 109422 - DNA, 979 bp, Zea mays subsp. mays
  misc_feature (1)..(979): Ceres Seq. ID no. 15179147
atatacatttttcttgttcactagcttcgaagtttctttcgaatagttaaaaaaaacaaacaatggcgacggttcagttcttcaaccaattcccctgccaaacccgagtccaaagcccatcaaactcaaaacccctctccaagccaccgtcttcgctggtgccaatgagcgcgctcactcgccgtccgtcgttttcccccggagaaatcgccgtttctcgttctgatttcagagtcagagtcatcgatgcggaagacgagttggatccggagacgagtgagggaggaggatctgctctattgatggcggaggaagcaatcgaatctgtggaggaaacggaggctctcaagagatcgctggtggattcgttgtacggcacagaccgagggttgagcgcatcgagcgagacgagagccgagatcggagatctaatcacacagctcgagtccaagaaccctacaccagctcccaccgatgctctcttccttctcaacggcaaatggatccagattaagttcgaggaaggtgtgatcggcactcctcagctaacggattcgattgagatcccggagtatgttgagtttcttggtcagaagattgatcttactccgatcagagggttgcttacatcggtacaagacacggctacgtctgtggctagaaccatatcgagccagccaccgttgaaattctctttgcctggggacagtgctcagtcgtggctgctcacgacttatctggacaaggacattaggatctctagaggagatggtggaagcgtctttgtgcttatcaaagaaggaagccctctgttgaacccttgaactctttaatgccaagtacaaactaagtgtttaatatattgttgttgtagtgttaatcgtttgtatgtattaactcggatggtatggagttaagtaataatgttgtagctgctataaaaatacaaaaaaaaaaatatacaaatgttaagaatctc

SEQ ID NO: 109423 - protein, 253 aa, Zea mays subsp. mays; identical to SEQ ID NO: 61487
  misc_feature (1)..(253): Ceres Seq. ID no. 15179148
  misc_feature (93)..(148): Pfam Name: PAP_fibrillin Pfam Description: PAP_fibrillin
  misc_feature (62)..(148): Homolog of NCBI NO: 7489179 NR Description: plastid-lipid-associated protein pap - common
  misc_feature (133)..(253): Homolog of NCBI NO: 7489179 NR Description: plastid-lipid-associated protein pap - common
  misc_feature (1)..(180): Homolog of NCBI NO: 14248550 NR Description: plastid-lipid associated protein PAP2 [Brassica
  misc_feature (1)..(180): Homolog of NCBI NO: 14248556 NR Description: plastid-lipid associated protein PAP2 [Brassica
  misc_feature (133)..(253): Homolog of NCBI NO: 25453087 NR Description: Light-induced protein, chloroplast precursor
  misc_feature (1)..(148): Homolog of NCBI NO: 25453087 NR Description: Light-induced protein, chloroplast precursor
  misc_feature (133)..(253): Homolog of NCBI NO: 22261807 NR Description: Light-induced protein, chloroplast precursor
  misc_feature (1)..(148): Homolog of NCBI NO: 22261807 NR Description: Light-induced protein, chloroplast precursor
  misc_feature (137)..(253): Homolog of NCBI NO: 21618237 NR Description: fibrillin precursor-like protein [Arabidopsis
  misc_feature (1)..(148): Homolog of NCBI NO: 21618237 NR Description: fibrillin precursor-like protein [Arabidopsis

SEQ ID NO: 109424 - protein, 219 aa, Zea mays subsp. mays; identical to SEQ ID NO: 61488
  misc_feature (1)..(219): Ceres Seq. ID no. 15179149
  misc_feature (59)..(114): Pfam Name: PAP_fibrillin Pfam Description: PAP_fibrillin
  misc_feature (28)..(114): Homolog of NCBI NO: 7489179 NR Description: plastid-lipid-associated protein pap - common
  misc_feature (99)..(219): Homolog of NCBI NO: 7489179 NR Description: plastid-lipid-associated protein pap - common
  misc_feature (1)..(146): Homolog of NCBI NO: 14248550 NR Description: plastid-lipid associated protein PAP2 [Brassica
  misc_feature (1)..(146): Homolog of NCBI NO: 14248556 NR Description: plastid-lipid associated protein PAP2 [Brassica
  misc_feature (99)..(219): Homolog of NCBI NO: 25453087 NR Description: Light-induced protein, chloroplast precursor
  misc_feature (1)..(114): Homolog of NCBI NO: 25453087 NR Description: Light-induced protein, chloroplast precursor
  misc_feature (99)..(219): Homolog of NCBI NO: 22261807 NR Description: Light-induced protein, chloroplast precursor
  misc_feature (1)..(114): Homolog of NCBI NO: 22261807 NR Description: Light-induced protein, chloroplast precursor
  misc_feature (103)..(219): Homolog of NCBI NO: 21618237 NR Description: fibrillin precursor-like protein [Arabidopsis
  misc_feature (1)..(114): Homolog of NCBI NO: 21618237 NR Description: fibrillin precursor-like protein [Arabidopsis

SEQ ID NO: 109425 - protein, 173 aa, Zea mays subsp. mays; identical to SEQ ID NO: 61489
  misc_feature (1)..(173): Ceres Seq. ID no. 15179150
  misc_feature (13)..(68): Pfam Name: PAP_fibrillin Pfam Description: PAP_fibrillin
  misc_feature (1)..(68): Homolog of NCBI NO: 7489179 NR Description: plastid-lipid-associated protein pap - common
  misc_feature (53)..(173): Homolog of NCBI NO: 7489179 NR Description: plastid-lipid-associated protein pap - common
  misc_feature (1)..(100): Homolog of NCBI NO: 14248550 NR Description: plastid-lipid associated protein PAP2 [Brassica
  misc_feature (1)..(100): Homolog of NCBI NO: 14248556 NR Description: plastid-lipid associated protein PAP2 [Brassica
  misc_feature (53)..(173): Homolog of NCBI NO: 25453087 NR Description: Light-induced protein, chloroplast precursor
  misc_feature (1)..(68): Homolog of NCBI NO: 25453087 NR Description: Light-induced protein, chloroplast precursor
  misc_feature (53)..(173): Homolog of NCBI NO: 22261807 NR Description: Light-induced protein, chloroplast precursor
  misc_feature (1)..(68): Homolog of NCBI NO: 22261807 NR Description: Light-induced protein, chloroplast precursor
  misc_feature (57)..(173): Homolog of NCBI NO: 21618237 NR Description: fibrillin precursor-like protein [Arabidopsis
  misc_feature (1)..(68): Homolog of NCBI NO: 21618237 NR Description: fibrillin precursor-like protein [Arabidopsis

SEQ ID NO: 109426 - DNA, 1046 bp, Zea mays subsp. mays
  misc_feature (1)..(1046): Ceres Seq. ID no. 15179003
agattttgattttaaccggaatagtcactttcctccggcgattgagaggctaattcatcctccggggaggttaattaagatggaggtaatcactcatccaacacctcgaactgtcgatgaggtctttactgacttcagaggtcgacgagctggtcttatcaaggctctcaccaccgatatggtgaagttttaccaaacgtgcgatcctgagaaagagaacttgtgcctctatggacttcctaatgagacatgggaggttaatcttcccgtcgaggaagttcctcctgagcttcctgaacctgctttaggcatcaatttcgctagagacgggatgcaagaaaaggactgggtgtctctggtcgctgttcacagtgattcctggctgctttctgttgccttctactttggtgcacgttttgggtttggtaagaatgagaggaagaagctcttccagatgataaacgagctcccaaccattttcgagattgtaacgggcaatgcaaagcaatccaaggatctatctggtaacaacaacaccagtagcaaaagcaaatccaacggcttgaaggtaccaaagatgtcatctccaccgcctaaagaagaagatgagagtgaggacgaggatgaagacgatgaacaaggtgcggtgtgtggcgcctgtggagacagtgacggtacagatgagttctggatctgctgtgacgcctgcgagaagtggttccatgggaaatgtgtgaagataacacctgctaaggcagaacacatcaagcactacaaatgcccaagctgcagtaacaagagagccaggccttgatgtaaaagaattaggaagaaggtgtgaaagaaggagaaagaagtttccagtttattgaacgagggttttagaagatgtaagaagatttttaaaaatacgctttatgtttaaaattgcttagtctttgtttatggattgagactatttacaatttgagtgatgtctttctttgtttttctttggattatttgttgttgttgttaatgtcaatgcactactgatttggcctgct

SEQ ID NO: 109427 - protein, 270 aa, Zea mays subsp. mays
  misc_feature (1)..(270): Ceres Seq. ID no. 15179004
  misc_feature (216)..(266): Pfam Name: PHD-finger Pfam Description: PHD-finger
  misc_feature (36)..(269): Homolog of NCBI NO: 4091080 NR Description: nucleic acid binding protein [Oryza sativa]
  misc_feature (35)..(269): Homolog of NCBI NO: 15239624 NR Description: nucleic acid binding protein - like [Arabidopsis
  misc_feature (32)..(270): Homolog of NCBI NO: 30687843 NR Description: zinc finger protein - like [Arabidopsis thaliana]
  misc_feature (35)..(269): Homolog of NCBI NO: 15229157 NR Description: nucleic acid binding protein-related [Arabidopsis
  misc_feature (32)..(269): Homolog of NCBI NO: 7488751 NR Description: probable zinc finger protein - alfalfa (fragment)
  misc_feature (27)..(58): Homolog of NCBI NO: 25346630 NR Description: F14L17.29 protein - Arabidopsis thaliana
  misc_feature (62)..(267): Homolog of NCBI NO: 25346630 NR Description: F14L17.29 protein - Arabidopsis thaliana
  misc_feature (27)..(267): Homolog of NCBI NO: 15223786 NR Description: nucleic acid binding protein (alfin-1) -related
  misc_feature (27)..(270): Homolog of NCBI NO: 21593407 NR Description: putative PHD-type zinc finger protein
  misc_feature (27)..(270): Homolog of NCBI NO: 15226967 NR Description: PHD-type zinc finger protein -related
DFDFNRNSHFPPAIERLIHPPGRLIKMEVITHPTPRTVDEVFTDFRGRRAGLIKALTTDMVKFYQTCDPEKENLCLYGLPNETWEVNLPVEEVPPELPEPALGINFARDGMQEKDWVSLVAVHSDSWLLSVAFYFGARFGFGKNERKKLFQMINELPTIFEIVTGNAKQSKDLSGNNNTSSKSKSNGLKVPKMSSPPPKEEDESEDEDEDDEQGAVCGACGDSDGTDEFWICCDACEKWFHGKCVKITPAKAEHIKHYKCPSCSNKRARP

SEQ ID NO: 109428 - protein, 244 aa, Zea mays subsp. mays
  misc_feature (1)..(244): Ceres Seq. ID no. 15179005
  misc_feature (190)..(240): Pfam Name: PHD-finger Pfam Description: PHD-finger
  misc_feature (6)..(244): Homolog of NCBI NO: 30687843 NR Description: zinc finger protein - like [Arabidopsis thaliana]
  misc_feature (9)..(243): Homolog of NCBI NO: 15229157 NR Description: nucleic acid binding protein-related [Arabidopsis
  misc_feature (6)..(243): Homolog of NCBI NO: 7488751 NR Description: probable zinc finger protein - alfalfa (fragment)
  misc_feature (1)..(32): Homolog of NCBI NO: 25346630 NR Description: F14L17.29 protein - Arabidopsis thaliana
  misc_feature (10)..(243): Homolog of NCBI NO: 4091080 NR Description: nucleic acid binding protein [Oryza sativa]
  misc_feature (9)..(243): Homolog of NCBI NO: 15239624 NR Description: nucleic acid binding protein - like [Arabidopsis
  misc_feature (36)..(241): Homolog of NCBI NO: 25346630 NR Description: F14L17.29 protein - Arabidopsis thaliana
  misc_feature (1)..(241): Homolog of NCBI NO: 15223786 NR Description: nucleic acid binding protein (alfin-1) -related
  misc_feature (1)..(244): Homolog of NCBI NO: 21593407 NR Description: putative PHD-type zinc finger protein
  misc_feature (1)..(244): Homolog of NCBI NO: 15226967 NR Description: PHD-type zinc finger protein -related
MEVITHPTPRTVDEVFTDFRGRRAGLIKALTTDMVKFYQTCDPEKENLCLYGLPNETWEVNLPVEEVPPELPEPALGINFARDGMQEKDWVSLVAVHSDSWLLSVAFYFGARFGFGKNERKKLFQMINELPTIFEIVTGNAKQSKDLSGNNNTSSKSKSNGLKVPKMSSPPPKEEDESEDEDEDDEQGAVCGACGDSDGTDEFWICCDACEKWFHGKCVKITPAKAEHIKHYKCPSCSNKRARP

SEQ ID NO: 109429 - protein, 211 aa, Zea mays subsp. mays
  misc_feature (1)..(211): Ceres Seq. ID no. 15179006
  misc_feature (157)..(207): Pfam Name: PHD-finger Pfam Description: PHD-finger
  misc_feature (1)..(209): Homolog of NCBI NO: 14192880 NR Description: Putative nucleic acid binding protein [Oryza
  misc_feature (1)..(210): Homolog of NCBI NO: 4091080 NR Description: nucleic acid binding protein [Oryza sativa]
  misc_feature (1)..(210): Homolog of NCBI NO: 15239624 NR Description: nucleic acid binding protein - like [Arabidopsis
  misc_feature (1)..(211): Homolog of NCBI NO: 30687843 NR Description: zinc finger protein - like [Arabidopsis thaliana]
  misc_feature (1)..(210): Homolog of NCBI NO: 15229157 NR Description: nucleic acid binding protein-related [Arabidopsis
  misc_feature (1)..(210): Homolog of NCBI NO: 7488751 NR Description: probable zinc finger protein - alfalfa (fragment)
  misc_feature (3)..(208): Homolog of NCBI NO: 25346630 NR Description: F14L17.29 protein - Arabidopsis thaliana
  misc_feature (1)..(208): Homolog of NCBI NO: 15223786 NR Description: nucleic acid binding protein (alfin-1) -related
  misc_feature (1)..(211): Homolog of NCBI NO: 21593407 NR Description: putative PHD-type zinc finger protein
  misc_feature (1)..(211): Homolog of NCBI NO: 15226967 NR Description: PHD-type zinc finger protein -related
MVKFYQTCDPEKENLCLYGLPNETWEVNLPVEEVPPELPEPALGINFARDGMQEKDWVSLVAVHSDSWLLSVAFYFGARFGFGKNERKKLFQMINELPTIFEIVTGNAKQSKDLSGNNNTSSKSKSNGLKVPKMSSPPPKEEDESEDEDEDDEQGAVCGACGDSDGTDEFWICCDACEKWFHGKCVKITPAKAEHIKHYKCPSCSNKRARP

SEQ ID NO: 109430 - DNA, 1174 bp, Zea mays subsp. mays
  misc_feature (1)..(1174): Ceres Seq. ID no. 14309328
aatcggtacgatcagattgcataaaagcaaatcataataagtcacgtggcacagttttgtcagatccaagagaagaaatcagaaaaagaacttgaaacgatgccgtactacaccagagacgaggacgaagtcgacgatttcgacgagttcgatccgacgccgtacagtggaggctacgacatcaccgtgatctacggccgtccgatccctccttgcgacgacacttgctaccctctctcctccgcagcggatgaagatttcgagtacgagagacctgaattcacctcgtaccacgatccttccgcctacgccgaagaagctctcaacaccgagtacagcagctactcccgccccaagccccgtcccggatttcgacccggttcagccggtggcggtcatgtccaaggtgagagacccgatcccagttacggatccggatacggtggagcgacggaggctgagtacggtaggagacctgaatctggatatggtgggagatcggagacggagaccggatacggatccgggtatgagaagaaaccgagcttcggtgaagagaggagcgagtatgagcgtaagcctagctatggaaggtctggggaagaggaaggaggttacaggaagcctagctatgggagatctgaggatcaggttgagagctacataaagcccaccagctatgaaaggtctgaggaacaggaggaagggagttacaggaagcctagctatggccgcaatgatgacgatgatgatgaagagcgcaggaaccgttctggtgatgatgaggaaggcagctatggccgcaagaaatatggtggcaatgactctaatgatgatgatgaggagaagaagcagcatcgttacaagcatcaccaccaccagaggcgccgtgatgaagatgatgactaaaaccttctctcagtactggagagtgttatgatcaagtacttttgcttagcttcatcttactaaataataaaaaagctaaggcatttatctttggatgttgttgttgcgtttgtttgattctctttggatacagcagagtctgtgtctgactttgtttctggttcataataagaccttgaactgatatcgggtcatcatcatgtaaaaagtaaactgttgtttttgttttctcgatattaaatatcaaaagtcattgccgagaagt

SEQ ID NO: 109431 - protein, 269 aa, Zea mays subsp. mays
  misc_feature (1)..(269): Ceres Seq. ID no. 14309329
  misc_feature (72)..(268): Homolog of NCBI NO: 32352182 NR Description: hypothetical protein [Oryza sativa (japonica
  misc_feature (6)..(236): Homolog of NCBI NO: 32352182 NR Description: hypothetical protein [Oryza sativa (japonica
  misc_feature (88)..(269): Homolog of NCBI NO: 24417262 NR Description: unknown [Arabidopsis thaliana]
  misc_feature (88)..(269): Homolog of NCBI NO: 9758332 NR Description: gene_id:MIJ24.6~ref|NP_013897.1~similar to
  misc_feature (1)..(245): Homolog of NCBI NO: 21928162 NR Description: AT3g29075/MXE2_1 [Arabidopsis thaliana]
  misc_feature (68)..(269): Homolog of NCBI NO: 24417262 NR Description: unknown [Arabidopsis thaliana]
  misc_feature (68)..(269): Homolog of NCBI NO: 9758332 NR Description: gene_id:MIJ24.6~ref|NP_013897.1~similar to
  misc_feature (1)..(269): Homolog of NCBI NO: 15228587 NR Description: glycine-rich protein [Arabidopsis thaliana]
  misc_feature (1)..(268): Homolog of NCBI NO: 24417262 NR Description: unknown [Arabidopsis thaliana]
  misc_feature (1)..(268): Homolog of NCBI NO: 9758332 NR Description: gene_id:MIJ24.6~ref|NP_013897.1~similar to
MPYYTRDEDEVDDFDEFDPTPYSGGYDITVIYGRPIPPCDDTCYPLSSAADEDFEYERPEFTSYHDPSAYAEEALNTEYSSYSRPKPRPGFRPGSAGGGHVQGERPDPSYGSGYGGATEAEYGRRPESGYGGRSETETGYGSGYEKKPSFGEERSEYERKPSYGRSGEEEGGYRKPSYGRSEDQVESYIKPTSYERSEEQEEGSYRKPSYGRNDDDDDEERRNRSGDDEEGSYGRKKYGGNDSNDDDEEKKQHRYKHHHHQRRRDEDDD

SEQ ID NO: 109432 - protein, 138 aa, Zea mays subsp. mays
  misc_feature (1)..(138): Ceres Seq. ID no. 14309330
  misc_feature (1)..(138): Homolog of NCBI NO: 18421880 NR Description: expressed protein [Arabidopsis thaliana]
  misc_feature (50)..(138): Homolog of NCBI NO: 18421880 NR Description: expressed protein [Arabidopsis thaliana]
MKISSTRDLNSPRTTILPPTPKKLSTPSTAATPAPSPVPDFDPVQPVAVMSKVRDPIPVTDPDTVERRRLSTVGDLNLDMVGDRRRRPDTDPGMRRNRASVKRGASMSVSLAMEGLGKRKEVTGSLAMGDLRIRLRAT

SEQ ID NO: 109433 - DNA, 1093 bp, Zea mays subsp. mays
  misc_feature (1)..(1093): Ceres Seq. ID no. 14309314
atggccaagccatcctctcctctgcccaaatccaaatcccaataacccaactctcctccttctctccttcctttccttcgtatggctgcaatcgcttctctttccttcccggcgctgggccaatctggaaagatttcgaatcccacgccttgtcgtcctctcgcctccgtctccgccatctgcaggagactttctcgccgctctctgacttcttccaggccttccacttcctcttcgaaattcgtcatccactgcatgtcaaatgctaccgatgtgccacctgtatcggagacaaagtcgaatttcctcaaagcttacaagcggcccatcccaagcatctacaacaccgtgttgcaggagctcatcgtgcagcagcatttgatgaggtacaaaaggacttaccgttacgaccccgttttcgcccttggctttgtaaccgtctacgatcagctcatggatgggtatccgagcgatcaggatcgtgattccattttccaagcttacgttgaagctttgaacgaggatcctaagcaataccgaattgatgcgcagaagatggaggaatgggccagaagtcagacgtctgcttcactagttgacttctcctctaaggaaggagaagttgaagcgattcttaaggacatttcagaaagagctggcagtaaggagggtttcagttacagcaggttcttcgctgttggcctctttcgcttgcttgagcttgcaggtgctactgatccaactgtccttgacaagctttgtgcgtccctaaatatcaacaagaaaagcgtggatcgggacctcgatgtgtatcgcaacctgctgtcaaagcttgtccaagccaaggaactactcaaggagtatgtcgagagggagaagaagaagagaggggaaagagccgaatcccagaaagctaacgaatcaatctccaagtctctgggagataatagcctatctttcttcgtttaatgaaaatcctaaaacaatctatttgtgattttttttgttttattgttcttagtaacgacatcaacttcttgacttgagatatacatatgctcattcctaagaacaaacatcactctgtctttcg

SEQ ID NO: 109434 - protein, 295 aa, Zea mays subsp. mays
  misc_feature (1)..(295): Ceres Seq. ID no. 14309315
  misc_feature (63)..(275): Homolog of NCBI NO: 16330615 NR Description: hypothetical protein [Synechocystis sp. PCC 6803]
  misc_feature (68)..(276): Homolog of NCBI NO: 37520969 NR Description: hypothetical protein glr1400 [Gloeobacter
  misc_feature (64)..(278): Homolog of NCBI NO: 23124166 NR Description: hypothetical protein [Nostoc punctiforme]
  misc_feature (68)..(283): Homolog of NCBI NO: 22298677 NR Description: ORF_ID:tlr1134~hypothetical protein
  misc_feature (68)..(283): Homolog of NCBI NO: 17228142 NR Description: hypothetical protein [Nostoc sp. PCC 7120]
  misc_feature (68)..(283): Homolog of NCBI NO: 23041708 NR Description: hypothetical protein [Trichodesmium erythraeum
  misc_feature (1)..(291): Homolog of NCBI NO: 29367385 NR Description: inositol phosphatase-like protein
  misc_feature (1)..(288): Homolog of NCBI NO: 33469614 NR Description: light-regulated chloroplast-localized protein
  misc_feature (3)..(295): Homolog of NCBI NO: 21592994 NR Description: unknown [Arabidopsis thaliana]
  misc_feature (3)..(295): Homolog of NCBI NO: 18399513 NR Description: expressed protein [Arabidopsis thaliana]
MAAIASLSFPALGQSGKISNPTPCRPLASVSAICRRLSRRSLTSSRPSTSSSKFVIHCMSNATDVPPVSETKSNFLKAYKRPIPSIYNTVLQELIVQQHLMRYKRTYRYDPVFALGFVTVYDQLMDGYPSDQDRDSIFQAYVEALNEDPKQYRIDAQKMEEWARSQTSASLVDFSSKEGEVEAILKDISERAGSKEGFSYSRFFAVGLFRLLELAGATDPTVLDKLCASLNINKKSVDRDLDVYRNLLSKLVQAKELLKEYVEREKKKRGERAESQKANESISKSLGDNSLSFFV

SEQ ID NO: 109435 - protein, 237 aa, Zea mays subsp. mays
  misc_feature (1)..(237): Ceres Seq. ID no. 14309316
  misc_feature (5)..(217): Homolog of NCBI NO: 16330615 NR Description: hypothetical protein [Synechocystis sp. PCC 6803]
  misc_feature (10)..(218): Homolog of NCBI NO: 37520969 NR Description: hypothetical protein glr1400 [Gloeobacter
  misc_feature (6)..(220): Homolog of NCBI NO: 23124166 NR Description: hypothetical protein [Nostoc punctiforme]
  misc_feature (10)..(225): Homolog of NCBI NO: 22298677 NR Description: ORF_ID:tlr1134~hypothetical protein
  misc_feature (10)..(225): Homolog of NCBI NO: 17228142 NR Description: hypothetical protein [Nostoc sp. PCC 7120]
  misc_feature (10)..(225): Homolog of NCBI NO: 23041708 NR Description: hypothetical protein [Trichodesmium erythraeum
  misc_feature (1)..(233): Homolog of NCBI NO: 29367385 NR Description: inositol phosphatase-like protein
  misc_feature (1)..(230): Homolog of NCBI NO: 33469614 NR Description: light-regulated chloroplast-localized protein
  misc_feature (1)..(237): Homolog of NCBI NO: 21592994 NR Description: unknown [Arabidopsis thaliana]
  misc_feature (1)..(237): Homolog of NCBI NO: 18399513 NR Description: expressed protein [Arabidopsis thaliana]
MSNATDVPPVSETKSNFLKAYKRPIPSIYNTVLQELIVQQHLMRYKRTYRYDPVFALGFVTVYDQLMDGYPSDQDRDSIFQAYVEALNEDPKQYRIDAQKMEEWARSQTSASLVDFSSKEGEVEAILKDISERAGSKEGFSYSRFFAVGLFRLLELAGATDPTVLDKLCASLNINKKSVDRDLDVYRNLLSKLVQAKELLKEYVEREKKKRGERAESQKANESISKSLGDNSLSFFV

SEQ ID NO: 109436 - protein, 195 aa, Zea mays subsp. mays
  misc_feature (1)..(195): Ceres Seq. ID no. 14309317
  misc_feature (1)..(175): Homolog of NCBI NO: 16330615 NR Description: hypothetical protein [Synechocystis sp. PCC 6803]
  misc_feature (1)..(176): Homolog of NCBI NO: 37520969 NR Description: hypothetical protein glr1400 [Gloeobacter
  misc_feature (1)..(178): Homolog of NCBI NO: 23124166 NR Description: hypothetical protein [Nostoc punctiforme]
  misc_feature (1)..(183): Homolog of NCBI NO: 22298677 NR Description: ORF_ID:tlr1134~hypothetical protein
  misc_feature (1)..(183): Homolog of NCBI NO: 17228142 NR Description: hypothetical protein [Nostoc sp. PCC 7120]
  misc_feature (1)..(183): Homolog of NCBI NO: 23041708 NR Description: hypothetical protein [Trichodesmium erythraeum
  misc_feature (1)..(191): Homolog of NCBI NO: 29367385 NR Description: inositol phosphatase-like protein
  misc_feature (1)..(188): Homolog of NCBI NO: 33469614 NR Description: light-regulated chloroplast-localized protein
  misc_feature (1)..(195): Homolog of NCBI NO: 21592994 NR Description: unknown [Arabidopsis thaliana]
  misc_feature (1)..(195): Homolog of NCBI NO: 18399513 NR Description: expressed protein [Arabidopsis thaliana]
MRYKRTYRYDPVFALGFVTVYDQLMDGYPSDQDRDSIFQAYVEALNEDPKQYRIDAQKMEEWARSQTSASLVDFSSKEGEVEAILKDISERAGSKEGFSYSRFFAVGLFRLLELAGATDPTVLDKLCASLNINKKSVDRDLDVYRNLLSKLVQAKELLKEYVEREKKKRGERAESQKANESISKSLGDNSLSFFV

SEQ ID NO: 109437 - DNA, 803 bp, Zea mays subsp. mays
  misc_feature (1)..(803): Ceres Seq. ID no. 14309300
gtcgtcttcttgccgagaaaaaaaaaattaaaagagcctcgaaaaattcacagacttgtctcccctctccctctctttctcactctttagtagcttctgaaaatttcacagccctaaacaaacaaaaatgagcaagttctggactttcctcaccgctcttcactcaggcgctggtcctctggtgatgttggtgtatccattgtacgcatcggtggtggcaatggagagcacaacgaaagtagacgatgagcagtggcttgcctactggatcatttactccttcctcaccctcactgagctgattctgcagtcgcttcttgagtggatcccgatctggtactcggtgaaactggtgtttgtagcttggttggttctgcctcagttccatggtgcagctttcatctacaaccgtgtggtgagagaacagttcaagaaacacggcttcttcggctcctcctttcacaccaaacactccaaacccaacatcatccactccattttccaccgggagggacacgaggctcactctcactgacgccaaagcagaggagaagctcgaatagcattgtagcggagttggtggtggcccccgtcttgtcttaagtctaatctttacttttgttttagttttatttaataatttgagaaatgtgatggatgatgactaatgaggtgtgtgatcgtttaaaagtagaaatggcttcttgttgtttttgttgttgttgtattgctttagcttccacgcgtatcttccatttgggaacacaagtgttaacgctattgtttcaatcgctttctaatgc

SEQ ID NO: 109438 - protein, 135 aa, Zea mays subsp. mays
  misc_feature (1)..(135): Ceres Seq. ID no. 14309301
  misc_feature (4)..(101): Pfam Name: TB2/DP1, HVA22 family Pfam Description: TB2/DP1, HVA22 family
  misc_feature (15)..(98): Homolog of NCBI NO: 15241840 NR Description: AtHVA22b-related protein [Arabidopsis thaliana]
  misc_feature (15)..(98): Homolog of NCBI NO: 4884934 NR Description: AtHVA22b [Arabidopsis thaliana]
  misc_feature (17)..(102): Homolog of NCBI NO: 15222421 NR Description: AtHVA22c [Arabidopsis thaliana]
  misc_feature (15)..(101): Homolog of NCBI NO: 15221266 NR Description: AtHVA22a [Arabidopsis thaliana]
  misc_feature (1)..(104): Homolog of NCBI NO: 1076715 NR Description: abscisic acid-induced protein HVA22 - barley
  misc_feature (1)..(135): Homolog of NCBI NO: 33342176 NR Description: hypothetical protein [Triticum aestivum]
  misc_feature (20)..(105): Homolog of NCBI NO: 8777395 NR Description: gene_id:MFB16.12~pir||T05517~similar to unknown
  misc_feature (1)..(105): Homolog of NCBI NO: 18423191 NR Description: expressed protein [Arabidopsis thaliana]
  misc_feature (20)..(127): Homolog of NCBI NO: 7484787 NR Description: abscisic acid-induced protein homolog F13M23.100
  misc_feature (1)..(135): Homolog of NCBI NO: 18416458 NR Description: abscisic acid-induced - like protein [Arabidopsis
MSKFWTFLTALHSGAGPLVMLVYPLYASVVAMESTTKVDDEQWLAYWIIYSFLTLTELILQSLLEWIPIWYSVKLVFVAWLVLPQFHGAAFIYNRVVREQFKKHGFFGSSFHTKHSKPNIIHSIFHREGHEAHSH

SEQ ID NO: 109439 - protein, 116 aa, Zea mays subsp. mays
  misc_feature (1)..(116): Ceres Seq. ID no. 14309302
  misc_feature (1)..(82): Pfam Name: TB2/DP1, HVA22 family Pfam Description: TB2/DP1, HVA22 family
  misc_feature (1)..(79): Homolog of NCBI NO: 15241840 NR Description: AtHVA22b-related protein [Arabidopsis thaliana]
  misc_feature (1)..(79): Homolog of NCBI NO: 4884934 NR Description: AtHVA22b [Arabidopsis thaliana]
  misc_feature (1)..(83): Homolog of NCBI NO: 15222421 NR Description: AtHVA22c [Arabidopsis thaliana]
  misc_feature (1)..(82): Homolog of NCBI NO: 15221266 NR Description: AtHVA22a [Arabidopsis thaliana]
  misc_feature (1)..(85): Homolog of NCBI NO: 1076715 NR Description: abscisic acid-induced protein HVA22 - barley
  misc_feature (1)..(116): Homolog of NCBI NO: 33342176 NR Description: hypothetical protein [Triticum aestivum]
  misc_feature (1)..(86): Homolog of NCBI NO: 8777395 NR Description: gene_id:MFB16.12~pir||T05517~similar to unknown
  misc_feature (1)..(86): Homolog of NCBI NO: 18423191 NR Description: expressed protein [Arabidopsis thaliana]
  misc_feature (1)..(108): Homolog of NCBI NO: 7484787 NR Description: abscisic acid-induced protein homolog F13M23.100
  misc_feature (1)..(116): Homolog of NCBI NO: 18416458 NR Description: abscisic acid-induced - like protein [Arabidopsis
MLVYPLYASVVAMESTTKVDDEQWLAYWIIYSFLTLTELILQSLLEWIPIWYSVKLVFVAWLVLPQFHGAAFIYNRVVREQFKKHGFFGSSFHTKHSKPNIIHSIFHREGHEAHSH

SEQ ID NO: 109440 - protein, 104 aa, Zea mays subsp. mays
  misc_feature (1)..(104): Ceres Seq. ID no. 14309303
  misc_feature (1)..(70): Pfam Name: TB2/DP1, HVA22 family Pfam Description: TB2/DP1, HVA22 family
  misc_feature (1)..(71): Homolog of NCBI NO: 15222421 NR Description: AtHVA22c [Arabidopsis thaliana]
  misc_feature (1)..(70): Homolog of NCBI NO: 15221266 NR Description: AtHVA22a [Arabidopsis thaliana]
  misc_feature (1)..(73): Homolog of NCBI NO: 1076715 NR Description: abscisic acid-induced protein HVA22 - barley
  misc_feature (1)..(104): Homolog of NCBI NO: 33342176 NR Description: hypothetical protein [Triticum aestivum]
  misc_feature (1)..(67): Homolog of NCBI NO: 15241840 NR Description: AtHVA22b-related protein [Arabidopsis thaliana]
  misc_feature (1)..(67): Homolog of NCBI NO: 4884934 NR Description: AtHVA22b [Arabidopsis thaliana]
  misc_feature (1)..(74): Homolog of NCBI NO: 8777395 NR Description: gene_id:MFB16.12~pir||T05517~similar to unknown
  misc_feature (1)..(74): Homolog of NCBI NO: 18423191 NR Description: expressed protein [Arabidopsis thaliana]
  misc_feature (1)..(96): Homolog of NCBI NO: 7484787 NR Description: abscisic acid-induced protein homolog F13M23.100
  misc_feature (1)..(104): Homolog of NCBI NO: 18416458 NR Description: abscisic acid-induced - like protein [Arabidopsis
MESTTKVDDEQWLAYWIIYSFLTLTELILQSLLEWIPIWYSVKLVFVAWLVLPQFHGAAFIYNRVVREQFKKHGFFGSSFHTKHSKPNIIHSIFHREGHEAHSH

SEQ ID NO: 109441 - DNA, 1269 bp, Zea mays subsp. mays
  misc_feature (1)..(1269): Ceres Seq. ID no. 15179023
atatcatcttctagatatagtttctcttcttcttataaacttcgtatactccattttaaggaaacgggagagtacacgtagtgtgtcagagggtgagaatcccaatgaggatcttacccgagcctctaggttcggttccatgcctcattctcctcgtgtcgtcggttctattttcagcgactctatccctcgctcgtgtcgtcgaagttgttggttacgccgagagcaaaatcaaaaatccccatgcattcacaggactccgagtgacgattgaatgtaagggggagaaagggcattttgttacaaaaggttctggaaacattgatgaggaaggaaagttcggtctgaaagttcttcctcatgacattatctctgacgacggagccttaaaggaggagtgttatgcccagcttcacagtgcggcgggagcaccttgtccggctcacgacggccttgagtcaaacaagatcgtgtttctatacacatccggagacaaacacgttttgggcctcaaacaaaacctgaggtttacacctgaactttgtgtttccaaattcttttggcctatgcctaagttccctcctgttaagggatttgaacatcatttccctttacctccaccgtttcctaaattcaagaaaccttgcccacctccccctgaggaggttccaccaccaccaaaggtagagcttccgccacctgtcccggttcacgatccacccccgaaggtggagcttccaccaccggctcctaagaagccttgtcctcctaaatcgccgaagatagagcacccacctcctgttcccgtttacaagccgccaccaaagatagagcattcacctcctaagaagccatgcccaccgccggttcacgttcacaagccgccaccgaagaaggcatgccccccaaagatcgagcttccaccaccagtcccgatctacaagccgccgccgaagatagagcatccaccaatctacgtgccaccggtggtgattccgaagaagccgtgtccaccacttccaaagtttccacatcttcctcctaaatacattcaccatcccaagttcggcaaatggcctcccttgccaacacacccttgaaactttaaacgtttactcgtatattttttttaaaaattattgcatgcatgtttaatattttggttgcttttgtctcatttaatctttgtttgctttatctccgatcgagttatatatatgtagactgtttgcgtaactattccagcaataatatggtaatgattccttt

SEQ ID NO: 109442 - protein, 331 aa, Zea mays subsp. mays
  misc_feature (1)..(331): Ceres Seq. ID no. 15179024
  misc_feature (154)..(329): Pfam Name: Extensin-like region Pfam Description: Extensin-like region
  misc_feature (154)..(330): Homolog of NCBI NO: 6782442 NR Description: proline-rich protein [Arabidopsis thaliana]
  misc_feature (154)..(330): Homolog of NCBI NO: 15234785 NR Description: proline-rich protein family [Arabidopsis
  misc_feature (154)..(331): Homolog of NCBI NO: 7620015 NR Description: proline-rich protein 4 [Arabidopsis thaliana]
  misc_feature (154)..(331): Homolog of NCBI NO: 6782442 NR Description: proline-rich protein [Arabidopsis thaliana]
  misc_feature (16)..(328): Homolog of NCBI NO: 7489265 NR Description: proline-rich protein GPP1 - potato
  misc_feature (1)..(325): Homolog of NCBI NO: 7620011 NR Description: proline-rich protein 2 [Arabidopsis thaliana]
  misc_feature (1)..(331): Homolog of NCBI NO: 15226468 NR Description: proline-rich protein family [Arabidopsis
  misc_feature (1)..(330): Homolog of NCBI NO: 7620015 NR Description: proline-rich protein 4 [Arabidopsis thaliana]
  misc_feature (1)..(330): Homolog of NCBI NO: 6782442 NR Description: proline-rich protein [Arabidopsis thaliana]
  misc_feature (1)..(330): Homolog of NCBI NO: 15234785 NR Description: proline-rich protein family [Arabidopsis
MRILPEPLGSVPCLILLVSSVLFSATLSLARVVEVVGYAESKIKNPHAFTGLRVTIECKGEKGHFVTKGSGNIDEEGKFGLKVLPHDIISDDGALKEECYAQLHSAAGAPCPAHDGLESNKIVFLYTSGDKHVLGLKQNLRFTPELCVSKFFWPMPKFPPVKGFEHHFPLPPPFPKFKKPCPPPPEEVPPPPKVELPPPVPVHDPPPKVELPPPAPKKPCPPKSPKIEHPPPVPVYKPPPKIEHSPPKKPCPPPVHVHKPPPKKACPPKIELPPPVPIYKPPPKIEHPPIYVPPVVIPKKPCPPLPKFPHLPPKYIHHPKFGKWPPLPTHP

SEQ ID NO: 109443 - protein, 177 aa, Zea mays subsp. mays
  misc_feature (1)..(177): Ceres Seq. ID no. 15179025
  misc_feature (1)..(175): Pfam Name: Extensin-like region Pfam Description: Extensin-like region
  misc_feature (1)..(176): Homolog of NCBI NO: 6782442 NR Description: proline-rich protein [Arabidopsis thaliana]
  misc_feature (1)..(176): Homolog of NCBI NO: 15234785 NR Description: proline-rich protein family [Arabidopsis
  misc_feature (1)..(177): Homolog of NCBI NO: 7620015 NR Description: proline-rich protein 4 [Arabidopsis thaliana]
  misc_feature (1)..(177): Homolog of NCBI NO: 6782442 NR Description: proline-rich protein [Arabidopsis thaliana]
  misc_feature (1)..(174): Homolog of NCBI NO: 7489265 NR Description: proline-rich protein GPP1 - potato
  misc_feature (1)..(171): Homolog of NCBI NO: 7620011 NR Description: proline-rich protein 2 [Arabidopsis thaliana]
  misc_feature (1)..(177): Homolog of NCBI NO: 15226468 NR Description: proline-rich protein family [Arabidopsis
  misc_feature (1)..(176): Homolog of NCBI NO: 7620015 NR Description: proline-rich protein 4 [Arabidopsis thaliana]
  misc_feature (1)..(176): Homolog of NCBI NO: 6782442 NR Description: proline-rich protein [Arabidopsis thaliana]
  misc_feature (1)..(176): Homolog of NCBI NO: 15234785 NR Description: proline-rich protein family [Arabidopsis
MPKFPPVKGFEHHFPLPPPFPKFKKPCPPPPEEVPPPPKVELPPPVPVHDPPPKVELPPPAPKKPCPPKSPKIEHPPPVPVYKPPPKIEHSPPKKPCPPPVHVHKPPPKKACPPKIELPPPVPIYKPPPKIEHPPIYVPPVVIPKKPCPPLPKFPHLPPKYIHHPKFGKWPPLPTHP

SEQ ID NO: 109444 - DNA, 912 bp, Zea mays subsp. mays
  misc_feature (1)..(912): Ceres Seq. ID no. 15174355
aacactacccacacgcctttcatcatcctttcgctactcccatcttcttcttcttttaatcttcttatcgccatagctctagcttgcaatagaagctgtacagttaaccttaaggttttattagtttttttggtttgttggaaagaaagaaaggaacgatgaaccactgggcggtccagccaaacgctttcggtgatcagagtgttgttgtctgcccaaaaccacgtcggattgctctccgtaacccttccctctaccaccatcccgctcgttctctccgttgttacttcagtcatcaacaagtggaggtgtgtgaatccgaggcagagactgatatcttagatatcatactcacaaaggatggttatggtacggaacaagttcaggctcaggtattagactcgccgtccccgtttttatgtgggtcgccgccgagcagagtcgctaaccctttaacccaggatgctcgtttcagagatgaactctcactggtctcttcatcgatctcgactccgctaggccaacctcagtcctcctcaggtaggaaaggaggatgtgttagaggcagttttggtagcagcccagcggttaggattgaagggttcgattgcctcgacagggacagtagaaactgcagcatccctgccttggcatgagaacccaacgtcggaaaccaccaaccacatactctgttgaattagctcacaaaaaccaattagtgcgtcgtacataatgagttaagtatatggagaatttgtggaaatctttgagggaagttgagagagagatagatccctttggagtttttctaaagagtgtgtaaataggagaaattttcttggctaagtttgtagtaatggtcattttgtaaaaagagtattaaggcagaaaatcagttgttgaggagagacc

SEQ ID NO: 109445 - protein, 165 aa, Zea mays subsp. mays
  misc_feature (1)..(165): Ceres Seq. ID no. 15174356
  misc_feature (1)..(165): Homolog of NCBI NO: 18396232 NR Description: expressed protein [Arabidopsis thaliana]
  misc_feature (1)..(165): Homolog of NCBI NO: 11762168 NR Description: AT5g16110 [Arabidopsis thaliana]
  misc_feature (1)..(165): Homolog of NCBI NO: 30685676 NR Description: expressed protein [Arabidopsis thaliana]
  misc_feature (1)..(165): Homolog of NCBI NO: 15222278 NR Description: expressed protein [Arabidopsis thaliana]
  misc_feature (1)..(165): Homolog of NCBI NO: 18409044 NR Description: expressed protein [Arabidopsis thaliana]
MNHWAVQPNAFGDQSVVVCPKPRRIALRNPSLYHHPARSLRCYFSHQQVEVCESEAETDILDIILTKDGYGTEQVQAQVLDSPSPFLCGSPPSRVANPLTQDARFRDELSLVSSSISTPLGQPQSSSGRKGGCVRGSFGSSPAVRIEGFDCLDRDSRNCSIPALA

SEQ ID NO: 109446 - DNA, 1149 bp, Zea mays subsp. mays
  misc_feature (1)..(1149): Ceres Seq. ID no. 14309296
gaatcttcttatctgggtcttcctcgttttctccgcttttaagccatgaaagtcaccgtcgtctcccgcagcggcagagaagttctcaaagcccccctcgacctccccgattcggcgactgttgctgatctgcaggaagcttttcataagagagctaagaagttttacccgtcgaggcaaagactgactctccccgtggctcctggctcaaaggacaaaccggttgtcctcaacagcaagaagtcactcaaagagtactgtgatggaaacacagactccttaaccgtagtcttcaaggacttgggagcacaagtctcataccacacgctcttcttcttcgagtacctaggcccgctcctaatctacccggtcttctactacttccctgtctacaaatacctgggctacggcgaagaccgtgtgatccacccggtccagacctacgccatgtactactggtgctttcactacttcaaacgtatcatggaaacgttcttcgtccataggttcagccacgcgacttcaccgatagggaacgtgttcaggaactgtgcttactactggacctttggtgcttacattgcgtattacgtgaaccaccctttgtacacgccggtgagtgaccttcagatgaagatcggtttcgggtttggtttggtctgccaagtcgcaaacttttactgtcacattctgttgaagaatctgagagaccctagtggctctggagggtaccagatcccacgtggcttcctcttcaacattgttacgtgtgccaattacacgactgagatttaccagtggctagggttcaacatcgctactcagaccgttgcgggatacgttttcttggctgttgcggctctgattatgactaactgggctcttggaaagcacagccgtctgagaaagatatttgatgggaaagatgggaagccaaagtatccaagaagatgggtgatcttacctccattcctgtagaagactcatcgttgtgatcctcgtttttatcagtttaaaactctattaataaggttgtcaaagagatttgcaagatgtgtggtttcctctgtattggttgttccttttgttttgatatgttttgtaagtttagagattttagaaacatgcttctttaatcgtttatcacgc

SEQ ID NO: 109447 - protein, 310 aa, Zea mays subsp. mays
  misc_feature (1)..(310): Ceres Seq. ID no. 14309297
  misc_feature (158)..(310): Pfam Name: 3-oxo-5-alpha-steroid 4-dehydrogenase Pfam Description: 3-oxo-5-alpha-steroid 4-dehydrogenase
  misc_feature (24)..(310): Homolog of NCBI NO: 19923070 NR Description: synaptic glycoprotein SC2
  misc_feature (24)..(310): Homolog of NCBI NO: 19924091 NR Description: synaptic glycoprotein SC2 [Rattus norvegicus]
  misc_feature (2)..(310): Homolog of NCBI NO: 24475816 NR Description: glycoprotein, synaptic 2
  misc_feature (2)..(310): Homolog of NCBI NO: 30585427 NR Description: Homo sapiens glycoprotein, synaptic 2 [synthetic
  misc_feature (2)..(310): Homolog of NCBI NO: 13111809 NR Description: Unknown (protein for IMAGE:2901253) [Homo sapiens]
  misc_feature (23)..(307): Homolog of NCBI NO: 31418870 NR Description: Unknown (protein for MGC:64025) [Danio rerio]
  misc_feature (2)..(310): Homolog of NCBI NO: 33585860 NR Description: Glycoprotein, synaptic 2 [Xenopus laevis]
  misc_feature (1)..(310): Homolog of NCBI NO: 25004880 NR Description: steroid 5-alpha reductase [Cicer arietinum]
  misc_feature (1)..(310): Homolog of NCBI NO: 34895848 NR Description: putative glycoprotein [Oryza sativa (japonica
  misc_feature (1)..(310): Homolog of NCBI NO: 15233250 NR Description: 3-oxo-5-alpha-steroid 4-dehydrogenase (steroid
MKVTVVSRSGREVLKAPLDLPDSATVADLQEAFHKRAKKFYPSRQRLTLPVAPGSKDKPVVLNSKKSLKEYCDGNTDSLTVVFKDLGAQVSYHTLFFFEYLGPLLIYPVFYYFPVYKYLGYGEDRVIHPVQTYAMYYWCFHYFKRIMETFFVHRFSHATSPIGNVFRNCAYYWTFGAYIAYYVNHPLYTPVSDLQMKIGFGFGLVCQVANFYCHILLKNLRDPSGSGGYQIPRGFLFNIVTCANYTTEIYQWLGFNIATQTVAGYVFLAVAALIMTNWALGKHSRLRKIFDGKDGKPKYPRRWVILPPFL

SEQ ID NO: 109448 - protein, 176 aa, Zea mays subsp. mays
  misc_feature (1)..(176): Ceres Seq. ID no. 14309298
  misc_feature (24)..(176): Pfam Name: 3-oxo-5-alpha-steroid 4-dehydrogenase Pfam Description: 3-oxo-5-alpha-steroid 4-dehydrogenase
  misc_feature (1)..(176): Homolog of NCBI NO: 19923070 NR Description: synaptic glycoprotein SC2
  misc_feature (1)..(176): Homolog of NCBI NO: 19924091 NR Description: synaptic glycoprotein SC2 [Rattus norvegicus]
  misc_feature (1)..(176): Homolog of NCBI NO: 24475816 NR Description: glycoprotein, synaptic 2
  misc_feature (1)..(176): Homolog of NCBI NO: 30585427 NR Description: Homo sapiens glycoprotein, synaptic 2 [synthetic
  misc_feature (1)..(176): Homolog of NCBI NO: 13111809 NR Description: Unknown (protein for IMAGE:2901253) [Homo sapiens]
  misc_feature (1)..(173): Homolog of NCBI NO: 31418870 NR Description: Unknown (protein for MGC:64025) [Danio rerio]
  misc_feature (1)..(176): Homolog of NCBI NO: 33585860 NR Description: Glycoprotein, synaptic 2 [Xenopus laevis]
  misc_feature (1)..(176): Homolog of NCBI NO: 25004880 NR Description: steroid 5-alpha reductase [Cicer arietinum]
  misc_feature (1)..(176): Homolog of NCBI NO: 34895848 NR Description: putative glycoprotein [Oryza sativa (japonica
  misc_feature (1)..(176): Homolog of NCBI NO: 15233250 NR Description: 3-oxo-5-alpha-steroid 4-dehydrogenase (steroid
MYYWCFHYFKRIMETFFVHRFSHATSPIGNVFRNCAYYWTFGAYIAYYVNHPLYTPVSDLQMKIGFGFGLVCQVANFYCHILLKNLRDPSGSGGYQIPRGFLFNIVTCANYTTEIYQWLGFNIATQTVAGYVFLAVAALIMTNWALGKHSRLRKIFDGKDGKPKYPRRWVILPPFL

SEQ ID NO: 109449 - protein, 164 aa, Zea mays subsp. mays
  misc_feature (1)..(164): Ceres Seq. ID no. 14309299
  misc_feature (12)..(164): Pfam Name: 3-oxo-5-alpha-steroid 4-dehydrogenase Pfam Description: 3-oxo-5-alpha-steroid 4-dehydrogenase
  misc_feature (1)..(164): Homolog of NCBI NO: 19923070 NR Description: synaptic glycoprotein SC2
  misc_feature (1)..(164): Homolog of NCBI NO: 19924091 NR Description: synaptic glycoprotein SC2 [Rattus norvegicus]
  misc_feature (1)..(164): Homolog of NCBI NO: 24475816 NR Description: glycoprotein, synaptic 2
  misc_feature (1)..(164): Homolog of NCBI NO: 30585427 NR Description: Homo sapiens glycoprotein, synaptic 2 [synthetic
  misc_feature (1)..(164): Homolog of NCBI NO: 13111809 NR Description: Unknown (protein for IMAGE:2901253) [Homo sapiens]
  misc_feature (1)..(161): Homolog of NCBI NO: 31418870 NR Description: Unknown (protein for MGC:64025) [Danio rerio]
  misc_feature (1)..(164): Homolog of NCBI NO: 33585860 NR Description: Glycoprotein, synaptic 2 [Xenopus laevis]
  misc_feature (1)..(164): Homolog of NCBI NO: 25004880 NR Description: steroid 5-alpha reductase [Cicer arietinum]
  misc_feature (1)..(164): Homolog of NCBI NO: 34895848 NR Description: putative glycoprotein [Oryza sativa (japonica
  misc_feature (1)..(164): Homolog of NCBI NO: 15233250 NR Description: 3-oxo-5-alpha-steroid 4-dehydrogenase (steroid
METFFVHRFSHATSPIGNVFRNCAYYWTFGAYIAYYVNHPLYTPVSDLQMKIGFGFGLVCQVANFYCHILLKNLRDPSGSGGYQIPRGFLFNIVTCANYTTEIYQWLGFNIATQTVAGYVFLAVAALIMTNWALGKHSRLRKIFDGKDGKPKYPRRWVILPPFL

SEQ ID NO: 109450 - DNA, 916 bp, Zea mays subsp. mays
  misc_feature (1)..(916): Ceres Seq. ID no. 14309294
acactctttctctagaaaatggagaccattctctctcctcgttgtctatctcctcctctcattccaaaactatcatcttctcatcaatccaaacatgctacttcttcttctttggctctctcgaatcccaccgtcttgggcccgaaacacctttccactcggtttagtgctaaaccagaatcttggttaacagatgcaaagcaaggactagctgctttatctctttctctggctcttactttctcacctgttggcactgccttagcctctgagttcaatattctcaacgatggtccacccaaagaaacttacgttgtggacgacgctggtgttcttagtcgagttacgagatcagatctgaagaaactcttgtctgatcttgaatacagaaagaaactccgactcaatttcatcactgtccggaagctcactagtaaagcagatgcgtttgagtatgcagaccaggttctggagaaatggtatccttcgattgaagaaggcaacaataagggtattgttgttttgattactagccagaaggaaggggcaattactggtggtcctgccttcattgaagctgtaggtgaaaagattcttgatgctaccgtctcggaaaatcttcctgtactagccacagacgaaaaatacaatgaagcaatatacagcagtgcaaaacggttggttgcagcaatagacggtctcccagaccccggtggtccagaagtgaaggataacaagagagaatcaaatttcaaaacgaaagaagaaaccgaagagaagagaggacagttcagtcttgtcgttggaggtttgcttgtaattgcctttgttgttcccatggctcagtactatgcttatgtatccaagaagtagtgtattggctcactttcgtatataccaaacttggccaggtcat

SEQ ID NO: 109451 - protein, 284 aa, Zea mays subsp. mays
  misc_feature (1)..(284): Ceres Seq. ID no. 14309295
  misc_feature (73)..(281): Homolog of NCBI NO: 13812326 NR Description: hypothetical protein [Guillardia theta]
  misc_feature (61)..(281): Homolog of NCBI NO: 16330824 NR Description: hypothetical protein [Synechocystis sp. PCC 6803]
  misc_feature (56)..(280): Homolog of NCBI NO: 22297947 NR Description: ORF_ID:tll0404~hypothetical protein
  misc_feature (64)..(280): Homolog of NCBI NO: 23128295 NR Description: hypothetical protein [Nostoc punctiforme]
  misc_feature (66)..(282): Homolog of NCBI NO: 17231592 NR Description: hypothetical protein [Nostoc sp. PCC 7120]
  misc_feature (64)..(282): Homolog of NCBI NO: 23041448 NR Description: hypothetical protein [Trichodesmium erythraeum
  misc_feature (1)..(284): Homolog of NCBI NO: 18405061 NR Description: thylakoid lumen 18.3 kDa protein [Arabidopsis
METILSPRCLSPPLIPKLSSSHQSKHATSSSLALSNPTVLGPKHLSTRFSAKPESWLTDAKQGLAALSLSLALTFSPVGTALASEFNILNDGPPKETYVVDDAGVLSRVTRSDLKKLLSDLEYRKKLRLNFITVRKLTSKADAFEYADQVLEKWYPSIEEGNNKGIVVLITSQKEGAITGGPAFIEAVGEKILDATVSENLPVLATDEKYNEAIYSSAKRLVAAIDGLPDPGGPEVKDNKRESNFKTKEETEEKRGQFSLVVGGLLVIAFVVPMAQYYAYVSKK

SEQ ID NO: 109452 - DNA, 980 bp, Zea mays subsp. mays
  misc_feature (1)..(980): Ceres Seq. ID no. 15174357
aagaaaagcatcagtctcgtctcttctacggcgtttcagagaatctaagagagatcatcgatgggtcttctctccaacagaatcgatagatcaagtttgaaacctggagatcacatctactcgtggaggactgcttacatctatgcccatcacggtatatatgttggagatgatagagtcatccatttcacaagacgaggccaagaagttggaaccgggaccgttctcgatctcatactcgtaagctcaggcccatcacgagcccacacgcactgtccaacctgcgttccgcccaacgaaggccacggcgtcgtttcctcgtgcctgaactgtttcctagccggtggcgtcctgtaccgcttcgagtactccgtcaacgccgctcacttcctcgccaaagcccgaggaggaacctgcacgctcgccgtctccgaccctaacgagataactgtccaccgtgccaaccacctccttcggaacgggttcgggtgctacgacgttttcaagaacaactgcgaggactttgcgatctattgcaagaccgggttgcttgttctcgaaggaagaatgacgatggggcagagcggtcaggctgtttcgattatcggtgggcccatcgctgcggttttgtccacaccgatgaggcttgtgacgacgaatatatatgggatggcggcgacggcggttagcgtgtactgtgcgagtaggtacgctactgatatcggtatgagagctgacgtggcgaaagttgaagtggaggatctcacgagaaggctctctgtagggctgttccaagtggttgagcctccagtggcagccgttgctttaccaaccacaagctgatagataaagcttaagagcttcatctacttcttgaatgtttcagtgattgtatcatgtgttgtttccagtttacgtttcgtatccaaaacattcgaataaccacactctgcttgtatacttatacgtttctctacact

SEQ ID NO: 109453 - protein, 260 aa, Zea mays subsp. mays
  misc_feature (1)..(260): Ceres Seq. ID no. 15174358
  misc_feature (101)..(173): Pfam Name: NC domain Pfam Description: NC domain
  misc_feature (1)..(190): Homolog of NCBI NO: 15237330 NR Description: expressed protein [Arabidopsis thaliana]
  misc_feature (1)..(238): Homolog of NCBI NO: 15237327 NR Description: hypothetical protein [Arabidopsis thaliana]
  misc_feature (1)..(243): Homolog of NCBI NO: 22328196 NR Description: expressed protein [Arabidopsis thaliana]
  misc_feature (1)..(241): Homolog of NCBI NO: 21592684 NR Description: unknown [Arabidopsis thaliana]
  misc_feature (1)..(241): Homolog of NCBI NO: 18378812 NR Description: expressed protein [Arabidopsis thaliana]
  misc_feature (1)..(235): Homolog of NCBI NO: 21594170 NR Description: unknown [Arabidopsis thaliana]
  misc_feature (1)..(235): Homolog of NCBI NO: 18396282 NR Description: expressed protein [Arabidopsis thaliana]
  misc_feature (32)..(260): Homolog of NCBI NO: 9758417 NR Description: gb|AAF32477.1~gene_id:MHF15.11~similar to unknown
  misc_feature (1)..(260): Homolog of NCBI NO: 18415178 NR Description: expressed protein [Arabidopsis thaliana]
MGLLSNRIDRSSLKPGDHIYSWRTAYIYAHHGIYVGDDRVIHFTRRGQEVGTGTVLDLILVSSGPSRAHTHCPTCVPPNEGHGVVSSCLNCFLAGGVLYRFEYSVNAAHFLAKARGGTCTLAVSDPNEITVHRANHLLRNGFGCYDVFKNNCEDFAIYCKTGLLVLEGRMTMGQSGQAVSIIGGPIAAVLSTPMRLVTTNIYGMAATAVSVYCASRYATDIGMRADVAKVEVEDLTRRLSVGLFQVVEPPVAAVALPTTS

SEQ ID NO: 109454 - DNA, 1096 bp, Zea mays subsp. mays
  misc_feature (1)..(1096): Ceres Seq. ID no. 14309287
gagatctttctcgatttgcctttactcgtttctcctgcgatatccgagctaagctgcagtgaaatatgatgcctcagcatcagatcaaggagcaacataatgctctcgtcatgaataagaagatcatgtccatccttgccgagagggacgctgccgtcaaggaaagaaacgaggccttggctgctaagcaggaagctttagccgctcgggatgaagcccttcagcaacgggacttagctatctctgagagagataatgctatcatggagagggaaaatgccttaactgctcttcaacaccgtgaaaaccatctcaactacattttggattgcgcaaagcgtggtggctaccaaacctgtttcactgaagaaacccacttgcccaacccttccccattgtcaaccattccacatgaaccacccaacaccaaaaggaagaaagatcgcaagagaaagaaagctggcggcgaagatctgaaccgtcagcttgcttctcctgggaagaaatgcagaaaggattgggactgtaacgatgtggggttaaaccttgtcacgttcgatgagacgacaatgccagtgcccatgtgcacttgcaccgggactgctcgtcagtgttacaaatggggaaatggcgggtggcaatcgtcttgctgcacaaccactttgtctcagtatccgctcccgcagatgccaaacaagcggcattctcgaataggcggtagaaaaatgagtggaaacgtcttctccaggttacttagccgtttagctggagaagggcacgacctctcctctccggttgatctcaaggactattgggctaggcatggcacgaatcgctacatcattatcaagtagccgagatttatgaaccactatgttaaatcaggtgtgtttctctcttcatcccttttttcttcttcgtttttttaacaattaggttcaaaaatgggatgaaagaatgaagcttaggctcattgttgtttttgttgtctatatagttcagctaataccaaatgtttagtagtattgttttgacttggtttcgtgtttatgtaattgtaaacagtccagtgaatgatgtcatattttattttaac

SEQ ID NO: 109455 - protein, 262 aa, Zea mays subsp. mays
  misc_feature (1)..(262): Ceres Seq. ID no. 14309288
  misc_feature (107)..(262): Homolog of NCBI NO: 30686452 NR Description: expressed protein [Arabidopsis thaliana]
  misc_feature (26)..(77): Homolog of NCBI NO: 6006362 NR Description: Similar to Arabidopsis thaliana chromosome II BAC
  misc_feature (200)..(262): Homolog of NCBI NO: 6006362 NR Description: Similar to Arabidopsis thaliana chromosome II BAC
  misc_feature (9)..(262): Homolog of NCBI NO: 9759488 NR Description: gb|AAF18661.1~gene_id:MDH9.22~similar to unknown
  misc_feature (4)..(83): Homolog of NCBI NO: 18422219 NR Description: expressed protein [Arabidopsis thaliana]
  misc_feature (149)..(262): Homolog of NCBI NO: 18422219 NR Description: expressed protein [Arabidopsis thaliana]
  misc_feature (1)..(234): Homolog of NCBI NO: 15234867 NR Description: hypothetical protein [Arabidopsis thaliana]
  misc_feature (1)..(262): Homolog of NCBI NO: 18399638 NR Description: expressed protein [Arabidopsis thaliana]
  misc_feature (107)..(262): Homolog of NCBI NO: 30686455 NR Description: expressed protein [Arabidopsis thaliana]
MMPQHQIKEQHNALVMNKKIMSILAERDAAVKERNEALAAKQEALAARDEALQQRDLAISERDNAIMERENALTALQHRENHLNYILDCAKRGGYQTCFTEETHLPNPSPLSTIPHEPPNTKRKKDRKRKKAGGEDLNRQLASPGKKCRKDWDCNDVGLNLVTFDETTMPVPMCTCTGTARQCYKWGNGGWQSSCCTTTLSQYPLPQMPNKRHSRIGGRKMSGNVFSRLLSRLAGEGHDLSSPVDLKDYWARHGTNRYIIIK

SEQ ID NO: 109456 - protein, 261 aa, Zea mays subsp. mays
  misc_feature (1)..(261): Ceres Seq. ID no. 14309289
  misc_feature (106)..(261): Homolog of NCBI NO: 30686455 NR Description: expressed protein [Arabidopsis thaliana]
  misc_feature (106)..(261): Homolog of NCBI NO: 30686452 NR Description: expressed protein [Arabidopsis thaliana]
  misc_feature (25)..(76): Homolog of NCBI NO: 6006362 NR Description: Similar to Arabidopsis thaliana chromosome II BAC
  misc_feature (199)..(261): Homolog of NCBI NO: 6006362 NR Description: Similar to Arabidopsis thaliana chromosome II BAC
  misc_feature (8)..(261): Homolog of NCBI NO: 9759488 NR Description: gb|AAF18661.1~gene_id:MDH9.22~similar to unknown
  misc_feature (3)..(82): Homolog of NCBI NO: 18422219 NR Description: expressed protein [Arabidopsis thaliana]
  misc_feature (148)..(261): Homolog of NCBI NO: 18422219 NR Description: expressed protein [Arabidopsis thaliana]
  misc_feature (1)..(233): Homolog of NCBI NO: 15234867 NR Description: hypothetical protein [Arabidopsis thaliana]
  misc_feature (1)..(261): Homolog of NCBI NO: 18399638 NR Description: expressed protein [Arabidopsis thaliana]
MPQHQIKEQHNALVMNKKIMSILAERDAAVKERNEALAAKQEALAARDEALQQRDLAISERDNAIMERENALTALQHRENHLNYILDCAKRGGYQTCFTEETHLPNPSPLSTIPHEPPNTKRKKDRKRKKAGGEDLNRQLASPGKKCRKDWDCNDVGLNLVTFDETTMPVPMCTCTGTARQCYKWGNGGWQSSCCTTTLSQYPLPQMPNKRHSRIGGRKMSGNVFSRLLSRLAGEGHDLSSPVDLKDYWARHGTNRYIIIK

SEQ ID NO: 109457 - protein, 247 aa, Zea mays subsp. mays
  misc_feature (1)..(247): Ceres Seq. ID no. 14309290
  misc_feature (92)..(247): Homolog of NCBI NO: 30686455 NR Description: expressed protein [Arabidopsis thaliana]
  misc_feature (92)..(247): Homolog of NCBI NO: 30686452 NR Description: expressed protein [Arabidopsis thaliana]
  misc_feature (11)..(62): Homolog of NCBI NO: 6006362 NR Description: Similar to Arabidopsis thaliana chromosome II BAC
  misc_feature (185)..(247): Homolog of NCBI NO: 6006362 NR Description: Similar to Arabidopsis thaliana chromosome II BAC
  misc_feature (1)..(247): Homolog of NCBI NO: 9759488 NR Description: gb|AAF18661.1~gene_id:MDH9.22~similar to unknown
  misc_feature (1)..(68): Homolog of NCBI NO: 18422219 NR Description: expressed protein [Arabidopsis thaliana]
  misc_feature (134)..(247): Homolog of NCBI NO: 18422219 NR Description: expressed protein [Arabidopsis thaliana]
  misc_feature (1)..(219): Homolog of NCBI NO: 15234867 NR Description: hypothetical protein [Arabidopsis thaliana]
  misc_feature (1)..(247): Homolog of NCBI NO: 18399638 NR Description: expressed protein [Arabidopsis thaliana]
MNKKIMSILAERDAAVKERNEALAAKQEALAARDEALQQRDLAISERDNAIMERENALTALQHRENHLNYILDCAKRGGYQTCFTEETHLPNPSPLSTIPHEPPNTKRKKDRKRKKAGGEDLNRQLASPGKKCRKDWDCNDVGLNLVTFDETTMPVPMCTCTGTARQCYKWGNGGWQSSCCTTTLSQYPLPQMPNKRHSRIGGRKMSGNVFSRLLSRLAGEGHDLSSPVDLKDYWARHGTNRYIIIK

SEQ ID NO: 109458 - DNA, 1135 bp, Zea mays subsp. mays
  misc_feature (1)..(1135): Ceres Seq. ID no. 14309283
atatctgtatcagttcgcatcagttttgtctgagaaccacttttgtgtcaatctttagcgatgtcgattcctcaggccaagatggagcttcgtcctctgggaaacacaggtctcaaagttagctccatcggctttggcgcctctcccctcggaagcgtcttcggtccagtcgccgaagtcgatgcagtcgccaccgtacgcgaggcgttccgacaaggcattaacttcttcgacacttccccgtattatggaggaacactgtcggagaagatgcttggcaagggactaaaagcactacaagtccctagaagcgactacattgttgcaaccaagtgtggacgttacgaggaaggctttgacttcagcactgagagagtaacaaagagcatcgacgagagcttggagaggcttcagctagactacgttgacatacttcattgccacgacattgagttcgggtctcttgaccagattgtgagtgaaacaatccctgctctccagaaactgaaacaggaagggaagacacggttcatcggtatcactggtcttccgttgagtattttcacttacgttcttgatcgagtgcctccagggacggtcgatgtgatactatcgtactgccattacggtgtgaatgattcgacgttggtggatttgataccttacttgaaagggaaaggtgtgggtgtgattagtgcttctccattagcaatgggtctccttacggaacaaggtggtcctgaatggcatcctgcttcccctgagctcaagtctgcttgcaaagccgctgctgctcattgtaaatcaaaaggtaagaagatcacaaagttggcgttgcagtacagcttggcaaacaaggagatttcatcagtgttggttggaatgagctctgtctcacaggtagaagaaaatgttgcagcagttaaagagcttgaagatttgggtatggatcaagaaactctctctgaggttgaagctattcttgagcctgtcaagaatcagacatggccaagtggagtcgatcagaagtagaagctcttttgttgtgtttgttcacatttacttcttggagtgctttgatgtgtcgataacagttttaagttgagttgatacgattaataaagttttcttagat

SEQ ID NO: 109459 - protein, 323 aa, Zea mays subsp. mays
  misc_feature (1)..(323): Ceres Seq. ID no. 14309284
  misc_feature (7)..(321): Homolog of NCBI NO: 17553316 NR Description: MEChanosensory abnormality MEC-14, l-galactose
  misc_feature (7)..(318): Homolog of NCBI NO: 24646159 NR Description: CG3397-PA [Drosophila melanogaster]
  misc_feature (7)..(321): Homolog of NCBI NO: 39594041 NR Description: Hypothetical protein CBG16615 [Caenorhabditis
  misc_feature (7)..(301): Homolog of NCBI NO: 24646155 NR Description: CG18547-PA [Drosophila melanogaster]
  misc_feature (6)..(322): Homolog of NCBI NO: 32470782 NR Description: putative oxidoreductase-possibly Aldo/keto
  misc_feature (7)..(321): Homolog of NCBI NO: 31201147 NR Description: ENSANGP00000008370 [Anopheles gambiae]
  misc_feature (8)..(316): Homolog of NCBI NO: 29349022 NR Description: putative oxidoreductase [Bacteroides
  misc_feature (2)..(322): Homolog of NCBI NO: 30267886 NR Description: L-galactose dehydrogenase [Malus x domestica]
  misc_feature (8)..(322): Homolog of NCBI NO: 27728731 NR Description: galactose dehydrogenase [Actinidia deliciosa]
  misc_feature (7)..(322): Homolog of NCBI NO: 15235040 NR Description: aldo/keto reductase family [Arabidopsis thaliana]
MSIPQAKMELRPLGNTGLKVSSIGFGASPLGSVFGPVAEVDAVATVREAFRQGINFFDTSPYYGGTLSEKMLGKGLKALQVPRSDYIVATKCGRYEEGFDFSTERVTKSIDESLERLQLDYVDILHCHDIEFGSLDQIVSETIPALQKLKQEGKTRFIGITGLPLSIFTYVLDRVPPGTVDVILSYCHYGVNDSTLVDLIPYLKGKGVGVISASPLAMGLLTEQGGPEWHPASPELKSACKAAAAHCKSKGKKITKLALQYSLANKEISSVLVGMSSVSQVEENVAAVKELEDLGMDQETLSEVEAILEPVKNQTWPSGVDQK

SEQ ID NO: 109460 - protein, 316 aa, Zea mays subsp. mays
  misc_feature (1)..(316): Ceres Seq. ID no. 14309285
  misc_feature (1)..(314): Homolog of NCBI NO: 17553316 NR Description: MEChanosensory abnormality MEC-14, l-galactose
  misc_feature (1)..(311): Homolog of NCBI NO: 24646159 NR Description: CG3397-PA [Drosophila melanogaster]
  misc_feature (1)..(314): Homolog of NCBI NO: 39594041 NR Description: Hypothetical protein CBG16615 [Caenorhabditis
  misc_feature (1)..(294): Homolog of NCBI NO: 24646155 NR Description: CG18547-PA [Drosophila melanogaster]
  misc_feature (1)..(315): Homolog of NCBI NO: 32470782 NR Description: putative oxidoreductase-possibly Aldo/keto
  misc_feature (1)..(314): Homolog of NCBI NO: 31201147 NR Description: ENSANGP00000008370 [Anopheles gambiae]
  misc_feature (1)..(309): Homolog of NCBI NO: 29349022 NR Description: putative oxidoreductase [Bacteroides
  misc_feature (1)..(315): Homolog of NCBI NO: 30267886 NR Description: L-galactose dehydrogenase [Malus x domestica]
  misc_feature (1)..(315): Homolog of NCBI NO: 27728731 NR Description: galactose dehydrogenase [Actinidia deliciosa]
  misc_feature (1)..(315): Homolog of NCBI NO: 15235040 NR Description: aldo/keto reductase family [Arabidopsis thaliana]
MELRPLGNTGLKVSSIGFGASPLGSVFGPVAEVDAVATVREAFRQGINFFDTSPYYGGTLSEKMLGKGLKALQVPRSDYIVATKCGRYEEGFDFSTERVTKSIDESLERLQLDYVDILHCHDIEFGSLDQIVSETIPALQKLKQEGKTRFIGITGLPLSIFTYVLDRVPPGTVDVILSYCHYGVNDSTLVDLIPYLKGKGVGVISASPLAMGLLTEQGGPEWHPASPELKSACKAAAAHCKSKGKKITKLALQYSLANKEISSVLVGMSSVSQVEENVAAVKELEDLGMDQETLSEVEAILEPVKNQTWPSGVDQK

SEQ ID NO: 109461 - protein, 253 aa, Zea mays subsp. mays
  misc_feature (1)..(253): Ceres Seq. ID no. 14309286
  misc_feature (1)..(251): Homolog of NCBI NO: 17553316 NR Description: MEChanosensory abnormality MEC-14, l-galactose
  misc_feature (1)..(248): Homolog of NCBI NO: 24646159 NR Description: CG3397-PA [Drosophila melanogaster]
  misc_feature (1)..(251): Homolog of NCBI NO: 39594041 NR Description: Hypothetical protein CBG16615 [Caenorhabditis
  misc_feature (1)..(231): Homolog of NCBI NO: 24646155 NR Description: CG18547-PA [Drosophila melanogaster]
  misc_feature (1)..(252): Homolog of NCBI NO: 32470782 NR Description: putative oxidoreductase-possibly Aldo/keto
  misc_feature (1)..(251): Homolog of NCBI NO: 31201147 NR Description: ENSANGP00000008370 [Anopheles gambiae]
  misc_feature (1)..(246): Homolog of NCBI NO: 29349022 NR Description: putative oxidoreductase [Bacteroides
  misc_feature (1)..(252): Homolog of NCBI NO: 30267886 NR Description: L-galactose dehydrogenase [Malus x domestica]
  misc_feature (1)..(252): Homolog of NCBI NO: 27728731 NR Description: galactose dehydrogenase [Actinidia deliciosa]
  misc_feature (1)..(252): Homolog of NCBI NO: 15235040 NR Description: aldo/keto reductase family [Arabidopsis thaliana]
MLGKGLKALQVPRSDYIVATKCGRYEEGFDFSTERVTKSIDESLERLQLDYVDILHCHDIEFGSLDQIVSETIPALQKLKQEGKTRFIGITGLPLSIFTYVLDRVPPGTVDVILSYCHYGVNDSTLVDLIPYLKGKGVGVISASPLAMGLLTEQGGPEWHPASPELKSACKAAAAHCKSKGKKITKLALQYSLANKEISSVLVGMSSVSQVEENVAAVKELEDLGMDQETLSEVEAILEPVKNQTWPSGVDQK

SEQ ID NO: 109462 - DNA, 830 bp, Zea mays subsp. mays
  misc_feature (1)..(830): Ceres Seq. ID no. 15174365
gtactcctcctccacacttccctccaacgagttccaaaacccgagaagccatgtcgctcacgatcccgacgaacctcgttctcaacccgagatccaacaaatctctcactcaatccttgcctaaatccaccgcgagattcgtctgctccgacgacaaatccgcgacgcagcaacagtccatgaaggctttctccaccgcagtggctctctcctccatcctcctctcagctccgatgccagccgttgctgatatctcggggttgacaccttgcaaggagtcgaaacagttcgccaagagggagaagcaacagatcaagaagcttcagtcatctcttaagctctacgctccggaaagtgctcctgctcttgctcttaacgctcagatcgagaagactaaacgcaggttcgacaactatggcaagtatggacttctctgtggcgcagacggtctaccccacctgatagtgaacggagatcagcggcattggggagagttcataactccaggccttctcttcctctacattgctggatggatcgggtgggttggaagaagctacttgatagcaatcagcgatgagaagaaaccagcaatgaaagagatcatcattgatgttccattggctagtcgcctcatcttccgtggtttcatttggcctgttgctgcttacagagcgttactcaatggcgatctcattgccaaggatgtctagaaaaacaaaaacaaatctatatttgttgttttggtttgcttctctctctttctctctatctcatgttttccagtgtatgtattgatatctctaattaactcttccatttctaagaat

SEQ ID NO: 109463 - protein, 236 aa, Zea mays subsp. mays
  misc_feature (1)..(236): Ceres Seq. ID no. 15174366
  misc_feature (62)..(236): Pfam Name: Photosystem I reaction centre subunit III Pfam Description: Photosystem I reaction centre subunit III
  misc_feature (59)..(235): Homolog of NCBI NO: 3885892 NR Description: photosystem-1 F subunit precursor [Oryza sativa]
  misc_feature (16)..(235): Homolog of NCBI NO: 548604 NR Description: Photosystem I reaction centre subunit III,
  misc_feature (17)..(232): Homolog of NCBI NO: 131187 NR Description: Photosystem I reaction centre subunit III,
  misc_feature (17)..(232): Homolog of NCBI NO: 1172664 NR Description: Photosystem I reaction centre subunit III,
  misc_feature (17)..(232): Homolog of NCBI NO: 30013659 NR Description: putative photosystem I subunit III precursor
  misc_feature (17)..(236): Homolog of NCBI NO: 8954295 NR Description: photosystem I reaction center subunit III [Vigna
  misc_feature (17)..(236): Homolog of NCBI NO: 15450361 NR Description: At1g31330/T19E23_1 [Arabidopsis thaliana]
  misc_feature (17)..(236): Homolog of NCBI NO: 15221681 NR Description: photosystem I subunit III precursor -related
  misc_feature (17)..(236): Homolog of NCBI NO: 5734518 NR Description: photosystem I subunit III precursor [Arabidopsis
TPPPHFPPTSSKTREAMSLTIPTNLVLNPRSNKSLTQSLPKSTARFVCSDDKSATQQQSMKAFSTAVALSSILLSAPMPAVADISGLTPCKESKQFAKREKQQIKKLQSSLKLYAPESAPALALNAQIEKTKRRFDNYGKYGLLCGADGLPHLIVNGDQRHWGEFITPGLLFLYIAGWIGWVGRSYLIAISDEKKPAMKEIIIDVPLASRLIFRGFIWPVAAYRALLNGDLIAKDV

SEQ ID NO: 109464 - protein, 220 aa, Zea mays subsp. mays
  misc_feature (1)..(220): Ceres Seq. ID no. 15174367
  misc_feature (46)..(220): Pfam Name: Photosystem I reaction centre subunit III Pfam Description: Photosystem I reaction centre subunit III
  misc_feature (43)..(219): Homolog of NCBI NO: 3885892 NR Description: photosystem-1 F subunit precursor [Oryza sativa]
  misc_feature (1)..(219): Homolog of NCBI NO: 548604 NR Description: Photosystem I reaction centre subunit III,
  misc_feature (1)..(216): Homolog of NCBI NO: 131187 NR Description: Photosystem I reaction centre subunit III,
  misc_feature (1)..(216): Homolog of NCBI NO: 1172664 NR Description: Photosystem I reaction centre subunit III,
  misc_feature (1)..(216): Homolog of NCBI NO: 30013659 NR Description: putative photosystem I subunit III precursor
  misc_feature (1)..(220): Homolog of NCBI NO: 8954295 NR Description: photosystem I reaction center subunit III [Vigna
  misc_feature (1)..(220): Homolog of NCBI NO: 15450361 NR Description: At1g31330/T19E23_1 [Arabidopsis thaliana]
  misc_feature (1)..(220): Homolog of NCBI NO: 15221681 NR Description: photosystem I subunit III precursor -related
  misc_feature (1)..(220): Homolog of NCBI NO: 5734518 NR Description: photosystem I subunit III precursor [Arabidopsis
MSLTIPTNLVLNPRSNKSLTQSLPKSTARFVCSDDKSATQQQSMKAFSTAVALSSILLSAPMPAVADISGLTPCKESKQFAKREKQQIKKLQSSLKLYAPESAPALALNAQIEKTKRRFDNYGKYGLLCGADGLPHLIVNGDQRHWGEFITPGLLFLYIAGWIGWVGRSYLIAISDEKKPAMKEIIIDVPLASRLIFRGFIWPVAAYRALLNGDLIAKDV

SEQ ID NO: 109465 - protein, 177 aa, Zea mays subsp. mays
  misc_feature (1)..(177): Ceres Seq. ID no. 15174368
  misc_feature (3)..(177): Pfam Name: Photosystem I reaction centre subunit III Pfam Description: Photosystem I reaction centre subunit III
  misc_feature (1)..(176): Homolog of NCBI NO: 3885892 NR Description: photosystem-1 F subunit precursor [Oryza sativa]
  misc_feature (1)..(176): Homolog of NCBI NO: 548604 NR Description: Photosystem I reaction centre subunit III,
  misc_feature (1)..(173): Homolog of NCBI NO: 131187 NR Description: Photosystem I reaction centre subunit III,
  misc_feature (1)..(173): Homolog of NCBI NO: 1172664 NR Description: Photosystem I reaction centre subunit III,
  misc_feature (1)..(173): Homolog of NCBI NO: 30013659 NR Description: putative photosystem I subunit III precursor
  misc_feature (1)..(177): Homolog of NCBI NO: 8954295 NR Description: photosystem I reaction center subunit III [Vigna
  misc_feature (1)..(177): Homolog of NCBI NO: 15450361 NR Description: At1g31330/T19E23_1 [Arabidopsis thaliana]
  misc_feature (1)..(177): Homolog of NCBI NO: 15221681 NR Description: photosystem I subunit III precursor -related
  misc_feature (1)..(177): Homolog of NCBI NO: 5734518 NR Description: photosystem I subunit III precursor [Arabidopsis
MKAFSTAVALSSILLSAPMPAVADISGLTPCKESKQFAKREKQQIKKLQSSLKLYAPESAPALALNAQIEKTKRRFDNYGKYGLLCGADGLPHLIVNGDQRHWGEFITPGLLFLYIAGWIGWVGRSYLIAISDEKKPAMKEIIIDVPLASRLIFRGFIWPVAAYRALLNGDLIAKDV

SEQ ID NO: 109466 - DNA, 696 bp, Zea mays subsp. mays
  misc_feature (1)..(696): Ceres Seq. ID no. 14309275
gaatttagggtagagttccaacggcgactcagtagtcgtctctcgatccctttacctcgtctcagctcaattcgctgcttttatcacggtggtgagagagatgaatcacggccaacaatctggcgaggcgaagcatgaagatgatcctgctcttacagagttccttgggtctctcatggattacactcctactattcctgatgatctaatggagcactacttggctaagagtgggtttcagtgccctgacgtacgattaataaggctagttgctgtggctacacaaaagtttgttgcagatgttgccagcgacgcccttcagcactgcaaggctagaccagcaccagttgtgaaagacaaaaaacagcaaaaggataaacgtttagtattgacaatggaagacctttccaaagctttgcgtgagtatggtgtgaacgtgaagcatccagaatattttgctgatagcccttccaccggaattgatcctgcgacaagggaggaatagaaaccaaacaggaagtctcgaccatattttgcctagtaagaatgattatgtgtgagagatccgtgattctatgttgtgtttccgtgaaaacaaaactcactctctcttcctattcacatgtatattcttttttgttgtttgtttcttgactcgtctctctccttgataaataagatttctgagttcttggt

SEQ ID NO: 109467 - protein, 134 aa, Zea mays subsp. mays
  misc_feature (1)..(134): Ceres Seq. ID no. 14309276
  misc_feature (30)..(80): Pfam Name: Transcription initiation factor TFIID 23-30kDa subunit Pfam Description: Transcription initiation factor TFIID 23-30kDa
  misc_feature (1)..(134): Homolog of NCBI NO: 26450720 NR Description: putative transcription factor II [Arabidopsis
  misc_feature (2)..(118): Homolog of NCBI NO: 17137648 NR Description: TBP-associated factor 10b CG3069-PA [Drosophila
  misc_feature (7)..(119): Homolog of NCBI NO: 20863106 NR Description: similar to Transcription initiation factor TFIID
  misc_feature (7)..(119): Homolog of NCBI NO: 26338586 NR Description: unnamed protein product [Mus musculus]
  misc_feature (7)..(119): Homolog of NCBI NO: 21619259 NR Description: Ilk protein [Mus musculus]
  misc_feature (7)..(119): Homolog of NCBI NO: 9910576 NR Description: TAF10 RNA polymerase II, TATA box binding protein
  misc_feature (7)..(119): Homolog of NCBI NO: 34859827 NR Description: similar to Ilk protein [Rattus norvegicus]
  misc_feature (18)..(119): Homolog of NCBI NO: 5454106 NR Description: TBP-related factor 10
  misc_feature (18)..(119): Homolog of NCBI NO: 2136293 NR Description: transcription factor IID 30k chain - human
  misc_feature (1)..(134): Homolog of NCBI NO: 15236059 NR Description: Transcription factor II homolog [Arabidopsis
MNHGQQSGEAKHEDDPALTEFLGSLMDYTPTIPDDLMEHYLAKSGFQCPDVRLIRLVAVATQKFVADVASDALQHCKARPAPVVKDKKQQKDKRLVLTMEDLSKALREYGVNVKHPEYFADSPSTGIDPATREE

SEQ ID NO: 109468 - protein, 109 aa, Zea mays subsp. mays
  misc_feature (1)..(109): Ceres Seq. ID no. 14309277
  misc_feature (5)..(55): Pfam Name: Transcription initiation factor TFIID 23-30kDa subunit Pfam Description: Transcription initiation factor TFIID 23-30kDa
  misc_feature (1)..(93): Homolog of NCBI NO: 17137648 NR Description: TBP-associated factor 10b CG3069-PA [Drosophila
  misc_feature (1)..(94): Homolog of NCBI NO: 2136293 NR Description: transcription factor IID 30k chain - human
  misc_feature (1)..(94): Homolog of NCBI NO: 20863106 NR Description: similar to Transcription initiation factor TFIID
  misc_feature (1)..(94): Homolog of NCBI NO: 5454106 NR Description: TBP-related factor 10
  misc_feature (1)..(94): Homolog of NCBI NO: 21619259 NR Description: Ilk protein [Mus musculus]
  misc_feature (1)..(94): Homolog of NCBI NO: 26338586 NR Description: unnamed protein product [Mus musculus]
  misc_feature (1)..(94): Homolog of NCBI NO: 34859827 NR Description: similar to Ilk protein [Rattus norvegicus]
  misc_feature (1)..(94): Homolog of NCBI NO: 9910576 NR Description: TAF10 RNA polymerase II, TATA box binding protein
  misc_feature (1)..(109): Homolog of NCBI NO: 26450720 NR Description: putative transcription factor II [Arabidopsis
  misc_feature (1)..(109): Homolog of NCBI NO: 15236059 NR Description: Transcription factor II homolog [Arabidopsis
MDYTPTIPDDLMEHYLAKSGFQCPDVRLIRLVAVATQKFVADVASDALQHCKARPAPVVKDKKQQKDKRLVLTMEDLSKALREYGVNVKHPEYFADSPSTGIDPATREE

SEQ ID NO: 109469 - protein, 98 aa, Zea mays subsp. mays
  misc_feature (1)..(98): Ceres Seq. ID no. 14309278
  misc_feature (1)..(44): Pfam Name: Transcription initiation factor TFIID 23-30kDa subunit Pfam Description: Transcription initiation factor TFIID 23-30kDa
  misc_feature (1)..(82): Homolog of NCBI NO: 17137648 NR Description: TBP-associated factor 10b CG3069-PA [Drosophila
  misc_feature (1)..(83): Homolog of NCBI NO: 2136293 NR Description: transcription factor IID 30k chain - human
  misc_feature (1)..(83): Homolog of NCBI NO: 20863106 NR Description: similar to Transcription initiation factor TFIID
  misc_feature (1)..(83): Homolog of NCBI NO: 5454106 NR Description: TBP-related factor 10
  misc_feature (1)..(83): Homolog of NCBI NO: 21619259 NR Description: Ilk protein [Mus musculus]
  misc_feature (1)..(83): Homolog of NCBI NO: 26338586 NR Description: unnamed protein product [Mus musculus]
  misc_feature (1)..(83): Homolog of NCBI NO: 34859827 NR Description: similar to Ilk protein [Rattus norvegicus]
  misc_feature (1)..(83): Homolog of NCBI NO: 9910576 NR Description: TAF10 RNA polymerase II, TATA box binding protein
  misc_feature (1)..(98): Homolog of NCBI NO: 26450720 NR Description: putative transcription factor II [Arabidopsis
  misc_feature (1)..(98): Homolog of NCBI NO: 15236059 NR Description: Transcription factor II homolog [Arabidopsis
MEHYLAKSGFQCPDVRLIRLVAVATQKFVADVASDALQHCKARPAPVVKDKKQQKDKRLVLTMEDLSKALREYGVNVKHPEYFADSPSTGIDPATREE

SEQ ID NO: 109470 - DNA, 1144 bp, Zea mays subsp. mays
  misc_feature (1)..(1144): Ceres Seq. ID no. 15176165
tagaacatcctaatcgaaaaatgaaattcgtctccatccgcggttcacccctgcaacaaaggcatggaagaagcagttcagttatgtctggcagctaaatccaacgacttgaaaaaggttcaaactttaattacctccggcgccgacgtttctcactttgacggcgacggtctaactccgttaatgcacgccgctaaaaccggaaacgccgaaatcatctctgcattactcgaagcaggagctccatggaacgctctgtccccgtctaatctctcagcaggagacttcgcaatggaagcaggacaccaagaagcgttcgatctcctcctcaaaaccggaatccaatccgagctaatcttgggaacaatcgcccgcaaagaaaccaagaacgaatactccaaccaagagtatctccaagaccgagtcaccttcagcgaagacaagatcatggacaacgaaagcaaaggagtgatgatgtcttgggagaagccgctaatggaagctcacgctaaagccatctgcaccaacggtggctccattctcaacgtcgggttcggtatgggactcgtcgatacagcgatacagcagtacaatccgaccaaacacacgatcatcgaagctcatccggatgtgtacaagcgtatgatcgagtcaggttggggcgagaaggagaacgtgaggattgttttcgggaggtggcaagatgttcttggcgagcttgatgagtgtggctacgatgggatctttttcgatacgtatggagagtattacgaagatttgtgggagtttcatcagaatctacccaagcttctgaagtctgatgggatttattcgtattttaatgggttttgtgggagtaatgcgttttttcatgttgtgtattgtaatctggtgacgttggagattgagagtttggggtttagcactcagttgattccgttgccggttaaggattgtcttggtgatgaagtttgggaaggtgtcaagcaaaagtattggcagcttgatacttattatctacctgtttgtcagtttagtgagtgaagttttacaacttccaagttttgtaatctctttgatacttttagttatgaaagtatcgattagctactaatttttttttagtagaaatttgccaaaatat

SEQ ID NO: 109471 - protein, 326 aa, Zea mays subsp. mays
  misc_feature (1)..(326): Ceres Seq. ID no. 15176166
  misc_feature (35)..(67): Pfam Name: Ankyrin repeat Pfam Description: Ankyrin repeat
  misc_feature (206)..(324): Homolog of NCBI NO: 32416678 NR Description: hypothetical protein [Neurospora crassa]
  misc_feature (108)..(295): Homolog of NCBI NO: 32416678 NR Description: hypothetical protein [Neurospora crassa]
  misc_feature (112)..(325): Homolog of NCBI NO: 6320673 NR Description: Protein Arginine Methyltransferase
  misc_feature (33)..(119): Homolog of NCBI NO: 40738857 NR Description: hypothetical protein AN6072.2 [Aspergillus
  misc_feature (112)..(326): Homolog of NCBI NO: 40738857 NR Description: hypothetical protein AN6072.2 [Aspergillus
  misc_feature (55)..(324): Homolog of NCBI NO: 19115072 NR Description: hypothetical protein [Schizosaccharomyces pombe]
  misc_feature (2)..(324): Homolog of NCBI NO: 12644401 NR Description: Hypothetical protein C26A3.17c in chromosome I
  misc_feature (2)..(324): Homolog of NCBI NO: 25777560 NR Description: hypothetical protein SPAC26A3.17c - fission yeast
  misc_feature (1)..(323): Homolog of NCBI NO: 14488376 NR Description: putative methyltransferase
  misc_feature (1)..(326): Homolog of NCBI NO: 15239183 NR Description: hypothetical protein [Arabidopsis thaliana]
MEEAVQLCLAAKSNDLKKVQTLITSGADVSHFDGDGLTPLMHAAKTGNAEIISALLEAGAPWNALSPSNLSAGDFAMEAGHQEAFDLLLKTGIQSELILGTIARKETKNEYSNQEYLQDRVTFSEDKIMDNESKGVMMSWEKPLMEAHAKAICTNGGSILNVGFGMGLVDTAIQQYNPTKHTIIEAHPDVYKRMIESGWGEKENVRIVFGRWQDVLGELDECGYDGIFFDTYGEYYEDLWEFHQNLPKLLKSDGIYSYFNGFCGSNAFFHVVYCNLVTLEIESLGFSTQLIPLPVKDCLGDEVWEGVKQKYWQLDTYYLPVCQFSE

SEQ ID NO: 109472 - protein, 286 aa, Zea mays subsp. mays
  misc_feature (1)..(286): Ceres Seq. ID no. 15176167
  misc_feature (1)..(27): Pfam Name: Ankyrin repeat Pfam Description: Ankyrin repeat
  misc_feature (166)..(284): Homolog of NCBI NO: 32416678 NR Description: hypothetical protein [Neurospora crassa]
  misc_feature (68)..(255): Homolog of NCBI NO: 32416678 NR Description: hypothetical protein [Neurospora crassa]
  misc_feature (72)..(285): Homolog of NCBI NO: 6320673 NR Description: Protein Arginine Methyltransferase
  misc_feature (1)..(79): Homolog of NCBI NO: 40738857 NR Description: hypothetical protein AN6072.2 [Aspergillus
  misc_feature (72)..(286): Homolog of NCBI NO: 40738857 NR Description: hypothetical protein AN6072.2 [Aspergillus
  misc_feature (15)..(284): Homolog of NCBI NO: 19115072 NR Description: hypothetical protein [Schizosaccharomyces pombe]
  misc_feature (1)..(284): Homolog of NCBI NO: 12644401 NR Description: Hypothetical protein C26A3.17c in chromosome I
  misc_feature (1)..(284): Homolog of NCBI NO: 25777560 NR Description: hypothetical protein SPAC26A3.17c - fission yeast
  misc_feature (1)..(283): Homolog of NCBI NO: 14488376 NR Description: putative methyltransferase
  misc_feature (1)..(286): Homolog of NCBI NO: 15239183 NR Description: hypothetical protein [Arabidopsis thaliana]
MHAAKTGNAEIISALLEAGAPWNALSPSNLSAGDFAMEAGHQEAFDLLLKTGIQSELILGTIARKETKNEYSNQEYLQDRVTFSEDKIMDNESKGVMMSWEKPLMEAHAKAICTNGGSILNVGFGMGLVDTAIQQYNPTKHTIIEAHPDVYKRMIESGWGEKENVRIVFGRWQDVLGELDECGYDGIFFDTYGEYYEDLWEFHQNLPKLLKSDGIYSYFNGFCGSNAFFHVVYCNLVTLEIESLGFSTQLIPLPVKDCLGDEVWEGVKQKYWQLDTYYLPVCQFSE

SEQ ID NO: 109473 - protein, 250 aa, Zea mays subsp. mays
  misc_feature (1)..(250): Ceres Seq. ID no. 15176168
  misc_feature (130)..(248): Homolog of NCBI NO: 32416678 NR Description: hypothetical protein [Neurospora crassa]
  misc_feature (32)..(219): Homolog of NCBI NO: 32416678 NR Description: hypothetical protein [Neurospora crassa]
  misc_feature (36)..(249): Homolog of NCBI NO: 6320673 NR Description: Protein Arginine Methyltransferase
  misc_feature (1)..(43): Homolog of NCBI NO: 40738857 NR Description: hypothetical protein AN6072.2 [Aspergillus
  misc_feature (36)..(250): Homolog of NCBI NO: 40738857 NR Description: hypothetical protein AN6072.2 [Aspergillus
  misc_feature (1)..(248): Homolog of NCBI NO: 19115072 NR Description: hypothetical protein [Schizosaccharomyces pombe]
  misc_feature (1)..(248): Homolog of NCBI NO: 12644401 NR Description: Hypothetical protein C26A3.17c in chromosome I
  misc_feature (1)..(248): Homolog of NCBI NO: 25777560 NR Description: hypothetical protein SPAC26A3.17c - fission yeast
  misc_feature (1)..(247): Homolog of NCBI NO: 14488376 NR Description: putative methyltransferase
  misc_feature (1)..(250): Homolog of NCBI NO: 15239183 NR Description: hypothetical protein [Arabidopsis thaliana]
MEAGHQEAFDLLLKTGIQSELILGTIARKETKNEYSNQEYLQDRVTFSEDKIMDNESKGVMMSWEKPLMEAHAKAICTNGGSILNVGFGMGLVDTAIQQYNPTKHTIIEAHPDVYKRMIESGWGEKENVRIVFGRWQDVLGELDECGYDGIFFDTYGEYYEDLWEFHQNLPKLLKSDGIYSYFNGFCGSNAFFHVVYCNLVTLEIESLGFSTQLIPLPVKDCLGDEVWEGVKQKYWQLDTYYLPVCQFSE

SEQ ID NO: 109474 - DNA, 1001 bp, Zea mays subsp. mays
  misc_feature (1)..(1001): Ceres Seq. ID no. 14309271
aagaaagaagaaagagttgttttgtacattcatttacgaatagtagaattggtacaaagacgttgcatttccatagattcgaattttgtctggtagggagggagtggatcatggcggaggttgttgtgcacatatacgatgtgaccaacactggatcagacaaaaccaacaacaccattcttcagatcaacaggatcttcaaagacggcatcggtctaggcggcattttccacagcgccattcaggtgtatggaaacgatgagtggtcttatgggtattgtgagcaaggcactggtgtcttcagatgtcctagcagcaagaatccaatgtacacttatcgtgagaaaattgttcttgggaggacagattgtacaatctttatggttaatcagatattccgtgagctcaccagggaatggccaggacatacttatgatctcttgtctagaaactgcaaccacttctgtgatgtactctgtgataggcttggtgtgccgaagctcccaggttgggtgaaccgttttgcgcatgctggcgacacagctttggaagtagcagaaaccacagcgatgcggttaaagcaagccaaaactgagcttctatcagctagtaaagtagcctatcgcttcctttcgaatgtcacctcaagcgtaaccaacagcagcaatggctcaccacaacagcctggaaccgtcaacaattcagacaatgtgaactcgagaatgcaaggcacttggctcaaagggatgctaaacacttcgaaaccttccacaagcacagagatagagaacaaagatgaagatgcaaatcacgactctgaggttctacagtttcagcagcaaccgtagtccaccgtaatgcattcatttggttaattgcattgcatatccaccccggaccaaaagctactcaactgtatccattactttgtatcacaccattggaacccatctcttttttttctcaacacgttaatgacaagtaaccaagcaagtctcagc

SEQ ID NO: 109475 - protein, 281 aa, Zea mays subsp. mays
  misc_feature (1)..(281): Ceres Seq. ID no. 14309272
  misc_feature (38)..(175): Pfam Name: Eukaryotic protein of unknown function (DUF862) Pfam Description: Eukaryotic protein of unknown function (DUF862)
  misc_feature (40)..(176): Homolog of NCBI NO: 31240103 NR Description: ENSANGP00000016701 [Anopheles gambiae]
  misc_feature (70)..(178): Homolog of NCBI NO: 25354458 NR Description: hypothetical protein F23A5.4 [imported] -
  misc_feature (70)..(178): Homolog of NCBI NO: 18412886 NR Description: expressed protein [Arabidopsis thaliana]
  misc_feature (69)..(178): Homolog of NCBI NO: 17529024 NR Description: unknown protein [Arabidopsis thaliana]
  misc_feature (70)..(224): Homolog of NCBI NO: 18420889 NR Description: expressed protein [Arabidopsis thaliana]
  misc_feature (69)..(243): Homolog of NCBI NO: 18400749 NR Description: expressed protein [Arabidopsis thaliana]
  misc_feature (32)..(135): Homolog of NCBI NO: 34897764 NR Description: hypothetical protein [Oryza sativa (japonica
  misc_feature (37)..(281): Homolog of NCBI NO: 37536408 NR Description: unknown protein [Oryza sativa (japonica
  misc_feature (37)..(278): Homolog of NCBI NO: 15235952 NR Description: expressed protein [Arabidopsis thaliana]
  misc_feature (37)..(278): Homolog of NCBI NO: 15235955 NR Description: expressed protein [Arabidopsis thaliana]
ERRKSCFVHSFTNSRIGTKTLHFHRFEFCLVGREWIMAEVVVHIYDVTNTGSDKTNNTILQINRIFKDGIGLGGIFHSAIQVYGNDEWSYGYCEQGTGVFRCPSSKNPMYTYREKIVLGRTDCTIFMVNQIFRELTREWPGHTYDLLSRNCNHFCDVLCDRLGVPKLPGWVNRFAHAGDTALEVAETTAMRLKQAKTELLSASKVAYRFLSNVTSSVTNSSNGSPQQPGTVNNSDNVNSRMQGTWLKGMLNTSKPSTSTEIENKDEDANHDSEVLQFQQQP

SEQ ID NO: 109476 - protein, 245 aa, Zea mays subsp. mays
  misc_feature (1)..(245): Ceres Seq. ID no. 14309273
  misc_feature (2)..(139): Pfam Name: Eukaryotic protein of unknown function (DUF862) Pfam Description: Eukaryotic protein of unknown function (DUF862)
  misc_feature (4)..(140): Homolog of NCBI NO: 31240103 NR Description: ENSANGP00000016701 [Anopheles gambiae]
  misc_feature (34)..(142): Homolog of NCBI NO: 25354458 NR Description: hypothetical protein F23A5.4 [imported] -
  misc_feature (34)..(142): Homolog of NCBI NO: 18412886 NR Description: expressed protein [Arabidopsis thaliana]
  misc_feature (33)..(142): Homolog of NCBI NO: 17529024 NR Description: unknown protein [Arabidopsis thaliana]
  misc_feature (34)..(188): Homolog of NCBI NO: 18420889 NR Description: expressed protein [Arabidopsis thaliana]
  misc_feature (33)..(207): Homolog of NCBI NO: 18400749 NR Description: expressed protein [Arabidopsis thaliana]
  misc_feature (1)..(99): Homolog of NCBI NO: 34897764 NR Description: hypothetical protein [Oryza sativa (japonica
  misc_feature (1)..(245): Homolog of NCBI NO: 37536408 NR Description: unknown protein [Oryza sativa (japonica
  misc_feature (1)..(242): Homolog of NCBI NO: 15235952 NR Description: expressed protein [Arabidopsis thaliana]
  misc_feature (1)..(242): Homolog of NCBI NO: 15235955 NR Description: expressed protein [Arabidopsis thaliana]
MAEVVVHIYDVTNTGSDKTNNTILQINRIFKDGIGLGGIFHSAIQVYGNDEWSYGYCEQGTGVFRCPSSKNPMYTYREKIVLGRTDCTIFMVNQIFRELTREWPGHTYDLLSRNCNHFCDVLCDRLGVPKLPGWVNRFAHAGDTALEVAETTAMRLKQAKTELLSASKVAYRFLSNVTSSVTNSSNGSPQQPGTVNNSDNVNSRMQGTWLKGMLNTSKPSTSTEIENKDEDANHDSEVLQFQQQP

SEQ ID NO: 109477 - protein, 173 aa, Zea mays subsp. mays
  misc_feature (1)..(173): Ceres Seq. ID no. 14309274
  misc_feature (1)..(67): Pfam Name: Eukaryotic protein of unknown function (DUF862) Pfam Description: Eukaryotic protein of unknown function (DUF862)
  misc_feature (1)..(173): Homolog of NCBI NO: 37536408 NR Description: unknown protein [Oryza sativa (japonica
  misc_feature (1)..(170): Homolog of NCBI NO: 15235952 NR Description: expressed protein [Arabidopsis thaliana]
  misc_feature (1)..(70): Homolog of NCBI NO: 25354458 NR Description: hypothetical protein F23A5.4 [imported] -
  misc_feature (1)..(70): Homolog of NCBI NO: 17529024 NR Description: unknown protein [Arabidopsis thaliana]
  misc_feature (1)..(135): Homolog of NCBI NO: 18400749 NR Description: expressed protein [Arabidopsis thaliana]
  misc_feature (1)..(27): Homolog of NCBI NO: 34897764 NR Description: hypothetical protein [Oryza sativa (japonica
  misc_feature (1)..(116): Homolog of NCBI NO: 18420889 NR Description: expressed protein [Arabidopsis thaliana]
  misc_feature (1)..(70): Homolog of NCBI NO: 18412886 NR Description: expressed protein [Arabidopsis thaliana]
  misc_feature (1)..(68): Homolog of NCBI NO: 31240103 NR Description: ENSANGP00000016701 [Anopheles gambiae]
  misc_feature (1)..(170): Homolog of NCBI NO: 15235955 NR Description: expressed protein [Arabidopsis thaliana]
MYTYREKIVLGRTDCTIFMVNQIFRELTREWPGHTYDLLSRNCNHFCDVLCDRLGVPKLPGWVNRFAHAGDTALEVAETTAMRLKQAKTELLSASKVAYRFLSNVTSSVTNSSNGSPQQPGTVNNSDNVNSRMQGTWLKGMLNTSKPSTSTEIENKDEDANHDSEVLQFQQQP

SEQ ID NO: 109478 - DNA, 1810 bp, Zea mays subsp. mays
  misc_feature (1)..(1810): Ceres Seq. ID no. 15178939
tttactccgtccattcacaaagagcgttcatttctgttttctctctcctctcttatttctcttttttccttttttttcttttttttgtttttttttttttttcctctttcgttttttttttctctcttcgttttagttgatttcgaaccctaagctaaaaaggggaaagaggtcttttctcgggaaacaaaacagatatttttccatctcattcatcgcagtgagaaaaaaagatgcagaatccgaggctcaaacaacagcaacaacaacaacaacaacaacaacaagctatgatgcagcaagctttgatgcaacaacaccactctctctatcatcctagccttatggctcctcctccccctcctcctcagatggagcctctaccaagtggaaaccttcctcctggtttcgatcccactacttgccgcagtgtgtatgctggcaacattcacacgcaggtcactgaggttcttcttcaagaaatttttgctagcaccggccctgttgagagctgtaagctcatcagaaaggataagtcatcatatggatttgttcactactttgatcgaagatctgctggtttggctatcatgtctcttaacggcaggcatctgtttggacagcctatcaaagttaattgggcttatgctactggtcaaagggaagacacatcaagccacttcaacatatttgtcggagacctcagtccagatgttactgatgcagctttgtttgagagcttctctgccttcaatacttgctcggatgcaagagtaatgtgggaccagaaaactggacgctcgagaggctttgggtttgtttccttccgcaatcagcaggatgctcaaaatgccataaatgaaatgaatggtaaatggttaagtagcagacaaatcagatgcaactgggcgacaaaaggtgctacttttggcgacgacaaacatagctctgatggcaaaagtgtcgttgaactcacaaacggctcagaggatggtagagagatctcaatcacaaacgaagaagctcctgaaaacaatcctcagtataccactgtgtatgtaggaaaccttgctcctgaagtaactcagcttgatctacaccgcctgttccatacacttggcgctggagtgattgaagaggtccgtgtccagcgagacaaaggctttggttttgtgagatacaatactcatgacgaggctgctcttgctattcagatgggcaactctcagcctttcctcttcaacagacagataaagtgttcatggggaaacaaaccaactccaataggcacagcctcaaacccgcttccaccaccagcgccagtggcagtccctggtctgtccccaatggacctcttagcctatgagaggcaactggctctagccaagatgcatcctcaggctcagcattctcttaggcatgccaatgcagccggagcaagtgctgctatgtacgatggtggttttcagaatgtagctgcggctcatcagcagctcatgtactatcagtaataaactcttggtgccttcgcgctgagataccttttctttctttcttcttaattttatcactttcttgttttcattttctagaccttgttcagagtcttatgtatgtgtctctctctcatttgaagtcgctgattttatatgcatgcttgctggttcgtaccctgagtcttacttggcttgcaagcaagcaataaaataacgttgaaataaaatggagtttggtttgggttctagacatgtttgtctgagagggagtagtagtgtcttgtattgtggttttgtaatggtaaacttggtcc

SEQ ID NO: 109479 - protein, 425 aa, Zea mays subsp. mays
  misc_feature (1)..(425): Ceres Seq. ID no. 15178940
  misc_feature (152)..(223): Pfam Name: RNA recognition motif. (a.k.a. RRM, RBD, or RNP domain) Pfam Description: RNA recognition motif. (a.k.a. RRM, RBD, or RNP
  misc_feature (6)..(424): Homolog of NCBI NO: 6996560 NR Description: oligouridylate binding protein [Nicotiana
  misc_feature (8)..(51): Homolog of NCBI NO: 25402821 NR Description: protein F1L3.2 [imported] - Arabidopsis thaliana
  misc_feature (340)..(425): Homolog of NCBI NO: 25402821 NR Description: protein F1L3.2 [imported] - Arabidopsis thaliana
  misc_feature (212)..(346): Homolog of NCBI NO: 25402821 NR Description: protein F1L3.2 [imported] - Arabidopsis thaliana
  misc_feature (46)..(214): Homolog of NCBI NO: 25402821 NR Description: protein F1L3.2 [imported] - Arabidopsis thaliana
  misc_feature (8)..(425): Homolog of NCBI NO: 18394471 NR Description: oligouridylate binding protein (UBP1), putative
  misc_feature (1)..(425): Homolog of NCBI NO: 15231783 NR Description: oligouridylate binding protein (UBP1), putative
  misc_feature (1)..(425): Homolog of NCBI NO: 21593280 NR Description: oligouridylate binding protein, putative
  misc_feature (1)..(425): Homolog of NCBI NO: 30695647 NR Description: oligouridylate binding protein (UBP1), putative
  misc_feature (1)..(425): Homolog of NCBI NO: 15221031 NR Description: oligouridylate binding protein (UBP1), putative
MQNPRLKQQQQQQQQQQQAMMQQALMQQHHSLYHPSLMAPPPPPPQMEPLPSGNLPPGFDPTTCRSVYAGNIHTQVTEVLLQEIFASTGPVESCKLIRKDKSSYGFVHYFDRRSAGLAIMSLNGRHLFGQPIKVNWAYATGQREDTSSHFNIFVGDLSPDVTDAALFESFSAFNTCSDARVMWDQKTGRSRGFGFVSFRNQQDAQNAINEMNGKWLSSRQIRCNWATKGATFGDDKHSSDGKSVVELTNGSEDGREISITNEEAPENNPQYTTVYVGNLAPEVTQLDLHRLFHTLGAGVIEEVRVQRDKGFGFVRYNTHDEAALAIQMGNSQPFLFNRQIKCSWGNKPTPIGTASNPLPPPAPVAVPGLSPMDLLAYERQLALAKMHPQAQHSLRHANAAGASAAMYDGGFQNVAAAHQQLMYYQ

SEQ ID NO: 109480 - protein, 406 aa, Zea mays subsp. mays
  misc_feature (1)..(406): Ceres Seq. ID no. 15178941
  misc_feature (133)..(204): Pfam Name: RNA recognition motif. (a.k.a. RRM, RBD, or RNP domain) Pfam Description: RNA recognition motif. (a.k.a. RRM, RBD, or RNP
  misc_feature (1)..(405): Homolog of NCBI NO: 6996560 NR Description: oligouridylate binding protein [Nicotiana
  misc_feature (1)..(32): Homolog of NCBI NO: 25402821 NR Description: protein F1L3.2 [imported] - Arabidopsis thaliana
  misc_feature (321)..(406): Homolog of NCBI NO: 25402821 NR Description: protein F1L3.2 [imported] - Arabidopsis thaliana
  misc_feature (193)..(327): Homolog of NCBI NO: 25402821 NR Description: protein F1L3.2 [imported] - Arabidopsis thaliana
  misc_feature (27)..(195): Homolog of NCBI NO: 25402821 NR Description: protein F1L3.2 [imported] - Arabidopsis thaliana
  misc_feature (1)..(406): Homolog of NCBI NO: 18394471 NR Description: oligouridylate binding protein (UBP1), putative
  misc_feature (1)..(406): Homolog of NCBI NO: 15231783 NR Description: oligouridylate binding protein (UBP1), putative
  misc_feature (1)..(406): Homolog of NCBI NO: 21593280 NR Description: oligouridylate binding protein, putative
  misc_feature (1)..(406): Homolog of NCBI NO: 30695647 NR Description: oligouridylate binding protein (UBP1), putative
  misc_feature (1)..(406): Homolog of NCBI NO: 15221031 NR Description: oligouridylate binding protein (UBP1), putative
MMQQALMQQHHSLYHPSLMAPPPPPPQMEPLPSGNLPPGFDPTTCRSVYAGNIHTQVTEVLLQEIFASTGPVESCKLIRKDKSSYGFVHYFDRRSAGLAIMSLNGRHLFGQPIKVNWAYATGQREDTSSHFNIFVGDLSPDVTDAALFESFSAFNTCSDARVMWDQKTGRSRGFGFVSFRNQQDAQNAINEMNGKWLSSRQIRCNWATKGATFGDDKHSSDGKSVVELTNGSEDGREISITNEEAPENNPQYTTVYVGNLAPEVTQLDLHRLFHTLGAGVIEEVRVQRDKGFGFVRYNTHDEAALAIQMGNSQPFLFNRQIKCSWGNKPTPIGTASNPLPPPAPVAVPGLSPMDLLAYERQLALAKMHPQAQHSLRHANAAGASAAMYDGGFQNVAAAHQQLMYYQ

SEQ ID NO: 109481 - protein, 405 aa, Zea mays subsp. mays
  misc_feature (1)..(405): Ceres Seq. ID no. 15178942
  misc_feature (132)..(203): Pfam Name: RNA recognition motif. (a.k.a. RRM, RBD, or RNP domain) Pfam Description: RNA recognition motif. (a.k.a. RRM, RBD, or RNP
  misc_feature (1)..(404): Homolog of NCBI NO: 6996560 NR Description: oligouridylate binding protein [Nicotiana
  misc_feature (1)..(31): Homolog of NCBI NO: 25402821 NR Description: protein F1L3.2 [imported] - Arabidopsis thaliana
  misc_feature (320)..(405): Homolog of NCBI NO: 25402821 NR Description: protein F1L3.2 [imported] - Arabidopsis thaliana
  misc_feature (192)..(326): Homolog of NCBI NO: 25402821 NR Description: protein F1L3.2 [imported] - Arabidopsis thaliana
  misc_feature (26)..(194): Homolog of NCBI NO: 25402821 NR Description: protein F1L3.2 [imported] - Arabidopsis thaliana
  misc_feature (1)..(405): Homolog of NCBI NO: 18394471 NR Description: oligouridylate binding protein (UBP1), putative
  misc_feature (1)..(405): Homolog of NCBI NO: 15231783 NR Description: oligouridylate binding protein (UBP1), putative
  misc_feature (1)..(405): Homolog of NCBI NO: 21593280 NR Description: oligouridylate binding protein, putative
  misc_feature (1)..(405): Homolog of NCBI NO: 30695647 NR Description: oligouridylate binding protein (UBP1), putative
  misc_feature (1)..(405): Homolog of NCBI NO: 15221031 NR Description: oligouridylate binding protein (UBP1), putative
MQQALMQQHHSLYHPSLMAPPPPPPQMEPLPSGNLPPGFDPTTCRSVYAGNIHTQVTEVLLQEIFASTGPVESCKLIRKDKSSYGFVHYFDRRSAGLAIMSLNGRHLFGQPIKVNWAYATGQREDTSSHFNIFVGDLSPDVTDAALFESFSAFNTCSDARVMWDQKTGRSRGFGFVSFRNQQDAQNAINEMNGKWLSSRQIRCNWATKGATFGDDKHSSDGKSVVELTNGSEDGREISITNEEAPENNPQYTTVYVGNLAPEVTQLDLHRLFHTLGAGVIEEVRVQRDKGFGFVRYNTHDEAALAIQMGNSQPFLFNRQIKCSWGNKPTPIGTASNPLPPPAPVAVPGLSPMDLLAYERQLALAKMHPQAQHSLRHANAAGASAAMYDGGFQNVAAAHQQLMYYQ

SEQ ID NO: 109482 - DNA, 1467 bp, Zea mays subsp. mays
  misc_feature (1)..(1467): Ceres Seq. ID no. 15178909
ataaataagaaaaatatttttttccaaacactaataataataaaactagtggattacaaaatatataaacaaaaataaaaattgtaatccctagtaactaaaaaaaaatcatataatgggtgtacattttggaatatctgtattatttgttgtttgtttgctaggtttatcagcaaatgctaaagatttcacaatcactgctcctccaggttctgatatcaccagcttattgttgaaaacattcaatgaggcatgccagttcccaaccaagagcagcgttttgatccctaaaggtgaatacaagcttaggcaaatagagatgatgggtccatgcaaagctcccataaggattactcttcaaggcactgtgaaagctgacggaaacgttaacgggaatgactactgggtcgctttccgcaggattaatgggtttaagttgaacggaggtggtgtctttgacggtgaaggtaacactgcatggagggctaataattgccacaaaatggcattaactcagtgcaagaaactccctatcagcatacggtttgatttcgtgactgacgctaagataagaggcataacctcgatggattcaaagaacttccacattaacgtgctcggggcaaggaacatgacattggaagaaatcacgatcattgcccctgaagagagtcccaacaccgatggaatccacgtgggaaggagtgttggagtccagatcatcaactcaaacatcaaaacaggagatgactgcatctctattggagacgggacgagagaccttcttgtcgaaagagttacatgcggtccgggacatggaatcagtattggaagcctcgatttatacgtgaaggaggaagacgtcactggcatcagggtcgtgaactgcaccctcataaacactgacaatggtgtaaggatcaagacatggccgtctgcagcttgctccaccaccgcctcgggtatccattttgagaatattatcctcaagaacgttaccaaccctatcctcatcgaccaagagtactgcccctggaaccgatgcaacaagaacaaaccatcaacaatcaagctggtggacataagcttcaagcatatcagaggaacatcagggaacaaagacgccgttaagcttttgtgcagcaagggatttccgtgcaagaacgtggagattggtgacattgacattaagtacaccggagccgatggtccagcgacattccaatgctccaacgtatctcccacgttgatgggaactcaggtccctaaagcatgtagcagcccagtgactaagctaccaggccagtaagaaatctcgatgcgataaccaatacacaatctaaaatgtacaacccataatgtatgttatattctttcatttgattttatttgtaaaaaaaaaaagcgtttttgctagctatcttgtataacatgcatcattcttgagaaaaaatataataactttat

SEQ ID NO: 109483 - protein, 397 aa, Zea mays subsp. mays
  misc_feature (1)..(397): Ceres Seq. ID no. 15178910
  misc_feature (47)..(387): Pfam Name: Glycosyl hydrolases family 28 Pfam Description: Glycosyl hydrolases family 28
  misc_feature (1)..(395): Homolog of NCBI NO: 3024386 NR Description: POLYGALACTURONASE PRECURSOR (PG) (PECTINASE)
  misc_feature (1)..(395): Homolog of NCBI NO: 3024385 NR Description: POLYGALACTURONASE PRECURSOR (PG) (PECTINASE)
  misc_feature (1)..(397): Homolog of NCBI NO: 548490 NR Description: Polygalacturonase precursor (PG) (Pectinase)
  misc_feature (1)..(390): Homolog of NCBI NO: 15231876 NR Description: polygalacturonase, putative [Arabidopsis
  misc_feature (1)..(397): Homolog of NCBI NO: 30984029 NR Description: polygalacturonase [Brassica napus]
  misc_feature (1)..(393): Homolog of NCBI NO: 15231878 NR Description: exopolygalacturonase [Arabidopsis thaliana]
  misc_feature (1)..(397): Homolog of NCBI NO: 21668071 NR Description: putative pollen polygalacturonase [Brassica
  misc_feature (1)..(390): Homolog of NCBI NO: 11263969 NR Description: polygalacturonase (EC 3.2.1.15) [imported] -
  misc_feature (1)..(390): Homolog of NCBI NO: 15231874 NR Description: polygalacturonase, putative [Arabidopsis
  misc_feature (1)..(395): Homolog of NCBI NO: 15238902 NR Description: polygalacturonase, putative [Arabidopsis
MGVHFGISVLFVVCLLGLSANAKDFTITAPPGSDITSLLLKTFNEACQFPTKSSVLIPKGEYKLRQIEMMGPCKAPIRITLQGTVKADGNVNGNDYWVAFRRINGFKLNGGGVFDGEGNTAWRANNCHKMALTQCKKLPISIRFDFVTDAKIRGITSMDSKNFHINVLGARNMTLEEITIIAPEESPNTDGIHVGRSVGVQIINSNIKTGDDCISIGDGTRDLLVERVTCGPGHGISIGSLDLYVKEEDVTGIRVVNCTLINTDNGVRIKTWPSAACSTTASGIHFENIILKNVTNPILIDQEYCPWNRCNKNKPSTIKLVDISFKHIRGTSGNKDAVKLLCSKGFPCKNVEIGDIDIKYTGADGPATFQCSNVSPTLMGTQVPKACSSPVTKLPGQ

SEQ ID NO: 109484 - protein, 329 aa, Zea mays subsp. mays
  misc_feature (1)..(329): Ceres Seq. ID no. 15178911
  misc_feature (1)..(319): Pfam Name: Glycosyl hydrolases family 28 Pfam Description: Glycosyl hydrolases family 28
  misc_feature (1)..(327): Homolog of NCBI NO: 3024386 NR Description: POLYGALACTURONASE PRECURSOR (PG) (PECTINASE)
  misc_feature (1)..(327): Homolog of NCBI NO: 3024385 NR Description: POLYGALACTURONASE PRECURSOR (PG) (PECTINASE)
  misc_feature (1)..(329): Homolog of NCBI NO: 548490 NR Description: Polygalacturonase precursor (PG) (Pectinase)
  misc_feature (1)..(322): Homolog of NCBI NO: 15231876 NR Description: polygalacturonase, putative [Arabidopsis
  misc_feature (1)..(329): Homolog of NCBI NO: 30984029 NR Description: polygalacturonase [Brassica napus]
  misc_feature (1)..(325): Homolog of NCBI NO: 15231878 NR Description: exopolygalacturonase [Arabidopsis thaliana]
  misc_feature (1)..(329): Homolog of NCBI NO: 21668071 NR Description: putative pollen polygalacturonase [Brassica
  misc_feature (1)..(322): Homolog of NCBI NO: 11263969 NR Description: polygalacturonase (EC 3.2.1.15) [imported] -
  misc_feature (1)..(322): Homolog of NCBI NO: 15231874 NR Description: polygalacturonase, putative [Arabidopsis
  misc_feature (1)..(327): Homolog of NCBI NO: 15238902 NR Description: polygalacturonase, putative [Arabidopsis
MMGPCKAPIRITLQGTVKADGNVNGNDYWVAFRRINGFKLNGGGVFDGEGNTAWRANNCHKMALTQCKKLPISIRFDFVTDAKIRGITSMDSKNFHINVLGARNMTLEEITIIAPEESPNTDGIHVGRSVGVQIINSNIKTGDDCISIGDGTRDLLVERVTCGPGHGISIGSLDLYVKEEDVTGIRVVNCTLINTDNGVRIKTWPSAACSTTASGIHFENIILKNVTNPILIDQEYCPWNRCNKNKPSTIKLVDISFKHIRGTSGNKDAVKLLCSKGFPCKNVEIGDIDIKYTGADGPATFQCSNVSPTLMGTQVPKACSSPVTKLPGQ

SEQ ID NO: 109485 - protein, 328 aa, Zea mays subsp. mays
  misc_feature (1)..(328): Ceres Seq. ID no. 15178912
  misc_feature (1)..(318): Pfam Name: Glycosyl hydrolases family 28 Pfam Description: Glycosyl hydrolases family 28
  misc_feature (1)..(326): Homolog of NCBI NO: 3024386 NR Description: POLYGALACTURONASE PRECURSOR (PG) (PECTINASE)
  misc_feature (1)..(326): Homolog of NCBI NO: 3024385 NR Description: POLYGALACTURONASE PRECURSOR (PG) (PECTINASE)
  misc_feature (1)..(328): Homolog of NCBI NO: 548490 NR Description: Polygalacturonase precursor (PG) (Pectinase)
  misc_feature (1)..(321): Homolog of NCBI NO: 15231876 NR Description: polygalacturonase, putative [Arabidopsis
  misc_feature (1)..(328): Homolog of NCBI NO: 30984029 NR Description: polygalacturonase [Brassica napus]
  misc_feature (1)..(324): Homolog of NCBI NO: 15231878 NR Description: exopolygalacturonase [Arabidopsis thaliana]
  misc_feature (1)..(328): Homolog of NCBI NO: 21668071 NR Description: putative pollen polygalacturonase [Brassica
  misc_feature (1)..(321): Homolog of NCBI NO: 11263969 NR Description: polygalacturonase (EC 3.2.1.15) [imported] -
  misc_feature (1)..(321): Homolog of NCBI NO: 15231874 NR Description: polygalacturonase, putative [Arabidopsis
  misc_feature (1)..(326): Homolog of NCBI NO: 15238902 NR Description: polygalacturonase, putative [Arabidopsis
MGPCKAPIRITLQGTVKADGNVNGNDYWVAFRRINGFKLNGGGVFDGEGNTAWRANNCHKMALTQCKKLPISIRFDFVTDAKIRGITSMDSKNFHINVLGARNMTLEEITIIAPEESPNTDGIHVGRSVGVQIINSNIKTGDDCISIGDGTRDLLVERVTCGPGHGISIGSLDLYVKEEDVTGIRVVNCTLINTDNGVRIKTWPSAACSTTASGIHFENIILKNVTNPILIDQEYCPWNRCNKNKPSTIKLVDISFKHIRGTSGNKDAVKLLCSKGFPCKNVEIGDIDIKYTGADGPATFQCSNVSPTLMGTQVPKACSSPVTKLPGQ

SEQ ID NO: 109486 - DNA, 1358 bp, Zea mays subsp. mays
  misc_feature (1)..(1358): Ceres Seq. ID no. 15179524
atcacaatttcaaacctctctctctctctctcttctccaattctcaatcaatcgaatcatggttgaaccggcgaataccgttggaatcccgttgaaccacactgcgctgctgaaggatgagctcgacatcgtgatccccacgatccgcaacctcgatttcctcgagatgtggagaccttttctccagccttaccatctcatcatcgtccaggacggagatccttccaagaccattgctgttcctgaagggttcgattacgagctttacaacaggaacgacattaaccgtatcctcggtcccaaagcttcgtgcatttccttcaaggactcggcttgtcgctgcttcggttacatggtgtctaagaagaagtacatcttcacaatcgacgacgattgcttcgttgctaaggatccatctggaaaagcagtgaacgcacttgagcaacacatcaagaaccttctctgcccatcttctccgtttttcttcaacaccttgtacgacccataccgtgaaggtgctgacttcgtccgtggataccctttcagtctccgtgagggtgtttccactgctgtctcccacggtctctggctcaacatccctgattacgatgccccaacccaacttgtgaagcctaaagaaaggaacacaaggtatgtggatgctgtaatgaccatcccaaagggaacacttttcccaatgtgtggtatgaacttagcctttgaccgtgatctcatcggtccggctatgtactttggtctcatgggtgatggtcagcctattggtcgctacgacgatatgtgggctggatggtgtgtcaaggtgatctgtgaccatttggggttaggagtgaagacaggtcttccctacatttaccacagcaaggcaagcaacccatttgtgaacctgaagaaggaatacaagggcattttctggcaggaggacatcattcctttcttccagagcgcaaagctctcgaaagaagctgtgacggttcaacaatgctacattgagctgtccaagatggtgaaggagaagctcagcgccattgatccttactttgacaagcttgctgatgctatggtcacctggattgaagcttgggatgagcttaacccggccaccaaagcttgagcagcagataaaaaaaaaaatcaccgcagttttggttattagcttaacctatctcatctatcttctttccttccccgttttttttctgactttccggtgattattcagttcgttttaaagttgccagagtttatttaaatagtgatggtgtgtagttctatttaagaccgatacaatgtatcctctgagctttttgtttcaataataaaatcatatatattccttg

SEQ ID NO: 109487 - protein, 376 aa, Zea mays subsp. mays
  misc_feature (1)..(376): Ceres Seq. ID no. 15179525
  misc_feature (32)..(375): Pfam Name: Reversibly glycosylated polypeptide Pfam Description: Reversibly glycosylated polypeptide
  misc_feature (56)..(376): Homolog of NCBI NO: 7488889 NR Description: type IIIa membrane protein cp-wap13 - cowpea
  misc_feature (34)..(376): Homolog of NCBI NO: 30680679 NR Description: reversibly glycosylatable polypeptide -related
  misc_feature (24)..(376): Homolog of NCBI NO: 34915190 NR Description: reversibly glycosylated polypeptide
  misc_feature (24)..(376): Homolog of NCBI NO: 4158221 NR Description: reversibly glycosylated polypeptide
  misc_feature (28)..(372): Homolog of NCBI NO: 34582499 NR Description: Alpha-1,4-glucan-protein synthase
  misc_feature (20)..(372): Homolog of NCBI NO: 21593071 NR Description: reversibly glycosylated polypeptide-3
  misc_feature (20)..(372): Homolog of NCBI NO: 2317731 NR Description: reversibly glycosylated polypeptide-2
  misc_feature (20)..(372): Homolog of NCBI NO: 15242351 NR Description: reversibly glycosylated polypeptide-3
  misc_feature (20)..(376): Homolog of NCBI NO: 2317729 NR Description: reversibly glycosylated polypeptide-1
  misc_feature (20)..(376): Homolog of NCBI NO: 15232865 NR Description: reversibly glycosylated polypeptide-1
SQFQTSLSLSLLQFSINRIMVEPANTVGIPLNHTALLKDELDIVIPTIRNLDFLEMWRPFLQPYHLIIVQDGDPSKTIAVPEGFDYELYNRNDINRILGPKASCISFKDSACRCFGYMVSKKKYIFTIDDDCFVAKDPSGKAVNALEQHIKNLLCPSSPFFFNTLYDPYREGADFVRGYPFSLREGVSTAVSHGLWLNIPDYDAPTQLVKPKERNTRYVDAVMTIPKGTLFPMCGMNLAFDRDLIGPAMYFGLMGDGQPIGRYDDMWAGWCVKVICDHLGLGVKTGLPYIYHSKASNPFVNLKKEYKGIFWQEDIIPFFQSAKLSKEAVTVQQCYIELSKMVKEKLSAIDPYFDKLADAMVTWIEAWDELNPATKA

SEQ ID NO: 109488 - protein, 357 aa, Zea mays subsp. mays
  misc_feature (1)..(357): Ceres Seq. ID no. 15179526
  misc_feature (13)..(356): Pfam Name: Reversibly glycosylated polypeptide Pfam Description: Reversibly glycosylated polypeptide
  misc_feature (1)..(357): Homolog of NCBI NO: 2317729 NR Description: reversibly glycosylated polypeptide-1
  misc_feature (37)..(357): Homolog of NCBI NO: 7488889 NR Description: type IIIa membrane protein cp-wap13 - cowpea
  misc_feature (5)..(357): Homolog of NCBI NO: 34915190 NR Description: reversibly glycosylated polypeptide
  misc_feature (9)..(353): Homolog of NCBI NO: 34582499 NR Description: Alpha-1,4-glucan-protein synthase
  misc_feature (1)..(353): Homolog of NCBI NO: 2317731 NR Description: reversibly glycosylated polypeptide-2
  misc_feature (1)..(353): Homolog of NCBI NO: 15242351 NR Description: reversibly glycosylated polypeptide-3
  misc_feature (1)..(353): Homolog of NCBI NO: 21593071 NR Description: reversibly glycosylated polypeptide-3
  misc_feature (5)..(357): Homolog of NCBI NO: 4158221 NR Description: reversibly glycosylated polypeptide
  misc_feature (15)..(357): Homolog of NCBI NO: 30680679 NR Description: reversibly glycosylatable polypeptide -related
  misc_feature (1)..(357): Homolog of NCBI NO: 15232865 NR Description: reversibly glycosylated polypeptide-1
MVEPANTVGIPLNHTALLKDELDIVIPTIRNLDFLEMWRPFLQPYHLIIVQDGDPSKTIAVPEGFDYELYNRNDINRILGPKASCISFKDSACRCFGYMVSKKKYIFTIDDDCFVAKDPSGKAVNALEQHIKNLLCPSSPFFFNTLYDPYREGADFVRGYPFSLREGVSTAVSHGLWLNIPDYDAPTQLVKPKERNTRYVDAVMTIPKGTLFPMCGMNLAFDRDLIGPAMYFGLMGDGQPIGRYDDMWAGWCVKVICDHLGLGVKTGLPYIYHSKASNPFVNLKKEYKGIFWQEDIIPFFQSAKLSKEAVTVQQCYIELSKMVKEKLSAIDPYFDKLADAMVTWIEAWDELNPATKA

SEQ ID NO: 109489 - protein, 321 aa, Zea mays subsp. mays
  misc_feature (1)..(321): Ceres Seq. ID no. 15179527
  misc_feature (1)..(320): Pfam Name: Reversibly glycosylated polypeptide Pfam Description: Reversibly glycosylated polypeptide
  misc_feature (1)..(321): Homolog of NCBI NO: 7488889 NR Description: type IIIa membrane protein cp-wap13 - cowpea
  misc_feature (1)..(321): Homolog of NCBI NO: 30680679 NR Description: reversibly glycosylatable polypeptide -related
  misc_feature (1)..(321): Homolog of NCBI NO: 34915190 NR Description: reversibly glycosylated polypeptide
  misc_feature (1)..(321): Homolog of NCBI NO: 4158221 NR Description: reversibly glycosylated polypeptide
  misc_feature (1)..(317): Homolog of NCBI NO: 34582499 NR Description: Alpha-1,4-glucan-protein synthase
  misc_feature (1)..(317): Homolog of NCBI NO: 21593071 NR Description: reversibly glycosylated polypeptide-3
  misc_feature (1)..(317): Homolog of NCBI NO: 2317731 NR Description: reversibly glycosylated polypeptide-2
  misc_feature (1)..(317): Homolog of NCBI NO: 15242351 NR Description: reversibly glycosylated polypeptide-3
  misc_feature (1)..(321): Homolog of NCBI NO: 2317729 NR Description: reversibly glycosylated polypeptide-1
  misc_feature (1)..(321): Homolog of NCBI NO: 15232865 NR Description: reversibly glycosylated polypeptide-1
MWRPFLQPYHLIIVQDGDPSKTIAVPEGFDYELYNRNDINRILGPKASCISFKDSACRCFGYMVSKKKYIFTIDDDCFVAKDPSGKAVNALEQHIKNLLCPSSPFFFNTLYDPYREGADFVRGYPFSLREGVSTAVSHGLWLNIPDYDAPTQLVKPKERNTRYVDAVMTIPKGTLFPMCGMNLAFDRDLIGPAMYFGLMGDGQPIGRYDDMWAGWCVKVICDHLGLGVKTGLPYIYHSKASNPFVNLKKEYKGIFWQEDIIPFFQSAKLSKEAVTVQQCYIELSKMVKEKLSAIDPYFDKLADAMVTWIEAWDELNPATKA

SEQ ID NO: 109490 - DNA, 907 bp, Zea mays subsp. mays
  misc_feature (1)..(907): Ceres Seq. ID no. 15174373
gattcagagtctcactcttgctcaagtggagctccatcaatggcttcactaaacctcttcaccttcgctttccttcttcttatctctcacgcttcagcttcaacggtcgtattcctcaacaaatgcagatatccagtgtggccaggcatccagcccagcgccggccaaaacatactcgccggcggtggatttaagcttcctgctaacaaagcctacacccttcagctcccaccgctttggtccggccgcttctggggtcgccacggctgcacatttgacagatctggccgtggtcgctgcgccaccggagattgcggcggttctctcacctgcaacggtgccggcggttcacctccggccactctcgcagaaatcaccctcggacaagagcttgacttctatgacgtcagcctcgtcgacggttataacctcgctatgtcgataatgccggtgaaaggtagaggtcaatgtagctacgccggttgtgtaagcgatctaaaccggatgtgtccggttgggttacaagtccggtcacgcaacgggaaacgggtgttagcctgtaaaagcgcttgctctgccttcaactcaccacagtactgttgtaccggcacgttcggtaacccgctcacctgcaagccaacttcttactccaaaatcttcaaggtcgcttgccctaaagcttattcttacgcttacgacgacccaaccagcatcgcaacttgttccaaggctaattacatcgtcaccttttgccctcaccatcgccgttaaggttacaattattaagaacaaggcatttctctgttagcaacaatatcttgtgttatgtaatcgggaatctttgaggtttatgtctctacaattgtaacactcttgaaatgcaaaatcctataacaatatcaatatc

SEQ ID NO: 109491 - protein, 256 aa, Zea mays subsp. mays
  misc_feature (1)..(256): Ceres Seq. ID no. 15174374
  misc_feature (40)..(252): Pfam Name: Thaumatin family Pfam Description: Thaumatin family
  misc_feature (26)..(252): Homolog of NCBI NO: 6273385 NR Description: SCUTL2 [Vitis vinifera]
  misc_feature (14)..(252): Homolog of NCBI NO: 15222088 NR Description: thaumatin-like protein [Arabidopsis thaliana]
  misc_feature (24)..(251): Homolog of NCBI NO: 4586372 NR Description: thaumatin-like protein SE39b [Nicotiana tabacum]
  misc_feature (153)..(255): Homolog of NCBI NO: 25296198 NR Description: protein T10O22.21 [imported] - Arabidopsis
  misc_feature (14)..(123): Homolog of NCBI NO: 25296198 NR Description: protein T10O22.21 [imported] - Arabidopsis
  misc_feature (15)..(256): Homolog of NCBI NO: 21553814 NR Description: thaumatin-like protein [Arabidopsis thaliana]
  misc_feature (9)..(256): Homolog of NCBI NO: 15219508 NR Description: thaumatin-like protein (pathogenesis-related
  misc_feature (14)..(255): Homolog of NCBI NO: 2129751 NR Description: thaumatin-like protein - Arabidopsis thaliana
  misc_feature (14)..(255): Homolog of NCBI NO: 15221033 NR Description: thaumatin-like protein [Arabidopsis thaliana]
  misc_feature (14)..(256): Homolog of NCBI NO: 7442175 NR Description: thaumatin-like protein - turnip
DSESHSCSSGAPSMASLNLFTFAFLLLISHASASTVVFLNKCRYPVWPGIQPSAGQNILAGGGFKLPANKAYTLQLPPLWSGRFWGRHGCTFDRSGRGRCATGDCGGSLTCNGAGGSPPATLAEITLGQELDFYDVSLVDGYNLAMSIMPVKGRGQCSYAGCVSDLNRMCPVGLQVRSRNGKRVLACKSACSAFNSPQYCCTGTFGNPLTCKPTSYSKIFKVACPKAYSYAYDDPTSIATCSKANYIVTFCPHHRR

SEQ ID NO: 109492 - protein, 243 aa, Zea mays subsp. mays
  misc_feature (1)..(243): Ceres Seq. ID no. 15174375
  misc_feature (27)..(239): Pfam Name: Thaumatin family Pfam Description: Thaumatin family
  misc_feature (13)..(239): Homolog of NCBI NO: 6273385 NR Description: SCUTL2 [Vitis vinifera]
  misc_feature (1)..(239): Homolog of NCBI NO: 15222088 NR Description: thaumatin-like protein [Arabidopsis thaliana]
  misc_feature (11)..(238): Homolog of NCBI NO: 4586372 NR Description: thaumatin-like protein SE39b [Nicotiana tabacum]
  misc_feature (140)..(242): Homolog of NCBI NO: 25296198 NR Description: protein T10O22.21 [imported] - Arabidopsis
  misc_feature (1)..(110): Homolog of NCBI NO: 25296198 NR Description: protein T10O22.21 [imported] - Arabidopsis
  misc_feature (2)..(243): Homolog of NCBI NO: 21553814 NR Description: thaumatin-like protein [Arabidopsis thaliana]
  misc_feature (1)..(243): Homolog of NCBI NO: 15219508 NR Description: thaumatin-like protein (pathogenesis-related
  misc_feature (1)..(242): Homolog of NCBI NO: 2129751 NR Description: thaumatin-like protein - Arabidopsis thaliana
  misc_feature (1)..(242): Homolog of NCBI NO: 15221033 NR Description: thaumatin-like protein [Arabidopsis thaliana]
  misc_feature (1)..(243): Homolog of NCBI NO: 7442175 NR Description: thaumatin-like protein - turnip
MASLNLFTFAFLLLISHASASTVVFLNKCRYPVWPGIQPSAGQNILAGGGFKLPANKAYTLQLPPLWSGRFWGRHGCTFDRSGRGRCATGDCGGSLTCNGAGGSPPATLAEITLGQELDFYDVSLVDGYNLAMSIMPVKGRGQCSYAGCVSDLNRMCPVGLQVRSRNGKRVLACKSACSAFNSPQYCCTGTFGNPLTCKPTSYSKIFKVACPKAYSYAYDDPTSIATCSKANYIVTFCPHHRR

SEQ ID NO: 109493 - DNA, 1048 bp, Zea mays subsp. mays
  misc_feature (1)..(1048): Ceres Seq. ID no. 15174333
ctccagttgattagatttctcccactttacactttctcccattctccaccgctctgcgacaatgtcggctgctttcattcccatggatcaatctcagaacaacattctcatggattcccagcctactacttcccccgtgaaaactgtgaaaattagcaatgtttcactcaatgtctccaagaaagatctcaatgagttcttttctttctctggtgacattcactacatcgagatgcgcagtgaaacgcaagaaactcagcttgcttatgttaccttcaaggatccacaaggagcagaaactgctatgctcttaacgggagctgtcattgctgatcatcgtgttagtattactcctgctgtgaactacgacctaccaccagaagcccttgcacttgactcgcaggaatattcatttaatggcttcactgtcaagaaagctgaacatgtggtaagcaccatgatggaaagaggttatgctgttggcaaagacgctatggagaaagccaaagcctttgacgacagacacaacctagtctcaaacgcttcagcaaccattgcctccctcgacaacaagatgggtttgagcgagaagctaagcataggaactaccgtggtgaacgaaaagctgagagaggtggacgagcggtatcaagtgagggagatcacaaaatccgctctagcagctgctgaggagagagcgattagcgcaggaacggctttgatggcgaatccttatgtttcaagcggagcttcgtggctatcaaacgcctttggtgcagtgacaaaggcggttagggctgaggatggaggagagggaagaaaggagattgtccaacttgatgacacgtcacctaaagctcctgctgttgttcctgttaactcagtggacacagacttcaccaaaccaagtttctaaagattgtcttaaactccaattctttgatacatttgctgtgcatatacatgcttacatattcattggtctttcttttattgcacaacataaacataacataaaacctttaaaatgtattttgttgtcacattc

SEQ ID NO: 109494 - protein, 284 aa, Zea mays subsp. mays
  misc_feature (1)..(284): Ceres Seq. ID no. 15174334
  misc_feature (29)..(96): Pfam Name: RNA recognition motif. (a.k.a. RRM, RBD, or RNP domain) Pfam Description: RNA recognition motif. (a.k.a. RRM, RBD, or RNP
  misc_feature (24)..(255): Homolog of NCBI NO: 38347069 NR Description: OSJNBa0006A01.10 [Oryza sativa (japonica
  misc_feature (26)..(261): Homolog of NCBI NO: 38344181 NR Description: OSJNBa0053K19.20 [Oryza sativa (japonica
  misc_feature (28)..(269): Homolog of NCBI NO: 18414951 NR Description: RNA recognition motif (RRM)-containing protein
  misc_feature (26)..(281): Homolog of NCBI NO: 18071362 NR Description: putative splicing regulatory protein
  misc_feature (58)..(272): Homolog of NCBI NO: 30697600 NR Description: RNA recognition motif (RRM)-containing protein
  misc_feature (58)..(272): Homolog of NCBI NO: 25404689 NR Description: unknown protein, 64612-65506 [imported] -
  misc_feature (1)..(245): Homolog of NCBI NO: 26450623 NR Description: unknown protein [Arabidopsis thaliana]
  misc_feature (3)..(272): Homolog of NCBI NO: 30697595 NR Description: RNA recognition motif (RRM)-containing protein
  misc_feature (1)..(272): Homolog of NCBI NO: 18408904 NR Description: RNA recognition motif (RRM)-containing protein
  misc_feature (1)..(272): Homolog of NCBI NO: 30697598 NR Description: RNA recognition motif (RRM)-containing protein
MSAAFIPMDQSQNNILMDSQPTTSPVKTVKISNVSLNVSKKDLNEFFSFSGDIHYIEMRSETQETQLAYVTFKDPQGAETAMLLTGAVIADHRVSITPAVNYDLPPEALALDSQEYSFNGFTVKKAEHVVSTMMERGYAVGKDAMEKAKAFDDRHNLVSNASATIASLDNKMGLSEKLSIGTTVVNEKLREVDERYQVREITKSALAAAEERAISAGTALMANPYVSSGASWLSNAFGAVTKAVRAEDGGEGRKEIVQLDDTSPKAPAVVPVNSVDTDFTKPSF

SEQ ID NO: 109495 - protein, 277 aa, Zea mays subsp. mays
  misc_feature (1)..(277): Ceres Seq. ID no. 15174335
  misc_feature (22)..(89): Pfam Name: RNA recognition motif. (a.k.a. RRM, RBD, or RNP domain) Pfam Description: RNA recognition motif. (a.k.a. RRM, RBD, or RNP
  misc_feature (17)..(248): Homolog of NCBI NO: 38347069 NR Description: OSJNBa0006A01.10 [Oryza sativa (japonica
  misc_feature (19)..(254): Homolog of NCBI NO: 38344181 NR Description: OSJNBa0053K19.20 [Oryza sativa (japonica
  misc_feature (21)..(262): Homolog of NCBI NO: 18414951 NR Description: RNA recognition motif (RRM)-containing protein
  misc_feature (19)..(274): Homolog of NCBI NO: 18071362 NR Description: putative splicing regulatory protein
  misc_feature (51)..(265): Homolog of NCBI NO: 30697600 NR Description: RNA recognition motif (RRM)-containing protein
  misc_feature (51)..(265): Homolog of NCBI NO: 25404689 NR Description: unknown protein, 64612-65506 [imported] -
  misc_feature (1)..(238): Homolog of NCBI NO: 26450623 NR Description: unknown protein [Arabidopsis thaliana]
  misc_feature (1)..(265): Homolog of NCBI NO: 30697595 NR Description: RNA recognition motif (RRM)-containing protein
  misc_feature (1)..(265): Homolog of NCBI NO: 18408904 NR Description: RNA recognition motif (RRM)-containing protein
  misc_feature (1)..(265): Homolog of NCBI NO: 30697598 NR Description: RNA recognition motif (RRM)-containing protein
MDQSQNNILMDSQPTTSPVKTVKISNVSLNVSKKDLNEFFSFSGDIHYIEMRSETQETQLAYVTFKDPQGAETAMLLTGAVIADHRVSITPAVNYDLPPEALALDSQEYSFNGFTVKKAEHVVSTMMERGYAVGKDAMEKAKAFDDRHNLVSNASATIASLDNKMGLSEKLSIGTTVVNEKLREVDERYQVREITKSALAAAEERAISAGTALMANPYVSSGASWLSNAFGAVTKAVRAEDGGEGRKEIVQLDDTSPKAPAVVPVNSVDTDFTKPSF

SEQ ID NO: 109496 - protein, 268 aa, Zea mays subsp. mays
  misc_feature (1)..(268): Ceres Seq. ID no. 15174336
  misc_feature (13)..(80): Pfam Name: RNA recognition motif. (a.k.a. RRM, RBD, or RNP domain) Pfam Description: RNA recognition motif. (a.k.a. RRM, RBD, or RNP
  misc_feature (8)..(239): Homolog of NCBI NO: 38347069 NR Description: OSJNBa0006A01.10 [Oryza sativa (japonica
  misc_feature (10)..(245): Homolog of NCBI NO: 38344181 NR Description: OSJNBa0053K19.20 [Oryza sativa (japonica
  misc_feature (12)..(253): Homolog of NCBI NO: 18414951 NR Description: RNA recognition motif (RRM)-containing protein
  misc_feature (10)..(265): Homolog of NCBI NO: 18071362 NR Description: putative splicing regulatory protein
  misc_feature (42)..(256): Homolog of NCBI NO: 30697600 NR Description: RNA recognition motif (RRM)-containing protein
  misc_feature (42)..(256): Homolog of NCBI NO: 25404689 NR Description: unknown protein, 64612-65506 [imported] -
  misc_feature (1)..(229): Homolog of NCBI NO: 26450623 NR Description: unknown protein [Arabidopsis thaliana]
  misc_feature (1)..(256): Homolog of NCBI NO: 30697595 NR Description: RNA recognition motif (RRM)-containing protein
  misc_feature (1)..(256): Homolog of NCBI NO: 18408904 NR Description: RNA recognition motif (RRM)-containing protein
  misc_feature (1)..(256): Homolog of NCBI NO: 30697598 NR Description: RNA recognition motif (RRM)-containing protein
MDSQPTTSPVKTVKISNVSLNVSKKDLNEFFSFSGDIHYIEMRSETQETQLAYVTFKDPQGAETAMLLTGAVIADHRVSITPAVNYDLPPEALALDSQEYSFNGFTVKKAEHVVSTMMERGYAVGKDAMEKAKAFDDRHNLVSNASATIASLDNKMGLSEKLSIGTTVVNEKLREVDERYQVREITKSALAAAEERAISAGTALMANPYVSSGASWLSNAFGAVTKAVRAEDGGEGRKEIVQLDDTSPKAPAVVPVNSVDTDFTKPSF

SEQ ID NO: 109497 - DNA, 1347 bp, Zea mays subsp. mays
  misc_feature (1)..(1347): Ceres Seq. ID no. 15179513
aacatcctcatagcaattaaacaccactgttctatatataaagctaaacggctttagctttacatgagtttcttgttttttttttaacttatttaaaaaagtcctcacatatatttctagtgataagagggagaggtttctcagcttttgtaatggaggagaagatacaaggacaaaacaagctctctgtaagttctttggatcagaaagtgattgtgagaagaagcttacaagttcaaggatcatcagaggatcaaagatttgtccttgaggaagatacgatgcaacaaagtgaagacctttcttctgttttgtcattcaaagacccaaactttctaagactactctctcttcagacactccaaaagccgccttgggagctcggagactatctcccacatgaagttccagagtttcattcacccaccaactactaccatcagaacccatctctggaaagaatcaatgaagccatctcaagccaagaacttcagttaaacccacaacgcaagcgcagaaacaacaacaacttggtagcagcatcagtgagcagagagaagagaaagagaaagagaacgaaaccaacaaagaacacagaagagatggagagtcagagaatgacgcacataacggttgaacgaaaccgcagacgccaaatgaacgtttatctcagctcactccgctctctcatcccatcttcttacatccttaggggagaccaagcgtcaatagtaggaggagctatagacttcgtgaagctcctcgagcaacagttacaatcactcgaagcgcaaaagataactcaacaaactgataccaaagacatttcgttagaacaaagtagtaaactgagaatcgatgccacggtgatagagagccacgtgaatctcaagatacagtgccagaagaaacaaggacagcttctcagatcaatcatttggttagagaagcttaggttcactgttcttcatctcaacgttacatctccatgcaatgcatctgcctcttattccttcaacctcaaggtacttaagaaaactaataacacaaatgaataaaacaaaaactcaatctcatgtttgttatttctcagatggaggacgactgtactttgacatcggccgatgagataacggcggcggttcgtcagatattggactgctgagttaagaacaagaaacccaaaaagcaaaaaaagtaacgttctttcataataataataagatgttttgttggtatgtaattggagtcttctcggcatggcactttgactttatttaaaagggttactctacagtactggggacaccatttgatagatgtatatcaagtttgaccttcgtattc

SEQ ID NO: 109498 - protein, 301 aa, Zea mays subsp. mays
  misc_feature (1)..(301): Ceres Seq. ID no. 15179514
  misc_feature (154)..(205): Pfam Name: Helix-loop-helix DNA-binding domain Pfam Description: Helix-loop-helix DNA-binding domain
  misc_feature (228)..(292): Homolog of NCBI NO: 30695519 NR Description: bHLH protein family [Arabidopsis thaliana]
  misc_feature (228)..(292): Homolog of NCBI NO: 21618009 NR Description: unknown [Arabidopsis thaliana]
  misc_feature (228)..(292): Homolog of NCBI NO: 18412203 NR Description: bHLH protein family [Arabidopsis thaliana]
  misc_feature (228)..(294): Homolog of NCBI NO: 11282339 NR Description: hypothetical protein F21F14.120 - Arabidopsis
  misc_feature (44)..(225): Homolog of NCBI NO: 18412203 NR Description: bHLH protein family [Arabidopsis thaliana]
  misc_feature (44)..(225): Homolog of NCBI NO: 21618009 NR Description: unknown [Arabidopsis thaliana]
  misc_feature (44)..(225): Homolog of NCBI NO: 30695519 NR Description: bHLH protein family [Arabidopsis thaliana]
  misc_feature (44)..(225): Homolog of NCBI NO: 11282339 NR Description: hypothetical protein F21F14.120 - Arabidopsis
  misc_feature (1)..(65): Homolog of NCBI NO: 15226442 NR Description: bHLH protein family [Arabidopsis thaliana]
  misc_feature (44)..(280): Homolog of NCBI NO: 15226442 NR Description: bHLH protein family [Arabidopsis thaliana]
MEEKIQGQNKLSVSSLDQKVIVRRSLQVQGSSEDQRFVLEEDTMQQSEDLSSVLSFKDPNFLRLLSLQTLQKPPWELGDYLPHEVPEFHSPTNYYHQNPSLERINEAISSQELQLNPQRKRRNNNNLVAASVSREKRKRKRTKPTKNTEEMESQRMTHITVERNRRRQMNVYLSSLRSLIPSSYILRGDQASIVGGAIDFVKLLEQQLQSLEAQKITQQTDTKDISLEQSSKLRIDATVIESHVNLKIQCQKKQGQLLRSIIWLEKLRFTVLHLNVTSPCNASASYSFNLKVLKKTNNTNE

SEQ ID NO: 109499 - protein, 258 aa, Zea mays subsp. mays
  misc_feature (1)..(258): Ceres Seq. ID no. 15179515
  misc_feature (111)..(162): Pfam Name: Helix-loop-helix DNA-binding domain Pfam Description: Helix-loop-helix DNA-binding domain
  misc_feature (185)..(249): Homolog of NCBI NO: 30695519 NR Description: bHLH protein family [Arabidopsis thaliana]
  misc_feature (185)..(249): Homolog of NCBI NO: 18412203 NR Description: bHLH protein family [Arabidopsis thaliana]
  misc_feature (185)..(251): Homolog of NCBI NO: 11282339 NR Description: hypothetical protein F21F14.120 - Arabidopsis
  misc_feature (1)..(182): Homolog of NCBI NO: 18412203 NR Description: bHLH protein family [Arabidopsis thaliana]
  misc_feature (1)..(182): Homolog of NCBI NO: 21618009 NR Description: unknown [Arabidopsis thaliana]
  misc_feature (185)..(249): Homolog of NCBI NO: 21618009 NR Description: unknown [Arabidopsis thaliana]
  misc_feature (1)..(182): Homolog of NCBI NO: 30695519 NR Description: bHLH protein family [Arabidopsis thaliana]
  misc_feature (1)..(182): Homolog of NCBI NO: 11282339 NR Description: hypothetical protein F21F14.120 - Arabidopsis
  misc_feature (1)..(22): Homolog of NCBI NO: 15226442 NR Description: bHLH protein family [Arabidopsis thaliana]
  misc_feature (1)..(237): Homolog of NCBI NO: 15226442 NR Description: bHLH protein family [Arabidopsis thaliana]
MQQSEDLSSVLSFKDPNFLRLLSLQTLQKPPWELGDYLPHEVPEFHSPTNYYHQNPSLERINEAISSQELQLNPQRKRRNNNNLVAASVSREKRKRKRTKPTKNTEEMESQRMTHITVERNRRRQMNVYLSSLRSLIPSSYILRGDQASIVGGAIDFVKLLEQQLQSLEAQKITQQTDTKDISLEQSSKLRIDATVIESHVNLKIQCQKKQGQLLRSIIWLEKLRFTVLHLNVTSPCNASASYSFNLKVLKKTNNTNE

SEQ ID NO: 109500 - protein, 151 aa, Zea mays subsp. mays
  misc_feature (1)..(151): Ceres Seq. ID no. 15179516
  misc_feature (4)..(55): Pfam Name: Helix-loop-helix DNA-binding domain Pfam Description: Helix-loop-helix DNA-binding domain
  misc_feature (1)..(92): Homolog of NCBI NO: 15234187 NR Description: bHLH protein family [Arabidopsis thaliana]
  misc_feature (78)..(142): Homolog of NCBI NO: 30695519 NR Description: bHLH protein family [Arabidopsis thaliana]
  misc_feature (78)..(142): Homolog of NCBI NO: 21618009 NR Description: unknown [Arabidopsis thaliana]
  misc_feature (78)..(142): Homolog of NCBI NO: 18412203 NR Description: bHLH protein family [Arabidopsis thaliana]
  misc_feature (78)..(144): Homolog of NCBI NO: 11282339 NR Description: hypothetical protein F21F14.120 - Arabidopsis
  misc_feature (1)..(75): Homolog of NCBI NO: 18412203 NR Description: bHLH protein family [Arabidopsis thaliana]
  misc_feature (1)..(75): Homolog of NCBI NO: 30695519 NR Description: bHLH protein family [Arabidopsis thaliana]
  misc_feature (1)..(75): Homolog of NCBI NO: 21618009 NR Description: unknown [Arabidopsis thaliana]
  misc_feature (1)..(75): Homolog of NCBI NO: 11282339 NR Description: hypothetical protein F21F14.120 - Arabidopsis
  misc_feature (1)..(130): Homolog of NCBI NO: 15226442 NR Description: bHLH protein family [Arabidopsis thaliana]
MESQRMTHITVERNRRRQMNVYLSSLRSLIPSSYILRGDQASIVGGAIDFVKLLEQQLQSLEAQKITQQTDTKDISLEQSSKLRIDATVIESHVNLKIQCQKKQGQLLRSIIWLEKLRFTVLHLNVTSPCNASASYSFNLKVLKKTNNTNE

SEQ ID NO: 109501 - DNA, 813 bp, Zea mays subsp. mays
  misc_feature (1)..(813): Ceres Seq. ID no. 14309260
agagatgtgtacgttggagaagcgtggtcaactcttcttgctgaaactcaccggcgacggcgaacaccgtctcaaccccaccttactcgacagcatcacctccgccatcacacagatccgttccgatccctcctcctcccaatcggtcctcatcacaacctccgacggcaaattcttctccaacggctacgatctcgccttggccgagtccaatccttctctccgccctgtcatggactccaaactccgatccctggtcgccgacctcatctccctccctatgccgacgatcgccgccgtgaccggccacgcctccgccgcggggttcgttctcgcgatgagccacgactatgtactgatgcgtagggatagagggtttttgtatatgagtgagttggacatcgagcttgtgattcctccgtggtttgcggcgatgatacggatgaagatcggttctcccgcggcgaggagagatgtgatgctgacggcggagaaggttacggcggagcggggtttggagatgggaatcgtggattctagttatggtagtgcggcggagacggttgaaggcgccgttaagttgggggaggagttagttagacgcgatgttgatggacacgtgtacggtgggatgagagaggctcttttaaaacaggttctccacacgattggttcaaatgagagcgtttccaatagaatgcgaaacagtggatctaaactgtaggttttttttttgtcaagtgtaggttgttcaaccacgaatataatttgtacgagttgataaaataaaaaataaaataaaaaatagagacc

SEQ ID NO: 109502 - protein, 240 aa, Zea mays subsp. mays
  misc_feature (1)..(240): Ceres Seq. ID no. 14309261
  misc_feature (14)..(182): Pfam Name: Enoyl-CoA hydratase/isomerase family Pfam Description: Enoyl-CoA hydratase/isomerase family
  misc_feature (7)..(209): Homolog of NCBI NO: 24214965 NR Description: enoyl-CoA hydratase
  misc_feature (4)..(239): Homolog of NCBI NO: 40739395 NR Description: hypothetical protein AN6767.2 [Aspergillus
  misc_feature (10)..(202): Homolog of NCBI NO: 15828352 NR Description: possible enoyl-CoA hydratase [Mycobacterium
  misc_feature (8)..(234): Homolog of NCBI NO: 32404374 NR Description: hypothetical protein ( hypothetical protein
  misc_feature (2)..(180): Homolog of NCBI NO: 23017142 NR Description: hypothetical protein [Thermobifida fusca]
  misc_feature (2)..(215): Homolog of NCBI NO: 34903766 NR Description: unnamed protein product [Oryza sativa (japonica
  misc_feature (2)..(223): Homolog of NCBI NO: 15236499 NR Description: enoyl-CoA hydratase/isomerase family [Arabidopsis
  misc_feature (2)..(224): Homolog of NCBI NO: 15236498 NR Description: enoyl-CoA hydratase/isomerase family [Arabidopsis
  misc_feature (2)..(224): Homolog of NCBI NO: 21555734 NR Description: carnitine racemase like protein [Arabidopsis
  misc_feature (2)..(240): Homolog of NCBI NO: 15218713 NR Description: enoyl-CoA hydratase/isomerase family [Arabidopsis
EMCTLEKRGQLFLLKLTGDGEHRLNPTLLDSITSAITQIRSDPSSSQSVLITTSDGKFFSNGYDLALAESNPSLRPVMDSKLRSLVADLISLPMPTIAAVTGHASAAGFVLAMSHDYVLMRRDRGFLYMSELDIELVIPPWFAAMIRMKIGSPAARRDVMLTAEKVTAERGLEMGIVDSSYGSAAETVEGAVKLGEELVRRDVDGHVYGGMREALLKQVLHTIGSNESVSNRMRNSGSKL

SEQ ID NO: 109503 - protein, 239 aa, Zea mays subsp. mays
  misc_feature (1)..(239): Ceres Seq. ID no. 14309262
  misc_feature (13)..(181): Pfam Name: Enoyl-CoA hydratase/isomerase family Pfam Description: Enoyl-CoA hydratase/isomerase family
  misc_feature (6)..(208): Homolog of NCBI NO: 24214965 NR Description: enoyl-CoA hydratase
  misc_feature (3)..(238): Homolog of NCBI NO: 40739395 NR Description: hypothetical protein AN6767.2 [Aspergillus
  misc_feature (9)..(201): Homolog of NCBI NO: 15828352 NR Description: possible enoyl-CoA hydratase [Mycobacterium
  misc_feature (7)..(233): Homolog of NCBI NO: 32404374 NR Description: hypothetical protein ( hypothetical protein
  misc_feature (1)..(179): Homolog of NCBI NO: 23017142 NR Description: hypothetical protein [Thermobifida fusca]
  misc_feature (1)..(214): Homolog of NCBI NO: 34903766 NR Description: unnamed protein product [Oryza sativa (japonica
  misc_feature (1)..(222): Homolog of NCBI NO: 15236499 NR Description: enoyl-CoA hydratase/isomerase family [Arabidopsis
  misc_feature (1)..(223): Homolog of NCBI NO: 15236498 NR Description: enoyl-CoA hydratase/isomerase family [Arabidopsis
  misc_feature (1)..(223): Homolog of NCBI NO: 21555734 NR Description: carnitine racemase like protein [Arabidopsis
  misc_feature (1)..(239): Homolog of NCBI NO: 15218713 NR Description: enoyl-CoA hydratase/isomerase family [Arabidopsis
MCTLEKRGQLFLLKLTGDGEHRLNPTLLDSITSAITQIRSDPSSSQSVLITTSDGKFFSNGYDLALAESNPSLRPVMDSKLRSLVADLISLPMPTIAAVTGHASAAGFVLAMSHDYVLMRRDRGFLYMSELDIELVIPPWFAAMIRMKIGSPAARRDVMLTAEKVTAERGLEMGIVDSSYGSAAETVEGAVKLGEELVRRDVDGHVYGGMREALLKQVLHTIGSNESVSNRMRNSGSKL

SEQ ID NO: 109504 - protein, 163 aa, Zea mays subsp. mays
  misc_feature (1)..(163): Ceres Seq. ID no. 14309263
  misc_feature (1)..(105): Pfam Name: Enoyl-CoA hydratase/isomerase family Pfam Description: Enoyl-CoA hydratase/isomerase family
  misc_feature (1)..(132): Homolog of NCBI NO: 24214965 NR Description: enoyl-CoA hydratase
  misc_feature (1)..(162): Homolog of NCBI NO: 40739395 NR Description: hypothetical protein AN6767.2 [Aspergillus
  misc_feature (1)..(125): Homolog of NCBI NO: 15828352 NR Description: possible enoyl-CoA hydratase [Mycobacterium
  misc_feature (1)..(157): Homolog of NCBI NO: 32404374 NR Description: hypothetical protein ( hypothetical protein
  misc_feature (1)..(103): Homolog of NCBI NO: 23017142 NR Description: hypothetical protein [Thermobifida fusca]
  misc_feature (1)..(138): Homolog of NCBI NO: 34903766 NR Description: unnamed protein product [Oryza sativa (japonica
  misc_feature (1)..(146): Homolog of NCBI NO: 15236499 NR Description: enoyl-CoA hydratase/isomerase family [Arabidopsis
  misc_feature (1)..(147): Homolog of NCBI NO: 15236498 NR Description: enoyl-CoA hydratase/isomerase family [Arabidopsis
  misc_feature (1)..(147): Homolog of NCBI NO: 21555734 NR Description: carnitine racemase like protein [Arabidopsis
  misc_feature (1)..(163): Homolog of NCBI NO: 15218713 NR Description: enoyl-CoA hydratase/isomerase family [Arabidopsis
MDSKLRSLVADLISLPMPTIAAVTGHASAAGFVLAMSHDYVLMRRDRGFLYMSELDIELVIPPWFAAMIRMKIGSPAARRDVMLTAEKVTAERGLEMGIVDSSYGSAAETVEGAVKLGEELVRRDVDGHVYGGMREALLKQVLHTIGSNESVSNRMRNSGSKL

SEQ ID NO: 109505 - DNA, 1049 bp, Zea mays subsp. mays
  misc_feature (1)..(1049): Ceres Seq. ID no. 14309256
aagattacagaggcgatggcgattaacggcgaagatcgcatctccggcgaacgcccgatcatcatggtcaccaacgacgacgggatagacgcgcctggtctccgttctctcgttcgcgtcctcgtctccaccaacctctacgacgtccgcgtctgcgctcccgattcggagaagtctgctgttagtcacagtatcatatggagtagacctctcactgcacaccgtgttgagattgaaggagctgaggcctatgctgtttctggaacccctgcggattgcactgggttgggcttatcggaagcgctcttcccttctcttcctgacctggttcttagtggtataaacgttggtagcaactgtggctacaacatcgtctactctggaactgttgctggtgctcgtgaagccttcatttatgatgtgccttctgcctccatatcttatgattggaaacgtggagacatcaatgttaatgattttgttctctctgcccaagcttgcttgcctattatcaacggcatgctcagtgccatcaagaacaaaactcacccaacaaactgctttctgaacattgatttgcctactgatattgctaaccataagggatacaagctaactacacaaggtaaaagcttgggtaaaatgggttggagacaagtggaggaggaagcacaaggtgcgaagatgttgtcaacaatgtcaatggaaacagattcaggagtagtctcagacaacaacgacacttctgctcatcattcaaacgatagccgtttgttcaagagagagctaaggactgtggtggtggaagaaggcactgatcttcactttctgcgagaaggatatattacagtgacgccgataggagctctctctcaggttgatgtggattgccaaaactactacaaagaatggcttcccaagatttcttcatccttgtgatttcaccaaatgaaaacataaaactcttgtgatgatttatccattatggaccacagtttgtggtagacctattatcagtactcttttaagttattagctagttttcttgc

SEQ ID NO: 109506 - protein, 312 aa, Zea mays subsp. mays
  misc_feature (1)..(312): Ceres Seq. ID no. 14309257
  misc_feature (19)..(217): Pfam Name: Survival protein SurE Pfam Description: Survival protein SurE
  misc_feature (21)..(210): Homolog of NCBI NO: 15791661 NR Description: SurE protein homolog [Campylobacter jejuni]
  misc_feature (21)..(226): Homolog of NCBI NO: 23475842 NR Description: hypothetical protein [Desulfovibrio desulfuricans
  misc_feature (209)..(311): Homolog of NCBI NO: 25406225 NR Description: hypothetical protein F3N23.8 [imported] -
  misc_feature (11)..(124): Homolog of NCBI NO: 25406225 NR Description: hypothetical protein F3N23.8 [imported] -
  misc_feature (144)..(267): Homolog of NCBI NO: 25406225 NR Description: hypothetical protein F3N23.8 [imported] -
  misc_feature (11)..(267): Homolog of NCBI NO: 15218620 NR Description: expressed protein [Arabidopsis thaliana]
  misc_feature (19)..(308): Homolog of NCBI NO: 33146601 NR Description: putative stationary phase survival protein SurE
  misc_feature (125)..(201): Homolog of NCBI NO: 7485145 NR Description: hypothetical protein - Arabidopsis thaliana
  misc_feature (6)..(124): Homolog of NCBI NO: 7485145 NR Description: hypothetical protein - Arabidopsis thaliana
  misc_feature (6)..(310): Homolog of NCBI NO: 18414342 NR Description: expressed protein [Arabidopsis thaliana]
KITEAMAINGEDRISGERPIIMVTNDDGIDAPGLRSLVRVLVSTNLYDVRVCAPDSEKSAVSHSIIWSRPLTAHRVEIEGAEAYAVSGTPADCTGLGLSEALFPSLPDLVLSGINVGSNCGYNIVYSGTVAGAREAFIYDVPSASISYDWKRGDINVNDFVLSAQACLPIINGMLSAIKNKTHPTNCFLNIDLPTDIANHKGYKLTTQGKSLGKMGWRQVEEEAQGAKMLSTMSMETDSGVVSDNNDTSAHHSNDSRLFKRELRTVVVEEGTDLHFLREGYITVTPIGALSQVDVDCQNYYKEWLPKISSSL

SEQ ID NO: 109507 - protein, 307 aa, Zea mays subsp. mays
  misc_feature (1)..(307): Ceres Seq. ID no. 14309258
  misc_feature (14)..(212): Pfam Name: Survival protein SurE Pfam Description: Survival protein SurE
  misc_feature (16)..(205): Homolog of NCBI NO: 15791661 NR Description: SurE protein homolog [Campylobacter jejuni]
  misc_feature (16)..(221): Homolog of NCBI NO: 23475842 NR Description: hypothetical protein [Desulfovibrio desulfuricans
  misc_feature (204)..(306): Homolog of NCBI NO: 25406225 NR Description: hypothetical protein F3N23.8 [imported] -
  misc_feature (6)..(119): Homolog of NCBI NO: 25406225 NR Description: hypothetical protein F3N23.8 [imported] -
  misc_feature (139)..(262): Homolog of NCBI NO: 25406225 NR Description: hypothetical protein F3N23.8 [imported] -
  misc_feature (6)..(262): Homolog of NCBI NO: 15218620 NR Description: expressed protein [Arabidopsis thaliana]
  misc_feature (14)..(303): Homolog of NCBI NO: 33146601 NR Description: putative stationary phase survival protein SurE
  misc_feature (120)..(196): Homolog of NCBI NO: 7485145 NR Description: hypothetical protein - Arabidopsis thaliana
  misc_feature (1)..(119): Homolog of NCBI NO: 7485145 NR Description: hypothetical protein - Arabidopsis thaliana
  misc_feature (1)..(305): Homolog of NCBI NO: 18414342 NR Description: expressed protein [Arabidopsis thaliana]
MAINGEDRISGERPIIMVTNDDGIDAPGLRSLVRVLVSTNLYDVRVCAPDSEKSAVSHSIIWSRPLTAHRVEIEGAEAYAVSGTPADCTGLGLSEALFPSLPDLVLSGINVGSNCGYNIVYSGTVAGAREAFIYDVPSASISYDWKRGDINVNDFVLSAQACLPIINGMLSAIKNKTHPTNCFLNIDLPTDIANHKGYKLTTQGKSLGKMGWRQVEEEAQGAKMLSTMSMETDSGVVSDNNDTSAHHSNDSRLFKRELRTVVVEEGTDLHFLREGYITVTPIGALSQVDVDCQNYYKEWLPKISSSL

SEQ ID NO: 109508 - protein, 291 aa, Zea mays subsp. mays
  misc_feature (1)..(291): Ceres Seq. ID no. 14309259
  misc_feature (1)..(196): Pfam Name: Survival protein SurE Pfam Description: Survival protein SurE
  misc_feature (1)..(189): Homolog of NCBI NO: 15791661 NR Description: SurE protein homolog [Campylobacter jejuni]
  misc_feature (1)..(205): Homolog of NCBI NO: 23475842 NR Description: hypothetical protein [Desulfovibrio desulfuricans
  misc_feature (188)..(290): Homolog of NCBI NO: 25406225 NR Description: hypothetical protein F3N23.8 [imported] -
  misc_feature (1)..(103): Homolog of NCBI NO: 25406225 NR Description: hypothetical protein F3N23.8 [imported] -
  misc_feature (123)..(246): Homolog of NCBI NO: 25406225 NR Description: hypothetical protein F3N23.8 [imported] -
  misc_feature (1)..(246): Homolog of NCBI NO: 15218620 NR Description: expressed protein [Arabidopsis thaliana]
  misc_feature (1)..(287): Homolog of NCBI NO: 33146601 NR Description: putative stationary phase survival protein SurE
  misc_feature (104)..(180): Homolog of NCBI NO: 7485145 NR Description: hypothetical protein - Arabidopsis thaliana
  misc_feature (1)..(103): Homolog of NCBI NO: 7485145 NR Description: hypothetical protein - Arabidopsis thaliana
  misc_feature (1)..(289): Homolog of NCBI NO: 18414342 NR Description: expressed protein [Arabidopsis thaliana]
MVTNDDGIDAPGLRSLVRVLVSTNLYDVRVCAPDSEKSAVSHSIIWSRPLTAHRVEIEGAEAYAVSGTPADCTGLGLSEALFPSLPDLVLSGINVGSNCGYNIVYSGTVAGAREAFIYDVPSASISYDWKRGDINVNDFVLSAQACLPIINGMLSAIKNKTHPTNCFLNIDLPTDIANHKGYKLTTQGKSLGKMGWRQVEEEAQGAKMLSTMSMETDSGVVSDNNDTSAHHSNDSRLFKRELRTVVVEEGTDLHFLREGYITVTPIGALSQVDVDCQNYYKEWLPKISSSL

SEQ ID NO: 109509 - DNA, 1342 bp, Zea mays subsp. mays
  misc_feature (1)..(1342): Ceres Seq. ID no. 15179486
  misc_feature: MA Experiment ID: 108504 Result: Up-regulated in Transcription
  misc_feature: MA Experiment 108504 PARAMETER Experiment Name: Zm_Drought_P Parameter: Age (day) Value: 8
  misc_feature: MA Experiment 108504 PARAMETER Experiment Name: Zm_Drought_P Parameter: Organism Value: Zea mays
  misc_feature: MA Experiment 108504 PARAMETER Experiment Name: Zm_Drought_P Parameter: Plant Line Value: 35A19
  misc_feature: MA Experiment 108504 PARAMETER Experiment Name: Zm_Drought_P Parameter: Timepoint (hr) Value: 12
  misc_feature: MA Experiment 108504 PARAMETER Experiment Name: Zm_Drought_P Parameter: Tissue Value: Aerial
  misc_feature: MA Experiment 108504 PARAMETER Experiment Name: Zm_Drought_P Parameter: Treatment Value: Drought vs. No Drought
  misc_feature: MA Experiment ID: 108523 Result: Up-regulated in Transcription
  misc_feature: MA Experiment 108523 PARAMETER Experiment Name: Zm_42deg_Heat_P Parameter: Age (day) Value: 8
  misc_feature: MA Experiment 108523 PARAMETER Experiment Name: Zm_42deg_Heat_P Parameter: Organism Value: Zea mays
  misc_feature: MA Experiment 108523 PARAMETER Experiment Name: Zm_42deg_Heat_P Parameter: Plant Line Value: 35A19
  misc_feature: MA Experiment 108523 PARAMETER Experiment Name: Zm_42deg_Heat_P Parameter: Temperature (deg C) Value: 42 vs. 22
  misc_feature: MA Experiment 108523 PARAMETER Experiment Name: Zm_42deg_Heat_P Parameter: Timepoint (hr) Value: 6
  misc_feature: MA Experiment 108523 PARAMETER Experiment Name: Zm_42deg_Heat_P Parameter: Tissue Value: Aerial
  misc_feature: MA Experiment ID: 108529 Result: Up-regulated in Transcription
  misc_feature: MA Experiment 108529 PARAMETER Experiment Name: Zm_Imbibed_Seeds_P Parameter: Age (day) Value: 5 vs. 2
  misc_feature: MA Experiment 108529 PARAMETER Experiment Name: Zm_Imbibed_Seeds_P Parameter: Organism Value: Zea mays
  misc_feature: MA Experiment 108529 PARAMETER Experiment Name: Zm_Imbibed_Seeds_P Parameter: Plant Line Value: 35A19
  misc_feature: MA Experiment 108529 PARAMETER Experiment Name: Zm_Imbibed_Seeds_P Parameter: Tissue Value: Roots vs. Embryo
  misc_feature: MA Experiment ID: 108556 Result: Up-regulated in Transcription
  misc_feature: MA Experiment 108556 PARAMETER Experiment Name: Zm_Drought_P Parameter: Age (day) Value: 9
  misc_feature: MA Experiment 108556 PARAMETER Experiment Name: Zm_Drought_P Parameter: Organism Value: Zea mays
  misc_feature: MA Experiment 108556 PARAMETER Experiment Name: Zm_Drought_P Parameter: Plant Line Value: 35A19
  misc_feature: MA Experiment 108556 PARAMETER Experiment Name: Zm_Drought_P Parameter: Timepoint (hr) Value: 24
  misc_feature: MA Experiment 108556 PARAMETER Experiment Name: Zm_Drought_P Parameter: Tissue Value: Aerial
  misc_feature: MA Experiment 108556 PARAMETER Experiment Name: Zm_Drought_P Parameter: Treatment Value: Drought vs. No Drought
  misc_feature: MA Experiment ID: 108597 Result: Up-regulated in Transcription
  misc_feature: MA Experiment 108597 PARAMETER Experiment Name: Zm_100uM_ABA_P Parameter: Age (day) Value: 9
  misc_feature: MA Experiment 108597 PARAMETER Experiment Name: Zm_100uM_ABA_P Parameter: Organism Value: Zea mays
  misc_feature: MA Experiment 108597 PARAMETER Experiment Name: Zm_100uM_ABA_P Parameter: Plant Line Value: 35A19
  misc_feature: MA Experiment 108597 PARAMETER Experiment Name: Zm_100uM_ABA_P Parameter: Timepoint (hr) Value: 24
  misc_feature: MA Experiment 108597 PARAMETER Experiment Name: Zm_100uM_ABA_P Parameter: Tissue Value: Aerial
  misc_feature: MA Experiment 108597 PARAMETER Experiment Name: Zm_100uM_ABA_P Parameter: Treatment Value: 100uM ABA vs. No Treatment
  misc_feature: MA Experiment ID: 20000480 Result: Up-regulated in Transcription
  misc_feature: MA Experiment 20000480 PARAMETER Experiment Name: Zm_Drought_P Parameter: Age (day) Value: 11
  misc_feature: MA Experiment 20000480 PARAMETER Experiment Name: Zm_Drought_P Parameter: Organism Value: Zea mays
  misc_feature: MA Experiment 20000480 PARAMETER Experiment Name: Zm_Drought_P Parameter: Plant Line Value: 35A19
  misc_feature: MA Experiment 20000480 PARAMETER Experiment Name: Zm_Drought_P Parameter: Timepoint (hr) Value: 72
  misc_feature: MA Experiment 20000480 PARAMETER Experiment Name: Zm_Drought_P Parameter: Tissue Value: Aerial
  misc_feature: MA Experiment 20000480 PARAMETER Experiment Name: Zm_Drought_P Parameter: Treatment Value: Drought vs. No Drought
  misc_feature: MA Experiment ID: 20000534 Result: Down-regulated in Transcription
  misc_feature: MA Experiment 20000534 PARAMETER Experiment Name: Zm_Hybrid_Pollen_P Parameter: Age (day) Value: 8
  misc_feature: MA Experiment 20000534 PARAMETER Experiment Name: Zm_Hybrid_Pollen_P Parameter: Organism Value: Zea mays
  misc_feature: MA Experiment 20000534 PARAMETER Experiment Name: Zm_Hybrid_Pollen_P Parameter: Plant Line Value: 35A19
  misc_feature: MA Experiment 20000534 PARAMETER Experiment Name: Zm_Hybrid_Pollen_P Parameter: Tissue Value: Pollen vs. Aerial
  misc_feature: MA Experiment ID: 20000535 Result: Down-regulated in Transcription
  misc_feature: MA Experiment 20000535 PARAMETER Experiment Name: Zm_Hybrid_Seed_Dev_P Parameter: DAP Value: 30 vs. 12
  misc_feature: MA Experiment 20000535 PARAMETER Experiment Name: Zm_Hybrid_Seed_Dev_P Parameter: Organism Value: Zea mays
  misc_feature: MA Experiment 20000535 PARAMETER Experiment Name: Zm_Hybrid_Seed_Dev_P Parameter: Plant Line Value: 35A19
  misc_feature: MA Experiment 20000535 PARAMETER Experiment Name: Zm_Hybrid_Seed_Dev_P Parameter: Tissue Value: Embryo vs. Unfert Floret
atcgcgaaagcgagcgcgaggcgagtcggccggcgaagggggcggatggcgcgcgggctgcgcggcgtccgcgacgacctatccgagctggggcgccacctgctcgacatcgcctgcttcctgcacccgctcctcaacccggcccacaccgactccccgccacccacccccacgggccgccgccgcccgcgccgctccccgtccccgcaccccgccgcgccgccgtcaccgtcgctcctcgcgggcatcctctccgacctcgccgagatcggcggctccttccgcggcggcttctcccgctcctcgccggcgcccgaccaccccgcccccgacgcgctcgagtcacagcaggccgcctcgtccccgtccccgcgtccgcctcctcctgctgctgccgaccagatcgcagatgatgtcgtgggagcagcgcgtgccctcgccgcgcggcccgaggcgtggatcgacttccccgtgctcgccctagatgagggttctgtaatttctggtatccaaagagatcatatggaatccattgaaaaacttgtcccagatttagcatctctacggggtaggctctgtccttcttacatggatgaagacatattctggaagatttactttaggttgcttgagtcaaacataaatgagcatagttctgaggaagatatccggagcgtgccaaattctgtacatcacaacaatgagatagagtctgattctccacctcacgtctgtgagatagaaagtgtgaaaagcaaccaagaagggtaccaatcttcggatggtcgtgctttccccaagacaagatctgagcgaagcattgaccaatgggtatttgcaaaatcaaaatctgaagaaagcatggatcagtggtctgaaataccttcagatgtggaatccttcagagaaggtaaaaggtacctcagtagcgaggagctgagtgacgttgatagtgccaacgttgttgtcatggacaaatacatggattcactcctctctgaccggaggaaccttccctacgctagctcctcggtgcgccgggattcagtcagacgaaaacctgcttcgtccgccgattacagccgccgacctccgcagccaactccacctgcatcgctgtcaaagaaggaatcgtgggatgtcattgaagattcggagttcgatatacttgacagttagtaattgagatctttgcgatctcaaggctgtttatccttctattttcttccatgtttccccacacttcacctcgtttgtaaatgtggacgtgcaggtggcgtcagtgatagtgggaaaggactaatgttctttttaccaatatattataacagtgtgtgcatat

SEQ ID NO: 109510 - protein, 392 aa, Zea mays subsp. mays
  misc_feature (1)..(392): Ceres Seq. ID no. 15179487
  misc_feature (165)..(210): Pfam Name: BSD domain Pfam Description: BSD domain
  misc_feature (135)..(230): Homolog of NCBI NO: 28273391 NR Description: putative BSD domain containing protein
  misc_feature (21)..(158): Homolog of NCBI NO: 6573740 NR Description: F20B24.15 [Arabidopsis thaliana]
  misc_feature (21)..(219): Homolog of NCBI NO: 15229611 NR Description: expressed protein [Arabidopsis thaliana]
  misc_feature (21)..(219): Homolog of NCBI NO: 18391195 NR Description: expressed protein [Arabidopsis thaliana]
  misc_feature (22)..(349): Homolog of NCBI NO: 34909848 NR Description: OSJNBb0053G03.5 [Oryza sativa (japonica
  misc_feature (22)..(102): Homolog of NCBI NO: 28273391 NR Description: putative BSD domain containing protein
  misc_feature (21)..(219): Homolog of NCBI NO: 21555533 NR Description: unknown [Arabidopsis thaliana]
  misc_feature (21)..(218): Homolog of NCBI NO: 18425006 NR Description: expressed protein [Arabidopsis thaliana]
  misc_feature (52)..(317): Homolog of NCBI NO: 18396945 NR Description: expressed protein [Arabidopsis thaliana]
  misc_feature (16)..(351): Homolog of NCBI NO: 34898448 NR Description: hypothetical protein [Oryza sativa (japonica
IAKASARRVGRRRGRMARGLRGVRDDLSELGRHLLDIACFLHPLLNPAHTDSPPPTPTGRRRPRRSPSPHPAAPPSPSLLAGILSDLAEIGGSFRGGFSRSSPAPDHPAPDALESQQAASSPSPRPPPPAAADQIADDVVGAARALAARPEAWIDFPVLALDEGSVISGIQRDHMESIEKLVPDLASLRGRLCPSYMDEDIFWKIYFRLLESNINEHSSEEDIRSVPNSVHHNNEIESDSPPHVCEIESVKSNQEGYQSSDGRAFPKTRSERSIDQWVFAKSKSEESMDQWSEIPSDVESFREGKRYLSSEELSDVDSANVVVMDKYMDSLLSDRRNLPYASSSVRRDSVRRKPASSADYSRRPPQPTPPASLSKKESWDVIEDSEFDILDS

SEQ ID NO: 109511 - protein, 377 aa, Zea mays subsp. mays
  misc_feature (1)..(377): Ceres Seq. ID no. 15179488
  misc_feature (150)..(195): Pfam Name: BSD domain Pfam Description: BSD domain
  misc_feature (6)..(143): Homolog of NCBI NO: 6573740 NR Description: F20B24.15 [Arabidopsis thaliana]
  misc_feature (37)..(302): Homolog of NCBI NO: 18396945 NR Description: expressed protein [Arabidopsis thaliana]
  misc_feature (6)..(204): Homolog of NCBI NO: 15229611 NR Description: expressed protein [Arabidopsis thaliana]
  misc_feature (6)..(203): Homolog of NCBI NO: 18425006 NR Description: expressed protein [Arabidopsis thaliana]
  misc_feature (6)..(204): Homolog of NCBI NO: 18391195 NR Description: expressed protein [Arabidopsis thaliana]
  misc_feature (6)..(204): Homolog of NCBI NO: 21555533 NR Description: unknown [Arabidopsis thaliana]
  misc_feature (7)..(334): Homolog of NCBI NO: 34909848 NR Description: OSJNBb0053G03.5 [Oryza sativa (japonica
  misc_feature (7)..(87): Homolog of NCBI NO: 28273391 NR Description: putative BSD domain containing protein
  misc_feature (120)..(215): Homolog of NCBI NO: 28273391 NR Description: putative BSD domain containing protein
  misc_feature (1)..(336): Homolog of NCBI NO: 34898448 NR Description: hypothetical protein [Oryza sativa (japonica
MARGLRGVRDDLSELGRHLLDIACFLHPLLNPAHTDSPPPTPTGRRRPRRSPSPHPAAPPSPSLLAGILSDLAEIGGSFRGGFSRSSPAPDHPAPDALESQQAASSPSPRPPPPAAADQIADDVVGAARALAARPEAWIDFPVLALDEGSVISGIQRDHMESIEKLVPDLASLRGRLCPSYMDEDIFWKIYFRLLESNINEHSSEEDIRSVPNSVHHNNEIESDSPPHVCEIESVKSNQEGYQSSDGRAFPKTRSERSIDQWVFAKSKSEESMDQWSEIPSDVESFREGKRYLSSEELSDVDSANVVVMDKYMDSLLSDRRNLPYASSSVRRDSVRRKPASSADYSRRPPQPTPPASLSKKESWDVIEDSEFDILDS

SEQ ID NO: 109512 - protein, 218 aa, Zea mays subsp. mays
  misc_feature (1)..(218): Ceres Seq. ID no. 15179489
  misc_feature (1)..(36): Pfam Name: BSD domain Pfam Description: BSD domain
  misc_feature (1)..(46): Homolog of NCBI NO: 25411374 NR Description: hypothetical protein At2g10950 [imported] -
  misc_feature (1)..(45): Homolog of NCBI NO: 6573740 NR Description: F20B24.15 [Arabidopsis thaliana]
  misc_feature (1)..(143): Homolog of NCBI NO: 18396945 NR Description: expressed protein [Arabidopsis thaliana]
  misc_feature (1)..(45): Homolog of NCBI NO: 15229611 NR Description: expressed protein [Arabidopsis thaliana]
  misc_feature (1)..(44): Homolog of NCBI NO: 18425006 NR Description: expressed protein [Arabidopsis thaliana]
  misc_feature (1)..(45): Homolog of NCBI NO: 18391195 NR Description: expressed protein [Arabidopsis thaliana]
  misc_feature (1)..(45): Homolog of NCBI NO: 21555533 NR Description: unknown [Arabidopsis thaliana]
  misc_feature (1)..(175): Homolog of NCBI NO: 34909848 NR Description: OSJNBb0053G03.5 [Oryza sativa (japonica
  misc_feature (1)..(56): Homolog of NCBI NO: 28273391 NR Description: putative BSD domain containing protein
  misc_feature (1)..(177): Homolog of NCBI NO: 34898448 NR Description: hypothetical protein [Oryza sativa (japonica
MESIEKLVPDLASLRGRLCPSYMDEDIFWKIYFRLLESNINEHSSEEDIRSVPNSVHHNNEIESDSPPHVCEIESVKSNQEGYQSSDGRAFPKTRSERSIDQWVFAKSKSEESMDQWSEIPSDVESFREGKRYLSSEELSDVDSANVVVMDKYMDSLLSDRRNLPYASSSVRRDSVRRKPASSADYSRRPPQPTPPASLSKKESWDVIEDSEFDILDS

SEQ ID NO: 109513 - DNA, 1205 bp, Zea mays subsp. mays
  misc_feature (1)..(1205): Ceres Seq. ID no. 14309252
cttcgattcgattcgtttcttcttcattcgacgccaaaaaaaacctaagtgctctgctgcaaactctttgttcctcagcgagaagaaaatctataaccaagagattggtttcaccgatctctctttctctatatctcctcgctgggtacggtctgtttaaaatcaaatctcaatgtcgtggaggaggattctccataatcactaggctctcttaccttctcaatctcatgctcacattctcttccttgtctatggcgtttactctcacctctcaaaagctctgcgtctttggccctgtgttgaatccttctttcccttactgcatcgccaatcactcctctgcctcccgttaattcatttacacaactcttgcctccttcaggctctactctcgatattttacttgtggtaccttctttacacattcctgtgagtctctactttaactgaagctcaagacctataatgatccaagaccagcctcttgttgtattctccctccggcgcaactctttcagacgccgatcctccataaccaacctcgacgacagaggctggactccgctccacgtcaaagctcgaaaaggcgatttgaaatccgtcaagcagctgctcgaccaagggtttgatgtcaacgctctagcgtggggacctaagtcgaaaggagtgagccctcttcaccttgctgcagagggaggtcatatagaagtcatggatctgcttcttgagcgtggggctaacattgatgcgaggacatggggctcctgcgggtggactcctctccacgctgcggctaaagagcggaagagagaagctgtgaagtttctggtggagaatggtgcgttcttgccggatgatataagtgatacgaggtttaatccgccggtgcattactgtcatgggctggagtgggcgtatgaggagatgaagaagcttaacagcgagtcttcctcttctggtggagacacatcttccagttctgagaactgagtctttgttgctgtgtttttttttttctcaggtcttgccgttgagaaaatgtcagaactcagcgttatggtttgtcagagaatgttatggttttgtgtttggtttaaaattgctatatgtgaaactgctggtatgctatgcataataaatcttctgtatgtgatacttttgtttgttctggatgaagcaaatatgagcacactggttttgatttc

SEQ ID NO: 109514 - protein, 174 aa, Zea mays subsp. mays
  misc_feature (1)..(174): Ceres Seq. ID no. 14309253
  misc_feature (29)..(61): Pfam Name: Ankyrin repeat Pfam Description: Ankyrin repeat
  misc_feature (27)..(138): Homolog of NCBI NO: 28274850 NR Description: ankyrin repeat protein E3_19 [synthetic construct]
  misc_feature (25)..(138): Homolog of NCBI NO: 28274854 NR Description: ankyrin repeat protein E4_8 [synthetic construct]
  misc_feature (21)..(138): Homolog of NCBI NO: 28373666 NR Description: Chain A, Sank E3_5: An Artificial Ankyrin Repeat
  misc_feature (25)..(142): Homolog of NCBI NO: 28274852 NR Description: ankyrin repeat protein E4_2 [synthetic construct]
  misc_feature (30)..(127): Homolog of NCBI NO: 28373835 NR Description: Chain A, 3ank: A Designed Ankyrin Repeat Protein
  misc_feature (30)..(142): Homolog of NCBI NO: 28373837 NR Description: Chain A, 4ank: A Designed Ankyrin Repeat Protein
  misc_feature (27)..(127): Homolog of NCBI NO: 28373837 NR Description: Chain A, 4ank: A Designed Ankyrin Repeat Protein
  misc_feature (1)..(174): Homolog of NCBI NO: 18415625 NR Description: expressed protein [Arabidopsis thaliana]
  misc_feature (1)..(174): Homolog of NCBI NO: 11357401 NR Description: hypothetical protein F13G24.40 - Arabidopsis
  misc_feature (1)..(174): Homolog of NCBI NO: 15240185 NR Description: expressed protein [Arabidopsis thaliana]
MIQDQPLVVFSLRRNSFRRRSSITNLDDRGWTPLHVKARKGDLKSVKQLLDQGFDVNALAWGPKSKGVSPLHLAAEGGHIEVMDLLLERGANIDARTWGSCGWTPLHAAAKERKREAVKFLVENGAFLPDDISDTRFNPPVHYCHGLEWAYEEMKKLNSESSSSGGDTSSSSEN

SEQ ID NO: 109515 - protein, 116 aa, Zea mays subsp. mays
  misc_feature (1)..(116): Ceres Seq. ID no. 14309254
SIRFVSSSFDAKKNLSALLQTLCSSARRKSITKRLVSPISLSLYLLAGYGLFKIKSQCRGGGFSIITRLSYLLNLMLTFSSLSMAFTLTSQKLCVFGPVLNPSFPYCIANHSSASR

SEQ ID NO: 109516 - protein, 92 aa, Zea mays subsp. mays
  misc_feature (1)..(92): Ceres Seq. ID no. 14309255
  misc_feature (1)..(56): Homolog of NCBI NO: 28274850 NR Description: ankyrin repeat protein E3_19 [synthetic construct]
  misc_feature (1)..(56): Homolog of NCBI NO: 28274854 NR Description: ankyrin repeat protein E4_8 [synthetic construct]
  misc_feature (1)..(56): Homolog of NCBI NO: 28373666 NR Description: Chain A, Sank E3_5: An Artificial Ankyrin Repeat
  misc_feature (1)..(60): Homolog of NCBI NO: 28274852 NR Description: ankyrin repeat protein E4_2 [synthetic construct]
  misc_feature (1)..(45): Homolog of NCBI NO: 28373835 NR Description: Chain A, 3ank: A Designed Ankyrin Repeat Protein
  misc_feature (1)..(60): Homolog of NCBI NO: 28373837 NR Description: Chain A, 4ank: A Designed Ankyrin Repeat Protein
  misc_feature (1)..(45): Homolog of NCBI NO: 28373837 NR Description: Chain A, 4ank: A Designed Ankyrin Repeat Protein
  misc_feature (1)..(92): Homolog of NCBI NO: 18415625 NR Description: expressed protein [Arabidopsis thaliana]
  misc_feature (1)..(92): Homolog of NCBI NO: 11357401 NR Description: hypothetical protein F13G24.40 - Arabidopsis
  misc_feature (1)..(92): Homolog of NCBI NO: 15240185 NR Description: expressed protein [Arabidopsis thaliana]
MDLLLERGANIDARTWGSCGWTPLHAAAKERKREAVKFLVENGAFLPDDISDTRFNPPVHYCHGLEWAYEEMKKLNSESSSSGGDTSSSSEN

SEQ ID NO: 109517 - DNA, 1434 bp, Zea mays subsp. mays
  misc_feature (1)..(1434): Ceres Seq. ID no. 15179482
ccctttcgtcgtcgttttcttcttcaatcagacttttccaatcgccgacaccgttttaacttcgatggttccgtcaccgttaaacccgcaacagatccaacaattcctctcctccgtcctctcacagcgcgggcccaactccgtcccctacgacgagtccaccaagtggctaatccgccaacatctcctcaacctaatctcatcctacccttccctcgagcccaaaacggcgacgtttatccacaacgacggccgttccgtaaacctcctccaagctgacggaaccatcccgatgccttaccacggcgtcacctacaacatccccgtcatcatctggctcctcgagtcctaccctcgccaccctccttgcgtctacgtgaaccccaccgccgacatgatcatcaaacggccccacgcgcacgtcaccccctcggggctcgtctctctcccttatctgcagaactgggtttaccctagctccaatctcgtggatctcgtctccgatctcggcgccgccttcgctaacgatcctcctctctactcccgccgccgtccggggccttcaccgactccgccgccgtacgagacacgcccccctcctcctccgacggttgatcagagaccgttcccgccgtctccttacggcagagtgcagcacgttcaccaccaggacgacgcggcggaggttttcaagagaaacgcgatcaacaagatggtggaggtggtccacggcgatctagcctcgatgcggagagataaggaagccgaggcggagtcgatgctgagcttgcaaggaggtttgaagaggagagaggaggagatcaacagagggatgaaggagatggtggaggagaaggagacgctcgagcagcagctacagatcatctccatgaacaccgacgttctcgactcttgggttagagagaatcaagggaagactaatactgtagttgatgttgataaggcctttgagtgtgtggacgcgctctctaagcagatgctggagtgtactgcttcggatttggctatcgaagatgcggtttatgcgttggacaaggggtttcaagacggggttgttccgtttgatcagtacttgaggagtgtgaggttgctttcgagggaacagttctttcatagagccacggggtctaaagttagagctgcgcagatggaagctcaggttcatgccatcgcaggtagattacattcgtgaatgtgtctttggtgtgatggttgttcctctgtcagattgaatttaaagtgtctatatggctatatatacatctgtgtggacatacaagtttgaatggatcacgcctttttcttctttgttcggtttgtgttataagagaaccatctacattttgtgttttattgatctctttgatgaacgttattttctagtgcatcaattaggcttgataatgttactct

SEQ ID NO: 109518 - protein, 403 aa, Zea mays subsp. mays
  misc_feature (1)..(403): Ceres Seq. ID no. 15179483
  misc_feature (52)..(390): Pfam Name: Tumour susceptibility gene 101 protein (TSG101) Pfam Description: Tumour susceptibility gene 101 protein (TSG101)
  misc_feature (63)..(214): Homolog of NCBI NO: 5454140 NR Description: tumor susceptibility gene 101; tumor
  misc_feature (60)..(293): Homolog of NCBI NO: 39795834 NR Description: Unknown (protein for MGC:76193) [Silurana
  misc_feature (29)..(213): Homolog of NCBI NO: 40745470 NR Description: hypothetical protein AN2521.2 [Aspergillus
  misc_feature (185)..(394): Homolog of NCBI NO: 40745470 NR Description: hypothetical protein AN2521.2 [Aspergillus
  misc_feature (58)..(215): Homolog of NCBI NO: 31745166 NR Description: Tumor supressor gene
  misc_feature (185)..(386): Homolog of NCBI NO: 31745166 NR Description: Tumor supressor gene
  misc_feature (58)..(215): Homolog of NCBI NO: 11230780 NR Description: tumor susceptibility gene 101 protein [Mus
  misc_feature (185)..(386): Homolog of NCBI NO: 11230780 NR Description: tumor susceptibility gene 101 protein [Mus
  misc_feature (22)..(403): Homolog of NCBI NO: 15240732 NR Description: hypothetical protein [Arabidopsis thaliana]
  misc_feature (22)..(403): Homolog of NCBI NO: 18399596 NR Description: expressed protein [Arabidopsis thaliana]
PFVVVFFFNQTFPIADTVLTSMVPSPLNPQQIQQFLSSVLSQRGPNSVPYDESTKWLIRQHLLNLISSYPSLEPKTATFIHNDGRSVNLLQADGTIPMPYHGVTYNIPVIIWLLESYPRHPPCVYVNPTADMIIKRPHAHVTPSGLVSLPYLQNWVYPSSNLVDLVSDLGAAFANDPPLYSRRRPGPSPTPPPYETRPPPPPTVDQRPFPPSPYGRVQHVHHQDDAAEVFKRNAINKMVEVVHGDLASMRRDKEAEAESMLSLQGGLKRREEEINRGMKEMVEEKETLEQQLQIISMNTDVLDSWVRENQGKTNTVVDVDKAFECVDALSKQMLECTASDLAIEDAVYALDKGFQDGVVPFDQYLRSVRLLSREQFFHRATGSKVRAAQMEAQVHAIAGRLHS

SEQ ID NO: 109519 - protein, 382 aa, Zea mays subsp. mays
  misc_feature (1)..(382): Ceres Seq. ID no. 15179484
  misc_feature (31)..(369): Pfam Name: Tumour susceptibility gene 101 protein (TSG101) Pfam Description: Tumour susceptibility gene 101 protein (TSG101)
  misc_feature (42)..(193): Homolog of NCBI NO: 5454140 NR Description: tumor susceptibility gene 101; tumor
  misc_feature (39)..(272): Homolog of NCBI NO: 39795834 NR Description: Unknown (protein for MGC:76193) [Silurana
  misc_feature (8)..(192): Homolog of NCBI NO: 40745470 NR Description: hypothetical protein AN2521.2 [Aspergillus
  misc_feature (164)..(373): Homolog of NCBI NO: 40745470 NR Description: hypothetical protein AN2521.2 [Aspergillus
  misc_feature (37)..(194): Homolog of NCBI NO: 31745166 NR Description: Tumor supressor gene
  misc_feature (164)..(365): Homolog of NCBI NO: 31745166 NR Description: Tumor supressor gene
  misc_feature (37)..(194): Homolog of NCBI NO: 11230780 NR Description: tumor susceptibility gene 101 protein [Mus
  misc_feature (164)..(365): Homolog of NCBI NO: 11230780 NR Description: tumor susceptibility gene 101 protein [Mus
  misc_feature (1)..(382): Homolog of NCBI NO: 15240732 NR Description: hypothetical protein [Arabidopsis thaliana]
  misc_feature (1)..(382): Homolog of NCBI NO: 18399596 NR Description: expressed protein [Arabidopsis thaliana]
MVPSPLNPQQIQQFLSSVLSQRGPNSVPYDESTKWLIRQHLLNLISSYPSLEPKTATFIHNDGRSVNLLQADGTIPMPYHGVTYNIPVIIWLLESYPRHPPCVYVNPTADMIIKRPHAHVTPSGLVSLPYLQNWVYPSSNLVDLVSDLGAAFANDPPLYSRRRPGPSPTPPPYETRPPPPPTVDQRPFPPSPYGRVQHVHHQDDAAEVFKRNAINKMVEVVHGDLASMRRDKEAEAESMLSLQGGLKRREEEINRGMKEMVEEKETLEQQLQIISMNTDVLDSWVRENQGKTNTVVDVDKAFECVDALSKQMLECTASDLAIEDAVYALDKGFQDGVVPFDQYLRSVRLLSREQFFHRATGSKVRAAQMEAQVHAIAGRLHS

SEQ ID NO: 109520 - protein, 306 aa, Zea mays subsp. mays
  misc_feature (1)..(306): Ceres Seq. ID no. 15179485
  misc_feature (1)..(293): Pfam Name: Tumour susceptibility gene 101 protein (TSG101) Pfam Description: Tumour susceptibility gene 101 protein (TSG101)
  misc_feature (88)..(297): Homolog of NCBI NO: 40745470 NR Description: hypothetical protein AN2521.2 [Aspergillus
  misc_feature (1)..(118): Homolog of NCBI NO: 31745166 NR Description: Tumor supressor gene
  misc_feature (88)..(289): Homolog of NCBI NO: 31745166 NR Description: Tumor supressor gene
  misc_feature (1)..(118): Homolog of NCBI NO: 11230780 NR Description: tumor susceptibility gene 101 protein [Mus
  misc_feature (1)..(116): Homolog of NCBI NO: 40745470 NR Description: hypothetical protein AN2521.2 [Aspergillus
  misc_feature (1)..(117): Homolog of NCBI NO: 5454140 NR Description: tumor susceptibility gene 101; tumor
  misc_feature (1)..(196): Homolog of NCBI NO: 39795834 NR Description: Unknown (protein for MGC:76193) [Silurana
  misc_feature (88)..(289): Homolog of NCBI NO: 11230780 NR Description: tumor susceptibility gene 101 protein [Mus
  misc_feature (1)..(306): Homolog of NCBI NO: 15240732 NR Description: hypothetical protein [Arabidopsis thaliana]
  misc_feature (1)..(306): Homolog of NCBI NO: 18399596 NR Description: expressed protein [Arabidopsis thaliana]
MPYHGVTYNIPVIIWLLESYPRHPPCVYVNPTADMIIKRPHAHVTPSGLVSLPYLQNWVYPSSNLVDLVSDLGAAFANDPPLYSRRRPGPSPTPPPYETRPPPPPTVDQRPFPPSPYGRVQHVHHQDDAAEVFKRNAINKMVEVVHGDLASMRRDKEAEAESMLSLQGGLKRREEEINRGMKEMVEEKETLEQQLQIISMNTDVLDSWVRENQGKTNTVVDVDKAFECVDALSKQMLECTASDLAIEDAVYALDKGFQDGVVPFDQYLRSVRLLSREQFFHRATGSKVRAAQMEAQVHAIAGRLHS

SEQ ID NO: 109521 - DNA, 841 bp, Zea mays subsp. mays
  misc_feature (1)..(841): Ceres Seq. ID no. 14309248
actattcgagcctccgccggattacaaatcgaagatgtcgtcgtcgccgttcgtgaagtcttatctcttcgcttacaattttctccaagcttcgtcatggacgatttcgcttctgagtatcgttagcagcgttttgtcgagcaagacgatcaatggcggcgcttactctgccgccggatatttgataagtgtgatgcaaactgctgctgttctagaagttcttcacggagccatgggaattgttccgagtggattcttgtctccgctgatgcaatggagtggaagaacacacttcatattggccattgttggacagatcaatgaggtccaggatttgccgtggctgtcaataactcttgtagcttggtgtatcggcgagatgattagatatcctcactatgctttaacttgccttggtagatgtccctattggctaacctatctcaggtacactggattcatcatcatctatccaacggggctggtgggtgaattgttgatcatgtacaaagcgcttccacatgttaaagaaaggaacctttatgcgaatttcttctctgttttccccttcagttactaccaattcctttgggccgtccttttggtctacccgttcctttggttgaagctttatctccagctgttcaaacaaagaaagtccaagcttggaaaagcagagaagcatcacggcaagagaaagagaatgtgaaaggcccttcaatcatctcctcagatatgtctatctttatccttgtttatgttatcgctctatgtgctgcctttaatttttgttttttcctttttttttttttaaagtttaaataatttaattatcatggcc

SEQ ID NO: 109522 - protein, 235 aa, Zea mays subsp. mays
  misc_feature (1)..(235): Ceres Seq. ID no. 14309249
  misc_feature (66)..(226): Pfam Name: Protein tyrosine phosphatase-like protein, PTPLA Pfam Description: Protein tyrosine phosphatase-like protein, PTPLA
  misc_feature (9)..(228): Homolog of NCBI NO: 12963741 NR Description: protein tyrosine phosphatase-like protein PTPLB
  misc_feature (9)..(228): Homolog of NCBI NO: 20892371 NR Description: similar to protein tyrosine phosphatase-like
  misc_feature (15)..(234): Homolog of NCBI NO: 31202853 NR Description: ENSANGP00000018910 [Anopheles gambiae]
  misc_feature (9)..(228): Homolog of NCBI NO: 34869216 NR Description: similar to protein tyrosine phosphatase-like
  misc_feature (8)..(228): Homolog of NCBI NO: 27882121 NR Description: Similar to RIKEN cDNA 6330408J20 gene [Danio
  misc_feature (198)..(235): Homolog of NCBI NO: 15238517 NR Description: expressed protein [Arabidopsis thaliana]
  misc_feature (35)..(131): Homolog of NCBI NO: 15238517 NR Description: expressed protein [Arabidopsis thaliana]
  misc_feature (35)..(85): Homolog of NCBI NO: 9758842 NR Description: gene_id:MTH12.2~unknown protein [Arabidopsis
  misc_feature (131)..(235): Homolog of NCBI NO: 9758842 NR Description: gene_id:MTH12.2~unknown protein [Arabidopsis
  misc_feature (15)..(235): Homolog of NCBI NO: 26453242 NR Description: unknown protein [Arabidopsis thaliana]
LFEPPPDYKSKMSSSPFVKSYLFAYNFLQASSWTISLLSIVSSVLSSKTINGGAYSAAGYLISVMQTAAVLEVLHGAMGIVPSGFLSPLMQWSGRTHFILAIVGQINEVQDLPWLSITLVAWCIGEMIRYPHYALTCLGRCPYWLTYLRYTGFIIIYPTGLVGELLIMYKALPHVKERNLYANFFSVFPFSYYQFLWAVLLVYPFLWLKLYLQLFKQRKSKLGKAEKHHGKRKRM

SEQ ID NO: 109523 - protein, 224 aa, Zea mays subsp. mays
  misc_feature (1)..(224): Ceres Seq. ID no. 14309250
  misc_feature (55)..(215): Pfam Name: Protein tyrosine phosphatase-like protein, PTPLA Pfam Description: Protein tyrosine phosphatase-like protein, PTPLA
  misc_feature (1)..(217): Homolog of NCBI NO: 12963741 NR Description: protein tyrosine phosphatase-like protein PTPLB
  misc_feature (1)..(217): Homolog of NCBI NO: 20892371 NR Description: similar to protein tyrosine phosphatase-like
  misc_feature (4)..(223): Homolog of NCBI NO: 31202853 NR Description: ENSANGP00000018910 [Anopheles gambiae]
  misc_feature (1)..(217): Homolog of NCBI NO: 34869216 NR Description: similar to protein tyrosine phosphatase-like
  misc_feature (1)..(217): Homolog of NCBI NO: 27882121 NR Description: Similar to RIKEN cDNA 6330408J20 gene [Danio
  misc_feature (187)..(224): Homolog of NCBI NO: 15238517 NR Description: expressed protein [Arabidopsis thaliana]
  misc_feature (24)..(120): Homolog of NCBI NO: 15238517 NR Description: expressed protein [Arabidopsis thaliana]
  misc_feature (24)..(74): Homolog of NCBI NO: 9758842 NR Description: gene_id:MTH12.2~unknown protein [Arabidopsis
  misc_feature (120)..(224): Homolog of NCBI NO: 9758842 NR Description: gene_id:MTH12.2~unknown protein [Arabidopsis
  misc_feature (4)..(224): Homolog of NCBI NO: 26453242 NR Description: unknown protein [Arabidopsis thaliana]
MSSSPFVKSYLFAYNFLQASSWTISLLSIVSSVLSSKTINGGAYSAAGYLISVMQTAAVLEVLHGAMGIVPSGFLSPLMQWSGRTHFILAIVGQINEVQDLPWLSITLVAWCIGEMIRYPHYALTCLGRCPYWLTYLRYTGFIIIYPTGLVGELLIMYKALPHVKERNLYANFFSVFPFSYYQFLWAVLLVYPFLWLKLYLQLFKQRKSKLGKAEKHHGKRKRM

SEQ ID NO: 109524 - protein, 171 aa, Zea mays subsp. mays
  misc_feature (1)..(171): Ceres Seq. ID no. 14309251
  misc_feature (2)..(162): Pfam Name: Protein tyrosine phosphatase-like protein, PTPLA Pfam Description: Protein tyrosine phosphatase-like protein, PTPLA
  misc_feature (1)..(164): Homolog of NCBI NO: 12963741 NR Description: protein tyrosine phosphatase-like protein PTPLB
  misc_feature (1)..(164): Homolog of NCBI NO: 20892371 NR Description: similar to protein tyrosine phosphatase-like
  misc_feature (1)..(170): Homolog of NCBI NO: 31202853 NR Description: ENSANGP00000018910 [Anopheles gambiae]
  misc_feature (1)..(164): Homolog of NCBI NO: 34869216 NR Description: similar to protein tyrosine phosphatase-like
  misc_feature (1)..(164): Homolog of NCBI NO: 27882121 NR Description: Similar to RIKEN cDNA 6330408J20 gene [Danio
  misc_feature (134)..(171): Homolog of NCBI NO: 15238517 NR Description: expressed protein [Arabidopsis thaliana]
  misc_feature (1)..(67): Homolog of NCBI NO: 15238517 NR Description: expressed protein [Arabidopsis thaliana]
  misc_feature (1)..(21): Homolog of NCBI NO: 9758842 NR Description: gene_id:MTH12.2~unknown protein [Arabidopsis
  misc_feature (67)..(171): Homolog of NCBI NO: 9758842 NR Description: gene_id:MTH12.2~unknown protein [Arabidopsis
  misc_feature (1)..(171): Homolog of NCBI NO: 26453242 NR Description: unknown protein [Arabidopsis thaliana]
MQTAAVLEVLHGAMGIVPSGFLSPLMQWSGRTHFILAIVGQINEVQDLPWLSITLVAWCIGEMIRYPHYALTCLGRCPYWLTYLRYTGFIIIYPTGLVGELLIMYKALPHVKERNLYANFFSVFPFSYYQFLWAVLLVYPFLWLKLYLQLFKQRKSKLGKAEKHHGKRKRM

SEQ ID NO: 109525 - DNA, 917 bp, Zea mays subsp. mays
  misc_feature (1)..(917): Ceres Seq. ID no. 15179452
gattctagggttttcacactttcacagcaatcggcgagaacttcaacaaccacaaaatggcgacgcaaatcagcaagaagagaaagtttgtagctgacggtgtgttctacgctgagctgaacgaggtcttaaccagagagcttgcggaagatggttactctggtgtggaggttagggttactccaatgaggactgagatcatcatcagagccacacgtacccaaaatgttctcggtgagaagggaaggaggatcagagagttgacatctcttgtgcagaagagattcaggttccctcaagacagtgttgagctttacgctgagaaggttgccaacagaggtctctgcgccattgctcaggccgagtctctccgttacaagctcctcggtggtcttgctgtccgcagggcttgctatggtgtcttgagattcgtcatggagagtggtgctaagggttgtgaggtgattgtgagtggaaagctccgtgcagcacgtgccaagtccatgaaattcaaggacggttacatggtttcctctggtcaaccaaccaaggattacatcgactctgctgtcagacatgttcttcttagacagggtgtgcttggaatcaaggtgaaggtcatgcttgactgggaccctaagggaataaatggaccaaagacaccattgcctgatgttgtcatcatccatgctcccaaggaggaagacgtcaactctgcacctgctcaggtttctgctccggctgctcttgcaccagaagctcccctcactgccgtagactaccctgagatgatcccagtcgcctagaagaaactcttttttttactagtactctgtgatttcgcccttataacttttctgctttttgacagtttatagtttatcgttatctcatcttcgaatcagacaccgttctcc

SEQ ID NO: 109526 - protein, 249 aa, Zea mays subsp. mays
  misc_feature (1)..(249): Ceres Seq. ID no. 15179453
  misc_feature (104)..(188): Pfam Name: Ribosomal protein S3, C-terminal domain Pfam Description: Ribosomal protein S3, C-terminal domain
  misc_feature (1)..(249): Homolog of NCBI NO: 28374213 NR Description: similar to 40S ribosomal protein S3 [Danio rerio]
  misc_feature (1)..(249): Homolog of NCBI NO: 22001962 NR Description: 40S ribosomal protein S3
  misc_feature (1)..(249): Homolog of NCBI NO: 12847921 NR Description: unnamed protein product [Mus musculus]
  misc_feature (1)..(249): Homolog of NCBI NO: 37595356 NR Description: ribosomal protein S3 [Danio rerio]
  misc_feature (1)..(249): Homolog of NCBI NO: 38512247 NR Description: Ribosomal protein S3 [Silurana tropicalis]
  misc_feature (1)..(225): Homolog of NCBI NO: 22204124 NR Description: putative 40S ribosomal protein S3 [Triticum
  misc_feature (3)..(230): Homolog of NCBI NO: 14192875 NR Description: Putative 40S ribosomal protein; contains
  misc_feature (1)..(249): Homolog of NCBI NO: 15238533 NR Description: 40S ribosomal protein S3 (RPS3C) [Arabidopsis
  misc_feature (1)..(247): Homolog of NCBI NO: 15225107 NR Description: 40S ribosomal protein S3 (RPS3A) [Arabidopsis
  misc_feature (1)..(249): Homolog of NCBI NO: 15232352 NR Description: 40S ribosomal protein S3 (RPS3B) [Arabidopsis
MATQISKKRKFVADGVFYAELNEVLTRELAEDGYSGVEVRVTPMRTEIIIRATRTQNVLGEKGRRIRELTSLVQKRFRFPQDSVELYAEKVANRGLCAIAQAESLRYKLLGGLAVRRACYGVLRFVMESGAKGCEVIVSGKLRAARAKSMKFKDGYMVSSGQPTKDYIDSAVRHVLLRQGVLGIKVKVMLDWDPKGINGPKTPLPDVVIIHAPKEEDVNSAPAQVSAPAALAPEAPLTAVDYPEMIPVA

SEQ ID NO: 109527 - protein, 206 aa, Zea mays subsp. mays
  misc_feature (1)..(206): Ceres Seq. ID no. 15179454
  misc_feature (61)..(145): Pfam Name: Ribosomal protein S3, C-terminal domain Pfam Description: Ribosomal protein S3, C-terminal domain
  misc_feature (1)..(206): Homolog of NCBI NO: 28374213 NR Description: similar to 40S ribosomal protein S3 [Danio rerio]
  misc_feature (1)..(206): Homolog of NCBI NO: 22001962 NR Description: 40S ribosomal protein S3
  misc_feature (1)..(206): Homolog of NCBI NO: 12847921 NR Description: unnamed protein product [Mus musculus]
  misc_feature (1)..(206): Homolog of NCBI NO: 37595356 NR Description: ribosomal protein S3 [Danio rerio]
  misc_feature (1)..(206): Homolog of NCBI NO: 38512247 NR Description: Ribosomal protein S3 [Silurana tropicalis]
  misc_feature (1)..(182): Homolog of NCBI NO: 22204124 NR Description: putative 40S ribosomal protein S3 [Triticum
  misc_feature (1)..(187): Homolog of NCBI NO: 14192875 NR Description: Putative 40S ribosomal protein; contains
  misc_feature (1)..(206): Homolog of NCBI NO: 15238533 NR Description: 40S ribosomal protein S3 (RPS3C) [Arabidopsis
  misc_feature (1)..(204): Homolog of NCBI NO: 15225107 NR Description: 40S ribosomal protein S3 (RPS3A) [Arabidopsis
  misc_feature (1)..(206): Homolog of NCBI NO: 15232352 NR Description: 40S ribosomal protein S3 (RPS3B) [Arabidopsis
MRTEIIIRATRTQNVLGEKGRRIRELTSLVQKRFRFPQDSVELYAEKVANRGLCAIAQAESLRYKLLGGLAVRRACYGVLRFVMESGAKGCEVIVSGKLRAARAKSMKFKDGYMVSSGQPTKDYIDSAVRHVLLRQGVLGIKVKVMLDWDPKGINGPKTPLPDVVIIHAPKEEDVNSAPAQVSAPAALAPEAPLTAVDYPEMIPVA

SEQ ID NO: 109528 - DNA, 731 bp, Zea mays subsp. mays
  misc_feature (1)..(731): Ceres Seq. ID no. 15179455
attaattcgataaaggctcctcaaatggattctaaaatgggaaatttcttcgactccatcggttccttcttcagcggcggcgataagatcccttggtgcgaccgtgatgtcatccttgaatgtgagaaagaagttaagacagcaactgagggtgactcggaagaccaaaagaaagagagcattatgcgattgtcttgggctcttgtccattcccgacaagccgaagatatccagcgtggaatcgccatgctcgaagcttctctagcaagtagtagccctcctttgcaggaccgggagaagatttatcttctcgctgttggttattatcgcactggagactactctagaagcaggcagctcgtggaacgctgtctcgaggttcaacctgattggaggcaagctttagccttaaagaaaaccattgaagacaaaattgcaaaagatggtgttattgggataggcatcacggctacggccgttggcctcatagccggtggaatcgctgctgctttggctcgcaaaaagtgaccctcgcagattccctgtgcatataaataacatatgctttcttttaagttctttttttttttgttttttcagctttcagatgttccattactttattttctatgctctgttcaaatagtaactctcccctcacgcctatatcccaaagtcagagccaaacttattgtctttctacggtcataatctgataattgtttgtttgt

SEQ ID NO: 109529 - protein, 175 aa, Zea mays subsp. mays
  misc_feature (1)..(175): Ceres Seq. ID no. 15179456
  misc_feature (65)..(175): Homolog of NCBI NO: 32408377 NR Description: hypothetical protein [Neurospora crassa]
  misc_feature (38)..(165): Homolog of NCBI NO: 40889302 NR Description: Chain A, Solution Structure Of Human Mitochondria
  misc_feature (58)..(175): Homolog of NCBI NO: 39590223 NR Description: Hypothetical protein CBG11144 [Caenorhabditis
  misc_feature (38)..(175): Homolog of NCBI NO: 33112470 NR Description: Tetratricopeptide repeat protein 11 (TPR repeat
  misc_feature (38)..(175): Homolog of NCBI NO: 7705632 NR Description: tetratricopeptide repeat domain 11; CGI-135
  misc_feature (44)..(175): Homolog of NCBI NO: 27664028 NR Description: similar to RIKEN cDNA 2010003O14
  misc_feature (44)..(175): Homolog of NCBI NO: 13384998 NR Description: tetratricopeptide repeat domain 11 [Mus musculus]
  misc_feature (3)..(174): Homolog of NCBI NO: 19386833 NR Description: B1147A04.28 [Oryza sativa (japonica
  misc_feature (9)..(173): Homolog of NCBI NO: 18416852 NR Description: expressed protein [Arabidopsis thaliana]
  misc_feature (9)..(175): Homolog of NCBI NO: 18410639 NR Description: expressed protein [Arabidopsis thaliana]
INSIKAPQMDSKMGNFFDSIGSFFSGGDKIPWCDRDVILECEKEVKTATEGDSEDQKKESIMRLSWALVHSRQAEDIQRGIAMLEASLASSSPPLQDREKIYLLAVGYYRTGDYSRSRQLVERCLEVQPDWRQALALKKTIEDKIAKDGVIGIGITATAVGLIAGGIAAALARKK

SEQ ID NO: 109530 - protein, 167 aa, Zea mays subsp. mays
  misc_feature (1)..(167): Ceres Seq. ID no. 15179457
  misc_feature (57)..(167): Homolog of NCBI NO: 32408377 NR Description: hypothetical protein [Neurospora crassa]
  misc_feature (30)..(157): Homolog of NCBI NO: 40889302 NR Description: Chain A, Solution Structure Of Human Mitochondria
  misc_feature (50)..(167): Homolog of NCBI NO: 39590223 NR Description: Hypothetical protein CBG11144 [Caenorhabditis
  misc_feature (30)..(167): Homolog of NCBI NO: 33112470 NR Description: Tetratricopeptide repeat protein 11 (TPR repeat
  misc_feature (30)..(167): Homolog of NCBI NO: 7705632 NR Description: tetratricopeptide repeat domain 11; CGI-135
  misc_feature (36)..(167): Homolog of NCBI NO: 27664028 NR Description: similar to RIKEN cDNA 2010003O14
  misc_feature (36)..(167): Homolog of NCBI NO: 13384998 NR Description: tetratricopeptide repeat domain 11 [Mus musculus]
  misc_feature (1)..(166): Homolog of NCBI NO: 19386833 NR Description: B1147A04.28 [Oryza sativa (japonica
  misc_feature (1)..(165): Homolog of NCBI NO: 18416852 NR Description: expressed protein [Arabidopsis thaliana]
  misc_feature (1)..(167): Homolog of NCBI NO: 18410639 NR Description: expressed protein [Arabidopsis thaliana]
MDSKMGNFFDSIGSFFSGGDKIPWCDRDVILECEKEVKTATEGDSEDQKKESIMRLSWALVHSRQAEDIQRGIAMLEASLASSSPPLQDREKIYLLAVGYYRTGDYSRSRQLVERCLEVQPDWRQALALKKTIEDKIAKDGVIGIGITATAVGLIAGGIAAALARKK

SEQ ID NO: 109531 - protein, 163 aa, Zea mays subsp. mays
  misc_feature (1)..(163): Ceres Seq. ID no. 15179458
  misc_feature (53)..(163): Homolog of NCBI NO: 32408377 NR Description: hypothetical protein [Neurospora crassa]
  misc_feature (26)..(153): Homolog of NCBI NO: 40889302 NR Description: Chain A, Solution Structure Of Human Mitochondria
  misc_feature (46)..(163): Homolog of NCBI NO: 39590223 NR Description: Hypothetical protein CBG11144 [Caenorhabditis
  misc_feature (26)..(163): Homolog of NCBI NO: 33112470 NR Description: Tetratricopeptide repeat protein 11 (TPR repeat
  misc_feature (26)..(163): Homolog of NCBI NO: 7705632 NR Description: tetratricopeptide repeat domain 11; CGI-135
  misc_feature (32)..(163): Homolog of NCBI NO: 27664028 NR Description: similar to RIKEN cDNA 2010003O14
  misc_feature (32)..(163): Homolog of NCBI NO: 13384998 NR Description: tetratricopeptide repeat domain 11 [Mus musculus]
  misc_feature (1)..(162): Homolog of NCBI NO: 19386833 NR Description: B1147A04.28 [Oryza sativa (japonica
  misc_feature (1)..(161): Homolog of NCBI NO: 18416852 NR Description: expressed protein [Arabidopsis thaliana]
  misc_feature (1)..(163): Homolog of NCBI NO: 18410639 NR Description: expressed protein [Arabidopsis thaliana]
MGNFFDSIGSFFSGGDKIPWCDRDVILECEKEVKTATEGDSEDQKKESIMRLSWALVHSRQAEDIQRGIAMLEASLASSSPPLQDREKIYLLAVGYYRTGDYSRSRQLVERCLEVQPDWRQALALKKTIEDKIAKDGVIGIGITATAVGLIAGGIAAALARKK

SEQ ID NO: 109532 - DNA, 752 bp, Zea mays subsp. mays
  misc_feature (1)..(752): Ceres Seq. ID no. 15175141
aagccggtcggtgagtgcactccctctctcactgtagttgttgtgtgcatctgcgttttctctgtgcttcgagatctcgacgaaaaaaatggctgcaagattcttgtgggcttccagggtcgcttctcatctaaggatctccatcgcccaacgagggtttgcgtcagttgttttgaaggatctgaagtatgctgagtcacatgaatgggtgaagattgatgggaacaaagcaaccttcggtataacggatcacgctcaggaccacttgggtgatgtggtctatgttgagttgcctgacttgggacgttccgtgtcacaaggtgagagctttggagcggttgagagtgtgaaagctaccagtgatatcaattctccagtctccggtaaggtggttgaagtcaatgaggtgctgagtgagtcccctggattggtgaacacgagcccgtatgaagatggatggatcataaaggtggagctgagtgatgcagaagaggcaaagaagctgatggattctgacaagtactccaagttctgcgaagaagaagacgccaagcactgagctttttttttttttttccttttcttctggaagtttccattgcaacatagattgttgttttcttaaatgaaatcttgatctatgtaacatggatgaatcaagaaaatcctgaagatctccatctctgcttctcttttttatgtttttgaactctctattgtttgaataatggtacaaaataacaagctttggc

SEQ ID NO: 109533 - protein, 156 aa, Zea mays subsp. mays
  misc_feature (1)..(156): Ceres Seq. ID no. 15175142
  misc_feature (32)..(152): Pfam Name: Glycine cleavage H-protein Pfam Description: Glycine cleavage H-protein
  misc_feature (1)..(156): Homolog of NCBI NO: 1346118 NR Description: Glycine cleavage system H protein, mitochondrial
  misc_feature (1)..(156): Homolog of NCBI NO: 2887286 NR Description: H protein [Flaveria anomala]
  misc_feature (1)..(156): Homolog of NCBI NO: 2499417 NR Description: Glycine cleavage system H protein, mitochondrial
  misc_feature (1)..(156): Homolog of NCBI NO: 2147453 NR Description: glycine cleavage system protein H precursor
  misc_feature (1)..(154): Homolog of NCBI NO: 37536058 NR Description: putative glycine decarboxylase subunit
  misc_feature (6)..(156): Homolog of NCBI NO: 2119600 NR Description: glycine cleavage system protein H precursor
  misc_feature (34)..(156): Homolog of NCBI NO: 39596544 NR Description: Hypothetical protein CBG07481 [Caenorhabditis
  misc_feature (1)..(156): Homolog of NCBI NO: 3688309 NR Description: H-Protein precursor [Flaveria pringlei]
  misc_feature (1)..(156): Homolog of NCBI NO: 29124971 NR Description: glycine decarboxylase complex H-protein [Populus
  misc_feature (1)..(156): Homolog of NCBI NO: 15226906 NR Description: glycine decarboxylase complex H-protein
MAARFLWASRVASHLRISIAQRGFASVVLKDLKYAESHEWVKIDGNKATFGITDHAQDHLGDVVYVELPDLGRSVSQGESFGAVESVKATSDINSPVSGKVVEVNEVLSESPGLVNTSPYEDGWIIKVELSDAEEAKKLMDSDKYSKFCEEEDAKH

SEQ ID NO: 109534 - DNA, 1023 bp, Zea mays subsp. mays
  misc_feature (1)..(1023): Ceres Seq. ID no. 14309224
acaatttaaactctctttttttttgtaatgacaggttgcttcagcttctctgaagtaatagaacgggcttacaaatacgggttcaaaagatccggtttacgacccgtaaccatcgacttgaaagacggaaccgtggtccatttctgggtatccaagacccgagacgaatccaaacccaacctcctcctcatccacgggctcggagcttctgccatctggcaatggtacgacgtcgcacgacgcctctctcctcatttcaacctcttcatccccgacctcgttttcttcggcggatcctccacgacccgacccgaaagatccgacgttttccaggcccagacgcttatgcgggccttagaggcccagtccgtgaaacgtttcagcctcgtcggccttagctacggcgggttcgtcggttaccgaatggcgtcgatgtacggagacgccgtggagaaggtggtgatatgctgcgccgccgtgtgcgtggaggagaaggacatgagggacggcgttttctccgtgtcggatcttgatgaagcttccaagattctcgtgccggagtctgtgaagaagctacgggaacttatcggttacatcttctacaagccggcgttggcgagactggttcctccttgtctgctccatgatttcatcgaacatgcattgaccagagataatttaaaagaaaagagggagatgatcaaagacataccaaaagatagaatagtctcagagattccaaaactcgcacagccaactttgattatatggggagagcatgatcacgtgtttccactggagatgggatacagacttaagaagcacttaggagataatgggaagcttgttgtcatcaaaagaactggtcatatctttaactttgaaaaacctaaaacttatgttaaacatctgaagtcttttcttatgcagactaaacaacatgttcctgtctctaacggatctgttaagtcttaaacatctgtattattttcatatcttgtaacgattattaacgcatgtagc

SEQ ID NO: 109535 - protein, 315 aa, Zea mays subsp. mays
  misc_feature (1)..(315): Ceres Seq. ID no. 14309225
  misc_feature (77)..(297): Pfam Name: alpha/beta hydrolase fold Pfam Description: alpha/beta hydrolase fold
  misc_feature (1)..(300): Homolog of NCBI NO: 18394481 NR Description: hydrolase, alpha/beta fold family [Arabidopsis
  misc_feature (1)..(300): Homolog of NCBI NO: 21592821 NR Description: unknown [Arabidopsis thaliana]
  misc_feature (6)..(300): Homolog of NCBI NO: 22326938 NR Description: hydrolase, alpha/beta fold family [Arabidopsis
  misc_feature (12)..(297): Homolog of NCBI NO: 37533664 NR Description: putative hydrolase [Oryza sativa (japonica
  misc_feature (6)..(301): Homolog of NCBI NO: 33146617 NR Description: hydrolase-like protein [Oryza sativa (japonica
  misc_feature (1)..(307): Homolog of NCBI NO: 21536873 NR Description: putative hydrolase [Arabidopsis thaliana]
  misc_feature (1)..(307): Homolog of NCBI NO: 18420566 NR Description: hydrolase, alpha/beta fold family [Arabidopsis
  misc_feature (4)..(302): Homolog of NCBI NO: 15242419 NR Description: hydrolase, alpha/beta fold family [Arabidopsis
  misc_feature (1)..(211): Homolog of NCBI NO: 25406548 NR Description: hypothetical protein T11I11.15 [imported] -
  misc_feature (1)..(310): Homolog of NCBI NO: 18411865 NR Description: hydrolase, alpha/beta fold family [Arabidopsis
MTGCFSFSEVIERAYKYGFKRSGLRPVTIDLKDGTVVHFWVSKTRDESKPNLLLIHGLGASAIWQWYDVARRLSPHFNLFIPDLVFFGGSSTTRPERSDVFQAQTLMRALEAQSVKRFSLVGLSYGGFVGYRMASMYGDAVEKVVICCAAVCVEEKDMRDGVFSVSDLDEASKILVPESVKKLRELIGYIFYKPALARLVPPCLLHDFIEHALTRDNLKEKREMIKDIPKDRIVSEIPKLAQPTLIIWGEHDHVFPLEMGYRLKKHLGDNGKLVVIKRTGHIFNFEKPKTYVKHLKSFLMQTKQHVPVSNGSVKS

SEQ ID NO: 109536 - protein, 209 aa, Zea mays subsp. mays
  misc_feature (1)..(209): Ceres Seq. ID no. 14309226
  misc_feature (1)..(191): Pfam Name: alpha/beta hydrolase fold Pfam Description: alpha/beta hydrolase fold
  misc_feature (1)..(194): Homolog of NCBI NO: 18394481 NR Description: hydrolase, alpha/beta fold family [Arabidopsis
  misc_feature (1)..(194): Homolog of NCBI NO: 21592821 NR Description: unknown [Arabidopsis thaliana]
  misc_feature (1)..(194): Homolog of NCBI NO: 22326938 NR Description: hydrolase, alpha/beta fold family [Arabidopsis
  misc_feature (1)..(191): Homolog of NCBI NO: 37533664 NR Description: putative hydrolase [Oryza sativa (japonica
  misc_feature (1)..(195): Homolog of NCBI NO: 33146617 NR Description: hydrolase-like protein [Oryza sativa (japonica
  misc_feature (1)..(201): Homolog of NCBI NO: 21536873 NR Description: putative hydrolase [Arabidopsis thaliana]
  misc_feature (1)..(201): Homolog of NCBI NO: 18420566 NR Description: hydrolase, alpha/beta fold family [Arabidopsis
  misc_feature (1)..(196): Homolog of NCBI NO: 15242419 NR Description: hydrolase, alpha/beta fold family [Arabidopsis
  misc_feature (1)..(105): Homolog of NCBI NO: 25406548 NR Description: hypothetical protein T11I11.15 [imported] -
  misc_feature (1)..(204): Homolog of NCBI NO: 18411865 NR Description: hydrolase, alpha/beta fold family [Arabidopsis
MRALEAQSVKRFSLVGLSYGGFVGYRMASMYGDAVEKVVICCAAVCVEEKDMRDGVFSVSDLDEASKILVPESVKKLRELIGYIFYKPALARLVPPCLLHDFIEHALTRDNLKEKREMIKDIPKDRIVSEIPKLAQPTLIIWGEHDHVFPLEMGYRLKKHLGDNGKLVVIKRTGHIFNFEKPKTYVKHLKSFLMQTKQHVPVSNGSVKS

SEQ ID NO: 109537 - protein, 183 aa, Zea mays subsp. mays
  misc_feature (1)..(183): Ceres Seq. ID no. 14309227
  misc_feature (1)..(165): Pfam Name: alpha/beta hydrolase fold Pfam Description: alpha/beta hydrolase fold
  misc_feature (1)..(168): Homolog of NCBI NO: 18394481 NR Description: hydrolase, alpha/beta fold family [Arabidopsis
  misc_feature (1)..(168): Homolog of NCBI NO: 21592821 NR Description: unknown [Arabidopsis thaliana]
  misc_feature (1)..(168): Homolog of NCBI NO: 22326938 NR Description: hydrolase, alpha/beta fold family [Arabidopsis
  misc_feature (1)..(165): Homolog of NCBI NO: 37533664 NR Description: putative hydrolase [Oryza sativa (japonica
  misc_feature (1)..(169): Homolog of NCBI NO: 33146617 NR Description: hydrolase-like protein [Oryza sativa (japonica
  misc_feature (1)..(175): Homolog of NCBI NO: 21536873 NR Description: putative hydrolase [Arabidopsis thaliana]
  misc_feature (1)..(175): Homolog of NCBI NO: 18420566 NR Description: hydrolase, alpha/beta fold family [Arabidopsis
  misc_feature (1)..(170): Homolog of NCBI NO: 15242419 NR Description: hydrolase, alpha/beta fold family [Arabidopsis
  misc_feature (1)..(79): Homolog of NCBI NO: 25406548 NR Description: hypothetical protein T11I11.15 [imported] -
  misc_feature (1)..(178): Homolog of NCBI NO: 18411865 NR Description: hydrolase, alpha/beta fold family [Arabidopsis
MASMYGDAVEKVVICCAAVCVEEKDMRDGVFSVSDLDEASKILVPESVKKLRELIGYIFYKPALARLVPPCLLHDFIEHALTRDNLKEKREMIKDIPKDRIVSEIPKLAQPTLIIWGEHDHVFPLEMGYRLKKHLGDNGKLVVIKRTGHIFNFEKPKTYVKHLKSFLMQTKQHVPVSNGSVKS

SEQ ID NO: 109538 - DNA, 719 bp, Zea mays subsp. mays
  misc_feature (1)..(719): Ceres Seq. ID no. 15174108
atcgccgtttgttctttcgtcctccttctctctctctctcttgaagttggggtgatcgtcttctttgggtaaattgagtctctatagcatcattcagacatgcagcaatcacgagcgagactgttcaaggaatacaaggaggttcagcgagagaaagtagctgatcctgatatccaattggtgtgtgatgataccaacattttcaaatggactgcacttatcaagggaccgtcggagactccttatgaaggcggagtgtttcagcttgcattcgctgttcccgaaccgtatcctctgcagcctcctcaagtgcgcttcttgaccaaaatattccatcccaatgtgcatttcaagactggagaaatatgtctcgacatattgaagaacgcgtggagccctgcgtggacgcttcagtctgtgtgtagagcgatcatagcactgatggctcatcctgaggcagacagtcctctcaactgcgactcaggtaaccttctaagatctggagatgtgagagggttcaattcaatggcacgcatgtacacacgcctcgccgctatgcctaagaaaggatgatcctctcttgctttccttttcttatgtcatcgggttataactcgttttctttgaatatgtaatgagaaatgatttgggaaaatgaatacattattaacaattcatatgtaaggtaacaattttattcaactagacacaagttactc

SEQ ID NO: 109539 - protein, 157 aa, Zea mays subsp. mays
  misc_feature (1)..(157): Ceres Seq. ID no. 15174109
  misc_feature (7)..(156): Homolog of NCBI NO: 23487093 NR Description: ubiquitin conjugating enzyme [Plasmodium yoelii
  misc_feature (76)..(147): Homolog of NCBI NO: 3915186 NR Description: Ubiquitin-conjugating enzyme E2-21 kDa
  misc_feature (1)..(74): Homolog of NCBI NO: 3915186 NR Description: Ubiquitin-conjugating enzyme E2-21 kDa
  misc_feature (1)..(155): Homolog of NCBI NO: 19111870 NR Description: putative ubiquitin conjugating enzyme, e2
  misc_feature (4)..(145): Homolog of NCBI NO: 13812330 NR Description: ubiquitin-conjugating enzyme E2-21 KD [Guillardia
  misc_feature (31)..(153): Homolog of NCBI NO: 23491070 NR Description: probable ubiquitin-conjugating enzyme e2-17 kDa
  misc_feature (4)..(153): Homolog of NCBI NO: 23612144 NR Description: ubiquitin-conjugating enzyme E2, putative
  misc_feature (6)..(150): Homolog of NCBI NO: 28829309 NR Description: similar to Arabidopsis thaliana (Mouse-ear
  misc_feature (7)..(153): Homolog of NCBI NO: 34391431 NR Description: ubiquitin-conjugating enzyme E2 [Pavlova lutheri]
  misc_feature (1)..(157): Homolog of NCBI NO: 18420949 NR Description: ubiquitin-conjugating enzyme, putative
MQQSRARLFKEYKEVQREKVADPDIQLVCDDTNIFKWTALIKGPSETPYEGGVFQLAFAVPEPYPLQPPQVRFLTKIFHPNVHFKTGEICLDILKNAWSPAWTLQSVCRAIIALMAHPEADSPLNCDSGNLLRSGDVRGFNSMARMYTRLAAMPKKG

SEQ ID NO: 109540 - DNA, 795 bp, Zea mays subsp. mays
  misc_feature (1)..(795): Ceres Seq. ID no. 14309220
attcacaaccacacctctaaacatttctcacaattttttggtctaaagaaggaatataactctttttctcttttcctttttgcttttacacaatcttataagaaactttagcctgagagagcgagagacggtgtaggatgcactacacgcgcatctcaccaattatattgccttctccaccacccaccatcaccgccaccgttgaatccagtggtagaggaaccatgttagccaccctattcatggccctccttctcccttgcgttggcatgtgcattgtcttcctcatatatctcttcttcttgtggtgctccacacgtcgccgtattgagcgtctaagattttctgaaccggttaagctggtcaccggtaaaggtctctctgtctcggagctcgagaaactcccaaaactcaccggaaaagagcttgccttagaagtgaggtcgacagagtgccctgtttgccttgaaaatatcgagagttgccaatcggcccgtctggttcccggttgcaaccatgggtttcaccaattatgtgctgacacgtggttatctaaccacacggtgtgtcctgtttgtcgtggcgatcttgctcagaaggttcctcaacttagtaacaatcatagtccatgttgaaaacatgatcccaaatactcttcttctttattcattttcttctacttgtcttgttttctctctgttaacattttagttttttcatcgtttgctgtagtaggtggatatggtttgtacagtaaattgtaatagagtcaagtacaaaatttcctgttttgtc

SEQ ID NO: 109541 - protein, 165 aa, Zea mays subsp. mays
  misc_feature (1)..(165): Ceres Seq. ID no. 14309221
  misc_feature (106)..(147): Pfam Name: Zinc finger, C3HC4 type (RING finger) Pfam Description: Zinc finger, C3HC4 type (RING finger)
  misc_feature (13)..(163): Homolog of NCBI NO: 15222068 NR Description: RING-H2 finger protein RHA3a -related
  misc_feature (12)..(148): Homolog of NCBI NO: 15218042 NR Description: RING zinc finger protein -related [Arabidopsis
  misc_feature (19)..(148): Homolog of NCBI NO: 21555237 NR Description: putative RING zinc finger protein [Arabidopsis
  misc_feature (19)..(148): Homolog of NCBI NO: 15223041 NR Description: RING zinc finger protein -related [Arabidopsis
  misc_feature (13)..(163): Homolog of NCBI NO: 25405963 NR Description: protein F27J15.2 [imported] - Arabidopsis
  misc_feature (13)..(163): Homolog of NCBI NO: 7770352 NR Description: F27J15.3 [Arabidopsis thaliana]
  misc_feature (13)..(163): Homolog of NCBI NO: 15222069 NR Description: RING-H2 finger protein RHA3a -related
  misc_feature (13)..(163): Homolog of NCBI NO: 15222071 NR Description: RING-H2 finger protein RHA3a -related
  misc_feature (1)..(165): Homolog of NCBI NO: 21593762 NR Description: unknown [Arabidopsis thaliana]
  misc_feature (1)..(165): Homolog of NCBI NO: 15238323 NR Description: zinc finger (C3HC4-type RING finger) protein
MHYTRISPIILPSPPPTITATVESSGRGTMLATLFMALLLPCVGMCIVFLIYLFFLWCSTRRRIERLRFSEPVKLVTGKGLSVSELEKLPKLTGKELALEVRSTECPVCLENIESCQSARLVPGCNHGFHQLCADTWLSNHTVCPVCRGDLAQKVPQLSNNHSPC

SEQ ID NO: 109542 - protein, 136 aa, Zea mays subsp. mays
  misc_feature (1)..(136): Ceres Seq. ID no. 14309222
  misc_feature (77)..(118): Pfam Name: Zinc finger, C3HC4 type (RING finger) Pfam Description: Zinc finger, C3HC4 type (RING finger)
  misc_feature (1)..(134): Homolog of NCBI NO: 15222068 NR Description: RING-H2 finger protein RHA3a -related
  misc_feature (1)..(119): Homolog of NCBI NO: 15218042 NR Description: RING zinc finger protein -related [Arabidopsis
  misc_feature (1)..(119): Homolog of NCBI NO: 21555237 NR Description: putative RING zinc finger protein [Arabidopsis
  misc_feature (1)..(119): Homolog of NCBI NO: 15223041 NR Description: RING zinc finger protein -related [Arabidopsis
  misc_feature (1)..(134): Homolog of NCBI NO: 25405963 NR Description: protein F27J15.2 [imported] - Arabidopsis
  misc_feature (1)..(134): Homolog of NCBI NO: 7770352 NR Description: F27J15.3 [Arabidopsis thaliana]
  misc_feature (1)..(134): Homolog of NCBI NO: 15222069 NR Description: RING-H2 finger protein RHA3a -related
  misc_feature (1)..(134): Homolog of NCBI NO: 15222071 NR Description: RING-H2 finger protein RHA3a -related
  misc_feature (1)..(136): Homolog of NCBI NO: 21593762 NR Description: unknown [Arabidopsis thaliana]
  misc_feature (1)..(136): Homolog of NCBI NO: 15238323 NR Description: zinc finger (C3HC4-type RING finger) protein
MLATLFMALLLPCVGMCIVFLIYLFFLWCSTRRRIERLRFSEPVKLVTGKGLSVSELEKLPKLTGKELALEVRSTECPVCLENIESCQSARLVPGCNHGFHQLCADTWLSNHTVCPVCRGDLAQKVPQLSNNHSPC

SEQ ID NO: 109543 - protein, 130 aa, Zea mays subsp. mays
  misc_feature (1)..(130): Ceres Seq. ID no. 14309223
  misc_feature (71)..(112): Pfam Name: Zinc finger, C3HC4 type (RING finger) Pfam Description: Zinc finger, C3HC4 type (RING finger)
  misc_feature (1)..(128): Homolog of NCBI NO: 15222068 NR Description: RING-H2 finger protein RHA3a -related
  misc_feature (1)..(113): Homolog of NCBI NO: 15218042 NR Description: RING zinc finger protein -related [Arabidopsis
  misc_feature (1)..(113): Homolog of NCBI NO: 21555237 NR Description: putative RING zinc finger protein [Arabidopsis
  misc_feature (1)..(113): Homolog of NCBI NO: 15223041 NR Description: RING zinc finger protein -related [Arabidopsis
  misc_feature (1)..(128): Homolog of NCBI NO: 25405963 NR Description: protein F27J15.2 [imported] - Arabidopsis
  misc_feature (1)..(128): Homolog of NCBI NO: 7770352 NR Description: F27J15.3 [Arabidopsis thaliana]
  misc_feature (1)..(128): Homolog of NCBI NO: 15222069 NR Description: RING-H2 finger protein RHA3a -related
  misc_feature (1)..(128): Homolog of NCBI NO: 15222071 NR Description: RING-H2 finger protein RHA3a -related
  misc_feature (1)..(130): Homolog of NCBI NO: 21593762 NR Description: unknown [Arabidopsis thaliana]
  misc_feature (1)..(130): Homolog of NCBI NO: 15238323 NR Description: zinc finger (C3HC4-type RING finger) protein
MALLLPCVGMCIVFLIYLFFLWCSTRRRIERLRFSEPVKLVTGKGLSVSELEKLPKLTGKELALEVRSTECPVCLENIESCQSARLVPGCNHGFHQLCADTWLSNHTVCPVCRGDLAQKVPQLSNNHSPC

SEQ ID NO: 109544 - DNA, 1049 bp, Zea mays subsp. mays
  misc_feature (1)..(1049): Ceres Seq. ID no. 15179151
gctgttcttgttcttgttgttccttccccctcattggagagagtaagcgagtctcttccgatcccagagagagagagagaagcgcttgttcttcttcaaaggagtctcagcagggtgggcaaagatggtcgcagaacgcttcactgtcgatttggataagccacttgtctttcaggttggtcatcttggggaagaatatcaggaatggattcatcaacctattgtatgtgtagagggtcctcgttttttccagagtgatttctgggagttcttgacccgcactgtttggtgggctatcccaacgatctggcttccagttgtctgctacgttctttcaatctccgcgaggaagggactgacatttccccagatcggtttaatagttgcctttggcgtactcacctggacactgctcgagtacacgcttcatcgtttccttttccatatagacaccaagagttactgggcaaacactgcacactatcttcttcatggatgccatcacaagcacccacaagacggccttcgtcttgttttccctcctaccgccacagccattctcttggttccactatggaagcttctccacctcatagctactcctgctacagctcctgctatgcttggaggcattttgtttggctatgtgatgtatgatgttactcattactatctacaccatggccaacctaaagaaccaacctttaagcatctcaagaaataccacctgaatcatcacttcagaatccaggacaaaggatatgggatcacttcctctctctgggatagagtctttggaacacttcccggtacaaaggctgctcagaagaagctctaaaccggagatttcgttttgcctttctctcagtgtgttaaaaactcacttcttgattcatcatgtgattcaaatgactgttttaactgatgctgtatacgatctatcaccatattttgaacatatctagtggtgtgtgtaccggttttatggtgtggtcatagaaaattgaaatcatactggtttattttctattcaatttggtctttgaatc

SEQ ID NO: 109545 - protein, 237 aa, Zea mays subsp. mays
  misc_feature (1)..(237): Ceres Seq. ID no. 15179152
  misc_feature (86)..(229): Pfam Name: Fatty acid hydroxylase Pfam Description: Fatty acid hydroxylase
  misc_feature (6)..(226): Homolog of NCBI NO: 31200833 NR Description: ENSANGP00000014963 [Anopheles gambiae]
  misc_feature (8)..(237): Homolog of NCBI NO: 6323928 NR Description: Required for the hydroxylation of the very long
  misc_feature (8)..(226): Homolog of NCBI NO: 32404274 NR Description: hypothetical protein [Neurospora crassa]
  misc_feature (14)..(227): Homolog of NCBI NO: 17505701 NR Description: fatty acid hydroxylase (36.3 kD) (1K755)
  misc_feature (14)..(227): Homolog of NCBI NO: 39589620 NR Description: Hypothetical protein CBG12227 [Caenorhabditis
  misc_feature (1)..(109): Homolog of NCBI NO: 32766618 NR Description: Unknown (protein for IMAGE:6878212) [Xenopus
  misc_feature (90)..(227): Homolog of NCBI NO: 32766618 NR Description: Unknown (protein for IMAGE:6878212) [Xenopus
  misc_feature (1)..(235): Homolog of NCBI NO: 34897078 NR Description: putative fatty acid hydroxylase
  misc_feature (1)..(236): Homolog of NCBI NO: 15226828 NR Description: fatty acid hydroxylase (FAH1) [Arabidopsis
  misc_feature (1)..(236): Homolog of NCBI NO: 15233426 NR Description: fatty acid hydroxylase, putative [Arabidopsis
MVAERFTVDLDKPLVFQVGHLGEEYQEWIHQPIVCVEGPRFFQSDFWEFLTRTVWWAIPTIWLPVVCYVLSISARKGLTFPQIGLIVAFGVLTWTLLEYTLHRFLFHIDTKSYWANTAHYLLHGCHHKHPQDGLRLVFPPTATAILLVPLWKLLHLIATPATAPAMLGGILFGYVMYDVTHYYLHHGQPKEPTFKHLKKYHLNHHFRIQDKGYGITSSLWDRVFGTLPGTKAAQKKL

SEQ ID NO: 109546 - DNA, 1270 bp, Zea mays subsp. mays
  misc_feature (1)..(1270): Ceres Seq. ID no. 15180043
atagtctttcgcagctttttttagggtttctcttttctcctctaactcacaaaaacacttgcggaggttaaagcgacggcgccaattcgctgtccgccttgtacgagctcgagcttcgtctaggccctcactttatctttaccatcctctctcaatccaagtatcaatggcggtgaaagcaacgaaggcggagaagaagatcgtttacgactcgaagctttgccagcttctgaatgagttccctcagatcctcatcgtcgcggcggataacgtcgggtccactcagcttcagaacatcaggaaagggttacgtggagactccgttgttctcatggggaagaacacgatgatgaagaggtctgttaagcttcatgctcagaaaactggaaatgatgggtttcttaatcttatgcctcttcttcagggtaatgttgggcttatcttcaccaagggtgacttgaaggaagtcagcgaggaggttgctaagtacaaggttggagctccagctcgtgttggcttagttgctccaatcgatgtggttgtgcaaccaggcaacactggcctcgacccatcgcagacctctttcttccaagtgctcaacattccaaccaagatcaacaaaggtaccgttgagatcattacccctgtggagctcatcaagaaaggcgacaaggtcggttcatccgaggctgcgcttctagccaaactcggaatcaggccgttctcttacggtctcgtcgtggagtcggtctacgacaacggctcagtgtttgaccccgaggtgcttaacctcactgaagacgaccttgttgaaaagtttgcagctggcgtctcgctggtgtcggcgctttctcttgccatctcttacccaaccattgcagctgcgcctcacatgttcatcaatgcttacaagaatgttctcgctgttgccttggctactgagtattctttccctcaggctgagaatgtgaaggagttcctcaaggatccaagcaagtttgcagttgctgctgctgcggttgcacctgtttccggagaatttggtggagctcctgtggcggctgctgtggtggaagaagctgcggaggagtctgatggggacatgggtttcgatcttttcggctaaaatatatgccgtcttatgctttgcaccagtttatctttatgattatcagttaaagttcaacactttttattttcactttcagaattttgttggtgcattcttatggatattttggttatttatctaaatcaactttttggtttt

SEQ ID NO: 109547 - protein, 319 aa, Zea mays subsp. mays
  misc_feature (1)..(319): Ceres Seq. ID no. 15180044
  misc_feature (6)..(110): Pfam Name: Ribosomal protein L10 Pfam Description: Ribosomal protein L10
  misc_feature (3)..(318): Homolog of NCBI NO: 21593316 NR Description: 60S acidic ribosomal protein P0-C [Arabidopsis
  misc_feature (3)..(318): Homolog of NCBI NO: 15229706 NR Description: 60S acidic ribosomal protein P0 (RPP0C)
  misc_feature (3)..(319): Homolog of NCBI NO: 21554645 NR Description: putative 60S acidic ribosomal protein P0
  misc_feature (3)..(319): Homolog of NCBI NO: 15232603 NR Description: 60S acidic ribosomal protein P0 (RPP0B)
  misc_feature (1)..(319): Homolog of NCBI NO: 15225613 NR Description: 60S acidic ribosomal protein P0 (RPP0A)
MAVKATKAEKKIVYDSKLCQLLNEFPQILIVAADNVGSTQLQNIRKGLRGDSVVLMGKNTMMKRSVKLHAQKTGNDGFLNLMPLLQGNVGLIFTKGDLKEVSEEVAKYKVGAPARVGLVAPIDVVVQPGNTGLDPSQTSFFQVLNIPTKINKGTVEIITPVELIKKGDKVGSSEAALLAKLGIRPFSYGLVVESVYDNGSVFDPEVLNLTEDDLVEKFAAGVSLVSALSLAISYPTIAAAPHMFINAYKNVLAVALATEYSFPQAENVKEFLKDPSKFAVAAAAVAPVSGEFGGAPVAAAVVEEAAEESDGDMGFDLFG

SEQ ID NO: 109548 - protein, 264 aa, Zea mays subsp. mays
  misc_feature (1)..(264): Ceres Seq. ID no. 15180045
  misc_feature (1)..(55): Pfam Name: Ribosomal protein L10 Pfam Description: Ribosomal protein L10
  misc_feature (1)..(263): Homolog of NCBI NO: 21593316 NR Description: 60S acidic ribosomal protein P0-C [Arabidopsis
  misc_feature (1)..(263): Homolog of NCBI NO: 15229706 NR Description: 60S acidic ribosomal protein P0 (RPP0C)
  misc_feature (1)..(264): Homolog of NCBI NO: 21554645 NR Description: putative 60S acidic ribosomal protein P0
  misc_feature (1)..(264): Homolog of NCBI NO: 15232603 NR Description: 60S acidic ribosomal protein P0 (RPP0B)
  misc_feature (1)..(264): Homolog of NCBI NO: 15225613 NR Description: 60S acidic ribosomal protein P0 (RPP0A)
MGKNTMMKRSVKLHAQKTGNDGFLNLMPLLQGNVGLIFTKGDLKEVSEEVAKYKVGAPARVGLVAPIDVVVQPGNTGLDPSQTSFFQVLNIPTKINKGTVEIITPVELIKKGDKVGSSEAALLAKLGIRPFSYGLVVESVYDNGSVFDPEVLNLTEDDLVEKFAAGVSLVSALSLAISYPTIAAAPHMFINAYKNVLAVALATEYSFPQAENVKEFLKDPSKFAVAAAAVAPVSGEFGGAPVAAAVVEEAAEESDGDMGFDLFG

SEQ ID NO: 109549 - protein, 259 aa, Zea mays subsp. mays
  misc_feature (1)..(259): Ceres Seq. ID no. 15180046
  misc_feature (176)..(258): Pfam Name: 60s Acidic ribosomal protein Pfam Description: 60s Acidic ribosomal protein
  misc_feature (1)..(258): Homolog of NCBI NO: 21593316 NR Description: 60S acidic ribosomal protein P0-C [Arabidopsis
  misc_feature (1)..(258): Homolog of NCBI NO: 15229706 NR Description: 60S acidic ribosomal protein P0 (RPP0C)
  misc_feature (1)..(259): Homolog of NCBI NO: 21554645 NR Description: putative 60S acidic ribosomal protein P0
  misc_feature (1)..(259): Homolog of NCBI NO: 15232603 NR Description: 60S acidic ribosomal protein P0 (RPP0B)
  misc_feature (1)..(259): Homolog of NCBI NO: 15225613 NR Description: 60S acidic ribosomal protein P0 (RPP0A)
MMKRSVKLHAQKTGNDGFLNLMPLLQGNVGLIFTKGDLKEVSEEVAKYKVGAPARVGLVAPIDVVVQPGNTGLDPSQTSFFQVLNIPTKINKGTVEIITPVELIKKGDKVGSSEAALLAKLGIRPFSYGLVVESVYDNGSVFDPEVLNLTEDDLVEKFAAGVSLVSALSLAISYPTIAAAPHMFINAYKNVLAVALATEYSFPQAENVKEFLKDPSKFAVAAAAVAPVSGEFGGAPVAAAVVEEAAEESDGDMGFDLFG

SEQ ID NO: 109550 - DNA, 940 bp, Zea mays subsp. mays
  misc_feature (1)..(940): Ceres Seq. ID no. 14309205
cagccccaggaaacctataaaattccttagatccaaactccgagaatggccggtggatttaccatcaacataaacattccggctggtgaaggatttaccattagcattaacccaaactctgctgcagcggtaggggctgcctttggccgaattcaacctccggctggtgaaggacttaacattagtattaacccaaactctgcaccagctggtaatctatgtacgaatccgtcctctcaaaagcccctagaatgctctccaggaaaggctaaccctaaggttttctttgatatggcggtgcgcggcaaagctgttggtcggatcgtgatggagctctttgccgacacgaccccacggacggcagagaatttccgcgccctctgtacaggcgagaaaggcatggggaagaagggtaagccacttcattacaaaggatcaatcatccaccatatgtgccccgattatatcattggcggaggagatttcacttacgaaaggaaaggatacggaggcgaatcaatctacgccggaggttttttcgaggatgagaacttcatcaaaaagcacaccggtccgggtatcctctccatgaacaacaatggtcctgacaccaaccaatctcagtttttgatctccttgaccgagaactgggaactcgacgatctacacgtcgtcttcggccaagttgttgaaggattggatgtggtcaggatcatatcacacgaacctcttaaggacaagttttccaagcccgtcgtgatcgactgcggtcagattaaatagatctgacagagatattttccaactacaatggttgcttgcttgctctgtgtccttttgatgcttggtgcgtttttaattttgttacttttgtttttttatcttttttcttgaaatttagattggctaccattgaataatgattacaaccatcatcagt

SEQ ID NO: 109551 - protein, 245 aa, Zea mays subsp. mays
  misc_feature (1)..(245): Ceres Seq. ID no. 14309206
  misc_feature (75)..(244): Homolog of NCBI NO: 68406 NR Description: peptidylprolyl isomerase (EC 5.2.1.8) - tomato
  misc_feature (75)..(244): Homolog of NCBI NO: 29124975 NR Description: cyclophilin [Populus tremuloides]
  misc_feature (76)..(244): Homolog of NCBI NO: 1076510 NR Description: peptidylprolyl isomerase (EC 5.2.1.8) Cyp -
  misc_feature (75)..(244): Homolog of NCBI NO: 15236211 NR Description: peptidylprolyl isomerase (cyclophilin)
  misc_feature (75)..(244): Homolog of NCBI NO: 118103 NR Description: Peptidyl-prolyl cis-trans isomerase (PPIase)
  misc_feature (76)..(244): Homolog of NCBI NO: 15227259 NR Description: cytosolic cyclophilin (ROC3) [Arabidopsis
  misc_feature (75)..(244): Homolog of NCBI NO: 21886603 NR Description: peptidylprolyl isomerase (cyclophilin) [Betula
  misc_feature (75)..(244): Homolog of NCBI NO: 11270316 NR Description: peptidylprolyl isomerase (EC 5.2.1.8)
  misc_feature (75)..(244): Homolog of NCBI NO: 18076088 NR Description: cyclophilin [Ricinus communis]
  misc_feature (76)..(244): Homolog of NCBI NO: 18146786 NR Description: CYP1 [Vigna radiata]
MAGGFTININIPAGEGFTISINPNSAAAVGAAFGRIQPPAGEGLNISINPNSAPAGNLCTNPSSQKPLECSPGKANPKVFFDMAVRGKAVGRIVMELFADTTPRTAENFRALCTGEKGMGKKGKPLHYKGSIIHHMCPDYIIGGGDFTYERKGYGGESIYAGGFFEDENFIKKHTGPGILSMNNNGPDTNQSQFLISLTENWELDDLHVVFGQVVEGLDVVRIISHEPLKDKFSKPVVIDCGQIK

SEQ ID NO: 109552 - protein, 163 aa, Zea mays subsp. mays
  misc_feature (1)..(163): Ceres Seq. ID no. 14309207
  misc_feature (1)..(162): Homolog of NCBI NO: 68406 NR Description: peptidylprolyl isomerase (EC 5.2.1.8) - tomato
  misc_feature (1)..(162): Homolog of NCBI NO: 29124975 NR Description: cyclophilin [Populus tremuloides]
  misc_feature (1)..(162): Homolog of NCBI NO: 1076510 NR Description: peptidylprolyl isomerase (EC 5.2.1.8) Cyp -
  misc_feature (1)..(162): Homolog of NCBI NO: 15236211 NR Description: peptidylprolyl isomerase (cyclophilin)
  misc_feature (1)..(162): Homolog of NCBI NO: 118103 NR Description: Peptidyl-prolyl cis-trans isomerase (PPIase)
  misc_feature (1)..(162): Homolog of NCBI NO: 15227259 NR Description: cytosolic cyclophilin (ROC3) [Arabidopsis
  misc_feature (1)..(162): Homolog of NCBI NO: 21886603 NR Description: peptidylprolyl isomerase (cyclophilin) [Betula
  misc_feature (1)..(162): Homolog of NCBI NO: 11270316 NR Description: peptidylprolyl isomerase (EC 5.2.1.8)
  misc_feature (1)..(162): Homolog of NCBI NO: 18076088 NR Description: cyclophilin [Ricinus communis]
  misc_feature (1)..(162): Homolog of NCBI NO: 18146786 NR Description: CYP1 [Vigna radiata]
MAVRGKAVGRIVMELFADTTPRTAENFRALCTGEKGMGKKGKPLHYKGSIIHHMCPDYIIGGGDFTYERKGYGGESIYAGGFFEDENFIKKHTGPGILSMNNNGPDTNQSQFLISLTENWELDDLHVVFGQVVEGLDVVRIISHEPLKDKFSKPVVIDCGQIK

SEQ ID NO: 109553 - protein, 151 aa, Zea mays subsp. mays
  misc_feature (1)..(151): Ceres Seq. ID no. 14309208
  misc_feature (1)..(150): Homolog of NCBI NO: 68406 NR Description: peptidylprolyl isomerase (EC 5.2.1.8) - tomato
  misc_feature (1)..(150): Homolog of NCBI NO: 29124975 NR Description: cyclophilin [Populus tremuloides]
  misc_feature (1)..(150): Homolog of NCBI NO: 1076510 NR Description: peptidylprolyl isomerase (EC 5.2.1.8) Cyp -
  misc_feature (1)..(150): Homolog of NCBI NO: 15236211 NR Description: peptidylprolyl isomerase (cyclophilin)
  misc_feature (1)..(150): Homolog of NCBI NO: 118103 NR Description: Peptidyl-prolyl cis-trans isomerase (PPIase)
  misc_feature (1)..(150): Homolog of NCBI NO: 15227259 NR Description: cytosolic cyclophilin (ROC3) [Arabidopsis
  misc_feature (1)..(150): Homolog of NCBI NO: 21886603 NR Description: peptidylprolyl isomerase (cyclophilin) [Betula
  misc_feature (1)..(150): Homolog of NCBI NO: 11270316 NR Description: peptidylprolyl isomerase (EC 5.2.1.8)
  misc_feature (1)..(150): Homolog of NCBI NO: 18076088 NR Description: cyclophilin [Ricinus communis]
  misc_feature (1)..(150): Homolog of NCBI NO: 18146786 NR Description: CYP1 [Vigna radiata]
MELFADTTPRTAENFRALCTGEKGMGKKGKPLHYKGSIIHHMCPDYIIGGGDFTYERKGYGGESIYAGGFFEDENFIKKHTGPGILSMNNNGPDTNQSQFLISLTENWELDDLHVVFGQVVEGLDVVRIISHEPLKDKFSKPVVIDCGQIK

SEQ ID NO: 109554 - DNA, 1117 bp, Zea mays subsp. mays
  misc_feature (1)..(1117): Ceres Seq. ID no. 14309202
aaagcttctcctctcttcctccgcccatctcggctttgcttcctccggtgaggcgtttaaaatggcggcagccttacctttatctccggttagccatcagttatgtcggagaagcaacaggttctggtacaacgctttgactcccaggttctgttcgccggttttctcgactacttctccctgtctcatcggcgtgaaaggaatcggctcgtcgagtcagttacggccacgccaccctctgatctcttcagcggcttcgactgattatctattgcatgacgtcggagccacggtggcagttcttggtggagcctacgcgcttgtcttactcttcgagagtctcacgaagcgagacgtgattccacagagattgagcagaaagcttgtgcatatactctcaggtctgcttttcgtactctcgtggccaatcttcagcgcatcaacggaggctcgatactttgctgcttttgttccgttagtgaatggcctaaggcttgttgtcaatggattatctgtctcccctaactccacgctaatccaatccgtcactagggaaggacgaccagaagagttgcttaaaggtccattgttctacgttctagcccttctcgttgctgcggttttcttctggagagattctcctaccggtatgatctcgctggcaatgatgtgtggtggcgacggaatagctgatatcatgggacgtaagtacggatcatataagataccttacaacccaagaaagagcttggcgggaagtatctccatgttcatattcggcttcttcatctccatcggattactttactattactcaagccttgggtatcttcacatgaactgggaaacaacctttacgagagtcgcgattgtctcattggtcgctacgttggttgagtcactacccatcaccgatcaaatagacgacaacgtttcggttcctctggcttcaattttggctgcttacctaagttttggatattagactcatccctcataaactgtataagttgtatttgtatgaatacgacctgggaatgcagctacgaatatgctaccagttgtatatattttactattactgctcaaagattcataactaatacaatttcgggtt

SEQ ID NO: 109555 - protein, 327 aa, Zea mays subsp. mays
  misc_feature (1)..(327): Ceres Seq. ID no. 14309203
  misc_feature (92)..(323): Homolog of NCBI NO: 21674801 NR Description: conserved hypothetical protein [Chlorobium
  misc_feature (95)..(327): Homolog of NCBI NO: 28850457 NR Description: similar to Oryza sativa (japonica
  misc_feature (90)..(277): Homolog of NCBI NO: 8843778 NR Description: emb|CAB85555.1~gene_id:MZN1.2~similar to unknown
  misc_feature (90)..(325): Homolog of NCBI NO: 15237702 NR Description: expressed protein [Arabidopsis thaliana]
  misc_feature (90)..(325): Homolog of NCBI NO: 21593148 NR Description: unknown [Arabidopsis thaliana]
  misc_feature (90)..(325): Homolog of NCBI NO: 34907982 NR Description: P0446G04.23 [Oryza sativa (japonica
  misc_feature (22)..(327): Homolog of NCBI NO: 32488404 NR Description: OSJNBa0043A12.34 [Oryza sativa (japonica
  misc_feature (21)..(327): Homolog of NCBI NO: 28393229 NR Description: unknown protein [Arabidopsis thaliana]
  misc_feature (21)..(327): Homolog of NCBI NO: 21537252 NR Description: unknown [Arabidopsis thaliana]
  misc_feature (21)..(327): Homolog of NCBI NO: 15238184 NR Description: expressed protein [Arabidopsis thaliana]
KLLLSSSAHLGFASSGEAFKMAAALPLSPVSHQLCRRSNRFWYNALTPRFCSPVFSTTSPCLIGVKGIGSSSQLRPRHPLISSAASTDYLLHDVGATVAVLGGAYALVLLFESLTKRDVIPQRLSRKLVHILSGLLFVLSWPIFSASTEARYFAAFVPLVNGLRLVVNGLSVSPNSTLIQSVTREGRPEELLKGPLFYVLALLVAAVFFWRDSPTGMISLAMMCGGDGIADIMGRKYGSYKIPYNPRKSLAGSISMFIFGFFISIGLLYYYSSLGYLHMNWETTFTRVAIVSLVATLVESLPITDQIDDNVSVPLASILAAYLSFGY

SEQ ID NO: 109556 - protein, 307 aa, Zea mays subsp. mays
  misc_feature (1)..(307): Ceres Seq. ID no. 14309204
  misc_feature (72)..(303): Homolog of NCBI NO: 21674801 NR Description: conserved hypothetical protein [Chlorobium
  misc_feature (75)..(307): Homolog of NCBI NO: 28850457 NR Description: similar to Oryza sativa (japonica
  misc_feature (70)..(257): Homolog of NCBI NO: 8843778 NR Description: emb|CAB85555.1~gene_id:MZN1.2~similar to unknown
  misc_feature (70)..(305): Homolog of NCBI NO: 15237702 NR Description: expressed protein [Arabidopsis thaliana]
  misc_feature (70)..(305): Homolog of NCBI NO: 21593148 NR Description: unknown [Arabidopsis thaliana]
  misc_feature (70)..(305): Homolog of NCBI NO: 34907982 NR Description: P0446G04.23 [Oryza sativa (japonica
  misc_feature (2)..(307): Homolog of NCBI NO: 32488404 NR Description: OSJNBa0043A12.34 [Oryza sativa (japonica
  misc_feature (1)..(307): Homolog of NCBI NO: 28393229 NR Description: unknown protein [Arabidopsis thaliana]
  misc_feature (1)..(307): Homolog of NCBI NO: 21537252 NR Description: unknown [Arabidopsis thaliana]
  misc_feature (1)..(307): Homolog of NCBI NO: 15238184 NR Description: expressed protein [Arabidopsis thaliana]
MAAALPLSPVSHQLCRRSNRFWYNALTPRFCSPVFSTTSPCLIGVKGIGSSSQLRPRHPLISSAASTDYLLHDVGATVAVLGGAYALVLLFESLTKRDVIPQRLSRKLVHILSGLLFVLSWPIFSASTEARYFAAFVPLVNGLRLVVNGLSVSPNSTLIQSVTREGRPEELLKGPLFYVLALLVAAVFFWRDSPTGMISLAMMCGGDGIADIMGRKYGSYKIPYNPRKSLAGSISMFIFGFFISIGLLYYYSSLGYLHMNWETTFTRVAIVSLVATLVESLPITDQIDDNVSVPLASILAAYLSFGY

SEQ ID NO: 109557 - DNA, 863 bp, Zea mays subsp. mays
  misc_feature (1)..(863): Ceres Seq. ID no. 15174341
atccaaacacttatctttttctctctcttccctcttcaatcttcacattttctctatggagaatcatggcaacaagcgagtctgggaccagtcctctgactccaacactcagcgggtcgactcgcccgagtctaagattcgtcgagttgactcgtccgattcgggtattaactcgtccgagtctcaactcgaatcggtcctcgactcgtcggaggtgcagctacaagacgacatttttaacatgcttgacgacacggacaatgtgcccgagcgtgactcggtgcagggtcttgactcagtgatcaaaagcttcgaggatgagataaatgctccaggttcggattctggttccggtgacccggcccaggaacccgactccggggagctacaatctaacttgggctatcttctagaagcctccgacgacgagctcgggttgccgccgacggtgggtgacggcgaggaaatgggtcgggctgccccggaaatggcggagcttgccaggttcgtgggatttgaagacgacatacccagttatgatgcattcgggtttgggtcggggtttacggcggagaatgacggaggtgccggaggttttgtgacggtggatgggttgtttgactattcggacccgtcggcggatgttttgtggcggtcggagtcattacaagctatgtaggtggtggcggtggttttagtgaaacggtgcgtaggggtggaaaatgtaaatctgggaaaatattggcgttaaaaataggaggaggggtagcacagaaaggtaggaggtagatgtgaaaaagttgtagggttaggatttgtttgttgttttggttttttcgttgaattcaattgaaacaaacccc

SEQ ID NO: 109558 - protein, 225 aa, Zea mays subsp. mays
  misc_feature (1)..(225): Ceres Seq. ID no. 15174342
  misc_feature (67)..(224): Homolog of NCBI NO: 18404714 NR Description: expressed protein [Arabidopsis thaliana]
  misc_feature (49)..(184): Homolog of NCBI NO: 34895572 NR Description: unnamed protein product [Oryza sativa (japonica
  misc_feature (46)..(224): Homolog of NCBI NO: 22329538 NR Description: expressed protein [Arabidopsis thaliana]
SKHLSFSLSSLFNLHIFSMENHGNKRVWDQSSDSNTQRVDSPESKIRRVDSSDSGINSSESQLESVLDSSEVQLQDDIFNMLDDTDNVPERDSVQGLDSVIKSFEDEINAPGSDSGSGDPAQEPDSGELQSNLGYLLEASDDELGLPPTVGDGEEMGRAAPEMAELARFVGFEDDIPSYDAFGFGSGFTAENDGGAGGFVTVDGLFDYSDPSADVLWRSESLQAM

SEQ ID NO: 109559 - protein, 207 aa, Zea mays subsp. mays
  misc_feature (1)..(207): Ceres Seq. ID no. 15174343
  misc_feature (49)..(206): Homolog of NCBI NO: 18404714 NR Description: expressed protein [Arabidopsis thaliana]
  misc_feature (31)..(166): Homolog of NCBI NO: 34895572 NR Description: unnamed protein product [Oryza sativa (japonica
  misc_feature (28)..(206): Homolog of NCBI NO: 22329538 NR Description: expressed protein [Arabidopsis thaliana]
MENHGNKRVWDQSSDSNTQRVDSPESKIRRVDSSDSGINSSESQLESVLDSSEVQLQDDIFNMLDDTDNVPERDSVQGLDSVIKSFEDEINAPGSDSGSGDPAQEPDSGELQSNLGYLLEASDDELGLPPTVGDGEEMGRAAPEMAELARFVGFEDDIPSYDAFGFGSGFTAENDGGAGGFVTVDGLFDYSDPSADVLWRSESLQAM

SEQ ID NO: 109560 - protein, 145 aa, Zea mays subsp. mays
  misc_feature (1)..(145): Ceres Seq. ID no. 15174344
  misc_feature (1)..(144): Homolog of NCBI NO: 18404714 NR Description: expressed protein [Arabidopsis thaliana]
  misc_feature (1)..(104): Homolog of NCBI NO: 34895572 NR Description: unnamed protein product [Oryza sativa (japonica
  misc_feature (1)..(144): Homolog of NCBI NO: 22329538 NR Description: expressed protein [Arabidopsis thaliana]
MLDDTDNVPERDSVQGLDSVIKSFEDEINAPGSDSGSGDPAQEPDSGELQSNLGYLLEASDDELGLPPTVGDGEEMGRAAPEMAELARFVGFEDDIPSYDAFGFGSGFTAENDGGAGGFVTVDGLFDYSDPSADVLWRSESLQAM

SEQ ID NO: 109561 - DNA, 1025 bp, Zea mays subsp. mays
  misc_feature (1)..(1025): Ceres Seq. ID no. 14309181
atcaacggataaaaaaaaaaaaaacgaaaccaacacaagaacagaagaagctctcatccttaaagggcaaagcttcctctgtaactacaatcaatggctcacttcatagaccttaacacttttaccaacactttactctcgacatctaaactacgtgagactcggaagatcgtaaaatcgagcgggtttgtttgtaggaaaaccaccactgatgactcggtacagcttccaagacggatgatgacacttggatttgctgtctccatagctctcactggaactttcagcggtaatgatgtttcgttggcacaagacaacaatgggttttggatagatggtcctcttccaactcctcctatttacaacaatatcgtgaacgagcagacaggaacgagatctttcttgaagaaaggagtgtatgtagctgacatcgggaccaaaggaagaacgtatagagttaaaaagtatgctttcgatctcttagctatggaggatttgatcggaccagacactttaaactatgttaaaaagtacttgaggcttaaatccaccttcttgttctacgatttcgacaatctcatctctgctgctgcctcccaagacaagctgcctctcactgatttggccaatagattgttcgacaactttgaaaagcttgaagatgcagctaaaacgaagaacttagccgagacagaatcgtgttacaaagatacaaagtttcttctccaagaagttatgaccagaatggcctgaagccagttcagttttcactggtttacttgctgctgaagatcactcattcacggtggataacactctgtgatcatgaaatgtaatcttgcataccaacacaaaaaaaaaaaaccttaaaagctaataagaaaaatgtaatattgggagaatgataatctagccaattctcttgtatgtataaatgcttgttttaagctgcttggaccagtttatctcccaacccttatatatagtttctacacattaatgaatgagagtatacacattgacat

SEQ ID NO: 109562 - protein, 219 aa, Zea mays subsp. mays
  misc_feature (1)..(219): Ceres Seq. ID no. 14309182
  misc_feature (16)..(219): Pfam Name: Oxygen evolving enhancer protein 3 (PsbQ) Pfam Description: Oxygen evolving enhancer protein 3 (PsbQ)
  misc_feature (83)..(218): Homolog of NCBI NO: 15234637 NR Description: oxygen-evolving complex protein 16, chloroplast
  misc_feature (85)..(218): Homolog of NCBI NO: 34810268 NR Description: Chain A, Crystal Structure Of Psbq Polypeptide Of
  misc_feature (23)..(218): Homolog of NCBI NO: 131397 NR Description: Oxygen-evolving enhancer protein 3, chloroplast (OEE3) (16 kDa subunit of oxygen evolving system of photosystem
  misc_feature (83)..(218): Homolog of NCBI NO: 11134066 NR Description: Oxygen-evolving enhancer protein 3-2, chloroplast (OEE3) (16 kDa subunit of oxygen evolving system of photosystem (OEC 16 kDa subunit) (Ferredoxin-NADP reductase binding protein)
  misc_feature (33)..(218): Homolog of NCBI NO: 11134057 NR Description: Oxygen-evolving enhancer protein 3-1, chloroplast (OEE3) (16 kDa subunit of oxygen evolving system of photosystem
  misc_feature (82)..(218): Homolog of NCBI NO: 15233587 NR Description: oxygen-evolving complex protein 16, chloroplast
  misc_feature (104)..(214): Homolog of NCBI NO: 8131595 NR Description: oxygen evolving enhancer protein 3 [Bruguiera
  misc_feature (47)..(219): Homolog of NCBI NO: 34915502 NR Description: hypothetical protein~similar to Arabidopsis
  misc_feature (1)..(219): Homolog of NCBI NO: 21537394 NR Description: unknown [Arabidopsis thaliana]
  misc_feature (1)..(219): Homolog of NCBI NO: 18395819 NR Description: PsbQ domain protein family, putative [Arabidopsis
MAHFIDLNTFTNTLLSTSKLRETRKIVKSSGFVCRKTTTDDSVQLPRRMMTLGFAVSIALTGTFSGNDVSLAQDNNGFWIDGPLPTPPIYNNIVNEQTGTRSFLKKGVYVADIGTKGRTYRVKKYAFDLLAMEDLIGPDTLNYVKKYLRLKSTFLFYDFDNLISAAASQDKLPLTDLANRLFDNFEKLEDAAKTKNLAETESCYKDTKFLLQEVMTRMA

SEQ ID NO: 109563 - protein, 171 aa, Zea mays subsp. mays
  misc_feature (1)..(171): Ceres Seq. ID no. 14309183
  misc_feature (1)..(171): Pfam Name: Oxygen evolving enhancer protein 3 (PsbQ) Pfam Description: Oxygen evolving enhancer protein 3 (PsbQ)
  misc_feature (1)..(171): Homolog of NCBI NO: 21537394 NR Description: unknown [Arabidopsis thaliana]
  misc_feature (35)..(170): Homolog of NCBI NO: 15234637 NR Description: oxygen-evolving complex protein 16, chloroplast
  misc_feature (1)..(170): Homolog of NCBI NO: 131397 NR Description: Oxygen-evolving enhancer protein 3, chloroplast (OEE3) (16 kDa subunit of oxygen evolving system of photosystem
  misc_feature (1)..(170): Homolog of NCBI NO: 11134057 NR Description: Oxygen-evolving enhancer protein 3-1, chloroplast (OEE3) (16 kDa subunit of oxygen evolving system of photosystem
  misc_feature (56)..(166): Homolog of NCBI NO: 8131595 NR Description: oxygen evolving enhancer protein 3 [Bruguiera
  misc_feature (1)..(171): Homolog of NCBI NO: 34915502 NR Description: hypothetical protein~similar to Arabidopsis
  misc_feature (34)..(170): Homolog of NCBI NO: 15233587 NR Description: oxygen-evolving complex protein 16, chloroplast
  misc_feature (35)..(170): Homolog of NCBI NO: 11134066 NR Description: Oxygen-evolving enhancer protein 3-2, chloroplast (OEE3) (16 kDa subunit of oxygen evolving system of photosystem (OEC 16 kDa subunit) (Ferredoxin-NADP reductase binding protein)
  misc_feature (37)..(170): Homolog of NCBI NO: 34810268 NR Description: Chain A, Crystal Structure Of Psbq Polypeptide Of
  misc_feature (1)..(171): Homolog of NCBI NO: 18395819 NR Description: PsbQ domain protein family, putative [Arabidopsis
MMTLGFAVSIALTGTFSGNDVSLAQDNNGFWIDGPLPTPPIYNNIVNEQTGTRSFLKKGVYVADIGTKGRTYRVKKYAFDLLAMEDLIGPDTLNYVKKYLRLKSTFLFYDFDNLISAAASQDKLPLTDLANRLFDNFEKLEDAAKTKNLAETESCYKDTKFLLQEVMTRMA

SEQ ID NO: 109564 - protein, 170 aa, Zea mays subsp. mays
  misc_feature (1)..(170): Ceres Seq. ID no. 14309184
  misc_feature (1)..(170): Pfam Name: Oxygen evolving enhancer protein 3 (PsbQ) Pfam Description: Oxygen evolving enhancer protein 3 (PsbQ)
  misc_feature (34)..(169): Homolog of NCBI NO: 15234637 NR Description: oxygen-evolving complex protein 16, chloroplast
  misc_feature (36)..(169): Homolog of NCBI NO: 34810268 NR Description: Chain A, Crystal Structure Of Psbq Polypeptide Of
  misc_feature (1)..(169): Homolog of NCBI NO: 131397 NR Description: Oxygen-evolving enhancer protein 3, chloroplast (OEE3) (16 kDa subunit of oxygen evolving system of photosystem
  misc_feature (34)..(169): Homolog of NCBI NO: 11134066 NR Description: Oxygen-evolving enhancer protein 3-2, chloroplast (OEE3) (16 kDa subunit of oxygen evolving system of photosystem (OEC 16 kDa subunit) (Ferredoxin-NADP reductase binding protein)
  misc_feature (1)..(169): Homolog of NCBI NO: 11134057 NR Description: Oxygen-evolving enhancer protein 3-1, chloroplast (OEE3) (16 kDa subunit of oxygen evolving system of photosystem
  misc_feature (33)..(169): Homolog of NCBI NO: 15233587 NR Description: oxygen-evolving complex protein 16, chloroplast
  misc_feature (55)..(165): Homolog of NCBI NO: 8131595 NR Description: oxygen evolving enhancer protein 3 [Bruguiera
  misc_feature (1)..(170): Homolog of NCBI NO: 34915502 NR Description: hypothetical protein~similar to Arabidopsis
  misc_feature (1)..(170): Homolog of NCBI NO: 21537394 NR Description: unknown [Arabidopsis thaliana]
  misc_feature (1)..(170): Homolog of NCBI NO: 18395819 NR Description: PsbQ domain protein family, putative [Arabidopsis
MTLGFAVSIALTGTFSGNDVSLAQDNNGFWIDGPLPTPPIYNNIVNEQTGTRSFLKKGVYVADIGTKGRTYRVKKYAFDLLAMEDLIGPDTLNYVKKYLRLKSTFLFYDFDNLISAAASQDKLPLTDLANRLFDNFEKLEDAAKTKNLAETESCYKDTKFLLQEVMTRMA

SEQ ID NO: 109565 - DNA, 1317 bp, Zea mays subsp. mays
  misc_feature (1)..(1317): Ceres Seq. ID no. 15179344
aagacctgttcttcagtttgctgagagagtgaactaacaattatggcgaagatgatgatgatgcaacagagccagccttctttatctctccttacttcttctgtctctgactttaatggcgctaagctccacttacaagtccagtacaagaggaaggttcaacagccaaaaggagcactctatgtatcagcctccagcgaaaagaagattctcataatgggtggcactcgattcatcggtatcttcttatccaggctccttgtcaaagaaggacatcaggttacgttgttcacaagaggtaaatctcctattgccaaacaactccctggcgaatctgaccaagactttgctgatttttcctccaagattcttcacttgaaaggagacagaaaggactatgactttgtgaagtcaagtctttcagctgaaggctttgatgttgtttatgatatcaacgggagggaggctgaagaagttgagcccatattagatgcacttcctaaactagaacagtacatctactgttcttcagctggtgtttacttgaaatctgatgtcttgccacactgtgaggtggatgcagttgacccaaagagcaggcacaaggggaagctggagactgagagcttactgcaatcaaaaggtgtaaactggacttccatacgccctgtctacatctacggtccgttgaactacaaccccgttgaagaatggttcttccaccgtctcaaagctggccgccctatcccagttccaaactctggaatccagatctcacagctcggtcacgttaaggacttggcaacagcctttctggccgtgcttggtaacgagaaagccagcagagagatattcaacatctcgggagagaagtacgtcacctttgatggcttagcaagagcttgcgcaaaggctggtgggtttccagagccagagattgttcactacaaccctaaagagtttgactttggaaagaagaaggctttccctttccgtgaccagcatttctttgcctcggtggagaaagcaaagcatgtgcttggatggaaaccagagttcgatttggtggagggtctcactgactcatacaaccttgatttcggtcgtggaactttcagaaaagaggcggatttcaccactgacgacatgattctaagcaagaaacttgttcttcaatagaaacatattgatttgtatggttgtgtgatctcacactgaagaacattcgcaagtttattgtcgtctcaaatgtattttggtttcggattgtgttcgacttcttctaagaagaggcggtctggctcttgaagtttactt

SEQ ID NO: 109566 - protein, 378 aa, Zea mays subsp. mays
  misc_feature (1)..(378): Ceres Seq. ID no. 15179345
  misc_feature (56)..(348): Pfam Name: NAD dependent epimerase/dehydratase family Pfam Description: NAD dependent epimerase/dehydratase family
  misc_feature (49)..(371): Homolog of NCBI NO: 32746733 NR Description: mRNA-binding protein precursor [Nicotiana tabacum]
  misc_feature (55)..(371): Homolog of NCBI NO: 23128166 NR Description: hypothetical protein [Nostoc punctiforme]
  misc_feature (55)..(371): Homolog of NCBI NO: 23040971 NR Description: hypothetical protein [Trichodesmium erythraeum
  misc_feature (55)..(371): Homolog of NCBI NO: 17232323 NR Description: mRNA-binding protein [Nostoc sp. PCC 7120]
  misc_feature (47)..(374): Homolog of NCBI NO: 34398360 NR Description: 38 kDa ribosome-associated protein precursor
  misc_feature (5)..(378): Homolog of NCBI NO: 25456171 NR Description: probable RNA binding protein [imported] -
  misc_feature (1)..(378): Homolog of NCBI NO: 25454619 NR Description: hypothetical protein g5bf [imported] -
  misc_feature (1)..(378): Homolog of NCBI NO: 17064988 NR Description: g5bf protein [Arabidopsis thaliana]
  misc_feature (1)..(378): Homolog of NCBI NO: 21593201 NR Description: putative RNA-binding protein [Arabidopsis
  misc_feature (1)..(378): Homolog of NCBI NO: 15217485 NR Description: RNA-binding protein -related [Arabidopsis
MAKMMMMQQSQPSLSLLTSSVSDFNGAKLHLQVQYKRKVQQPKGALYVSASSEKKILIMGGTRFIGIFLSRLLVKEGHQVTLFTRGKSPIAKQLPGESDQDFADFSSKILHLKGDRKDYDFVKSSLSAEGFDVVYDINGREAEEVEPILDALPKLEQYIYCSSAGVYLKSDVLPHCEVDAVDPKSRHKGKLETESLLQSKGVNWTSIRPVYIYGPLNYNPVEEWFFHRLKAGRPIPVPNSGIQISQLGHVKDLATAFLAVLGNEKASREIFNISGEKYVTFDGLARACAKAGGFPEPEIVHYNPKEFDFGKKKAFPFRDQHFFASVEKAKHVLGWKPEFDLVEGLTDSYNLDFGRGTFRKEADFTTDDMILSKKLVLQ

SEQ ID NO: 109567 - protein, 375 aa, Zea mays subsp. mays
  misc_feature (1)..(375): Ceres Seq. ID no. 15179346
  misc_feature (53)..(345): Pfam Name: NAD dependent epimerase/dehydratase family Pfam Description: NAD dependent epimerase/dehydratase family
  misc_feature (46)..(368): Homolog of NCBI NO: 32746733 NR Description: mRNA-binding protein precursor [Nicotiana tabacum]
  misc_feature (52)..(368): Homolog of NCBI NO: 23128166 NR Description: hypothetical protein [Nostoc punctiforme]
  misc_feature (52)..(368): Homolog of NCBI NO: 23040971 NR Description: hypothetical protein [Trichodesmium erythraeum
  misc_feature (52)..(368): Homolog of NCBI NO: 17232323 NR Description: mRNA-binding protein [Nostoc sp. PCC 7120]
  misc_feature (44)..(371): Homolog of NCBI NO: 34398360 NR Description: 38 kDa ribosome-associated protein precursor
  misc_feature (2)..(375): Homolog of NCBI NO: 25456171 NR Description: probable RNA binding protein [imported] -
  misc_feature (1)..(375): Homolog of NCBI NO: 25454619 NR Description: hypothetical protein g5bf [imported] -
  misc_feature (1)..(375): Homolog of NCBI NO: 17064988 NR Description: g5bf protein [Arabidopsis thaliana]
  misc_feature (1)..(375): Homolog of NCBI NO: 21593201 NR Description: putative RNA-binding protein [Arabidopsis
  misc_feature (1)..(375): Homolog of NCBI NO: 15217485 NR Description: RNA-binding protein -related [Arabidopsis
MMMMQQSQPSLSLLTSSVSDFNGAKLHLQVQYKRKVQQPKGALYVSASSEKKILIMGGTRFIGIFLSRLLVKEGHQVTLFTRGKSPIAKQLPGESDQDFADFSSKILHLKGDRKDYDFVKSSLSAEGFDVVYDINGREAEEVEPILDALPKLEQYIYCSSAGVYLKSDVLPHCEVDAVDPKSRHKGKLETESLLQSKGVNWTSIRPVYIYGPLNYNPVEEWFFHRLKAGRPIPVPNSGIQISQLGHVKDLATAFLAVLGNEKASREIFNISGEKYVTFDGLARACAKAGGFPEPEIVHYNPKEFDFGKKKAFPFRDQHFFASVEKAKHVLGWKPEFDLVEGLTDSYNLDFGRGTFRKEADFTTDDMILSKKLVLQ

SEQ ID NO: 109568 - protein, 374 aa, Zea mays subsp. mays
  misc_feature (1)..(374): Ceres Seq. ID no. 15179347
  misc_feature (52)..(344): Pfam Name: NAD dependent epimerase/dehydratase family Pfam Description: NAD dependent epimerase/dehydratase family
  misc_feature (45)..(367): Homolog of NCBI NO: 32746733 NR Description: mRNA-binding protein precursor [Nicotiana tabacum]
  misc_feature (51)..(367): Homolog of NCBI NO: 23128166 NR Description: hypothetical protein [Nostoc punctiforme]
  misc_feature (51)..(367): Homolog of NCBI NO: 23040971 NR Description: hypothetical protein [Trichodesmium erythraeum
  misc_feature (51)..(367): Homolog of NCBI NO: 17232323 NR Description: mRNA-binding protein [Nostoc sp. PCC 7120]
  misc_feature (43)..(370): Homolog of NCBI NO: 34398360 NR Description: 38 kDa ribosome-associated protein precursor
  misc_feature (1)..(374): Homolog of NCBI NO: 25456171 NR Description: probable RNA binding protein [imported] -
  misc_feature (1)..(374): Homolog of NCBI NO: 25454619 NR Description: hypothetical protein g5bf [imported] -
  misc_feature (1)..(374): Homolog of NCBI NO: 17064988 NR Description: g5bf protein [Arabidopsis thaliana]
  misc_feature (1)..(374): Homolog of NCBI NO: 21593201 NR Description: putative RNA-binding protein [Arabidopsis
  misc_feature (1)..(374): Homolog of NCBI NO: 15217485 NR Description: RNA-binding protein -related [Arabidopsis
MMMQQSQPSLSLLTSSVSDFNGAKLHLQVQYKRKVQQPKGALYVSASSEKKILIMGGTRFIGIFLSRLLVKEGHQVTLFTRGKSPIAKQLPGESDQDFADFSSKILHLKGDRKDYDFVKSSLSAEGFDVVYDINGREAEEVEPILDALPKLEQYIYCSSAGVYLKSDVLPHCEVDAVDPKSRHKGKLETESLLQSKGVNWTSIRPVYIYGPLNYNPVEEWFFHRLKAGRPIPVPNSGIQISQLGHVKDLATAFLAVLGNEKASREIFNISGEKYVTFDGLARACAKAGGFPEPEIVHYNPKEFDFGKKKAFPFRDQHFFASVEKAKHVLGWKPEFDLVEGLTDSYNLDFGRGTFRKEADFTTDDMILSKKLVLQ

SEQ ID NO: 109569 - DNA, 623 bp, Zea mays subsp. mays
  misc_feature (1)..(623): Ceres Seq. ID no. 15174293
aatcagagtagtgagtgccaaaaaaaagattcaaaagtcgccgagagcacaaaccctcctctaatggcgtctctctccatggcttccgttaaccttagcttctctcccttacgctctcctccaaaggtttccactcacgcttccgttcaattcgctcggttcagctcgtcgattcttgcctcagctcactgcatttctgggcttcgcgcggttcttcctcagaagatatccaccgttgtctctcagagttctcagaggcttcagactcttaccgttttcgctcataagggctacaagatgaagacccacaaggcctcagcgaagaggttcagggtgacgggtagagggaagatagtgaggaggagatccgggaagcagcatttgttagctaagaagaacaacaagaggaagctgcgtctttccaaaatgcatgaagtgagccggagtgactatgacaatgtgatcggcgctcttccctacctgaaagtcaaccgaaaggcgacttaagcagagccgagcttgattctttttcttacctacatttctcattttgtaatctaagttgtgataatactctctcttttgttttgtgattttttggtcaatgagttgatccttcttct

SEQ ID NO: 109570 - protein, 168 aa, Zea mays subsp. mays
  misc_feature (1)..(168): Ceres Seq. ID no. 15174294
  misc_feature (100)..(158): Pfam Name: Ribosomal protein L35 Pfam Description: Ribosomal protein L35
  misc_feature (99)..(161): Homolog of NCBI NO: 17230919 NR Description: 50S ribosomal protein L35 [Nostoc sp. PCC 7120]
  misc_feature (96)..(167): Homolog of NCBI NO: 28411204 NR Description: putative plastid ribosomal protein L35 [Zea mays]
  misc_feature (96)..(167): Homolog of NCBI NO: 28411209 NR Description: putative plastid ribosomal protein L35 [Zea mays]
  misc_feature (96)..(167): Homolog of NCBI NO: 28411206 NR Description: putative plastid ribosomal protein L35 [Zea mays]
  misc_feature (54)..(167): Homolog of NCBI NO: 28411216 NR Description: putative plastid ribosomal protein L35 [Zea mays]
  misc_feature (24)..(167): Homolog of NCBI NO: 28411202 NR Description: putative plastid ribosomal protein L35 [Zea mays]
  misc_feature (23)..(166): Homolog of NCBI NO: 132918 NR Description: 50S RIBOSOMAL PROTEIN L35, CHLOROPLAST PRECURSOR
  misc_feature (22)..(143): Homolog of NCBI NO: 25295676 NR Description: probable chloroplast ribosomal protein L35
  misc_feature (27)..(168): Homolog of NCBI NO: 7572943 NR Description: ribosomal protein L35 [Arabidopsis thaliana]
  misc_feature (22)..(168): Homolog of NCBI NO: 30682291 NR Description: chloroplast ribosomal protein L35 -related
NQSSECQKKDSKVAESTNPPLMASLSMASVNLSFSPLRSPPKVSTHASVQFARFSSSILASAHCISGLRAVLPQKISTVVSQSSQRLQTLTVFAHKGYKMKTHKASAKRFRVTGRGKIVRRRSGKQHLLAKKNNKRKLRLSKMHEVSRSDYDNVIGALPYLKVNRKAT

SEQ ID NO: 109571 - protein, 147 aa, Zea mays subsp. mays
  misc_feature (1)..(147): Ceres Seq. ID no. 15174295
  misc_feature (79)..(137): Pfam Name: Ribosomal protein L35 Pfam Description: Ribosomal protein L35
  misc_feature (78)..(140): Homolog of NCBI NO: 17230919 NR Description: 50S ribosomal protein L35 [Nostoc sp. PCC 7120]
  misc_feature (75)..(146): Homolog of NCBI NO: 28411204 NR Description: putative plastid ribosomal protein L35 [Zea mays]
  misc_feature (75)..(146): Homolog of NCBI NO: 28411209 NR Description: putative plastid ribosomal protein L35 [Zea mays]
  misc_feature (75)..(146): Homolog of NCBI NO: 28411206 NR Description: putative plastid ribosomal protein L35 [Zea mays]
  misc_feature (33)..(146): Homolog of NCBI NO: 28411216 NR Description: putative plastid ribosomal protein L35 [Zea mays]
  misc_feature (3)..(146): Homolog of NCBI NO: 28411202 NR Description: putative plastid ribosomal protein L35 [Zea mays]
  misc_feature (2)..(145): Homolog of NCBI NO: 132918 NR Description: 50S RIBOSOMAL PROTEIN L35, CHLOROPLAST PRECURSOR
  misc_feature (1)..(122): Homolog of NCBI NO: 25295676 NR Description: probable chloroplast ribosomal protein L35
  misc_feature (6)..(147): Homolog of NCBI NO: 7572943 NR Description: ribosomal protein L35 [Arabidopsis thaliana]
  misc_feature (1)..(147): Homolog of NCBI NO: 30682291 NR Description: chloroplast ribosomal protein L35 -related
MASLSMASVNLSFSPLRSPPKVSTHASVQFARFSSSILASAHCISGLRAVLPQKISTVVSQSSQRLQTLTVFAHKGYKMKTHKASAKRFRVTGRGKIVRRRSGKQHLLAKKNNKRKLRLSKMHEVSRSDYDNVIGALPYLKVNRKAT

SEQ ID NO: 109572 - protein, 142 aa, Zea mays subsp. mays
  misc_feature (1)..(142): Ceres Seq. ID no. 15174296
  misc_feature (74)..(132): Pfam Name: Ribosomal protein L35 Pfam Description: Ribosomal protein L35
  misc_feature (73)..(135): Homolog of NCBI NO: 17230919 NR Description: 50S ribosomal protein L35 [Nostoc sp. PCC 7120]
  misc_feature (70)..(141): Homolog of NCBI NO: 28411204 NR Description: putative plastid ribosomal protein L35 [Zea mays]
  misc_feature (70)..(141): Homolog of NCBI NO: 28411209 NR Description: putative plastid ribosomal protein L35 [Zea mays]
  misc_feature (70)..(141): Homolog of NCBI NO: 28411206 NR Description: putative plastid ribosomal protein L35 [Zea mays]
  misc_feature (28)..(141): Homolog of NCBI NO: 28411216 NR Description: putative plastid ribosomal protein L35 [Zea mays]
  misc_feature (1)..(141): Homolog of NCBI NO: 28411202 NR Description: putative plastid ribosomal protein L35 [Zea mays]
  misc_feature (1)..(140): Homolog of NCBI NO: 132918 NR Description: 50S RIBOSOMAL PROTEIN L35, CHLOROPLAST PRECURSOR
  misc_feature (1)..(117): Homolog of NCBI NO: 25295676 NR Description: probable chloroplast ribosomal protein L35
  misc_feature (1)..(142): Homolog of NCBI NO: 7572943 NR Description: ribosomal protein L35 [Arabidopsis thaliana]
  misc_feature (1)..(142): Homolog of NCBI NO: 30682291 NR Description: chloroplast ribosomal protein L35 -related
MASVNLSFSPLRSPPKVSTHASVQFARFSSSILASAHCISGLRAVLPQKISTVVSQSSQRLQTLTVFAHKGYKMKTHKASAKRFRVTGRGKIVRRRSGKQHLLAKKNNKRKLRLSKMHEVSRSDYDNVIGALPYLKVNRKAT

SEQ ID NO: 109573 - DNA, 904 bp, Zea mays subsp. mays
  misc_feature (1)..(904): Ceres Seq. ID no. 15174088
accggtctcaatggcgaagctcctctcccgctccaccgcctcgcgcgtcgcaaatcgtttcttctccacctccagagccgccgctccttctcgctctaacctcatctcccgtcgatcttcaccggcgctgttccaagccatgggattcatccctgattcgacccgtttgacgacgatccggacccggatggataggtccggtggatcgtattccccgctcaaatccggatccaatttcagcgacagggcacctacggagatggcgccgctgtttcccggctgcgactacgagcattggctcatcgtcatggagaagcccggcggcgaaaacgcgagtagacagcagatgatcgattgctatgttcagactcttgccaaaattgtcggaagtgaggaagaagctaagaggaagatctataatgtctcgtgcgagaggtattttgggtttggttgtgagatcgatgaggagacatcaaataaactcgaagggattcctggtgttctcttcgtgcttccggattcctatgttgatccagagtacaaagactacggagctgagttgtttgtgaatggagaagtagttccgcgtccaccagagagacagaggaagatactggagttaacgactcaaagaagctcggataaaccgaggtacaatgacagaaccagaaatgttcgacggagagataacatgcgttaagaccttcagtactcaagagtcttttgctaaacatctcctttcccttttgaacttcgttcgtattgcctttcttggtgtttgttatttgctccactctatacgaataatgtaaattgtgatcatggtgatgatggtattatggattatgttgtttctgttcgatcgcgcgaagcttattcaatagtacctcttagtattattttc

SEQ ID NO: 109574 - protein, 232 aa, Zea mays subsp. mays
  misc_feature (1)..(232): Ceres Seq. ID no. 15174089
  misc_feature (53)..(232): Homolog of NCBI NO: 15226108 NR Description: plastid protein [Arabidopsis thaliana]
  misc_feature (4)..(232): Homolog of NCBI NO: 15223247 NR Description: plastid protein -related [Arabidopsis thaliana]
  misc_feature (4)..(232): Homolog of NCBI NO: 15226934 NR Description: expressed protein [Arabidopsis thaliana]
  misc_feature (70)..(229): Homolog of NCBI NO: 15220382 NR Description: DAG protein -related [Arabidopsis thaliana]
  misc_feature (19)..(231): Homolog of NCBI NO: 18400602 NR Description: expressed protein [Arabidopsis thaliana]
  misc_feature (11)..(230): Homolog of NCBI NO: 38344141 NR Description: OSJNBa0041A02.8 [Oryza sativa (japonica
  misc_feature (11)..(232): Homolog of NCBI NO: 34897972 NR Description: putative plastid protein [Oryza sativa (japonica
  misc_feature (53)..(232): Homolog of NCBI NO: 2440029 NR Description: DAL1 protein [Arabidopsis thaliana]
  misc_feature (53)..(232): Homolog of NCBI NO: 21617909 NR Description: plastid protein [Arabidopsis thaliana]
  misc_feature (53)..(232): Homolog of NCBI NO: 25370552 NR Description: DAG protein homolog [imported] - Arabidopsis
PVSMAKLLSRSTASRVANRFFSTSRAAAPSRSNLISRRSSPALFQAMGFIPDSTRLTTIRTRMDRSGGSYSPLKSGSNFSDRAPTEMAPLFPGCDYEHWLIVMEKPGGENASRQQMIDCYVQTLAKIVGSEEEAKRKIYNVSCERYFGFGCEIDEETSNKLEGIPGVLFVLPDSYVDPEYKDYGAELFVNGEVVPRPPERQRKILELTTQRSSDKPRYNDRTRNVRRRDNMR

SEQ ID NO: 109575 - protein, 229 aa, Zea mays subsp. mays
  misc_feature (1)..(229): Ceres Seq. ID no. 15174090
  misc_feature (67)..(226): Homolog of NCBI NO: 15220382 NR Description: DAG protein -related [Arabidopsis thaliana]
  misc_feature (16)..(228): Homolog of NCBI NO: 18400602 NR Description: expressed protein [Arabidopsis thaliana]
  misc_feature (8)..(227): Homolog of NCBI NO: 38344141 NR Description: OSJNBa0041A02.8 [Oryza sativa (japonica
  misc_feature (8)..(229): Homolog of NCBI NO: 34897972 NR Description: putative plastid protein [Oryza sativa (japonica
  misc_feature (50)..(229): Homolog of NCBI NO: 2440029 NR Description: DAL1 protein [Arabidopsis thaliana]
  misc_feature (50)..(229): Homolog of NCBI NO: 21617909 NR Description: plastid protein [Arabidopsis thaliana]
  misc_feature (50)..(229): Homolog of NCBI NO: 25370552 NR Description: DAG protein homolog [imported] - Arabidopsis
  misc_feature (50)..(229): Homolog of NCBI NO: 15226108 NR Description: plastid protein [Arabidopsis thaliana]
  misc_feature (1)..(229): Homolog of NCBI NO: 15223247 NR Description: plastid protein -related [Arabidopsis thaliana]
  misc_feature (1)..(229): Homolog of NCBI NO: 15226934 NR Description: expressed protein [Arabidopsis thaliana]
MAKLLSRSTASRVANRFFSTSRAAAPSRSNLISRRSSPALFQAMGFIPDSTRLTTIRTRMDRSGGSYSPLKSGSNFSDRAPTEMAPLFPGCDYEHWLIVMEKPGGENASRQQMIDCYVQTLAKIVGSEEEAKRKIYNVSCERYFGFGCEIDEETSNKLEGIPGVLFVLPDSYVDPEYKDYGAELFVNGEVVPRPPERQRKILELTTQRSSDKPRYNDRTRNVRRRDNMR

SEQ ID NO: 109576 - protein, 186 aa, Zea mays subsp. mays
  misc_feature (1)..(186): Ceres Seq. ID no. 15174091
  misc_feature (24)..(183): Homolog of NCBI NO: 15220382 NR Description: DAG protein -related [Arabidopsis thaliana]
  misc_feature (1)..(185): Homolog of NCBI NO: 18400602 NR Description: expressed protein [Arabidopsis thaliana]
  misc_feature (1)..(184): Homolog of NCBI NO: 38344141 NR Description: OSJNBa0041A02.8 [Oryza sativa (japonica
  misc_feature (1)..(186): Homolog of NCBI NO: 34897972 NR Description: putative plastid protein [Oryza sativa (japonica
  misc_feature (7)..(186): Homolog of NCBI NO: 2440029 NR Description: DAL1 protein [Arabidopsis thaliana]
  misc_feature (7)..(186): Homolog of NCBI NO: 21617909 NR Description: plastid protein [Arabidopsis thaliana]
  misc_feature (7)..(186): Homolog of NCBI NO: 25370552 NR Description: DAG protein homolog [imported] - Arabidopsis
  misc_feature (7)..(186): Homolog of NCBI NO: 15226108 NR Description: plastid protein [Arabidopsis thaliana]
  misc_feature (1)..(186): Homolog of NCBI NO: 15223247 NR Description: plastid protein -related [Arabidopsis thaliana]
  misc_feature (1)..(186): Homolog of NCBI NO: 15226934 NR Description: expressed protein [Arabidopsis thaliana]
MGFIPDSTRLTTIRTRMDRSGGSYSPLKSGSNFSDRAPTEMAPLFPGCDYEHWLIVMEKPGGENASRQQMIDCYVQTLAKIVGSEEEAKRKIYNVSCERYFGFGCEIDEETSNKLEGIPGVLFVLPDSYVDPEYKDYGAELFVNGEVVPRPPERQRKILELTTQRSSDKPRYNDRTRNVRRRDNMR

SEQ ID NO: 109577 - DNA, 736 bp, Zea mays subsp. mays
  misc_feature (1)..(736): Ceres Seq. ID no. 14309166
aaaaatctcagaagaagctacgaggcagccatggcttccatttcatcatgcacagctccttgtgcgagcttattctcctctaccaccaaacctatcaacagttcttcttcttcttcttcctcctcagtaaggctctcctctcggtttcttggaactcgggttgtgaagctcagtatccgactcggaccctccaatgggtctagagccacttgctggttcaagttcggaaagaacggcgtcgatgctgagaatgctggaatctatggcagccaatcacgtgatgatttcgatagagacgatgtcgaacagtatttcaactacatggggatgcttgcggttgaaggtacctatgataagatggaggctcttctaaaccaaaacattcatcctgtagatattcttctgatgttagcagcctcagaaggagacaagcctaagatagaggagctcctcagagccggcgctgactacactgttaaggacgctgatggaagaaccgctcttgacagagccagcagtgaggagatccgtgatttgatccttggatctctcactcaaaaggcttgacaagatctcctctagcttcttcttacagagaaggtgatgtctgttttttggtaccttggaatcttagtcgtttcaatgttctcttacttttacgtaattggtccgaaccctaagtgtgcttcaactttaaagtaaagattgaatctattaccagaagctttacaaaacc

SEQ ID NO: 109578 - protein, 188 aa, Zea mays subsp. mays
  misc_feature (1)..(188): Ceres Seq. ID no. 14309167
  misc_feature (153)..(169): Homolog of NCBI NO: 11994141 NR Description: contains similarity to DNA polymerase
  misc_feature (108)..(182): Homolog of NCBI NO: 33146521 NR Description: unknown protein [Oryza sativa (japonica
  misc_feature (11)..(182): Homolog of NCBI NO: 34901972 NR Description: hypothetical protein~similar to Arabidopsis
  misc_feature (25)..(188): Homolog of NCBI NO: 18403267 NR Description: expressed protein [Arabidopsis thaliana]
  misc_feature (18)..(188): Homolog of NCBI NO: 25373264 NR Description: unknown protein [imported] - Arabidopsis thaliana
KNLRRSYEAAMASISSCTAPCASLFSSTTKPINSSSSSSSSSVRLSSRFLGTRVVKLSIRLGPSNGSRATCWFKFGKNGVDAENAGIYGSQSRDDFDRDDVEQYFNYMGMLAVEGTYDKMEALLNQNIHPVDILLMLAASEGDKPKIEELLRAGADYTVKDADGRTALDRASSEEIRDLILGSLTQKA

SEQ ID NO: 109579 - protein, 178 aa, Zea mays subsp. mays
  misc_feature (1)..(178): Ceres Seq. ID no. 14309168
  misc_feature (143)..(159): Homolog of NCBI NO: 11994141 NR Description: contains similarity to DNA polymerase
  misc_feature (98)..(172): Homolog of NCBI NO: 33146521 NR Description: unknown protein [Oryza sativa (japonica
  misc_feature (1)..(172): Homolog of NCBI NO: 34901972 NR Description: hypothetical protein~similar to Arabidopsis
  misc_feature (15)..(178): Homolog of NCBI NO: 18403267 NR Description: expressed protein [Arabidopsis thaliana]
  misc_feature (8)..(178): Homolog of NCBI NO: 25373264 NR Description: unknown protein [imported] - Arabidopsis thaliana
MASISSCTAPCASLFSSTTKPINSSSSSSSSSVRLSSRFLGTRVVKLSIRLGPSNGSRATCWFKFGKNGVDAENAGIYGSQSRDDFDRDDVEQYFNYMGMLAVEGTYDKMEALLNQNIHPVDILLMLAASEGDKPKIEELLRAGADYTVKDADGRTALDRASSEEIRDLILGSLTQKA

SEQ ID NO: 109580 - DNA, 1099 bp, Zea mays subsp. mays
  misc_feature (1)..(1099): Ceres Seq. ID no. 14309162
acaactaaatctaattaagaaaaaaacagagtctgtctttgactttccaaaaacagagcctttttttttgccttaacacacatcaatggcgattcctgtgattgatttctccaagatcaatggcgaagaaagggagaaaacactctctgaaatcgctaaagcttgcgaagaatgggggtttttccagctggtgaaccatgggatcccattggagcttcttaacaaggtgaagaagctggcctcagattgctacaaaacagagagagaagaagcgttcaagacctcaactcccgtgaagctactcaacgagttgcttgagaaaaactctggagagaagctcgagaacgttgactgggaagatgtcttcactctattagaccacaaccaaaacgaatggccatccaacacttctggcctcaaagagacgatggtagaatacagagaagaagtgaggaaactagcgagcaagatgatggaagtgatggacgagaacttgggtttgcctaaaggttacataaagaaagcttttaacgaaggcatggaagacggagaagagacggctttctttggaaccaaagttagccattacccaccttgtcctcatccagagcttgtcaatggccttaggtctcataccgatgcaggaggtgtcgttttgttgttccaagacgatgagtacgatggccttcaagtgttgaaagatggagagtggatcgatgttcagccgatgcctaatgctattgttatcaacactggtgatcagattgaagttcttagcaacggaaggtacaagagtgcatggcacagggtgttggcgagggaggaaggaaacaggaggtccattgcttccttctacaatccgtcgtacaaggcggccattgggccagcggcggaggaaggaagtgagaagaagtatccaaagtttgtgtttggagattatatggatgtctatgcaaaccagaagttcatgcctaaggagcctcgttttcttgctgtgaagactctctaaatgttgttaattgaatcactcttttattcaacgtcatgatgtattttcacttttaagttattaaatgccaagtttaataattgataaaat

SEQ ID NO: 109581 - protein, 307 aa, Zea mays subsp. mays
  misc_feature (1)..(307): Ceres Seq. ID no. 14309163
  misc_feature (159)..(259): Pfam Name: 2OG-Fe(II) oxygenase superfamily Pfam Description: 2OG-Fe(II) oxygenase superfamily
  misc_feature (1)..(305): Homolog of NCBI NO: 25285704 NR Description: 1-aminocyclopropane-1-carboxylate oxidase (EC
  misc_feature (1)..(305): Homolog of NCBI NO: 15220770 NR Description: 1-aminocyclopropane-1-carboxylate oxidase (ACC
  misc_feature (1)..(305): Homolog of NCBI NO: 7433217 NR Description: 1-aminocyclopropane-1-carboxylate oxidase (EC
  misc_feature (1)..(307): Homolog of NCBI NO: 25452792 NR Description: 1-aminocyclopropane-1-carboxylate oxidase (ACC
  misc_feature (1)..(307): Homolog of NCBI NO: 12001828 NR Description: 1-aminocyclopropane-1-carboxylate oxidase; ACC
  misc_feature (1)..(307): Homolog of NCBI NO: 27371996 NR Description: 1-aminocyclopropane-1-carboxylic acid oxidase
  misc_feature (1)..(307): Homolog of NCBI NO: 28949891 NR Description: 1-aminocyclopropane-1-carboxylic acid oxidase
  misc_feature (1)..(307): Homolog of NCBI NO: 25285689 NR Description: hypothetical protein F2P24.4 [imported] -
  misc_feature (1)..(307): Homolog of NCBI NO: 21555054 NR Description: 1-aminocyclopropane-1-carboxylate oxidase,
  misc_feature (1)..(307): Homolog of NCBI NO: 18411485 NR Description: 1-aminocyclopropane-1-carboxylate oxidase (ACC
MAIPVIDFSKINGEEREKTLSEIAKACEEWGFFQLVNHGIPLELLNKVKKLASDCYKTEREEAFKTSTPVKLLNELLEKNSGEKLENVDWEDVFTLLDHNQNEWPSNTSGLKETMVEYREEVRKLASKMMEVMDENLGLPKGYIKKAFNEGMEDGEETAFFGTKVSHYPPCPHPELVNGLRSHTDAGGVVLLFQDDEYDGLQVLKDGEWIDVQPMPNAIVINTGDQIEVLSNGRYKSAWHRVLAREEGNRRSIASFYNPSYKAAIGPAAEEGSEKKYPKFVFGDYMDVYANQKFMPKEPRFLAVKTL

SEQ ID NO: 109582 - protein, 193 aa, Zea mays subsp. mays
  misc_feature (1)..(193): Ceres Seq. ID no. 14309164
  misc_feature (45)..(145): Pfam Name: 2OG-Fe(II) oxygenase superfamily Pfam Description: 2OG-Fe(II) oxygenase superfamily
  misc_feature (1)..(191): Homolog of NCBI NO: 25285704 NR Description: 1-aminocyclopropane-1-carboxylate oxidase (EC
  misc_feature (1)..(191): Homolog of NCBI NO: 15220770 NR Description: 1-aminocyclopropane-1-carboxylate oxidase (ACC
  misc_feature (1)..(191): Homolog of NCBI NO: 7433217 NR Description: 1-aminocyclopropane-1-carboxylate oxidase (EC
  misc_feature (1)..(193): Homolog of NCBI NO: 25452792 NR Description: 1-aminocyclopropane-1-carboxylate oxidase (ACC
  misc_feature (1)..(193): Homolog of NCBI NO: 12001828 NR Description: 1-aminocyclopropane-1-carboxylate oxidase; ACC
  misc_feature (1)..(193): Homolog of NCBI NO: 27371996 NR Description: 1-aminocyclopropane-1-carboxylic acid oxidase
  misc_feature (1)..(193): Homolog of NCBI NO: 28949891 NR Description: 1-aminocyclopropane-1-carboxylic acid oxidase
  misc_feature (1)..(193): Homolog of NCBI NO: 25285689 NR Description: hypothetical protein F2P24.4 [imported] -
  misc_feature (1)..(193): Homolog of NCBI NO: 21555054 NR Description: 1-aminocyclopropane-1-carboxylate oxidase,
  misc_feature (1)..(193): Homolog of NCBI NO: 18411485 NR Description: 1-aminocyclopropane-1-carboxylate oxidase (ACC
MVEYREEVRKLASKMMEVMDENLGLPKGYIKKAFNEGMEDGEETAFFGTKVSHYPPCPHPELVNGLRSHTDAGGVVLLFQDDEYDGLQVLKDGEWIDVQPMPNAIVINTGDQIEVLSNGRYKSAWHRVLAREEGNRRSIASFYNPSYKAAIGPAAEEGSEKKYPKFVFGDYMDVYANQKFMPKEPRFLAVKTL

SEQ ID NO: 109583 - protein, 179 aa, Zea mays subsp. mays
  misc_feature (1)..(179): Ceres Seq. ID no. 14309165
  misc_feature (31)..(131): Pfam Name: 2OG-Fe(II) oxygenase superfamily Pfam Description: 2OG-Fe(II) oxygenase superfamily
  misc_feature (1)..(177): Homolog of NCBI NO: 25285704 NR Description: 1-aminocyclopropane-1-carboxylate oxidase (EC
  misc_feature (1)..(177): Homolog of NCBI NO: 15220770 NR Description: 1-aminocyclopropane-1-carboxylate oxidase (ACC
  misc_feature (1)..(177): Homolog of NCBI NO: 7433217 NR Description: 1-aminocyclopropane-1-carboxylate oxidase (EC
  misc_feature (1)..(179): Homolog of NCBI NO: 25452792 NR Description: 1-aminocyclopropane-1-carboxylate oxidase (ACC
  misc_feature (1)..(179): Homolog of NCBI NO: 12001828 NR Description: 1-aminocyclopropane-1-carboxylate oxidase; ACC
  misc_feature (1)..(179): Homolog of NCBI NO: 27371996 NR Description: 1-aminocyclopropane-1-carboxylic acid oxidase
  misc_feature (1)..(179): Homolog of NCBI NO: 28949891 NR Description: 1-aminocyclopropane-1-carboxylic acid oxidase
  misc_feature (1)..(179): Homolog of NCBI NO: 25285689 NR Description: hypothetical protein F2P24.4 [imported] -
  misc_feature (1)..(179): Homolog of NCBI NO: 21555054 NR Description: 1-aminocyclopropane-1-carboxylate oxidase,
  misc_feature (1)..(179): Homolog of NCBI NO: 18411485 NR Description: 1-aminocyclopropane-1-carboxylate oxidase (ACC
MMEVMDENLGLPKGYIKKAFNEGMEDGEETAFFGTKVSHYPPCPHPELVNGLRSHTDAGGVVLLFQDDEYDGLQVLKDGEWIDVQPMPNAIVINTGDQIEVLSNGRYKSAWHRVLAREEGNRRSIASFYNPSYKAAIGPAAEEGSEKKYPKFVFGDYMDVYANQKFMPKEPRFLAVKTL

SEQ ID NO: 109584 - DNA, 493 bp, Zea mays subsp. mays
  misc_feature (1)..(493): Ceres Seq. ID no. 14309158
atattatattaaacacagtaaaaattcaaacaacttaacatatacaaataattaactagacatgaagatcatggtcttgacactcatggttttcgtcatacttctgacattgtttccggctccaaacgaagcggcagacacaaatgtggaagcagcatgtgacccaaagcagcttcagccttgcctggccgcgattactggaggaggacagccctcgggtgactgttgtgcaaagctgaaggagcaacaaccatgcttgtgtgggttttctaagaaccctgcttttgctcagtacattagctctcccaactctcgcaaagtcctaaccgcttgtggtattccttacccaagttgttaaaactcttaagagtttttacaaataaataaataacgagtaaggaagatgaataaattatatctagctgttttttatgaaataaaataaccgttagtatgtaatgtttatatggttaaataaagtttaccttctcat

SEQ ID NO: 109585 - protein, 98 aa, Zea mays subsp. mays
  misc_feature (1)..(98): Ceres Seq. ID no. 14309159
  misc_feature (33)..(98): Pfam Name: Protease inhibitor/seed storage/LTP family Pfam Description: Protease inhibitor/seed storage/LTP family
  misc_feature (1)..(98): Homolog of NCBI NO: 543565 NR Description: hypothetical 10.0K protein - Zinnia elegans
  misc_feature (1)..(98): Homolog of NCBI NO: 15240847 NR Description: protease inhibitor/seed storage/lipid transfer
  misc_feature (1)..(98): Homolog of NCBI NO: 15229614 NR Description: protease inhibitor/seed storage/lipid transfer
  misc_feature (1)..(98): Homolog of NCBI NO: 18402345 NR Description: protease inhibitor/seed storage/lipid transfer
  misc_feature (1)..(98): Homolog of NCBI NO: 32395583 NR Description: seed specific protein Bn15D80B [Brassica napus]
  misc_feature (1)..(98): Homolog of NCBI NO: 3183088 NR Description: Probable nonspecific lipid-transfer protein AKCS9
  misc_feature (1)..(98): Homolog of NCBI NO: 21555147 NR Description: lipid transfer-like protein [Arabidopsis thaliana]
  misc_feature (1)..(98): Homolog of NCBI NO: 18421731 NR Description: protease inhibitor/seed storage/lipid transfer
  misc_feature (1)..(98): Homolog of NCBI NO: 15219758 NR Description: lipid transfer protein family [Arabidopsis
  misc_feature (13)..(98): Homolog of NCBI NO: 7488524 NR Description: lipid transfer like protein - turnip (fragment)
MKIMVLTLMVFVILLTLFPAPNEAADTNVEAACDPKQLQPCLAAITGGGQPSGDCCAKLKEQQPCLCGFSKNPAFAQYISSPNSRKVLTACGIPYPSC

SEQ ID NO: 109586 - protein, 95 aa, Zea mays subsp. mays
  misc_feature (1)..(95): Ceres Seq. ID no. 14309160
  misc_feature (30)..(95): Pfam Name: Protease inhibitor/seed storage/LTP family Pfam Description: Protease inhibitor/seed storage/LTP family
  misc_feature (10)..(95): Homolog of NCBI NO: 7488524 NR Description: lipid transfer like protein - turnip (fragment)
  misc_feature (1)..(95): Homolog of NCBI NO: 543565 NR Description: hypothetical 10.0K protein - Zinnia elegans
  misc_feature (1)..(95): Homolog of NCBI NO: 15240847 NR Description: protease inhibitor/seed storage/lipid transfer
  misc_feature (1)..(95): Homolog of NCBI NO: 15229614 NR Description: protease inhibitor/seed storage/lipid transfer
  misc_feature (1)..(95): Homolog of NCBI NO: 18402345 NR Description: protease inhibitor/seed storage/lipid transfer
  misc_feature (1)..(95): Homolog of NCBI NO: 32395583 NR Description: seed specific protein Bn15D80B [Brassica napus]
  misc_feature (1)..(95): Homolog of NCBI NO: 3183088 NR Description: Probable nonspecific lipid-transfer protein AKCS9
  misc_feature (1)..(95): Homolog of NCBI NO: 21555147 NR Description: lipid transfer-like protein [Arabidopsis thaliana]
  misc_feature (1)..(95): Homolog of NCBI NO: 18421731 NR Description: protease inhibitor/seed storage/lipid transfer
  misc_feature (1)..(95): Homolog of NCBI NO: 15219758 NR Description: lipid transfer protein family [Arabidopsis
MVLTLMVFVILLTLFPAPNEAADTNVEAACDPKQLQPCLAAITGGGQPSGDCCAKLKEQQPCLCGFSKNPAFAQYISSPNSRKVLTACGIPYPSC

SEQ ID NO: 109587 - protein, 90 aa, Zea mays subsp. mays
  misc_feature (1)..(90): Ceres Seq. ID no. 14309161
  misc_feature (25)..(90): Pfam Name: Protease inhibitor/seed storage/LTP family Pfam Description: Protease inhibitor/seed storage/LTP family
  misc_feature (1)..(90): Homolog of NCBI NO: 543565 NR Description: hypothetical 10.0K protein - Zinnia elegans
  misc_feature (1)..(90): Homolog of NCBI NO: 15240847 NR Description: protease inhibitor/seed storage/lipid transfer
  misc_feature (1)..(90): Homolog of NCBI NO: 15229614 NR Description: protease inhibitor/seed storage/lipid transfer
  misc_feature (1)..(90): Homolog of NCBI NO: 18402345 NR Description: protease inhibitor/seed storage/lipid transfer
  misc_feature (1)..(90): Homolog of NCBI NO: 32395583 NR Description: seed specific protein Bn15D80B [Brassica napus]
  misc_feature (1)..(90): Homolog of NCBI NO: 3183088 NR Description: Probable nonspecific lipid-transfer protein AKCS9
  misc_feature (1)..(90): Homolog of NCBI NO: 21555147 NR Description: lipid transfer-like protein [Arabidopsis thaliana]
  misc_feature (1)..(90): Homolog of NCBI NO: 18421731 NR Description: protease inhibitor/seed storage/lipid transfer
  misc_feature (1)..(90): Homolog of NCBI NO: 15219758 NR Description: lipid transfer protein family [Arabidopsis
  misc_feature (5)..(90): Homolog of NCBI NO: 7488524 NR Description: lipid transfer like protein - turnip (fragment)
MVFVILLTLFPAPNEAADTNVEAACDPKQLQPCLAAITGGGQPSGDCCAKLKEQQPCLCGFSKNPAFAQYISSPNSRKVLTACGIPYPSC

SEQ ID NO: 109588 - DNA, 719 bp, Zea mays subsp. mays
  misc_feature (1)..(719): Ceres Seq. ID no. 14309154
aagagataaagaaaataaaacttcacaagacagaacacagagagagagagatgagccgttgctgctctcttgggctctgtgccccgaatgcgttgtctctttcttcaacccctcgcagtgtcaaagctcctctctctattacatctcacaccaaacccatctctaacaccgattctcttcttcataatattgccaagatgagagcaaaggctggtgacttctttggagcaaagaagacaatctttgcagctcaactcgggacagttcttgccacgattgatcacccggccttggcaataactggagtcaaccacgagcaggaactgagcagcgtcgtgctcgatatcagtatcatatcggtctggtacttcctagtaatgccaccaattatcatgaactggctgagagtaagatggtacagaaggaagttcttcgagatgtatctacagttcatgtgcgtcttcatgttcttccccgggctacttctatgggcaccatttctcaatttcagaaagttcccaagagatccgtctatgaagtatccttgggacaaaccaaaagacccttccactatcaagaacggttaccttaagtacccatttgctcagccagaagattatgactactaaaatcttgatttacagaaagtttgttatatatatcttgtgactgtatatactcttcttgcctactcaggcttaaggctctatattcaatat

SEQ ID NO: 109589 - protein, 208 aa, Zea mays subsp. mays
  misc_feature (1)..(208): Ceres Seq. ID no. 14309155
  misc_feature (109)..(170): Homolog of NCBI NO: 33861127 NR Description: NADH dehydrogenase subunit NdhL (ndhL)
  misc_feature (106)..(170): Homolog of NCBI NO: 33866055 NR Description: possible inorganic carbon transport protein
  misc_feature (122)..(174): Homolog of NCBI NO: 22298248 NR Description: NADH dehydrogenase subunit [Thermosynechococcus
  misc_feature (17)..(159): Homolog of NCBI NO: 25373317 NR Description: hypothetical protein F15H11.1 [imported] -
  misc_feature (17)..(207): Homolog of NCBI NO: 15223241 NR Description: expressed protein [Arabidopsis thaliana]
EIKKIKLHKTEHREREMSRCCSLGLCAPNALSLSSTPRSVKAPLSITSHTKPISNTDSLLHNIAKMRAKAGDFFGAKKTIFAAQLGTVLATIDHPALAITGVNHEQELSSVVLDISIISVWYFLVMPPIIMNWLRVRWYRRKFFEMYLQFMCVFMFFPGLLLWAPFLNFRKFPRDPSMKYPWDKPKDPSTIKNGYLKYPFAQPEDYDY

SEQ ID NO: 109590 - protein, 192 aa, Zea mays subsp. mays
  misc_feature (1)..(192): Ceres Seq. ID no. 14309156
  misc_feature (93)..(154): Homolog of NCBI NO: 33861127 NR Description: NADH dehydrogenase subunit NdhL (ndhL)
  misc_feature (90)..(154): Homolog of NCBI NO: 33866055 NR Description: possible inorganic carbon transport protein
  misc_feature (106)..(158): Homolog of NCBI NO: 22298248 NR Description: NADH dehydrogenase subunit [Thermosynechococcus
  misc_feature (1)..(143): Homolog of NCBI NO: 25373317 NR Description: hypothetical protein F15H11.1 [imported] -
  misc_feature (1)..(191): Homolog of NCBI NO: 15223241 NR Description: expressed protein [Arabidopsis thaliana]
MSRCCSLGLCAPNALSLSSTPRSVKAPLSITSHTKPISNTDSLLHNIAKMRAKAGDFFGAKKTIFAAQLGTVLATIDHPALAITGVNHEQELSSVVLDISIISVWYFLVMPPIIMNWLRVRWYRRKFFEMYLQFMCVFMFFPGLLLWAPFLNFRKFPRDPSMKYPWDKPKDPSTIKNGYLKYPFAQPEDYDY

SEQ ID NO: 109591 - protein, 143 aa, Zea mays subsp. mays
  misc_feature (1)..(143): Ceres Seq. ID no. 14309157
  misc_feature (44)..(105): Homolog of NCBI NO: 33861127 NR Description: NADH dehydrogenase subunit NdhL (ndhL)
  misc_feature (41)..(105): Homolog of NCBI NO: 33866055 NR Description: possible inorganic carbon transport protein
  misc_feature (57)..(109): Homolog of NCBI NO: 22298248 NR Description: NADH dehydrogenase subunit [Thermosynechococcus
  misc_feature (1)..(94): Homolog of NCBI NO: 25373317 NR Description: hypothetical protein F15H11.1 [imported] -
  misc_feature (1)..(142): Homolog of NCBI NO: 15223241 NR Description: expressed protein [Arabidopsis thaliana]
MRAKAGDFFGAKKTIFAAQLGTVLATIDHPALAITGVNHEQELSSVVLDISIISVWYFLVMPPIIMNWLRVRWYRRKFFEMYLQFMCVFMFFPGLLLWAPFLNFRKFPRDPSMKYPWDKPKDPSTIKNGYLKYPFAQPEDYDY

SEQ ID NO: 109592 - DNA, 618 bp, Zea mays subsp. mays
  misc_feature (1)..(618): Ceres Seq. ID no. 15174406
acccaaatatcttacttgtttacatcttcttttgcaaaccaacagaaacactaatagaaaaatggccggtgtaatgaagttggcatgcttggtcttggcctgcatgattgtggcaggtccgatcacagcgaacgcagctatgacctgtggcaccgttaacagcaacgtggcaccgtgcattggctacataacccaaggtggaccccttcccggagcgtgctgcaccggtgttagtaaacttaacagcatggcccgtacaactccggaccgtcagcaagcttgtcgttgccttaaaactgctgctagcgccttaggccctaatctcaacgctggccgtgcagctggaattcccaaggcatgtggagtcagtgttcctttcccaatcagcaccaacaccaactgcaacatcgtgaaatgagcgacagtgtgatgaagcttcaggggacgtttcgaatattataatatggatcagaatattaaataagatatgttcgaatgcatgttttaaaaatgttttataatttcctttttttttaatatggtgatcctatattcctatgaactggtcgtttgtactatgttatcgaacaacgttatatgaaattcagatttgaagtt

SEQ ID NO: 109593 - protein, 138 aa, Zea mays subsp. mays
  misc_feature (1)..(138): Ceres Seq. ID no. 15174407
  misc_feature (49)..(134): Pfam Name: Protease inhibitor/seed storage/LTP family Pfam Description: Protease inhibitor/seed storage/LTP family
  misc_feature (21)..(138): Homolog of NCBI NO: 15224898 NR Description: nonspecific lipid transfer protein 2 (LTP 2)
  misc_feature (21)..(138): Homolog of NCBI NO: 5777389 NR Description: non-specific lipid transfer protein [Brassica
  misc_feature (21)..(138): Homolog of NCBI NO: 2497739 NR Description: NONSPECIFIC LIPID-TRANSFER PROTEIN B PRECURSOR
  misc_feature (21)..(138): Homolog of NCBI NO: 2497737 NR Description: NONSPECIFIC LIPID-TRANSFER PROTEIN 3 PRECURSOR
  misc_feature (21)..(138): Homolog of NCBI NO: 2497735 NR Description: NONSPECIFIC LIPID-TRANSFER PROTEIN 1 PRECURSOR
  misc_feature (21)..(138): Homolog of NCBI NO: 2497736 NR Description: NONSPECIFIC LIPID-TRANSFER PROTEIN 2 PRECURSOR
  misc_feature (21)..(138): Homolog of NCBI NO: 15224899 NR Description: nonspecific lipid transfer protein 1 (LTP 1)
  misc_feature (21)..(138): Homolog of NCBI NO: 7438295 NR Description: lipid transfer protein wax9C - broccoli
  misc_feature (21)..(138): Homolog of NCBI NO: 2497738 NR Description: NONSPECIFIC LIPID-TRANSFER PROTEIN A PRECURSOR
  misc_feature (21)..(138): Homolog of NCBI NO: 11273805 NR Description: lipid transfer protein [imported] - wild cabbage
PKYLTCLHLLLQTNRNTNRKMAGVMKLACLVLACMIVAGPITANAAMTCGTVNSNVAPCIGYITQGGPLPGACCTGVSKLNSMARTTPDRQQACRCLKTAASALGPNLNAGRAAGIPKACGVSVPFPISTNTNCNIVK

SEQ ID NO: 109594 - protein, 118 aa, Zea mays subsp. mays
  misc_feature (1)..(118): Ceres Seq. ID no. 15174408
  misc_feature (29)..(114): Pfam Name: Protease inhibitor/seed storage/LTP family Pfam Description: Protease inhibitor/seed storage/LTP family
  misc_feature (1)..(118): Homolog of NCBI NO: 15224898 NR Description: nonspecific lipid transfer protein 2 (LTP 2)
  misc_feature (1)..(118): Homolog of NCBI NO: 5777389 NR Description: non-specific lipid transfer protein [Brassica
  misc_feature (1)..(118): Homolog of NCBI NO: 2497739 NR Description: NONSPECIFIC LIPID-TRANSFER PROTEIN B PRECURSOR
  misc_feature (1)..(118): Homolog of NCBI NO: 2497737 NR Description: NONSPECIFIC LIPID-TRANSFER PROTEIN 3 PRECURSOR
  misc_feature (1)..(118): Homolog of NCBI NO: 2497735 NR Description: NONSPECIFIC LIPID-TRANSFER PROTEIN 1 PRECURSOR
  misc_feature (1)..(118): Homolog of NCBI NO: 2497736 NR Description: NONSPECIFIC LIPID-TRANSFER PROTEIN 2 PRECURSOR
  misc_feature (1)..(118): Homolog of NCBI NO: 15224899 NR Description: nonspecific lipid transfer protein 1 (LTP 1)
  misc_feature (1)..(118): Homolog of NCBI NO: 7438295 NR Description: lipid transfer protein wax9C - broccoli
  misc_feature (1)..(118): Homolog of NCBI NO: 2497738 NR Description: NONSPECIFIC LIPID-TRANSFER PROTEIN A PRECURSOR
  misc_feature (1)..(118): Homolog of NCBI NO: 11273805 NR Description: lipid transfer protein [imported] - wild cabbage
MAGVMKLACLVLACMIVAGPITANAAMTCGTVNSNVAPCIGYITQGGPLPGACCTGVSKLNSMARTTPDRQQACRCLKTAASALGPNLNAGRAAGIPKACGVSVPFPISTNTNCNIVK

SEQ ID NO: 109595 - protein, 114 aa, Zea mays subsp. mays
  misc_feature (1)..(114): Ceres Seq. ID no. 15174409
  misc_feature (25)..(110): Pfam Name: Protease inhibitor/seed storage/LTP family Pfam Description: Protease inhibitor/seed storage/LTP family
  misc_feature (1)..(114): Homolog of NCBI NO: 15224898 NR Description: nonspecific lipid transfer protein 2 (LTP 2)
  misc_feature (1)..(114): Homolog of NCBI NO: 5777389 NR Description: non-specific lipid transfer protein [Brassica
  misc_feature (1)..(114): Homolog of NCBI NO: 2497739 NR Description: NONSPECIFIC LIPID-TRANSFER PROTEIN B PRECURSOR
  misc_feature (1)..(114): Homolog of NCBI NO: 2497737 NR Description: NONSPECIFIC LIPID-TRANSFER PROTEIN 3 PRECURSOR
  misc_feature (1)..(114): Homolog of NCBI NO: 2497735 NR Description: NONSPECIFIC LIPID-TRANSFER PROTEIN 1 PRECURSOR
  misc_feature (1)..(114): Homolog of NCBI NO: 2497736 NR Description: NONSPECIFIC LIPID-TRANSFER PROTEIN 2 PRECURSOR
  misc_feature (1)..(114): Homolog of NCBI NO: 15224899 NR Description: nonspecific lipid transfer protein 1 (LTP 1)
  misc_feature (1)..(114): Homolog of NCBI NO: 7438295 NR Description: lipid transfer protein wax9C - broccoli
  misc_feature (1)..(114): Homolog of NCBI NO: 2497738 NR Description: NONSPECIFIC LIPID-TRANSFER PROTEIN A PRECURSOR
  misc_feature (1)..(114): Homolog of NCBI NO: 11273805 NR Description: lipid transfer protein [imported] - wild cabbage
MKLACLVLACMIVAGPITANAAMTCGTVNSNVAPCIGYITQGGPLPGACCTGVSKLNSMARTTPDRQQACRCLKTAASALGPNLNAGRAAGIPKACGVSVPFPISTNTNCNIVK

SEQ ID NO: 109596 - DNA, 1241 bp, Zea mays subsp. mays
  misc_feature (1)..(1241): Ceres Seq. ID no. 15178884
atcacaaagctaaatacgaaagaaacatggggttcttgggtaagagtatattgtcgagtctccttgcaatatggttcttcacttcctgtgctttcactgaagaagtgaaccatgttaaccaaacgccttcctctgctcctgctccatctccttaccaccacggccaccaccacccacatcctccccatcaccaccaccctcaccctcacccaccggcaaaagcccctgtcaagccgccggtttctccaccttctaaacctccggttaagcctccagtttaccccccaaccaaatccccggttaagcccccaactaaacctccggttaagccaccagtttccccaccagcaaaacctcctgttaaacctccggtttaccctccgaccaaagctccagttaagcccccagtcaaacctccggttaagccaccagtttcaccaccggccaaacctccaataaagccaccagtttcaccaccggccaaacctccggttaagcccccggtttaccctccgaccaaagcccctgttaagcccccgaccaaagccccggctaagcctccggtctctcctccagccaaaccaccagtatcccctccagctaagccaccggtgaagccaccggtttacccgccaaaattcaacagaagcctaatcgcggttcagggtacggtcttctgcaaaagctgccagtacgcttctttcgattcactcattggcgccaaacccgttgaaggtgctcttgtgagactactgtgtaagagcaagaagaacatagtcgcggagaccaagacggacaagaacggatacttcttgttgttgggcccgaagacggtgacaaactacggtttcagaggatgtcgtgtgtatcttgtgaaatcaaaggactacaaatgcaataaagtgtcaaagctattcggtggagatgtcggtgccgtactcaagccggagaaaaggaaggggaaatctgcggtggtcattaatcagctcatctacggtatctttaacgttggaccgtttgcgttcgacccggtctgccccaaataaagatgatgatgatgctttgttactttcttgattatatcatgctcaaaagagttcgagggagacagagagttatgtctttatgcgttcgaattgtaatgttagctatagttttaagctaaatgcttgtgtttttatgaatgtgtccttaagagacgtcgtttgggtttcgtttgaataaaaatcgtcagctttaag

SEQ ID NO: 109597 - protein, 347 aa, Zea mays subsp. mays
  misc_feature (1)..(347): Ceres Seq. ID no. 15178885
  misc_feature (220)..(347): Pfam Name: Pollen proteins Ole e I family Pfam Description: Pollen proteins Ole e I family
  misc_feature (57)..(345): Homolog of NCBI NO: 478673 NR Description: proline-rich protein precursor - kidney bean
  misc_feature (150)..(347): Homolog of NCBI NO: 15226166 NR Description: proline-rich protein -related [Arabidopsis
  misc_feature (40)..(211): Homolog of NCBI NO: 480109 NR Description: EPPT protein - hydromedusa (Podocoryne carnea)
  misc_feature (40)..(211): Homolog of NCBI NO: 480109 NR Description: EPPT protein - hydromedusa (Podocoryne carnea)
  misc_feature (40)..(211): Homolog of NCBI NO: 480109 NR Description: EPPT protein - hydromedusa (Podocoryne carnea)
  misc_feature (40)..(226): Homolog of NCBI NO: 480109 NR Description: EPPT protein - hydromedusa (Podocoryne carnea)
  misc_feature (40)..(211): Homolog of NCBI NO: 480109 NR Description: EPPT protein - hydromedusa (Podocoryne carnea)
  misc_feature (40)..(211): Homolog of NCBI NO: 480109 NR Description: EPPT protein - hydromedusa (Podocoryne carnea)
  misc_feature (9)..(211): Homolog of NCBI NO: 15217879 NR Description: prolin-rich protein -related [Arabidopsis
  misc_feature (42)..(347): Homolog of NCBI NO: 15217879 NR Description: prolin-rich protein -related [Arabidopsis
HKAKYERNMGFLGKSILSSLLAIWFFTSCAFTEEVNHVNQTPSSAPAPSPYHHGHHHPHPPHHHHPHPHPPAKAPVKPPVSPPSKPPVKPPVYPPTKSPVKPPTKPPVKPPVSPPAKPPVKPPVYPPTKAPVKPPVKPPVKPPVSPPAKPPIKPPVSPPAKPPVKPPVYPPTKAPVKPPTKAPAKPPVSPPAKPPVSPPAKPPVKPPVYPPKFNRSLIAVQGTVFCKSCQYASFDSLIGAKPVEGALVRLLCKSKKNIVAETKTDKNGYFLLLGPKTVTNYGFRGCRVYLVKSKDYKCNKVSKLFGGDVGAVLKPEKRKGKSAVVINQLIYGIFNVGPFAFDPVCPK

SEQ ID NO: 109598 - protein, 339 aa, Zea mays subsp. mays
  misc_feature (1)..(339): Ceres Seq. ID no. 15178886
  misc_feature (212)..(339): Pfam Name: Pollen proteins Ole e I family Pfam Description: Pollen proteins Ole e I family
  misc_feature (32)..(203): Homolog of NCBI NO: 480109 NR Description: EPPT protein - hydromedusa (Podocoryne carnea)
  misc_feature (32)..(203): Homolog of NCBI NO: 480109 NR Description: EPPT protein - hydromedusa (Podocoryne carnea)
  misc_feature (32)..(203): Homolog of NCBI NO: 480109 NR Description: EPPT protein - hydromedusa (Podocoryne carnea)
  misc_feature (32)..(203): Homolog of NCBI NO: 480109 NR Description: EPPT protein - hydromedusa (Podocoryne carnea)
  misc_feature (32)..(203): Homolog of NCBI NO: 480109 NR Description: EPPT protein - hydromedusa (Podocoryne carnea)
  misc_feature (32)..(218): Homolog of NCBI NO: 480109 NR Description: EPPT protein - hydromedusa (Podocoryne carnea)
  misc_feature (49)..(337): Homolog of NCBI NO: 478673 NR Description: proline-rich protein precursor - kidney bean
  misc_feature (142)..(339): Homolog of NCBI NO: 15226166 NR Description: proline-rich protein -related [Arabidopsis
  misc_feature (1)..(203): Homolog of NCBI NO: 15217879 NR Description: prolin-rich protein -related [Arabidopsis
  misc_feature (34)..(339): Homolog of NCBI NO: 15217879 NR Description: prolin-rich protein -related [Arabidopsis
MGFLGKSILSSLLAIWFFTSCAFTEEVNHVNQTPSSAPAPSPYHHGHHHPHPPHHHHPHPHPPAKAPVKPPVSPPSKPPVKPPVYPPTKSPVKPPTKPPVKPPVSPPAKPPVKPPVYPPTKAPVKPPVKPPVKPPVSPPAKPPIKPPVSPPAKPPVKPPVYPPTKAPVKPPTKAPAKPPVSPPAKPPVSPPAKPPVKPPVYPPKFNRSLIAVQGTVFCKSCQYASFDSLIGAKPVEGALVRLLCKSKKNIVAETKTDKNGYFLLLGPKTVTNYGFRGCRVYLVKSKDYKCNKVSKLFGGDVGAVLKPEKRKGKSAVVINQLIYGIFNVGPFAFDPVCPK

SEQ ID NO: 109599 - DNA, 830 bp, Zea mays subsp. mays
  misc_feature (1)..(830): Ceres Seq. ID no. 14309148
ctgttctgtcttaaatcagagtttttgctcctttctccactcatctcttcgctagaaacaaaaaaaatggctttgcaaatgcagacctccactacgatcttcaaaaaccccacaccatctactgccgccgatgcgctcactggaagattcttcccagcaactgtcgcggttcgccgggaaacgttaacggcgtggcgtgaagtcatatgcagcagcggtggagttggagacgccgggaagaaaaaagcggtacctaactcgaactacgtagtgcctttggacaagttctcgtcctcttcctccatcactcggcctttgattgagatacttcgcgatctcaacaagaagatccctgataacatcgtcaagagccacgatcctggatccagtgctgcttcttctggctttatcccttggttccatgctaatcgtatgctcagcttctacgcacctggttggtgtggggaggttcgtgacgtcattttctcagagaatggtaatgtcactgttgtttatcgtcttaccattcgtggctctgatggtgaggcacaccgcgaatcgacagggacagtaacgatcactgatgatcacatcgaggatccagttgctgcagctgaggaaatggcattttgcagagcatgtgctcgatttggtctcggcttgtatctctatcacgaagagtaggcccgtgtacacttcaagtgtgcttaccgtttttggttgaacaagtctctatcaacttgttgagagacccttatgcgttctagaatgctaaaatatatgtaatgatgtctacaaacaaagttataataacattataagcatatgat

SEQ ID NO: 109600 - protein, 227 aa, Zea mays subsp. mays
  misc_feature (1)..(227): Ceres Seq. ID no. 14309149
  misc_feature (99)..(227): Homolog of NCBI NO: 34907336 NR Description: putative SnRK1-interacting protein 1
  misc_feature (99)..(227): Homolog of NCBI NO: 9367245 NR Description: SnRK1-interacting protein 1 [Hordeum vulgare
  misc_feature (64)..(182): Homolog of NCBI NO: 27573357 NR Description: hypothetical protein [Oryza sativa (japonica
  misc_feature (99)..(227): Homolog of NCBI NO: 15224018 NR Description: expressed protein [Arabidopsis thaliana]
  misc_feature (23)..(226): Homolog of NCBI NO: 21593360 NR Description: unknown [Arabidopsis thaliana]
  misc_feature (23)..(226): Homolog of NCBI NO: 15238827 NR Description: expressed protein [Arabidopsis thaliana]
LFCLKSEFLLLSPLISSLETKKMALQMQTSTTIFKNPTPSTAADALTGRFFPATVAVRRETLTAWREVICSSGGVGDAGKKKAVPNSNYVVPLDKFSSSSSITRPLIEILRDLNKKIPDNIVKSHDPGSSAASSGFIPWFHANRMLSFYAPGWCGEVRDVIFSENGNVTVVYRLTIRGSDGEAHRESTGTVTITDDHIEDPVAAAEEMAFCRACARFGLGLYLYHEE

SEQ ID NO: 109601 - protein, 205 aa, Zea mays subsp. mays
  misc_feature (1)..(205): Ceres Seq. ID no. 14309150
  misc_feature (77)..(205): Homolog of NCBI NO: 34907336 NR Description: putative SnRK1-interacting protein 1
  misc_feature (77)..(205): Homolog of NCBI NO: 9367245 NR Description: SnRK1-interacting protein 1 [Hordeum vulgare
  misc_feature (42)..(160): Homolog of NCBI NO: 27573357 NR Description: hypothetical protein [Oryza sativa (japonica
  misc_feature (77)..(205): Homolog of NCBI NO: 15224018 NR Description: expressed protein [Arabidopsis thaliana]
  misc_feature (1)..(204): Homolog of NCBI NO: 21593360 NR Description: unknown [Arabidopsis thaliana]
  misc_feature (1)..(204): Homolog of NCBI NO: 15238827 NR Description: expressed protein [Arabidopsis thaliana]
MALQMQTSTTIFKNPTPSTAADALTGRFFPATVAVRRETLTAWREVICSSGGVGDAGKKKAVPNSNYVVPLDKFSSSSSITRPLIEILRDLNKKIPDNIVKSHDPGSSAASSGFIPWFHANRMLSFYAPGWCGEVRDVIFSENGNVTVVYRLTIRGSDGEAHRESTGTVTITDDHIEDPVAAAEEMAFCRACARFGLGLYLYHEE

SEQ ID NO: 109602 - protein, 201 aa, Zea mays subsp. mays
  misc_feature (1)..(201): Ceres Seq. ID no. 14309151
  misc_feature (73)..(201): Homolog of NCBI NO: 34907336 NR Description: putative SnRK1-interacting protein 1
  misc_feature (73)..(201): Homolog of NCBI NO: 9367245 NR Description: SnRK1-interacting protein 1 [Hordeum vulgare
  misc_feature (38)..(156): Homolog of NCBI NO: 27573357 NR Description: hypothetical protein [Oryza sativa (japonica
  misc_feature (73)..(201): Homolog of NCBI NO: 15224018 NR Description: expressed protein [Arabidopsis thaliana]
  misc_feature (1)..(200): Homolog of NCBI NO: 21593360 NR Description: unknown [Arabidopsis thaliana]
  misc_feature (1)..(200): Homolog of NCBI NO: 15238827 NR Description: expressed protein [Arabidopsis thaliana]
MQTSTTIFKNPTPSTAADALTGRFFPATVAVRRETLTAWREVICSSGGVGDAGKKKAVPNSNYVVPLDKFSSSSSITRPLIEILRDLNKKIPDNIVKSHDPGSSAASSGFIPWFHANRMLSFYAPGWCGEVRDVIFSENGNVTVVYRLTIRGSDGEAHRESTGTVTITDDHIEDPVAAAEEMAFCRACARFGLGLYLYHEE

SEQ ID NO: 109603 - DNA, 947 bp, Zea mays subsp. mays
  misc_feature (1)..(947): Ceres Seq. ID no. 15174396
ataacttgtttcttctcctctatcaaatcagatcaaaacttgtgtttcttgctcccaaaatattggataaatattctcataagttttgaaattgtgtttctttgttagcaaataaatatgagttgcaatggatgtagagttcttcgaaaaggttgcagcgaaacatgcatccttcgtccttgccttcaatggatcgaatccgccgagtcacaaggccacgctaccgtcttcgtggctaaattctttggccgtgccggtctaatgtcattcatctccgccgtacccgaaccaaaccgccctgctttgtttcagtcgttgttgtttgaagcgtgtgggaggacggtgaatccggttaacggagcggttggtatgttatggaccgggaactggcacgtgtgccaagcggcggttgaaactgttcttcgcggcggaactttacgacctatctcagatctacacgaatctccttcgttgaactcctcagatgagtctaccgagatctggcggatgcagcgtccagagggttccaggaaagaatctttggtcaaccgtaaacgatctaagaccgagcggtctgatccggaactgatccacgggttagctctaaccggtccggttgtcccggctccttttcttccaccgccgccgtttagcaaggcggttaatggggatcatccgggaagtccatcagaggagtctgtaacgacgacgtcgtgttatgaatatggaatcagcggcgatggatacggaaacaaaagagagagaaagttattaaacctttttgtttaaaaccgacgacgcaaactcttcgcactcagtttttttcgacggtcctttttagggcttttttttcggggtgaagccgcataattattggctaacataattattttctctatcgagaaatatgataattttggtgatataatactttgcggatgatgagt

SEQ ID NO: 109604 - protein, 223 aa, Zea mays subsp. mays
  misc_feature (1)..(223): Ceres Seq. ID no. 15174397
  misc_feature (2)..(107): Pfam Name: Protein of unknown function DUF260 Pfam Description: Protein of unknown function DUF260
  misc_feature (1)..(123): Homolog of NCBI NO: 34895540 NR Description: unnamed protein product [Oryza sativa (japonica
  misc_feature (1)..(222): Homolog of NCBI NO: 40539088 NR Description: expressed protein [Oryza sativa (japonica
  misc_feature (1)..(164): Homolog of NCBI NO: 15219829 NR Description: lateral organ boundaries (LOB) domain family
  misc_feature (1)..(153): Homolog of NCBI NO: 15229644 NR Description: lateral organ boundaries (LOB) domain protein,
  misc_feature (1)..(153): Homolog of NCBI NO: 21553886 NR Description: unknown [Arabidopsis thaliana]
  misc_feature (1)..(223): Homolog of NCBI NO: 34394489 NR Description: putative lateral organ boundaries (LOB) domain
  misc_feature (1)..(153): Homolog of NCBI NO: 15240739 NR Description: lateral organ boundaries (LOB) domain protein 37
  misc_feature (1)..(153): Homolog of NCBI NO: 21593577 NR Description: unknown [Arabidopsis thaliana]
  misc_feature (1)..(216): Homolog of NCBI NO: 15235604 NR Description: lateral organ boundaries (LOB) domain family
  misc_feature (1)..(216): Homolog of NCBI NO: 21592894 NR Description: unknown [Arabidopsis thaliana]
MSCNGCRVLRKGCSETCILRPCLQWIESAESQGHATVFVAKFFGRAGLMSFISAVPEPNRPALFQSLLFEACGRTVNPVNGAVGMLWTGNWHVCQAAVETVLRGGTLRPISDLHESPSLNSSDESTEIWRMQRPEGSRKESLVNRKRSKTERSDPELIHGLALTGPVVPAPFLPPPPFSKAVNGDHPGSPSEESVTTTSCYEYGISGDGYGNKRERKLLNLFV

SEQ ID NO: 109605 - protein, 175 aa, Zea mays subsp. mays
  misc_feature (1)..(175): Ceres Seq. ID no. 15174398
  misc_feature (1)..(59): Pfam Name: Protein of unknown function DUF260 Pfam Description: Protein of unknown function DUF260
  misc_feature (1)..(75): Homolog of NCBI NO: 34895540 NR Description: unnamed protein product [Oryza sativa (japonica
  misc_feature (1)..(174): Homolog of NCBI NO: 40539088 NR Description: expressed protein [Oryza sativa (japonica
  misc_feature (1)..(116): Homolog of NCBI NO: 15219829 NR Description: lateral organ boundaries (LOB) domain family
  misc_feature (1)..(105): Homolog of NCBI NO: 15229644 NR Description: lateral organ boundaries (LOB) domain protein,
  misc_feature (1)..(105): Homolog of NCBI NO: 21553886 NR Description: unknown [Arabidopsis thaliana]
  misc_feature (1)..(175): Homolog of NCBI NO: 34394489 NR Description: putative lateral organ boundaries (LOB) domain
  misc_feature (1)..(105): Homolog of NCBI NO: 15240739 NR Description: lateral organ boundaries (LOB) domain protein 37
  misc_feature (1)..(105): Homolog of NCBI NO: 21593577 NR Description: unknown [Arabidopsis thaliana]
  misc_feature (1)..(168): Homolog of NCBI NO: 15235604 NR Description: lateral organ boundaries (LOB) domain family
  misc_feature (1)..(168): Homolog of NCBI NO: 21592894 NR Description: unknown [Arabidopsis thaliana]
MSFISAVPEPNRPALFQSLLFEACGRTVNPVNGAVGMLWTGNWHVCQAAVETVLRGGTLRPISDLHESPSLNSSDESTEIWRMQRPEGSRKESLVNRKRSKTERSDPELIHGLALTGPVVPAPFLPPPPFSKAVNGDHPGSPSEESVTTTSCYEYGISGDGYGNKRERKLLNLFV

SEQ ID NO: 109606 - protein, 139 aa, Zea mays subsp. mays
  misc_feature (1)..(139): Ceres Seq. ID no. 15174399
  misc_feature (1)..(39): Homolog of NCBI NO: 34895540 NR Description: unnamed protein product [Oryza sativa (japonica
  misc_feature (1)..(138): Homolog of NCBI NO: 40539088 NR Description: expressed protein [Oryza sativa (japonica
  misc_feature (1)..(80): Homolog of NCBI NO: 15219829 NR Description: lateral organ boundaries (LOB) domain family
  misc_feature (1)..(69): Homolog of NCBI NO: 15229644 NR Description: lateral organ boundaries (LOB) domain protein,
  misc_feature (1)..(69): Homolog of NCBI NO: 21553886 NR Description: unknown [Arabidopsis thaliana]
  misc_feature (1)..(139): Homolog of NCBI NO: 34394489 NR Description: putative lateral organ boundaries (LOB) domain
  misc_feature (1)..(69): Homolog of NCBI NO: 15240739 NR Description: lateral organ boundaries (LOB) domain protein 37
  misc_feature (1)..(69): Homolog of NCBI NO: 21593577 NR Description: unknown [Arabidopsis thaliana]
  misc_feature (1)..(132): Homolog of NCBI NO: 15235604 NR Description: lateral organ boundaries (LOB) domain family
  misc_feature (1)..(132): Homolog of NCBI NO: 21592894 NR Description: unknown [Arabidopsis thaliana]
MLWTGNWHVCQAAVETVLRGGTLRPISDLHESPSLNSSDESTEIWRMQRPEGSRKESLVNRKRSKTERSDPELIHGLALTGPVVPAPFLPPPPFSKAVNGDHPGSPSEESVTTTSCYEYGISGDGYGNKRERKLLNLFV

SEQ ID NO: 109607 - DNA, 1041 bp, Zea mays subsp. mays
  misc_feature (1)..(1041): Ceres Seq. ID no. 15179463
atcatcatcaacagcagcagccataaacctaaacacctttcccattccaatagaaaagaaaaccttatggcctccaaggcgctctcttctttcacggctaagcccgctgtgtcactgctcccccatggcgtctcctcctctgcctctccgtctgttacgtctctgagcttctcaaggcatactggcggcagaggagtggtggttgcgtcctcaacggtagacacaaacaatatgccgatgacaggagtggtgttccagccgttcgaggaggtgaagaaagccgatctggccattccaatcacatctaatgcctccctcgctcgccagaggtatgccgactcttgcgaggctgccattaacgagcaaatcaatgtggaatacaacgtgtcgtatgtttaccattcaatgtacgcctacttcgacagagacaacgttgctctcatgggtcttgccaaatttttcaaggaatcaagtgatgaagaaagagagcacgctgagaagtttatggagtaccagaacaaaagaggaggaagagtgacactccaccctatcgtctcccctatctctgattttgaacatgctgaaaaaggagatgccttatatgcaatggagttggccctgtctctggagaaactgaccaacgagaagcttctaaaccttcacagagtggcatcagagaacaatgacccacagttagctgattttgttgagagtgagtttcttggagagcagattaaagcaatcaagaagatctcagacttcatcacccagctaaggatggttggcaaaggacacggagtttggcacttcgaccagatgcttctgaactagactgggaaattcactttatgctctgggagattaaaagagaagtaaaccgaagaagattgattctgtaaaagtttctagagtactggaagttattattggagcaaaataagattgtagtagtaataatagtaagcttttgtgtgttaagatgatgttttttttgtaataatttcctaagtttaatctatgaagaaggtttttttttgtttc

SEQ ID NO: 109608 - protein, 276 aa, Zea mays subsp. mays
  misc_feature (1)..(276): Ceres Seq. ID no. 15179464
  misc_feature (116)..(261): Pfam Name: Ferritin-like domain Pfam Description: Ferritin-like domain
  misc_feature (23)..(276): Homolog of NCBI NO: 21536745 NR Description: ferritin 1 precursor [Arabidopsis thaliana]
  misc_feature (23)..(276): Homolog of NCBI NO: 15241018 NR Description: ferritin 1 precursor [Arabidopsis thaliana]
  misc_feature (23)..(276): Homolog of NCBI NO: 29839389 NR Description: Ferritin 1, chloroplast precursor
IIINSSSHKPKHLSHSNRKENLMASKALSSFTAKPAVSLLPHGVSSSASPSVTSLSFSRHTGGRGVVVASSTVDTNNMPMTGVVFQPFEEVKKADLAIPITSNASLARQRYADSCEAAINEQINVEYNVSYVYHSMYAYFDRDNVALMGLAKFFKESSDEEREHAEKFMEYQNKRGGRVTLHPIVSPISDFEHAEKGDALYAMELALSLEKLTNEKLLNLHRVASENNDPQLADFVESEFLGEQIKAIKKISDFITQLRMVGKGHGVWHFDQMLLN

SEQ ID NO: 109609 - protein, 254 aa, Zea mays subsp. mays
  misc_feature (1)..(254): Ceres Seq. ID no. 15179465
  misc_feature (94)..(239): Pfam Name: Ferritin-like domain Pfam Description: Ferritin-like domain
  misc_feature (1)..(254): Homolog of NCBI NO: 21536745 NR Description: ferritin 1 precursor [Arabidopsis thaliana]
  misc_feature (1)..(254): Homolog of NCBI NO: 15241018 NR Description: ferritin 1 precursor [Arabidopsis thaliana]
  misc_feature (1)..(254): Homolog of NCBI NO: 29839389 NR Description: Ferritin 1, chloroplast precursor
MASKALSSFTAKPAVSLLPHGVSSSASPSVTSLSFSRHTGGRGVVVASSTVDTNNMPMTGVVFQPFEEVKKADLAIPITSNASLARQRYADSCEAAINEQINVEYNVSYVYHSMYAYFDRDNVALMGLAKFFKESSDEEREHAEKFMEYQNKRGGRVTLHPIVSPISDFEHAEKGDALYAMELALSLEKLTNEKLLNLHRVASENNDPQLADFVESEFLGEQIKAIKKISDFITQLRMVGKGHGVWHFDQMLLN

SEQ ID NO: 109610 - protein, 199 aa, Zea mays subsp. mays
  misc_feature (1)..(199): Ceres Seq. ID no. 15179466
  misc_feature (39)..(184): Pfam Name: Ferritin-like domain Pfam Description: Ferritin-like domain
  misc_feature (1)..(199): Homolog of NCBI NO: 21536745 NR Description: ferritin 1 precursor [Arabidopsis thaliana]
  misc_feature (1)..(199): Homolog of NCBI NO: 15241018 NR Description: ferritin 1 precursor [Arabidopsis thaliana]
  misc_feature (1)..(199): Homolog of NCBI NO: 29839389 NR Description: Ferritin 1, chloroplast precursor
MPMTGVVFQPFEEVKKADLAIPITSNASLARQRYADSCEAAINEQINVEYNVSYVYHSMYAYFDRDNVALMGLAKFFKESSDEEREHAEKFMEYQNKRGGRVTLHPIVSPISDFEHAEKGDALYAMELALSLEKLTNEKLLNLHRVASENNDPQLADFVESEFLGEQIKAIKKISDFITQLRMVGKGHGVWHFDQMLLN

SEQ ID NO: 109611 - DNA, 940 bp, Zea mays subsp. mays
  misc_feature (1)..(940): Ceres Seq. ID no. 14309137
aattaaagttttcccgaagaagaagtcctttttccttcattttatctttctctctctctcttttgtttttttttttgtaatgaaatgggagagatggagatggaagaaatcgaagcagttctcgagaaaatctgcgatctgcacgacaagctcagcgacgagattcacttgatttcgcgctctcacttcctcaaatcggttaaaccagctaccagatcggagaagaggaagagccacggcttaaactccgccgaagagaagccacagggatacgtcttcatcaagggcttccccgttaacgataacgacgcagcgattcaagaggccaagagtcttaacgcgattcgaaccgcgcttgagcacctcgaagaccagctcgagttcttccatacgatacatacacagcaacgaacagagagggatgtagcagttgctcggcttgaacaaagcaggatgttactagcgaagagattggctgaacaccacggcaagagctacggagttctagatgaaactcttgccttcgttgggagcattaaaacctccacaaattttgtttacaactcctctccaaacacagccggggcatactctactcctcctgatggaccaaagtcgaactttgtaatcaacgcctttgcgtggactttcgggttggccaaaagagcacttggattcaaccatgtgagaggcgtactaggaaacgccgctatattcgctataagcatggtcgctatgctacatcttcagcaagttgcttctactgaacatcatcgtctagggaagaaacagaggaaaacatacagaagagagatgtcttcatctgacataagcttggaccacttggacgtcatgatggctcgtggttaaagattaaagaccagatatcgaacttgtctacacgtgatactctgacttgcagccatgggaatataatacc

SEQ ID NO: 109612 - protein, 261 aa, Zea mays subsp. mays
  misc_feature (1)..(261): Ceres Seq. ID no. 14309138
  misc_feature (4)..(261): Homolog of NCBI NO: 34904152 NR Description: P0417G05.19 [Oryza sativa (japonica
  misc_feature (4)..(261): Homolog of NCBI NO: 21592900 NR Description: unknown [Arabidopsis thaliana]
  misc_feature (1)..(261): Homolog of NCBI NO: 15238704 NR Description: expressed protein [Arabidopsis thaliana]
MGEMEMEEIEAVLEKICDLHDKLSDEIHLISRSHFLKSVKPATRSEKRKSHGLNSAEEKPQGYVFIKGFPVNDNDAAIQEAKSLNAIRTALEHLEDQLEFFHTIHTQQRTERDVAVARLEQSRMLLAKRLAEHHGKSYGVLDETLAFVGSIKTSTNFVYNSSPNTAGAYSTPPDGPKSNFVINAFAWTFGLAKRALGFNHVRGVLGNAAIFAISMVAMLHLQQVASTEHHRLGKKQRKTYRREMSSSDISLDHLDVMMARG

SEQ ID NO: 109613 - protein, 258 aa, Zea mays subsp. mays
  misc_feature (1)..(258): Ceres Seq. ID no. 14309139
  misc_feature (1)..(258): Homolog of NCBI NO: 34904152 NR Description: P0417G05.19 [Oryza sativa (japonica
  misc_feature (1)..(258): Homolog of NCBI NO: 21592900 NR Description: unknown [Arabidopsis thaliana]
  misc_feature (1)..(258): Homolog of NCBI NO: 15238704 NR Description: expressed protein [Arabidopsis thaliana]
MEMEEIEAVLEKICDLHDKLSDEIHLISRSHFLKSVKPATRSEKRKSHGLNSAEEKPQGYVFIKGFPVNDNDAAIQEAKSLNAIRTALEHLEDQLEFFHTIHTQQRTERDVAVARLEQSRMLLAKRLAEHHGKSYGVLDETLAFVGSIKTSTNFVYNSSPNTAGAYSTPPDGPKSNFVINAFAWTFGLAKRALGFNHVRGVLGNAAIFAISMVAMLHLQQVASTEHHRLGKKQRKTYRREMSSSDISLDHLDVMMARG

SEQ ID NO: 109614 - protein, 256 aa, Zea mays subsp. mays
  misc_feature (1)..(256): Ceres Seq. ID no. 14309140
  misc_feature (1)..(256): Homolog of NCBI NO: 34904152 NR Description: P0417G05.19 [Oryza sativa (japonica
  misc_feature (1)..(256): Homolog of NCBI NO: 21592900 NR Description: unknown [Arabidopsis thaliana]
  misc_feature (1)..(256): Homolog of NCBI NO: 15238704 NR Description: expressed protein [Arabidopsis thaliana]
MEEIEAVLEKICDLHDKLSDEIHLISRSHFLKSVKPATRSEKRKSHGLNSAEEKPQGYVFIKGFPVNDNDAAIQEAKSLNAIRTALEHLEDQLEFFHTIHTQQRTERDVAVARLEQSRMLLAKRLAEHHGKSYGVLDETLAFVGSIKTSTNFVYNSSPNTAGAYSTPPDGPKSNFVINAFAWTFGLAKRALGFNHVRGVLGNAAIFAISMVAMLHLQQVASTEHHRLGKKQRKTYRREMSSSDISLDHLDVMMARG

SEQ ID NO: 109615 - DNA, 688 bp, Zea mays subsp. mays
  misc_feature (1)..(688): Ceres Seq. ID no. 14309133
aaattaaattaattaattttatttctgatatttctctcctctctgttcatcaatggcgatgaggaagcttttatcgaagcgtatcttcaacatctcgaaccaatcgtcgcagagtctaacgaattgccgcacatcgtcttcttcggtatccgtgcgaaccagaatcgctccagagcccggagactccgggatctcgcggcggttcttccacaacaccgccgtgattaggccggagatgatgcagatgccggtgggagggagcttgatcgagaagctccgcgaaatcgacggtagcaaggatcgaatccgattagacgggatcgctccgccgatgagggagacggcgagtttgacggtggaggatacgaagaaagttctgagagcggcgcagatggagatggtgaagacgaagcttagagagacggggagaagctggatgacgtattcggagtttgctagcgtttgcggtgaagcttcgtcggatccggaggacggagctagaatagcgaagatgcttgatgattcagcaaacgtcatcgttttgggaggttccgtttgtcttagaccagatcaggtactttcctcatcttgttacctgtgaaatgaatctctgagtgtgcagctgcttgaactgattgggagaggttaaggctctctgaaaataaaaaacatgaattaggttttcttc

SEQ ID NO: 109616 - protein, 182 aa, Zea mays subsp. mays
  misc_feature (1)..(182): Ceres Seq. ID no. 14309134
  misc_feature (3)..(176): Homolog of NCBI NO: 15234535 NR Description: hypothetical protein [Arabidopsis thaliana]
  misc_feature (1)..(178): Homolog of NCBI NO: 24496456 NR Description: hypothetical protein [Arabidopsis thaliana]
  misc_feature (1)..(178): Homolog of NCBI NO: 15224063 NR Description: expressed protein [Arabidopsis thaliana]
  misc_feature (71)..(178): Homolog of NCBI NO: 37535778 NR Description: unknown protein [Oryza sativa (japonica
  misc_feature (58)..(178): Homolog of NCBI NO: 15239011 NR Description: hypothetical protein [Arabidopsis thaliana]
  misc_feature (1)..(175): Homolog of NCBI NO: 20330769 NR Description: Hypothetical protein [Oryza sativa (japonica
  misc_feature (1)..(178): Homolog of NCBI NO: 15240047 NR Description: expressed protein [Arabidopsis thaliana]
  misc_feature (1)..(178): Homolog of NCBI NO: 14596231 NR Description: Unknown protein [Arabidopsis thaliana]
MAMRKLLSKRIFNISNQSSQSLTNCRTSSSSVSVRTRIAPEPGDSGISRRFFHNTAVIRPEMMQMPVGGSLIEKLREIDGSKDRIRLDGIAPPMRETASLTVEDTKKVLRAAQMEMVKTKLRETGRSWMTYSEFASVCGEASSDPEDGARIAKMLDDSANVIVLGGSVCLRPDQVLSSSCYL

SEQ ID NO: 109617 - protein, 180 aa, Zea mays subsp. mays
  misc_feature (1)..(180): Ceres Seq. ID no. 14309135
  misc_feature (69)..(176): Homolog of NCBI NO: 37535778 NR Description: unknown protein [Oryza sativa (japonica
  misc_feature (56)..(176): Homolog of NCBI NO: 15239011 NR Description: hypothetical protein [Arabidopsis thaliana]
  misc_feature (1)..(173): Homolog of NCBI NO: 20330769 NR Description: Hypothetical protein [Oryza sativa (japonica
  misc_feature (1)..(176): Homolog of NCBI NO: 15240047 NR Description: expressed protein [Arabidopsis thaliana]
  misc_feature (1)..(176): Homolog of NCBI NO: 14596231 NR Description: Unknown protein [Arabidopsis thaliana]
  misc_feature (1)..(174): Homolog of NCBI NO: 15234535 NR Description: hypothetical protein [Arabidopsis thaliana]
  misc_feature (1)..(176): Homolog of NCBI NO: 24496456 NR Description: hypothetical protein [Arabidopsis thaliana]
  misc_feature (1)..(176): Homolog of NCBI NO: 15224063 NR Description: expressed protein [Arabidopsis thaliana]
MRKLLSKRIFNISNQSSQSLTNCRTSSSSVSVRTRIAPEPGDSGISRRFFHNTAVIRPEMMQMPVGGSLIEKLREIDGSKDRIRLDGIAPPMRETASLTVEDTKKVLRAAQMEMVKTKLRETGRSWMTYSEFASVCGEASSDPEDGARIAKMLDDSANVIVLGGSVCLRPDQVLSSSCYL

SEQ ID NO: 109618 - protein, 121 aa, Zea mays subsp. mays
  misc_feature (1)..(121): Ceres Seq. ID no. 14309136
  misc_feature (10)..(117): Homolog of NCBI NO: 37535778 NR Description: unknown protein [Oryza sativa (japonica
  misc_feature (1)..(117): Homolog of NCBI NO: 15239011 NR Description: hypothetical protein [Arabidopsis thaliana]
  misc_feature (1)..(114): Homolog of NCBI NO: 20330769 NR Description: Hypothetical protein [Oryza sativa (japonica
  misc_feature (1)..(117): Homolog of NCBI NO: 15240047 NR Description: expressed protein [Arabidopsis thaliana]
  misc_feature (1)..(117): Homolog of NCBI NO: 14596231 NR Description: Unknown protein [Arabidopsis thaliana]
  misc_feature (1)..(115): Homolog of NCBI NO: 15234535 NR Description: hypothetical protein [Arabidopsis thaliana]
  misc_feature (1)..(117): Homolog of NCBI NO: 24496456 NR Description: hypothetical protein [Arabidopsis thaliana]
  misc_feature (1)..(117): Homolog of NCBI NO: 15224063 NR Description: expressed protein [Arabidopsis thaliana]
MMQMPVGGSLIEKLREIDGSKDRIRLDGIAPPMRETASLTVEDTKKVLRAAQMEMVKTKLRETGRSWMTYSEFASVCGEASSDPEDGARIAKMLDDSANVIVLGGSVCLRPDQVLSSSCYL

SEQ ID NO: 109619 - DNA, 1002 bp, Zea mays subsp. mays
  misc_feature (1)..(1002): Ceres Seq. ID no. 15179474
attccactaaaaaaatattgttattatatagagaaaatcaaaactggttatctggaaggcgctaaaaaaatggaaaacggcgacgagagcccggtggttctgataacgggatgctcgcaaggaggaatcggccacgcgctggcacgtgagttctcagataagggatgtcgagtggtggcgacgagccgttcgcggagtacgatgacggatctggagcaggatccgaggttgttcgtgcaggagctcgatgtgcaatcggagcagagcgtgagcaaagtcatgtcgaacgttatcgataagttcggacagatcgacgttcttgtcaacaacgcaggcgttcagtgcgttggacctcttgcggagattccaatgtccgccgtggagaatacattcaacaccaatgttttcggttccatgaggatgactcaagcagttgtacctcacatggtgtctaagaagaagggaaagattgtcaacgttgggagtatcactgttatggcaccaggtccatgggcaggtgtctatacagctaccaaagctgctatccatgctcttaccgacacactcaggttggagctcggcccctttggcattgatgtaatcaatgttgtgccaggaggaatacgaacgaacatagcaaactcagctgtagcaaccttcaacaagatgccagagctgaaactattcaagccttacgaagaagctatcagagagagggcctttatatcacagaggatgaagccaactcctgcagaaacattcgctaaagacaccgtagctgcagtgctaaagaagaacccacctgcttggttctcttccggcagatactcaactctcatggcaatcatgtaccatatgcccctctggttcaaagattttgtccagaagaaggctttaatgaaaaaggactagacagcttccggttttaaagtctctctttctctcttacgataacgaaatgtaaaagattattcagacttgataatgtaatcttatgtcccc

SEQ ID NO: 109620 - protein, 303 aa, Zea mays subsp. mays
  misc_feature (1)..(303): Ceres Seq. ID no. 15179475
  misc_feature (31)..(297): Homolog of NCBI NO: 28868436 NR Description: oxidoreductase, short chain
  misc_feature (31)..(283): Homolog of NCBI NO: 23058177 NR Description: hypothetical protein [Pseudomonas fluorescens
  misc_feature (68)..(301): Homolog of NCBI NO: 38567881 NR Description: OSJNBa0036B21.7 [Oryza sativa (japonica
  misc_feature (68)..(302): Homolog of NCBI NO: 26450169 NR Description: unknown protein [Arabidopsis thaliana]
  misc_feature (26)..(303): Homolog of NCBI NO: 10178182 NR Description: contains similarity to
  misc_feature (26)..(302): Homolog of NCBI NO: 18424923 NR Description: short-chain dehydrogenase/reductase family
  misc_feature (24)..(138): Homolog of NCBI NO: 11358313 NR Description: hypothetical protein T31P16.40 - Arabidopsis
  misc_feature (130)..(302): Homolog of NCBI NO: 11358313 NR Description: hypothetical protein T31P16.40 - Arabidopsis
  misc_feature (24)..(302): Homolog of NCBI NO: 26453106 NR Description: unknown protein [Arabidopsis thaliana]
  misc_feature (24)..(302): Homolog of NCBI NO: 30682984 NR Description: short-chain dehydrogenase/reductase family
IPLKKYCYYIEKIKTGYLEGAKKMENGDESPVVLITGCSQGGIGHALAREFSDKGCRVVATSRSRSTMTDLEQDPRLFVQELDVQSEQSVSKVMSNVIDKFGQIDVLVNNAGVQCVGPLAEIPMSAVENTFNTNVFGSMRMTQAVVPHMVSKKKGKIVNVGSITVMAPGPWAGVYTATKAAIHALTDTLRLELGPFGIDVINVVPGGIRTNIANSAVATFNKMPELKLFKPYEEAIRERAFISQRMKPTPAETFAKDTVAAVLKKNPPAWFSSGRYSTLMAIMYHMPLWFKDFVQKKALMKKD

SEQ ID NO: 109621 - protein, 280 aa, Zea mays subsp. mays
  misc_feature (1)..(280): Ceres Seq. ID no. 15179476
  misc_feature (8)..(274): Homolog of NCBI NO: 28868436 NR Description: oxidoreductase, short chain
  misc_feature (8)..(260): Homolog of NCBI NO: 23058177 NR Description: hypothetical protein [Pseudomonas fluorescens
  misc_feature (45)..(278): Homolog of NCBI NO: 38567881 NR Description: OSJNBa0036B21.7 [Oryza sativa (japonica
  misc_feature (45)..(279): Homolog of NCBI NO: 26450169 NR Description: unknown protein [Arabidopsis thaliana]
  misc_feature (3)..(280): Homolog of NCBI NO: 10178182 NR Description: contains similarity to
  misc_feature (3)..(279): Homolog of NCBI NO: 18424923 NR Description: short-chain dehydrogenase/reductase family
  misc_feature (1)..(115): Homolog of NCBI NO: 11358313 NR Description: hypothetical protein T31P16.40 - Arabidopsis
  misc_feature (107)..(279): Homolog of NCBI NO: 11358313 NR Description: hypothetical protein T31P16.40 - Arabidopsis
  misc_feature (1)..(279): Homolog of NCBI NO: 26453106 NR Description: unknown protein [Arabidopsis thaliana]
  misc_feature (1)..(279): Homolog of NCBI NO: 30682984 NR Description: short-chain dehydrogenase/reductase family
MENGDESPVVLITGCSQGGIGHALAREFSDKGCRVVATSRSRSTMTDLEQDPRLFVQELDVQSEQSVSKVMSNVIDKFGQIDVLVNNAGVQCVGPLAEIPMSAVENTFNTNVFGSMRMTQAVVPHMVSKKKGKIVNVGSITVMAPGPWAGVYTATKAAIHALTDTLRLELGPFGIDVINVVPGGIRTNIANSAVATFNKMPELKLFKPYEEAIRERAFISQRMKPTPAETFAKDTVAAVLKKNPPAWFSSGRYSTLMAIMYHMPLWFKDFVQKKALMKKD

SEQ ID NO: 109622 - protein, 236 aa, Zea mays subsp. mays
  misc_feature (1)..(236): Ceres Seq. ID no. 15179477
  misc_feature (1)..(230): Homolog of NCBI NO: 28868436 NR Description: oxidoreductase, short chain
  misc_feature (1)..(216): Homolog of NCBI NO: 23058177 NR Description: hypothetical protein [Pseudomonas fluorescens
  misc_feature (1)..(234): Homolog of NCBI NO: 38567881 NR Description: OSJNBa0036B21.7 [Oryza sativa (japonica
  misc_feature (1)..(235): Homolog of NCBI NO: 26450169 NR Description: unknown protein [Arabidopsis thaliana]
  misc_feature (1)..(236): Homolog of NCBI NO: 10178182 NR Description: contains similarity to
  misc_feature (1)..(235): Homolog of NCBI NO: 18424923 NR Description: short-chain dehydrogenase/reductase family
  misc_feature (1)..(71): Homolog of NCBI NO: 11358313 NR Description: hypothetical protein T31P16.40 - Arabidopsis
  misc_feature (63)..(235): Homolog of NCBI NO: 11358313 NR Description: hypothetical protein T31P16.40 - Arabidopsis
  misc_feature (1)..(235): Homolog of NCBI NO: 26453106 NR Description: unknown protein [Arabidopsis thaliana]
  misc_feature (1)..(235): Homolog of NCBI NO: 30682984 NR Description: short-chain dehydrogenase/reductase family
MTDLEQDPRLFVQELDVQSEQSVSKVMSNVIDKFGQIDVLVNNAGVQCVGPLAEIPMSAVENTFNTNVFGSMRMTQAVVPHMVSKKKGKIVNVGSITVMAPGPWAGVYTATKAAIHALTDTLRLELGPFGIDVINVVPGGIRTNIANSAVATFNKMPELKLFKPYEEAIRERAFISQRMKPTPAETFAKDTVAAVLKKNPPAWFSSGRYSTLMAIMYHMPLWFKDFVQKKALMKKD

SEQ ID NO: 109623 - DNA, 825 bp, Zea mays subsp. mays
  misc_feature (1)..(825): Ceres Seq. ID no. 14309121
aattaattaaaaatgattccacagtagatgcgaaaaagcagtcgtctcctctcaccggcattaaaccaaaccaaaccagaaatctagagactccttcctttctccttgttcctccgagagagagtattgtgtgaatctgggttttcgaatcgtgatattgttgtggaatagatcggatcgatggcgaatctgtacgtgaaagcggctccaccgccggatatgaacaggaacacggagtggttcatgtacccaggggtgtggaccacttatatactcatcctcttcttcggatggctcgttgttctctccctctctggctgttcccctgggatggcttggactgttgttaatctcgctcacttcgttgtaacgtatcactcctttcactggatgaaaggaacgccttttgcagacgaccagggagtctacaatggtctcacctggtgggaacagatggacaacggtcagcaacttacccgcaaccgcaagttccttaccgttgttcctgttgtcctgtacttgatagcatcacatacaacagattacaggcatccatggctattcctcaacacactcgctgtgatggttctagttgtggccaagttccctaacatgcacaaggtgcgcatcttcgggatcaacggtgataagtaacgttctttagcaaaactcagatccatttcttttctggcaagagaaaagtggatataaccaaacacatgtatgtataaaatgttgatatgagttggtttggagttgtcggatattttgtaagtaactttgaagctttgaatttcttcttttttatgttttcttttttaatat

SEQ ID NO: 109624 - protein, 157 aa, Zea mays subsp. mays
  misc_feature (1)..(157): Ceres Seq. ID no. 14309122
  misc_feature (14)..(156): Pfam Name: ORMDL family Pfam Description: ORMDL family
  misc_feature (15)..(155): Homolog of NCBI NO: 6323382 NR Description: Homologous to ORM1.; Orm2p [Saccharomyces
  misc_feature (15)..(146): Homolog of NCBI NO: 40745942 NR Description: hypothetical protein AN1933.2 [Aspergillus
  misc_feature (15)..(153): Homolog of NCBI NO: 19112082 NR Description: hypothetical protein
  misc_feature (56)..(156): Homolog of NCBI NO: 18419644 NR Description: unknown [Narcissus pseudonarcissus]
  misc_feature (5)..(147): Homolog of NCBI NO: 34901370 NR Description: OSJNBb0062P14.15 [Oryza sativa (japonica
  misc_feature (5)..(156): Homolog of NCBI NO: 34394897 NR Description: putative ORMDL2 [Oryza sativa (japonica
  misc_feature (1)..(154): Homolog of NCBI NO: 38344271 NR Description: OSJNBa0005N02.9 [Oryza sativa (japonica
  misc_feature (4)..(157): Homolog of NCBI NO: 15238262 NR Description: expressed protein [Arabidopsis thaliana]
  misc_feature (1)..(147): Homolog of NCBI NO: 25513580 NR Description: F6F3.4 protein - Arabidopsis thaliana
  misc_feature (1)..(157): Homolog of NCBI NO: 18378814 NR Description: expressed protein [Arabidopsis thaliana]
MANLYVKAAPPPDMNRNTEWFMYPGVWTTYILILFFGWLVVLSLSGCSPGMAWTVVNLAHFVVTYHSFHWMKGTPFADDQGVYNGLTWWEQMDNGQQLTRNRKFLTVVPVVLYLIASHTTDYRHPWLFLNTLAVMVLVVAKFPNMHKVRIFGINGDK

SEQ ID NO: 109625 - protein, 144 aa, Zea mays subsp. mays
  misc_feature (1)..(144): Ceres Seq. ID no. 14309123
  misc_feature (1)..(143): Pfam Name: ORMDL family Pfam Description: ORMDL family
  misc_feature (2)..(142): Homolog of NCBI NO: 6323382 NR Description: Homologous to ORM1.; Orm2p [Saccharomyces
  misc_feature (2)..(133): Homolog of NCBI NO: 40745942 NR Description: hypothetical protein AN1933.2 [Aspergillus
  misc_feature (2)..(140): Homolog of NCBI NO: 19112082 NR Description: hypothetical protein
  misc_feature (43)..(143): Homolog of NCBI NO: 18419644 NR Description: unknown [Narcissus pseudonarcissus]
  misc_feature (1)..(134): Homolog of NCBI NO: 34901370 NR Description: OSJNBb0062P14.15 [Oryza sativa (japonica
  misc_feature (1)..(143): Homolog of NCBI NO: 34394897 NR Description: putative ORMDL2 [Oryza sativa (japonica
  misc_feature (1)..(141): Homolog of NCBI NO: 38344271 NR Description: OSJNBa0005N02.9 [Oryza sativa (japonica
  misc_feature (1)..(144): Homolog of NCBI NO: 15238262 NR Description: expressed protein [Arabidopsis thaliana]
  misc_feature (1)..(134): Homolog of NCBI NO: 25513580 NR Description: F6F3.4 protein - Arabidopsis thaliana
  misc_feature (1)..(144): Homolog of NCBI NO: 18378814 NR Description: expressed protein [Arabidopsis thaliana]
MNRNTEWFMYPGVWTTYILILFFGWLVVLSLSGCSPGMAWTVVNLAHFVVTYHSFHWMKGTPFADDQGVYNGLTWWEQMDNGQQLTRNRKFLTVVPVVLYLIASHTTDYRHPWLFLNTLAVMVLVVAKFPNMHKVRIFGINGDK

SEQ ID NO: 109626 - protein, 136 aa, Zea mays subsp. mays
  misc_feature (1)..(136): Ceres Seq. ID no. 14309124
  misc_feature (1)..(135): Pfam Name: ORMDL family Pfam Description: ORMDL family
  misc_feature (1)..(134): Homolog of NCBI NO: 6323382 NR Description: Homologous to ORM1.; Orm2p [Saccharomyces
  misc_feature (1)..(125): Homolog of NCBI NO: 40745942 NR Description: hypothetical protein AN1933.2 [Aspergillus
  misc_feature (1)..(132): Homolog of NCBI NO: 19112082 NR Description: hypothetical protein
  misc_feature (35)..(135): Homolog of NCBI NO: 18419644 NR Description: unknown [Narcissus pseudonarcissus]
  misc_feature (1)..(126): Homolog of NCBI NO: 34901370 NR Description: OSJNBb0062P14.15 [Oryza sativa (japonica
  misc_feature (1)..(135): Homolog of NCBI NO: 34394897 NR Description: putative ORMDL2 [Oryza sativa (japonica
  misc_feature (1)..(133): Homolog of NCBI NO: 38344271 NR Description: OSJNBa0005N02.9 [Oryza sativa (japonica
  misc_feature (1)..(136): Homolog of NCBI NO: 15238262 NR Description: expressed protein [Arabidopsis thaliana]
  misc_feature (1)..(126): Homolog of NCBI NO: 25513580 NR Description: F6F3.4 protein - Arabidopsis thaliana
  misc_feature (1)..(136): Homolog of NCBI NO: 18378814 NR Description: expressed protein [Arabidopsis thaliana]
MYPGVWTTYILILFFGWLVVLSLSGCSPGMAWTVVNLAHFVVTYHSFHWMKGTPFADDQGVYNGLTWWEQMDNGQQLTRNRKFLTVVPVVLYLIASHTTDYRHPWLFLNTLAVMVLVVAKFPNMHKVRIFGINGDK

SEQ ID NO: 109627 - DNA, 1057 bp, Zea mays subsp. mays
  misc_feature (1)..(1057): Ceres Seq. ID no. 15179562
cctttccttctcgagctcttcgtccttcctctgtttccttcattcacacagagagagaaacgcaaaagactaaaactttgagaaaagagatgatggagtgggacaatcagcagcaacccagtaacaatccttcttcaaatcttcaagggatcgacgttaatggaggctcaggctcaggaggaatgtacgtgaaggtgatgaccgacgagcagctcgaaactctgaggaagcagattgctatctacgccaccatttgtgaacgtctcgttgagatgcacaaaaccctcacttctcaacaagatcttgcagggagagtgggaggtctatatgcagacccaacgtttggtcacaagatgacaggtggtaggcagaggtggactcctactccagttcagcttcagattctggagcgtatattcgaccaagggatagggacaccgagcaagcagaagatcaaagacataaccgaggagctgagccagcacggtcagatagctgagcaaaacgtctacaattggtttcagaaccggcgcgctcggtccaagaggaagcagcatggtggtggtggtggtggtgttggttcttctagtaacaacaacaatggtgagtctgaggtggaggctgaaactgagacggtgaatgagaagagaaagatgccagagagtcttcttgtgtttcctgatggaaacaagaatgccattgggacaacaagtgctactagtcctaggcctgaagatctttacttccagagccctgagatgagctctgatcttgacttgctaggagtcctatcaaacccaagggatgagcattttgtaggaaagatggggctgtctgaaagctacaacatgtatgatcatgttgaagattatggcatgtagggctgattaatacaagctgaggaaattggttcagtagtcagtcttaagcagttttagacacttttttaattattttgtttctgggtgttttaatcaaagtttgtgatgcattactttaatgtttactggatttagagtgattcctatctccttaacaataataatatttttctaag

SEQ ID NO: 109628 - protein, 292 aa, Zea mays subsp. mays
  misc_feature (1)..(292): Ceres Seq. ID no. 15179563
  misc_feature (122)..(182): Pfam Name: Homeobox domain Pfam Description: Homeobox domain
  misc_feature (102)..(226): Homolog of NCBI NO: 34910936 NR Description: OSJNBb0063G05.13 [Oryza sativa (japonica
  misc_feature (52)..(184): Homolog of NCBI NO: 15218015 NR Description: homeodomain protein [Arabidopsis thaliana]
  misc_feature (36)..(184): Homolog of NCBI NO: 30686974 NR Description: homeodomain protein PALE-2, putative [Arabidopsis
  misc_feature (59)..(229): Homolog of NCBI NO: 40233067 NR Description: homeodomain protein HB1 [Populus tomentosa]
  misc_feature (59)..(229): Homolog of NCBI NO: 3955019 NR Description: HB1 homeodomain protein [Populus tremula x
  misc_feature (31)..(221): Homolog of NCBI NO: 34909272 NR Description: putative HB2 homeodomain protein
  misc_feature (31)..(220): Homolog of NCBI NO: 40233087 NR Description: homeodomain protein HB2 [Populus tomentosa]
  misc_feature (196)..(292): Homolog of NCBI NO: 3955021 NR Description: HB2 homeodomain protein [Populus tremula x
  misc_feature (31)..(220): Homolog of NCBI NO: 3955021 NR Description: HB2 homeodomain protein [Populus tremula x
  misc_feature (30)..(292): Homolog of NCBI NO: 15237035 NR Description: homeodomain protein HB2, putative [Arabidopsis
FPSRALRPSSVSFIHTERETQKTKTLRKEMMEWDNQQQPSNNPSSNLQGIDVNGGSGSGGMYVKVMTDEQLETLRKQIAIYATICERLVEMHKTLTSQQDLAGRVGGLYADPTFGHKMTGGRQRWTPTPVQLQILERIFDQGIGTPSKQKIKDITEELSQHGQIAEQNVYNWFQNRRARSKRKQHGGGGGGVGSSSNNNNGESEVEAETETVNEKRKMPESLLVFPDGNKNAIGTTSATSPRPEDLYFQSPEMSSDLDLLGVLSNPRDEHFVGKMGLSESYNMYDHVEDYGM

SEQ ID NO: 109629 - protein, 263 aa, Zea mays subsp. mays
  misc_feature (1)..(263): Ceres Seq. ID no. 15179564
  misc_feature (93)..(153): Pfam Name: Homeobox domain Pfam Description: Homeobox domain
  misc_feature (73)..(197): Homolog of NCBI NO: 34910936 NR Description: OSJNBb0063G05.13 [Oryza sativa (japonica
  misc_feature (23)..(155): Homolog of NCBI NO: 15218015 NR Description: homeodomain protein [Arabidopsis thaliana]
  misc_feature (7)..(155): Homolog of NCBI NO: 30686974 NR Description: homeodomain protein PALE-2, putative [Arabidopsis
  misc_feature (30)..(200): Homolog of NCBI NO: 40233067 NR Description: homeodomain protein HB1 [Populus tomentosa]
  misc_feature (30)..(200): Homolog of NCBI NO: 3955019 NR Description: HB1 homeodomain protein [Populus tremula x
  misc_feature (2)..(192): Homolog of NCBI NO: 34909272 NR Description: putative HB2 homeodomain protein
  misc_feature (2)..(191): Homolog of NCBI NO: 40233087 NR Description: homeodomain protein HB2 [Populus tomentosa]
  misc_feature (167)..(263): Homolog of NCBI NO: 3955021 NR Description: HB2 homeodomain protein [Populus tremula x
  misc_feature (2)..(191): Homolog of NCBI NO: 3955021 NR Description: HB2 homeodomain protein [Populus tremula x
  misc_feature (1)..(263): Homolog of NCBI NO: 15237035 NR Description: homeodomain protein HB2, putative [Arabidopsis
MMEWDNQQQPSNNPSSNLQGIDVNGGSGSGGMYVKVMTDEQLETLRKQIAIYATICERLVEMHKTLTSQQDLAGRVGGLYADPTFGHKMTGGRQRWTPTPVQLQILERIFDQGIGTPSKQKIKDITEELSQHGQIAEQNVYNWFQNRRARSKRKQHGGGGGGVGSSSNNNNGESEVEAETETVNEKRKMPESLLVFPDGNKNAIGTTSATSPRPEDLYFQSPEMSSDLDLLGVLSNPRDEHFVGKMGLSESYNMYDHVEDYGM

SEQ ID NO: 109630 - protein, 262 aa, Zea mays subsp. mays
  misc_feature (1)..(262): Ceres Seq. ID no. 15179565
  misc_feature (92)..(152): Pfam Name: Homeobox domain Pfam Description: Homeobox domain
  misc_feature (72)..(196): Homolog of NCBI NO: 34910936 NR Description: OSJNBb0063G05.13 [Oryza sativa (japonica
  misc_feature (22)..(154): Homolog of NCBI NO: 15218015 NR Description: homeodomain protein [Arabidopsis thaliana]
  misc_feature (6)..(154): Homolog of NCBI NO: 30686974 NR Description: homeodomain protein PALE-2, putative [Arabidopsis
  misc_feature (29)..(199): Homolog of NCBI NO: 40233067 NR Description: homeodomain protein HB1 [Populus tomentosa]
  misc_feature (29)..(199): Homolog of NCBI NO: 3955019 NR Description: HB1 homeodomain protein [Populus tremula x
  misc_feature (1)..(191): Homolog of NCBI NO: 34909272 NR Description: putative HB2 homeodomain protein
  misc_feature (1)..(190): Homolog of NCBI NO: 40233087 NR Description: homeodomain protein HB2 [Populus tomentosa]
  misc_feature (166)..(262): Homolog of NCBI NO: 3955021 NR Description: HB2 homeodomain protein [Populus tremula x
  misc_feature (1)..(190): Homolog of NCBI NO: 3955021 NR Description: HB2 homeodomain protein [Populus tremula x
  misc_feature (1)..(262): Homolog of NCBI NO: 15237035 NR Description: homeodomain protein HB2, putative [Arabidopsis
MEWDNQQQPSNNPSSNLQGIDVNGGSGSGGMYVKVMTDEQLETLRKQIAIYATICERLVEMHKTLTSQQDLAGRVGGLYADPTFGHKMTGGRQRWTPTPVQLQILERIFDQGIGTPSKQKIKDITEELSQHGQIAEQNVYNWFQNRRARSKRKQHGGGGGGVGSSSNNNNGESEVEAETETVNEKRKMPESLLVFPDGNKNAIGTTSATSPRPEDLYFQSPEMSSDLDLLGVLSNPRDEHFVGKMGLSESYNMYDHVEDYGM

SEQ ID NO: 109631 - DNA, 636 bp, Zea mays subsp. mays
  misc_feature (1)..(636): Ceres Seq. ID no. 14309116
aatagattttcagttgtgtcggctgaagaagcacacagatggcggcgagcgcgtgtctccggctgccggcggcgatggctgtccggcgagaggaaggcgttccgaattcaaaatcttcgcaggaaaaaccgagaatttatctcaacaaaccttcatggatagtcacaactcagtgtggcgctaagacgagtagaaaggagaagggtcgatgcgtaatctgccatggaactggaagagtcgactgtttcaattgtagcgggaaagggaggactaactgcgtggatatggagatgcttccaagaggagagtggcccaaatggtgcaggagctgtggagggagtggtttatgtgaatgctctcgctgtcttggcaccggagagtacagatacattatgggtttccgcttcttgaacaaacacgatgacgtggatccacagttatgagttgctgaaacggtggtggtgatgtttccttaccagtttctttttgtatatgttcagtgaagactttagtatgttttgatatgtttgctccagacttgtttggttttagtgtgttaaatgtctgtcacttttaagtgtaattcttttctctgtaagaacgctacaataattaatgtcttctctttacttgggt

SEQ ID NO: 109632 - protein, 134 aa, Zea mays subsp. mays
  misc_feature (1)..(134): Ceres Seq. ID no. 14309117
  misc_feature (31)..(127): Homolog of NCBI NO: 38346709 NR Description: OSJNBa0086O06.7 [Oryza sativa (japonica
  misc_feature (1)..(114): Homolog of NCBI NO: 15229091 NR Description: hypothetical protein [Arabidopsis thaliana]
  misc_feature (1)..(133): Homolog of NCBI NO: 9294155 NR Description: gene_id:MKP6.23~unknown protein [Arabidopsis
MAASACLRLPAAMAVRREEGVPNSKSSQEKPRIYLNKPSWIVTTQCGAKTSRKEKGRCVICHGTGRVDCFNCSGKGRTNCVDMEMLPRGEWPKWCRSCGGSGLCECSRCLGTGEYRYIMGFRFLNKHDDVDPQL

SEQ ID NO: 109633 - protein, 122 aa, Zea mays subsp. mays
  misc_feature (1)..(122): Ceres Seq. ID no. 14309118
  misc_feature (19)..(115): Homolog of NCBI NO: 38346709 NR Description: OSJNBa0086O06.7 [Oryza sativa (japonica
  misc_feature (1)..(102): Homolog of NCBI NO: 15229091 NR Description: hypothetical protein [Arabidopsis thaliana]
  misc_feature (1)..(121): Homolog of NCBI NO: 9294155 NR Description: gene_id:MKP6.23~unknown protein [Arabidopsis
MAVRREEGVPNSKSSQEKPRIYLNKPSWIVTTQCGAKTSRKEKGRCVICHGTGRVDCFNCSGKGRTNCVDMEMLPRGEWPKWCRSCGGSGLCECSRCLGTGEYRYIMGFRFLNKHDDVDPQL

SEQ ID NO: 109634 - DNA, 863 bp, Zea mays subsp. mays
  misc_feature (1)..(863): Ceres Seq. ID no. 14309113
aaaaacctaacaagaaagcttgtgttaaacttgtttccttactaacttgtccgattttctcattaggccatggctccttccgctgcctcttcaaacactaaagaaggagaatctggtgaggaaggatatactgcattggagaaacatgtagccttcttcgacaggaacggagacggcgtcatttatccttgggaaacctaccaaggatttagagcgataggggtagggcgtctcccgtcagctattgctggtctctttatcaacatgggacttagccagaaaactcgcccggggaagggattctcgctgttgtttccaatagaagtgaagaatagtcacttttgcatccatggtagtgtcactgaagtatacgacaagaacggaagatttgtggaatcgaaattcgaggagatattcaagaagcatgctcgctcacatcgaaatgctctcacttacaaggaacttcttcaattgcttaagtctaacagagaccctggagactttggaggatggattgcagcatacggagaatggaaattattatatgaattatgcaaagatgaagatggtttattgacgagagaggcagtaaaaggcgccttcgatggcagcattttcagaaaattggagaaagaacgattatcttcttctcataagaagaaagaaaaaagaagacgttaaatattcccaaagcccattcatccatcatcttcaacgttacaaattaatagatacacttatgtgactagtgtgtatcttatatgaaaatggtttgttgttgtgatgcattctttacataaacatatatgatatttttgtgtaatattccgataataccattagaaaatatagttatgacatgc

SEQ ID NO: 109635 - protein, 203 aa, Zea mays subsp. mays
  misc_feature (1)..(203): Ceres Seq. ID no. 14309114
  misc_feature (21)..(188): Pfam Name: Caleosin related protein Pfam Description: Caleosin related protein
  misc_feature (2)..(193): Homolog of NCBI NO: 15226103 NR Description: RD20 protein [Arabidopsis thaliana]
  misc_feature (45)..(200): Homolog of NCBI NO: 15220688 NR Description: Ca2+-binding EF-hand common family protein,
  misc_feature (1)..(193): Homolog of NCBI NO: 34902470 NR Description: Putative abscisic acid-induced protein - rice
  misc_feature (1)..(198): Homolog of NCBI NO: 37652831 NR Description: calcium binding protein [Fagus sylvatica]
  misc_feature (5)..(194): Homolog of NCBI NO: 21617961 NR Description: unknown [Arabidopsis thaliana]
  misc_feature (5)..(194): Homolog of NCBI NO: 18409651 NR Description: Ca2+-binding EF-hand common family protein,
  misc_feature (23)..(197): Homolog of NCBI NO: 21593851 NR Description: unknown [Arabidopsis thaliana]
  misc_feature (23)..(197): Homolog of NCBI NO: 18409649 NR Description: Ca2+-binding EF-hand common family protein,
  misc_feature (13)..(200): Homolog of NCBI NO: 9295714 NR Description: F26F24.9 [Arabidopsis thaliana]
  misc_feature (21)..(200): Homolog of NCBI NO: 15220687 NR Description: pollen coat EF-hand protein [Arabidopsis
MAPSAASSNTKEGESGEEGYTALEKHVAFFDRNGDGVIYPWETYQGFRAIGVGRLPSAIAGLFINMGLSQKTRPGKGFSLLFPIEVKNSHFCIHGSVTEVYDKNGRFVESKFEEIFKKHARSHRNALTYKELLQLLKSNRDPGDFGGWIAAYGEWKLLYELCKDEDGLLTREAVKGAFDGSIFRKLEKERLSSSHKKKEKRRR

SEQ ID NO: 109636 - protein, 138 aa, Zea mays subsp. mays
  misc_feature (1)..(138): Ceres Seq. ID no. 14309115
  misc_feature (1)..(123): Pfam Name: Caleosin related protein Pfam Description: Caleosin related protein
  misc_feature (1)..(128): Homolog of NCBI NO: 15226103 NR Description: RD20 protein [Arabidopsis thaliana]
  misc_feature (1)..(135): Homolog of NCBI NO: 15220688 NR Description: Ca2+-binding EF-hand common family protein,
  misc_feature (1)..(128): Homolog of NCBI NO: 34902470 NR Description: Putative abscisic acid-induced protein - rice
  misc_feature (1)..(133): Homolog of NCBI NO: 37652831 NR Description: calcium binding protein [Fagus sylvatica]
  misc_feature (1)..(129): Homolog of NCBI NO: 21617961 NR Description: unknown [Arabidopsis thaliana]
  misc_feature (1)..(129): Homolog of NCBI NO: 18409651 NR Description: Ca2+-binding EF-hand common family protein,
  misc_feature (1)..(132): Homolog of NCBI NO: 21593851 NR Description: unknown [Arabidopsis thaliana]
  misc_feature (1)..(132): Homolog of NCBI NO: 18409649 NR Description: Ca2+-binding EF-hand common family protein,
  misc_feature (1)..(135): Homolog of NCBI NO: 9295714 NR Description: F26F24.9 [Arabidopsis thaliana]
  misc_feature (1)..(135): Homolog of NCBI NO: 15220687 NR Description: pollen coat EF-hand protein [Arabidopsis
MGLSQKTRPGKGFSLLFPIEVKNSHFCIHGSVTEVYDKNGRFVESKFEEIFKKHARSHRNALTYKELLQLLKSNRDPGDFGGWIAAYGEWKLLYELCKDEDGLLTREAVKGAFDGSIFRKLEKERLSSSHKKKEKRRR

SEQ ID NO: 109637 - DNA, 923 bp, Zea mays subsp. mays
  misc_feature (1)..(923): Ceres Seq. ID no. 14309110
atctcactcactctcgtctcttctctatctctctgcgtgggtgaaatttagatggctggagttgtgcgattatcaacgacgtcggttcagacccttggcgtctcttctccgcccttcacctcctttgcagccactctcagttctcctcccttacctcctcctactccgaatctgaattccgacaagagattgcgtccgctctcatcttctccctcgtgctcgtctcctcattacccagcttctggtctcgcaagccatagcctccttagacgtcccaacagcaaagtggttcgcgtcaaggtagatgagagtgtggccgagacagagccacctaaatggtgggagaggaatgctccaaacatggtagacattcattccaccgaagagttcttgaaggctctgagcgaagcgggtgaaagactagtgattgtagagttctatggaacttggtgcgcttcttgtagagcattgttccctaagctttgcaaaacggcggtggagaatcccaatatattgttcctcaaagtaaactttgatgagaataaaccaatgtgcaagagtttgaacgtgaaagtgcttccttatttccacttctaccgtggtgctgatggccagctcgagtccttctcatgttctcttgctaagtttcagaagataaaagatgccatcagactacacaacactgatcgttgcagcatcggtccagccaagggacctgaagggtttacgttggattctttatccgtccagacgaatgcagccaaaccagctggatcaagttgaaatgccagatactgagctcaatattctgtacatccgagatcttctgctactgtaacaatctttggttgctgaagcaaatactgagcttaatattctgtatatcagtaatttttttggtataaatggataactcctgaagc

SEQ ID NO: 109638 - protein, 243 aa, Zea mays subsp. mays
  misc_feature (1)..(243): Ceres Seq. ID no. 14309111
  misc_feature (104)..(211): Pfam Name: Thioredoxin Pfam Description: Thioredoxin
  misc_feature (95)..(231): Homolog of NCBI NO: 15223262 NR Description: thioredoxin family [Arabidopsis thaliana]
  misc_feature (95)..(232): Homolog of NCBI NO: 34394520 NR Description: putative thioredoxin [Oryza sativa (japonica
  misc_feature (68)..(231): Homolog of NCBI NO: 308906 NR Description: thioredoxin
  misc_feature (104)..(201): Homolog of NCBI NO: 14423392 NR Description: Thioredoxin-like protein [Arabidopsis thaliana]
  misc_feature (22)..(215): Homolog of NCBI NO: 4973258 NR Description: thioredoxin-like 2 [Arabidopsis thaliana]
  misc_feature (11)..(215): Homolog of NCBI NO: 21553512 NR Description: putative thioredoxin [Arabidopsis thaliana]
  misc_feature (11)..(215): Homolog of NCBI NO: 15236134 NR Description: thioredoxin family [Arabidopsis thaliana]
  misc_feature (1)..(201): Homolog of NCBI NO: 30688403 NR Description: thioredoxin family [Arabidopsis thaliana]
  misc_feature (1)..(243): Homolog of NCBI NO: 21554313 NR Description: thioredoxin-like protein [Arabidopsis thaliana]
  misc_feature (1)..(243): Homolog of NCBI NO: 18417441 NR Description: thioredoxin family [Arabidopsis thaliana]
MAGVVRLSTTSVQTLGVSSPPFTSFAATLSSPPLPPPTPNLNSDKRLRPLSSSPSCSSPHYPASGLASHSLLRRPNSKVVRVKVDESVAETEPPKWWERNAPNMVDIHSTEEFLKALSEAGERLVIVEFYGTWCASCRALFPKLCKTAVENPNILFLKVNFDENKPMCKSLNVKVLPYFHFYRGADGQLESFSCSLAKFQKIKDAIRLHNTDRCSIGPAKGPEGFTLDSLSVQTNAAKPAGSS

SEQ ID NO: 109639 - protein, 140 aa, Zea mays subsp. mays
  misc_feature (1)..(140): Ceres Seq. ID no. 14309112
  misc_feature (1)..(108): Pfam Name: Thioredoxin Pfam Description: Thioredoxin
  misc_feature (1)..(128): Homolog of NCBI NO: 15223262 NR Description: thioredoxin family [Arabidopsis thaliana]
  misc_feature (1)..(129): Homolog of NCBI NO: 34394520 NR Description: putative thioredoxin [Oryza sativa (japonica
  misc_feature (1)..(128): Homolog of NCBI NO: 308906 NR Description: thioredoxin
  misc_feature (1)..(98): Homolog of NCBI NO: 14423392 NR Description: Thioredoxin-like protein [Arabidopsis thaliana]
  misc_feature (1)..(112): Homolog of NCBI NO: 4973258 NR Description: thioredoxin-like 2 [Arabidopsis thaliana]
  misc_feature (1)..(112): Homolog of NCBI NO: 21553512 NR Description: putative thioredoxin [Arabidopsis thaliana]
  misc_feature (1)..(112): Homolog of NCBI NO: 15236134 NR Description: thioredoxin family [Arabidopsis thaliana]
  misc_feature (1)..(98): Homolog of NCBI NO: 30688403 NR Description: thioredoxin family [Arabidopsis thaliana]
  misc_feature (1)..(140): Homolog of NCBI NO: 21554313 NR Description: thioredoxin-like protein [Arabidopsis thaliana]
  misc_feature (1)..(140): Homolog of NCBI NO: 18417441 NR Description: thioredoxin family [Arabidopsis thaliana]
MVDIHSTEEFLKALSEAGERLVIVEFYGTWCASCRALFPKLCKTAVENPNILFLKVNFDENKPMCKSLNVKVLPYFHFYRGADGQLESFSCSLAKFQKIKDAIRLHNTDRCSIGPAKGPEGFTLDSLSVQTNAAKPAGSS

SEQ ID NO: 109640 - DNA, 1352 bp, Zea mays subsp. mays
  misc_feature (1)..(1352): Ceres Seq. ID no. 15180047
aacgaagaaccgaatgcccagtcctgaatcacgtcttcacccgtgctcgtgcgctgcgcccatcccttccgcctccacgctccccacgtgcaccgtgcacagcaccacacagccaggtccccatggcggcggcggcggcggttgcgtctgcgacgacggcggaagacgaagcgcgcctgctgcgcctggaggagcaggcggagcacggcggcggcggcgcctgggaatacctctgcctcgcccgccggctccgcgcccgccgccccgctcacgtcctccgcgtcggcctcgccctcctcaacaacgcctccgcgcgctccggccttgcctcagaacagtggacgctctacgagcaggtggccacggcggccatggattgccagcgtctcgatgtggcaaaggactgtattggagtcctttcaaaacaatttcctgggagcacacgggttgcccggctagaagctcgtctgtttgaagcaaaaggtgaatgggctgaagctgaaagagcctacgcgctaatcctggaaaacaatccatttgaccagattgtccacaagaggaaaattgctatcgcaaaagcacaaggtggtatgtcgatagtgattgattatctcaataagtatctggaattgtttatggctgatcatgatgcttggagagaacttgctgaaacatacagttccttacaaatgtacaagcaagctgccttttgttatgaggagctaatattagcccaaccaactattccactatatcatatagcctacgctgaggttctgtacactatgggtggcttggaaaatctccaaacagctaagaagtattatgcatcaacaatccagttaactggaggcaagaatacaagagccctctttggtgtatgtctgtgtacttcggcaatcaatcagttgacgaaaggaaggaataaagaggaagaggactcggagctgcagagcttggctgcagaggtactgctgaagaattacaagcagcaggctccatcaaaggcgccccttatcagcagcatgttgaagaacatgaaactcagctgataccaaccagctccacacattcagagtggcctgatttgatagatagttaagttaaattgatgtggcttaatatatgcttgtttttttatatataaaaaaattgtggcaccaacattgtgcaaggcttaaaagtagatgctcccaaggccatgggttgtacaacacctgcttgcttacctcgaaatatgcatggcttcttcagtggatgttctactatatagatcaacaaacccccgattgtacttgagcacaaacaaaattttgaatcagtcgctggtgaagttgtacgtgttgattttc

SEQ ID NO: 109641 - protein, 349 aa, Zea mays subsp. mays
  misc_feature (1)..(349): Ceres Seq. ID no. 15180048
  misc_feature (81)..(335): Homolog of NCBI NO: 18088455 NR Description: KIAA0103 gene product [Homo sapiens]
  misc_feature (81)..(335): Homolog of NCBI NO: 7661910 NR Description: KIAA0103 gene product [Homo sapiens]
  misc_feature (81)..(342): Homolog of NCBI NO: 34866113 NR Description: similar to RIKEN cDNA 4921531G14 [Rattus
  misc_feature (81)..(335): Homolog of NCBI NO: 14193698 NR Description: KIAA0103 protein [Mus musculus]
  misc_feature (81)..(335): Homolog of NCBI NO: 13385196 NR Description: RIKEN cDNA 4921531G14 [Mus musculus]
  misc_feature (138)..(348): Homolog of NCBI NO: 10799830 NR Description: O-linked GlcNAc transferase like [Nicotiana
  misc_feature (52)..(347): Homolog of NCBI NO: 30690960 NR Description: expressed protein [Arabidopsis thaliana]
  misc_feature (52)..(347): Homolog of NCBI NO: 5732436 NR Description: contains similarity to O-linked GlcNAc
  misc_feature (52)..(349): Homolog of NCBI NO: 22330847 NR Description: expressed protein [Arabidopsis thaliana]
  misc_feature (52)..(349): Homolog of NCBI NO: 30679284 NR Description: expressed protein [Arabidopsis thaliana]
RRTECPVLNHVFTRARALRPSLPPPRSPRAPCTAPHSQVPMAAAAAVASATTAEDEARLLRLEEQAEHGGGGAWEYLCLARRLRARRPAHVLRVGLALLNNASARSGLASEQWTLYEQVATAAMDCQRLDVAKDCIGVLSKQFPGSTRVARLEARLFEAKGEWAEAERAYALILENNPFDQIVHKRKIAIAKAQGGMSIVIDYLNKYLELFMADHDAWRELAETYSSLQMYKQAAFCYEELILAQPTIPLYHIAYAEVLYTMGGLENLQTAKKYYASTIQLTGGKNTRALFGVCLCTSAINQLTKGRNKEEEDSELQSLAAEVLLKNYKQQAPSKAPLISSMLKNMKLS

SEQ ID NO: 109642 - protein, 309 aa, Zea mays subsp. mays
  misc_feature (1)..(309): Ceres Seq. ID no. 15180049
  misc_feature (41)..(295): Homolog of NCBI NO: 18088455 NR Description: KIAA0103 gene product [Homo sapiens]
  misc_feature (41)..(295): Homolog of NCBI NO: 7661910 NR Description: KIAA0103 gene product [Homo sapiens]
  misc_feature (41)..(302): Homolog of NCBI NO: 34866113 NR Description: similar to RIKEN cDNA 4921531G14 [Rattus
  misc_feature (41)..(295): Homolog of NCBI NO: 14193698 NR Description: KIAA0103 protein [Mus musculus]
  misc_feature (41)..(295): Homolog of NCBI NO: 13385196 NR Description: RIKEN cDNA 4921531G14 [Mus musculus]
  misc_feature (98)..(308): Homolog of NCBI NO: 10799830 NR Description: O-linked GlcNAc transferase like [Nicotiana
  misc_feature (12)..(307): Homolog of NCBI NO: 30690960 NR Description: expressed protein [Arabidopsis thaliana]
  misc_feature (12)..(307): Homolog of NCBI NO: 5732436 NR Description: contains similarity to O-linked GlcNAc
  misc_feature (12)..(309): Homolog of NCBI NO: 22330847 NR Description: expressed protein [Arabidopsis thaliana]
  misc_feature (12)..(309): Homolog of NCBI NO: 30679284 NR Description: expressed protein [Arabidopsis thaliana]
MAAAAAVASATTAEDEARLLRLEEQAEHGGGGAWEYLCLARRLRARRPAHVLRVGLALLNNASARSGLASEQWTLYEQVATAAMDCQRLDVAKDCIGVLSKQFPGSTRVARLEARLFEAKGEWAEAERAYALILENNPFDQIVHKRKIAIAKAQGGMSIVIDYLNKYLELFMADHDAWRELAETYSSLQMYKQAAFCYEELILAQPTIPLYHIAYAEVLYTMGGLENLQTAKKYYASTIQLTGGKNTRALFGVCLCTSAINQLTKGRNKEEEDSELQSLAAEVLLKNYKQQAPSKAPLISSMLKNMKLS

SEQ ID NO: 109643 - protein, 226 aa, Zea mays subsp. mays
  misc_feature (1)..(226): Ceres Seq. ID no. 15180050
  misc_feature (15)..(225): Homolog of NCBI NO: 10799830 NR Description: O-linked GlcNAc transferase like [Nicotiana
  misc_feature (1)..(224): Homolog of NCBI NO: 30690960 NR Description: expressed protein [Arabidopsis thaliana]
  misc_feature (1)..(224): Homolog of NCBI NO: 5732436 NR Description: contains similarity to O-linked GlcNAc
  misc_feature (1)..(226): Homolog of NCBI NO: 22330847 NR Description: expressed protein [Arabidopsis thaliana]
  misc_feature (1)..(226): Homolog of NCBI NO: 30679284 NR Description: expressed protein [Arabidopsis thaliana]
  misc_feature (1)..(212): Homolog of NCBI NO: 18088455 NR Description: KIAA0103 gene product [Homo sapiens]
  misc_feature (1)..(212): Homolog of NCBI NO: 7661910 NR Description: KIAA0103 gene product [Homo sapiens]
  misc_feature (1)..(219): Homolog of NCBI NO: 34866113 NR Description: similar to RIKEN cDNA 4921531G14 [Rattus
  misc_feature (1)..(212): Homolog of NCBI NO: 14193698 NR Description: KIAA0103 protein [Mus musculus]
  misc_feature (1)..(212): Homolog of NCBI NO: 13385196 NR Description: RIKEN cDNA 4921531G14 [Mus musculus]
MDCQRLDVAKDCIGVLSKQFPGSTRVARLEARLFEAKGEWAEAERAYALILENNPFDQIVHKRKIAIAKAQGGMSIVIDYLNKYLELFMADHDAWRELAETYSSLQMYKQAAFCYEELILAQPTIPLYHIAYAEVLYTMGGLENLQTAKKYYASTIQLTGGKNTRALFGVCLCTSAINQLTKGRNKEEEDSELQSLAAEVLLKNYKQQAPSKAPLISSMLKNMKLS

SEQ ID NO: 109644 - DNA, 858 bp, Zea mays subsp. mays
  misc_feature (1)..(858): Ceres Seq. ID no. 15174056
gtggaaaatgttgagatcctcgtttcggcttctctatataacaagaaccaatcttctggttcgagcttcaccatcatcgctctctcgactcccatctaagttcacttctgcgaaaccacttgtcagttctcatcatcagattccgttatcaacaacgggagctaaactttctaggtcggaacattccatggctgcttcctccgaacccaaatccatctatgatttcatcgtcaaggatgcgaagggaaacgatgttgatctaagcacttacaaggggaaggttctgttgattgtcaacgttgcttctcagtgtggcttgaccaattcgaactatactgagcttgcacagctgtaccagaagtacaaagaccatgggtttgagatccttgcattcccctgtaaccagtttggtaatcaagaacctggttctaatgaagagattgttcagtttgcttgtacccgtttcaaggccgagtaccccatcttcgacaaggttgatgtgaacggtgactcggctgctccaatctataagttcctgaaatcaagcaaaggagggctttttggagacggaatcaagtggaacttcgccaagttcttggttgacaaagatgggaatgttgtggaccgttacgctccaactacttcccctctcagcattgagaaggacctgaagaaactgttgggagttactgcttaagcaactaataggcgcaagtattcaaataaaagctcctatagtattgtaataagctgtgtctatgttcttgagtgtctttgggatgagtcgtctcctactacttaaactcctcctttttagttactgatgtgtgtaacatcgttgacctaaaacacatattt

SEQ ID NO: 109645 - protein, 231 aa, Zea mays subsp. mays
  misc_feature (1)..(231): Ceres Seq. ID no. 15174057
  misc_feature (71)..(180): Pfam Name: Glutathione peroxidase Pfam Description: Glutathione peroxidase
  misc_feature (57)..(227): Homolog of NCBI NO: 20138099 NR Description: Phospholipid hydroperoxide glutathione
  misc_feature (63)..(230): Homolog of NCBI NO: 20138384 NR Description: Probable phospholipid hydroperoxide glutathione
  misc_feature (63)..(228): Homolog of NCBI NO: 21360380 NR Description: glutathione peroxidase 1 [Oryza sativa]
  misc_feature (63)..(228): Homolog of NCBI NO: 34334012 NR Description: cytosolic glutathione peroxidase [Triticum
  misc_feature (65)..(229): Homolog of NCBI NO: 20138151 NR Description: Probable phospholipid hydroperoxide glutathione
  misc_feature (63)..(228): Homolog of NCBI NO: 22268405 NR Description: putative glutathione peroxidase [Zea mays]
  misc_feature (64)..(227): Homolog of NCBI NO: 27544804 NR Description: phospholipid hydroperoxide glutathione
  misc_feature (12)..(227): Homolog of NCBI NO: 6179600 NR Description: GPX12Hv, glutathione peroxidase-like protein
  misc_feature (63)..(231): Homolog of NCBI NO: 20138157 NR Description: Probable phospholipid hydroperoxide glutathione
  misc_feature (3)..(231): Homolog of NCBI NO: 30681827 NR Description: glutathione peroxidase, putative [Arabidopsis
WKMLRSSFRLLYITRTNLLVRASPSSLSRLPSKFTSAKPLVSSHHQIPLSTTGAKLSRSEHSMAASSEPKSIYDFIVKDAKGNDVDLSTYKGKVLLIVNVASQCGLTNSNYTELAQLYQKYKDHGFEILAFPCNQFGNQEPGSNEEIVQFACTRFKAEYPIFDKVDVNGDSAAPIYKFLKSSKGGLFGDGIKWNFAKFLVDKDGNVVDRYAPTTSPLSIEKDLKKLLGVTA

SEQ ID NO: 109646 - protein, 229 aa, Zea mays subsp. mays
  misc_feature (1)..(229): Ceres Seq. ID no. 15174058
  misc_feature (69)..(178): Pfam Name: Glutathione peroxidase Pfam Description: Glutathione peroxidase
  misc_feature (55)..(225): Homolog of NCBI NO: 20138099 NR Description: Phospholipid hydroperoxide glutathione
  misc_feature (61)..(228): Homolog of NCBI NO: 20138384 NR Description: Probable phospholipid hydroperoxide glutathione
  misc_feature (61)..(226): Homolog of NCBI NO: 21360380 NR Description: glutathione peroxidase 1 [Oryza sativa]
  misc_feature (61)..(226): Homolog of NCBI NO: 34334012 NR Description: cytosolic glutathione peroxidase [Triticum
  misc_feature (63)..(227): Homolog of NCBI NO: 20138151 NR Description: Probable phospholipid hydroperoxide glutathione
  misc_feature (61)..(226): Homolog of NCBI NO: 22268405 NR Description: putative glutathione peroxidase [Zea mays]
  misc_feature (62)..(225): Homolog of NCBI NO: 27544804 NR Description: phospholipid hydroperoxide glutathione
  misc_feature (10)..(225): Homolog of NCBI NO: 6179600 NR Description: GPX12Hv, glutathione peroxidase-like protein
  misc_feature (61)..(229): Homolog of NCBI NO: 20138157 NR Description: Probable phospholipid hydroperoxide glutathione
  misc_feature (1)..(229): Homolog of NCBI NO: 30681827 NR Description: glutathione peroxidase, putative [Arabidopsis
MLRSSFRLLYITRTNLLVRASPSSLSRLPSKFTSAKPLVSSHHQIPLSTTGAKLSRSEHSMAASSEPKSIYDFIVKDAKGNDVDLSTYKGKVLLIVNVASQCGLTNSNYTELAQLYQKYKDHGFEILAFPCNQFGNQEPGSNEEIVQFACTRFKAEYPIFDKVDVNGDSAAPIYKFLKSSKGGLFGDGIKWNFAKFLVDKDGNVVDRYAPTTSPLSIEKDLKKLLGVTA

SEQ ID NO: 109647 - protein, 169 aa, Zea mays subsp. mays
  misc_feature (1)..(169): Ceres Seq. ID no. 15174059
  misc_feature (9)..(118): Pfam Name: Glutathione peroxidase Pfam Description: Glutathione peroxidase
  misc_feature (1)..(165): Homolog of NCBI NO: 20138099 NR Description: Phospholipid hydroperoxide glutathione
  misc_feature (1)..(168): Homolog of NCBI NO: 20138384 NR Description: Probable phospholipid hydroperoxide glutathione
  misc_feature (1)..(166): Homolog of NCBI NO: 21360380 NR Description: glutathione peroxidase 1 [Oryza sativa]
  misc_feature (1)..(166): Homolog of NCBI NO: 34334012 NR Description: cytosolic glutathione peroxidase [Triticum
  misc_feature (3)..(167): Homolog of NCBI NO: 20138151 NR Description: Probable phospholipid hydroperoxide glutathione
  misc_feature (1)..(166): Homolog of NCBI NO: 22268405 NR Description: putative glutathione peroxidase [Zea mays]
  misc_feature (2)..(165): Homolog of NCBI NO: 27544804 NR Description: phospholipid hydroperoxide glutathione
  misc_feature (1)..(165): Homolog of NCBI NO: 6179600 NR Description: GPX12Hv, glutathione peroxidase-like protein
  misc_feature (1)..(169): Homolog of NCBI NO: 20138157 NR Description: Probable phospholipid hydroperoxide glutathione
  misc_feature (1)..(169): Homolog of NCBI NO: 30681827 NR Description: glutathione peroxidase, putative [Arabidopsis
MAASSEPKSIYDFIVKDAKGNDVDLSTYKGKVLLIVNVASQCGLTNSNYTELAQLYQKYKDHGFEILAFPCNQFGNQEPGSNEEIVQFACTRFKAEYPIFDKVDVNGDSAAPIYKFLKSSKGGLFGDGIKWNFAKFLVDKDGNVVDRYAPTTSPLSIEKDLKKLLGVTA

SEQ ID NO: 109648 - DNA, 1103 bp, Zea mays subsp. mays
  misc_feature (1)..(1103): Ceres Seq. ID no. 14309100
gcttcattctctcaatctcgctcgctctcctttggcagatctgagagttttggacaaagaataaaaacttgggaaacatgcctccgcagaagatcgagacaggtcacagcgacattgtccatgatgtcgtcatggattactacggaaagcgaatagcaactgcctcatcagacggcaccatcaagataaccggagtgagcaacagcggcggatctcagcagctagctaccttaaccggccaccgaggtcccgtctggcaagtcgcctgggcccacccgaagtacgattcgctcctcgcttcgtgctcctacgatgggcaaatcataatatggaaagaaggaaaccaaaacgagtggacgcagtctcacgtcttcacagaccacaaagtatcagtcaactccatcgcttgggctcctcacgagctcggtctctccttagcttgcggagcatccgacggaaacatctctgtcttctcggccagagccgatggcggttgggacacaacgaggatagaccaagctcacccggtcggagtcacttcggtgtcgtgggcaccagcgacggagccaggggcgctcgttagctccggtatgcacgagccggtttacaagttagcgtcgggagggtgtgatagtacggtgaaggtgtggaaattcgcaaacgggtcgtggaagatggactgtttcccggcgctacacaagcacaaggactgggtgagggacgtggcgtgggcaccgaacttgggtctgccgaagtcgacgatagcgagtgggtcggaggatgggagtgtgatcatatggacggtggggaaagaaggagagcagtgggaagggaaggtattgaaagatttcaagacgccggtgtggagggtgacgtggtcgatgacgggtaacttgctggcggtgtcggatgggaacaataacgtaacggtgtggaaagaggctgtggatggagagtgggaacaagtgactgtcgttgagccttagattgtgttgttcctgtttgtttgattgtgatttattttgttgtagtaagtatcaaatgtggttgctttatacatttttttgtttcttaccatcctctagatacttgctttctctgct

SEQ ID NO: 109649 - protein, 302 aa, Zea mays subsp. mays
  misc_feature (1)..(302): Ceres Seq. ID no. 14309101
  misc_feature (141)..(192): Pfam Name: WD domain, G-beta repeat Pfam Description: WD domain, G-beta repeat
  misc_feature (6)..(300): Homolog of NCBI NO: 27696242 NR Description: Similar to RIKEN cDNA 1110003H02 gene [Xenopus
  misc_feature (6)..(300): Homolog of NCBI NO: 38174439 NR Description: Unknown (protein for MGC:76017) [Silurana
  misc_feature (6)..(300): Homolog of NCBI NO: 32451650 NR Description: Unknown (protein for MGC:63980) [Danio rerio]
  misc_feature (1)..(302): Homolog of NCBI NO: 34897242 NR Description: putative coat protein complex II (COPII)
  misc_feature (1)..(302): Homolog of NCBI NO: 34393220 NR Description: putative Sec13p [Oryza sativa (japonica
  misc_feature (1)..(301): Homolog of NCBI NO: 18147582 NR Description: Sec13p [Oryza sativa]
  misc_feature (1)..(302): Homolog of NCBI NO: 21593146 NR Description: putative protein transport protein SEC13
  misc_feature (1)..(302): Homolog of NCBI NO: 15227692 NR Description: transducin / WD-40 repeat protein family
  misc_feature (1)..(302): Homolog of NCBI NO: 21593236 NR Description: transport protein SEC13, putative [Arabidopsis
  misc_feature (1)..(302): Homolog of NCBI NO: 15232095 NR Description: protein transport protein SEC13 family / WD-40
MPPQKIETGHSDIVHDVVMDYYGKRIATASSDGTIKITGVSNSGGSQQLATLTGHRGPVWQVAWAHPKYDSLLASCSYDGQIIIWKEGNQNEWTQSHVFTDHKVSVNSIAWAPHELGLSLACGASDGNISVFSARADGGWDTTRIDQAHPVGVTSVSWAPATEPGALVSSGMHEPVYKLASGGCDSTVKVWKFANGSWKMDCFPALHKHKDWVRDVAWAPNLGLPKSTIASGSEDGSVIIWTVGKEGEQWEGKVLKDFKTPVWRVTWSMTGNLLAVSDGNNNVTVWKEAVDGEWEQVTVVEP

SEQ ID NO: 109650 - protein, 284 aa, Zea mays subsp. mays
  misc_feature (1)..(284): Ceres Seq. ID no. 14309102
  misc_feature (123)..(174): Pfam Name: WD domain, G-beta repeat Pfam Description: WD domain, G-beta repeat
  misc_feature (1)..(282): Homolog of NCBI NO: 27696242 NR Description: Similar to RIKEN cDNA 1110003H02 gene [Xenopus
  misc_feature (1)..(282): Homolog of NCBI NO: 38174439 NR Description: Unknown (protein for MGC:76017) [Silurana
  misc_feature (1)..(282): Homolog of NCBI NO: 32451650 NR Description: Unknown (protein for MGC:63980) [Danio rerio]
  misc_feature (1)..(284): Homolog of NCBI NO: 34897242 NR Description: putative coat protein complex II (COPII)
  misc_feature (1)..(284): Homolog of NCBI NO: 34393220 NR Description: putative Sec13p [Oryza sativa (japonica
  misc_feature (1)..(283): Homolog of NCBI NO: 18147582 NR Description: Sec13p [Oryza sativa]
  misc_feature (1)..(284): Homolog of NCBI NO: 21593146 NR Description: putative protein transport protein SEC13
  misc_feature (1)..(284): Homolog of NCBI NO: 15227692 NR Description: transducin / WD-40 repeat protein family
  misc_feature (1)..(284): Homolog of NCBI NO: 21593236 NR Description: transport protein SEC13, putative [Arabidopsis
  misc_feature (1)..(284): Homolog of NCBI NO: 15232095 NR Description: protein transport protein SEC13 family / WD-40
MDYYGKRIATASSDGTIKITGVSNSGGSQQLATLTGHRGPVWQVAWAHPKYDSLLASCSYDGQIIIWKEGNQNEWTQSHVFTDHKVSVNSIAWAPHELGLSLACGASDGNISVFSARADGGWDTTRIDQAHPVGVTSVSWAPATEPGALVSSGMHEPVYKLASGGCDSTVKVWKFANGSWKMDCFPALHKHKDWVRDVAWAPNLGLPKSTIASGSEDGSVIIWTVGKEGEQWEGKVLKDFKTPVWRVTWSMTGNLLAVSDGNNNVTVWKEAVDGEWEQVTVVEP

SEQ ID NO: 109651 - DNA, 692 bp, Zea mays subsp. mays
  misc_feature (1)..(692): Ceres Seq. ID no. 14309080
aaaatatatataatcttgtcatacttctctcaaacccggttcttgtctgaagaaagcagaatcaatccatgtctttcagaggacttcgcaagccaaatgcaacatccggaatgggtgttgcggaccagagcaagaccacataccacgagctccagaggaagaagactcatcgctacgtcgtcttcaagatcgacgaactcaaaaaccaagtggtggttgagaagacaggaaacccagcggagagctacgatgacttcttagcttctctccccgacaatgattgcagatacgccgtttacgactttgatttcgtcaccgctgagaattgccagaaaagcaaaatcttcttcgtcgcttggtctccagacacttcaagagtcagggcgaagatggtttacgcgacttcgaaagagaggtttaggagggagcttcaagggattcactatgagattcaagctactgatcctactgaggttgatcttgatgtcctacgcgaacgagccgactgaggattatttgttctctattaagacgattacttatggtaatgtaatgaaaataatcattcaggatttctcgtattctcgtctcgtgggtggatttgtgtaaccacagtttcatgttctatggacaagtgtactaaactcagttgatgtttcagattgctcatctataaaacctctttgtaactc

SEQ ID NO: 109652 - protein, 146 aa, Zea mays subsp. mays
  misc_feature (1)..(146): Ceres Seq. ID no. 14309081
  misc_feature (19)..(146): Pfam Name: Cofilin/tropomyosin-type actin-binding protein Pfam Description: Cofilin/tropomyosin-type actin-binding protein
  misc_feature (10)..(146): Homolog of NCBI NO: 30697300 NR Description: actin depolymerizing factor 4 - like protein
  misc_feature (10)..(146): Homolog of NCBI NO: 17366768 NR Description: Actin-depolymerizing factor 1 (ADF 1)
  misc_feature (10)..(145): Homolog of NCBI NO: 34897072 NR Description: putative actin-depolymerizing factor
  misc_feature (13)..(146): Homolog of NCBI NO: 7330254 NR Description: actin depolymerizing factor [Elaeis guineensis]
  misc_feature (15)..(146): Homolog of NCBI NO: 25295741 NR Description: actin depolymerizing factor 6 [imported] -
  misc_feature (9)..(146): Homolog of NCBI NO: 4566614 NR Description: actin depolymerizing factor [Populus x canescens]
  misc_feature (1)..(145): Homolog of NCBI NO: 24745620 NR Description: actin depolymerizing factor 6 [Solanum tuberosum]
  misc_feature (1)..(145): Homolog of NCBI NO: 32363121 NR Description: Actin-depolymerizing factor (ADF)
  misc_feature (1)..(146): Homolog of NCBI NO: 21554405 NR Description: Actin-depolymerizing factor ADF-6 [Arabidopsis
  misc_feature (1)..(146): Homolog of NCBI NO: 18402587 NR Description: actin depolymerizing factor 6 [Arabidopsis
MSFRGLRKPNATSGMGVADQSKTTYHELQRKKTHRYVVFKIDELKNQVVVEKTGNPAESYDDFLASLPDNDCRYAVYDFDFVTAENCQKSKIFFVAWSPDTSRVRAKMVYATSKERFRRELQGIHYEIQATDPTEVDLDVLRERAD

SEQ ID NO: 109653 - protein, 132 aa, Zea mays subsp. mays
  misc_feature (1)..(132): Ceres Seq. ID no. 14309082
  misc_feature (5)..(132): Pfam Name: Cofilin/tropomyosin-type actin-binding protein Pfam Description: Cofilin/tropomyosin-type actin-binding protein
  misc_feature (1)..(132): Homolog of NCBI NO: 30697300 NR Description: actin depolymerizing factor 4 - like protein
  misc_feature (1)..(132): Homolog of NCBI NO: 17366768 NR Description: Actin-depolymerizing factor 1 (ADF 1)
  misc_feature (1)..(131): Homolog of NCBI NO: 34897072 NR Description: putative actin-depolymerizing factor
  misc_feature (1)..(132): Homolog of NCBI NO: 7330254 NR Description: actin depolymerizing factor [Elaeis guineensis]
  misc_feature (1)..(132): Homolog of NCBI NO: 25295741 NR Description: actin depolymerizing factor 6 [imported] -
  misc_feature (1)..(132): Homolog of NCBI NO: 4566614 NR Description: actin depolymerizing factor [Populus x canescens]
  misc_feature (1)..(131): Homolog of NCBI NO: 24745620 NR Description: actin depolymerizing factor 6 [Solanum tuberosum]
  misc_feature (1)..(131): Homolog of NCBI NO: 32363121 NR Description: Actin-depolymerizing factor (ADF)
  misc_feature (1)..(132): Homolog of NCBI NO: 21554405 NR Description: Actin-depolymerizing factor ADF-6 [Arabidopsis
  misc_feature (1)..(132): Homolog of NCBI NO: 18402587 NR Description: actin depolymerizing factor 6 [Arabidopsis
MGVADQSKTTYHELQRKKTHRYVVFKIDELKNQVVVEKTGNPAESYDDFLASLPDNDCRYAVYDFDFVTAENCQKSKIFFVAWSPDTSRVRAKMVYATSKERFRRELQGIHYEIQATDPTEVDLDVLRERAD

SEQ ID NO: 109654 - protein, 110 aa, Zea mays subsp. mays
  misc_feature (1)..(110): Ceres Seq. ID no. 14309083
MIADTPFTTLISSPLRIARKAKSSSSLGLQTLQESGRRWFTRLRKRGLGGSFKGFTMRFKLLILLRLILMSYANEPTEDYLFSIKTITYGNVMKIIIQDFSYSRLVGGFV

SEQ ID NO: 109655 - DNA, 1177 bp, Zea mays subsp. mays
  misc_feature (1)..(1177): Ceres Seq. ID no. 14309076
aggacaaaaaaaaagatagtggagggatcctctcgggaaccgggaccgtgattggtctcgtcgaggccgagagtgagaggatgatgatgatgatgcgaagaatcatctccgagagagctacttgtgtctctaagaactttattctcagatcctctgcttcgcggtttcacggcgagtctctcgattcctccgtctcacccgttctcattcccggcgtccatgtcttccactgccaggacgcagttggaatcgtagcaaagctatcagattgtattgcagctaaaggcggaaacattctcggctacgatgtctttgttcctgagaacaacaacgtcttctactctcgcagtgagtttatatttgatccggtgaaatggccgagagagcaaatgagtgaagactttcaagctattgcgcaaagattcggtgccatgaactctgttgttcgtgttccttctatagatcccaagtataagattgctcttctactttctaaacaggatcattgtctggtggaaatgttgcatagatggcaagacggaaaactccctgtggatataacatgtgtgataagcaatcatgagagagcttcaaacactcatgttatgcggtttcttgagaggcatggcattccgtatcattatgtagccacaactaaagataataaacgagaagatgagattttggatttggttaaagacactgacttcttagttctcgctagatacatgcagattctatcgggtaagttcttgaaaggttatggaaaggatgtaatcaatattcaccatggtctcttgccatcattcaagggcggatatccagccaaacaggcgtttgatgcaggtgtgaagctgattggagcaacaagtcactttgttactgaggaacttgatgcagggcctatcattgaacaaatggttgagagtgtttcccaccgggacaatctaaggagctttgtccagaaatctgaggacctcgagaaaaaatgcctaacaaaagctataaagtcatactgcgaactacgtgtgttaccttatggagcaaacaagactgttgtattctaatagaacaagcaaagactatttgttgtatgaataactcaaaagaaagttataacaattctcttgaagatttctgattcacttgcagttaatgtgaacaagttatttacagg

SEQ ID NO: 109656 - protein, 354 aa, Zea mays subsp. mays
  misc_feature (1)..(354): Ceres Seq. ID no. 14309077
  misc_feature (157)..(335): Pfam Name: Formyl transferase Pfam Description: Formyl transferase
  misc_feature (74)..(354): Homolog of NCBI NO: 23063861 NR Description: hypothetical protein [Pseudomonas fluorescens
  misc_feature (74)..(354): Homolog of NCBI NO: 15599510 NR Description: formyltetrahydrofolate deformylase [Pseudomonas
  misc_feature (77)..(354): Homolog of NCBI NO: 27381066 NR Description: formyltetrahydrofolate deformylase
  misc_feature (61)..(354): Homolog of NCBI NO: 37523894 NR Description: formyltetrahydrofolate deformylase [Gloeobacter
  misc_feature (77)..(354): Homolog of NCBI NO: 36958741 NR Description: Formyltetrahydrofolate deformylase [Rhizobium sp.
  misc_feature (77)..(354): Homolog of NCBI NO: 15805611 NR Description: formyltetrahydrofolate deformylase [Deinococcus
  misc_feature (77)..(354): Homolog of NCBI NO: 15606867 NR Description: formyltetrahydrofolate deformylase [Aquifex
  misc_feature (89)..(354): Homolog of NCBI NO: 7433570 NR Description: probable formyltransferase purU - Arabidopsis
  misc_feature (30)..(354): Homolog of NCBI NO: 15236046 NR Description: formyltetrahydrofolate deformylase, putative
  misc_feature (30)..(354): Homolog of NCBI NO: 18422794 NR Description: formyltetrahydrofolate deformylase, putative
DKKKDSGGILSGTGTVIGLVEAESERMMMMMRRIISERATCVSKNFILRSSASRFHGESLDSSVSPVLIPGVHVFHCQDAVGIVAKLSDCIAAKGGNILGYDVFVPENNNVFYSRSEFIFDPVKWPREQMSEDFQAIAQRFGAMNSVVRVPSIDPKYKIALLLSKQDHCLVEMLHRWQDGKLPVDITCVISNHERASNTHVMRFLERHGIPYHYVATTKDNKREDEILDLVKDTDFLVLARYMQILSGKFLKGYGKDVINIHHGLLPSFKGGYPAKQAFDAGVKLIGATSHFVTEELDAGPIIEQMVESVSHRDNLRSFVQKSEDLEKKCLTKAIKSYCELRVLPYGANKTVVF

SEQ ID NO: 109657 - protein, 328 aa, Zea mays subsp. mays
  misc_feature (1)..(328): Ceres Seq. ID no. 14309078
  misc_feature (131)..(309): Pfam Name: Formyl transferase Pfam Description: Formyl transferase
  misc_feature (51)..(328): Homolog of NCBI NO: 36958741 NR Description: Formyltetrahydrofolate deformylase [Rhizobium sp.
  misc_feature (51)..(328): Homolog of NCBI NO: 15805611 NR Description: formyltetrahydrofolate deformylase [Deinococcus
  misc_feature (48)..(328): Homolog of NCBI NO: 23063861 NR Description: hypothetical protein [Pseudomonas fluorescens
  misc_feature (48)..(328): Homolog of NCBI NO: 15599510 NR Description: formyltetrahydrofolate deformylase [Pseudomonas
  misc_feature (51)..(328): Homolog of NCBI NO: 27381066 NR Description: formyltetrahydrofolate deformylase
  misc_feature (35)..(328): Homolog of NCBI NO: 37523894 NR Description: formyltetrahydrofolate deformylase [Gloeobacter
  misc_feature (51)..(328): Homolog of NCBI NO: 15606867 NR Description: formyltetrahydrofolate deformylase [Aquifex
  misc_feature (63)..(328): Homolog of NCBI NO: 7433570 NR Description: probable formyltransferase purU - Arabidopsis
  misc_feature (4)..(328): Homolog of NCBI NO: 15236046 NR Description: formyltetrahydrofolate deformylase, putative
  misc_feature (4)..(328): Homolog of NCBI NO: 18422794 NR Description: formyltetrahydrofolate deformylase, putative
MMMMMRRIISERATCVSKNFILRSSASRFHGESLDSSVSPVLIPGVHVFHCQDAVGIVAKLSDCIAAKGGNILGYDVFVPENNNVFYSRSEFIFDPVKWPREQMSEDFQAIAQRFGAMNSVVRVPSIDPKYKIALLLSKQDHCLVEMLHRWQDGKLPVDITCVISNHERASNTHVMRFLERHGIPYHYVATTKDNKREDEILDLVKDTDFLVLARYMQILSGKFLKGYGKDVINIHHGLLPSFKGGYPAKQAFDAGVKLIGATSHFVTEELDAGPIIEQMVESVSHRDNLRSFVQKSEDLEKKCLTKAIKSYCELRVLPYGANKTVVF

SEQ ID NO: 109658 - protein, 327 aa, Zea mays subsp. mays
  misc_feature (1)..(327): Ceres Seq. ID no. 14309079
  misc_feature (130)..(308): Pfam Name: Formyl transferase Pfam Description: Formyl transferase
  misc_feature (50)..(327): Homolog of NCBI NO: 36958741 NR Description: Formyltetrahydrofolate deformylase [Rhizobium sp.
  misc_feature (50)..(327): Homolog of NCBI NO: 15805611 NR Description: formyltetrahydrofolate deformylase [Deinococcus
  misc_feature (47)..(327): Homolog of NCBI NO: 23063861 NR Description: hypothetical protein [Pseudomonas fluorescens
  misc_feature (47)..(327): Homolog of NCBI NO: 15599510 NR Description: formyltetrahydrofolate deformylase [Pseudomonas
  misc_feature (50)..(327): Homolog of NCBI NO: 27381066 NR Description: formyltetrahydrofolate deformylase
  misc_feature (34)..(327): Homolog of NCBI NO: 37523894 NR Description: formyltetrahydrofolate deformylase [Gloeobacter
  misc_feature (50)..(327): Homolog of NCBI NO: 15606867 NR Description: formyltetrahydrofolate deformylase [Aquifex
  misc_feature (62)..(327): Homolog of NCBI NO: 7433570 NR Description: probable formyltransferase purU - Arabidopsis
  misc_feature (3)..(327): Homolog of NCBI NO: 15236046 NR Description: formyltetrahydrofolate deformylase, putative
  misc_feature (3)..(327): Homolog of NCBI NO: 18422794 NR Description: formyltetrahydrofolate deformylase, putative
MMMMRRIISERATCVSKNFILRSSASRFHGESLDSSVSPVLIPGVHVFHCQDAVGIVAKLSDCIAAKGGNILGYDVFVPENNNVFYSRSEFIFDPVKWPREQMSEDFQAIAQRFGAMNSVVRVPSIDPKYKIALLLSKQDHCLVEMLHRWQDGKLPVDITCVISNHERASNTHVMRFLERHGIPYHYVATTKDNKREDEILDLVKDTDFLVLARYMQILSGKFLKGYGKDVINIHHGLLPSFKGGYPAKQAFDAGVKLIGATSHFVTEELDAGPIIEQMVESVSHRDNLRSFVQKSEDLEKKCLTKAIKSYCELRVLPYGANKTVVF

SEQ ID NO: 109659 - DNA, 780 bp, Zea mays subsp. mays
  misc_feature (1)..(780): Ceres Seq. ID no. 15178116
aagaaaggattcttattcgttctctctcttttgcacgccattaacaaaaaagaaagaaagaaagaaagctcatcggtttctcagatccacttcttcttcggttaatctcttgtcttttctgatcgctcgttaggtctgagccatggcttctaagaggattctgaaagagcttaaggatttgcagaaggatcctccttctaactgcagcgcaggtcctgtggctgaggacatgttccattggcaagcaactatcatgggacctcctgacagtccttacgctggaggagtctttttggtttccattcactttccgccggattatcctttcaagcccccaaaggtgtcttttaagacaagggtgtaccatcccaacatcaacagcaatggaagcatttgccttgatatcctgaaagaacagtggagtcctgctcttaccatatcaaaggtattgctgtcgatctgctcattgctgacagacccgaacccagatgatcctcttgtgccagagattgcgcatatgtacaagacggataagaccaagtacgagtcaactgcccgaagctggacgcagaagtacgccatgggatgatgaagagtcaagttgtggtcgaacacaagcaaaagcataacgttatttctcatctaaatatattgaactgcatttgtttggtttagttaaacgctattattatgtgatcataattgagcaacttatatgctattgctcttactctgttccaactgatatcattattattcacgttacttaaggttttaatc

SEQ ID NO: 109660 - protein, 148 aa, Zea mays subsp. mays
  misc_feature (1)..(148): Ceres Seq. ID no. 15178117
  misc_feature (1)..(148): Homolog of NCBI NO: 30687803 NR Description: ubiquitin-conjugating enzyme 9 (UBC9)
  misc_feature (1)..(148): Homolog of NCBI NO: 18417097 NR Description: ubiquitin-conjugating enzyme 9 (UBC9)
  misc_feature (1)..(148): Homolog of NCBI NO: 11762186 NR Description: AT4g27960 [Arabidopsis thaliana]
  misc_feature (1)..(148): Homolog of NCBI NO: 456568 NR Description: ubiquitin conjugating enzyme
  misc_feature (1)..(148): Homolog of NCBI NO: 18423494 NR Description: ubiquitin-conjugating enzyme 10 (UBC10)
  misc_feature (1)..(148): Homolog of NCBI NO: 40287554 NR Description: ubiquitin-conjugating enzyme 8 [Capsicum annuum]
  misc_feature (1)..(148): Homolog of NCBI NO: 464981 NR Description: Ubiquitin-conjugating enzyme E2-17 kDa
  misc_feature (1)..(148): Homolog of NCBI NO: 34909292 NR Description: ubiquitin conjugating enzyme
  misc_feature (1)..(148): Homolog of NCBI NO: 2668744 NR Description: ubiquitin conjugating enzyme [Zea mays]
  misc_feature (1)..(148): Homolog of NCBI NO: 18398206 NR Description: ubiquitin-conjugating enzyme 11 (UBC11)
MASKRILKELKDLQKDPPSNCSAGPVAEDMFHWQATIMGPPDSPYAGGVFLVSIHFPPDYPFKPPKVSFKTRVYHPNINSNGSICLDILKEQWSPALTISKVLLSICSLLTDPNPDDPLVPEIAHMYKTDKTKYESTARSWTQKYAMG

SEQ ID NO: 109661 - protein, 119 aa, Zea mays subsp. mays
  misc_feature (1)..(119): Ceres Seq. ID no. 15178118
  misc_feature (1)..(119): Homolog of NCBI NO: 18417097 NR Description: ubiquitin-conjugating enzyme 9 (UBC9)
  misc_feature (1)..(119): Homolog of NCBI NO: 30687803 NR Description: ubiquitin-conjugating enzyme 9 (UBC9)
  misc_feature (1)..(119): Homolog of NCBI NO: 11762186 NR Description: AT4g27960 [Arabidopsis thaliana]
  misc_feature (1)..(119): Homolog of NCBI NO: 456568 NR Description: ubiquitin conjugating enzyme
  misc_feature (1)..(119): Homolog of NCBI NO: 18423494 NR Description: ubiquitin-conjugating enzyme 10 (UBC10)
  misc_feature (1)..(119): Homolog of NCBI NO: 40287554 NR Description: ubiquitin-conjugating enzyme 8 [Capsicum annuum]
  misc_feature (1)..(119): Homolog of NCBI NO: 464981 NR Description: Ubiquitin-conjugating enzyme E2-17 kDa
  misc_feature (1)..(119): Homolog of NCBI NO: 34909292 NR Description: ubiquitin conjugating enzyme
  misc_feature (1)..(119): Homolog of NCBI NO: 2668744 NR Description: ubiquitin conjugating enzyme [Zea mays]
  misc_feature (1)..(119): Homolog of NCBI NO: 18398206 NR Description: ubiquitin-conjugating enzyme 11 (UBC11)
MFHWQATIMGPPDSPYAGGVFLVSIHFPPDYPFKPPKVSFKTRVYHPNINSNGSICLDILKEQWSPALTISKVLLSICSLLTDPNPDDPLVPEIAHMYKTDKTKYESTARSWTQKYAMG

SEQ ID NO: 109662 - protein, 111 aa, Zea mays subsp. mays
  misc_feature (1)..(111): Ceres Seq. ID no. 15178119
  misc_feature (1)..(111): Homolog of NCBI NO: 30687803 NR Description: ubiquitin-conjugating enzyme 9 (UBC9)
  misc_feature (1)..(111): Homolog of NCBI NO: 18417097 NR Description: ubiquitin-conjugating enzyme 9 (UBC9)
  misc_feature (1)..(111): Homolog of NCBI NO: 11762186 NR Description: AT4g27960 [Arabidopsis thaliana]
  misc_feature (1)..(111): Homolog of NCBI NO: 456568 NR Description: ubiquitin conjugating enzyme
  misc_feature (1)..(111): Homolog of NCBI NO: 18423494 NR Description: ubiquitin-conjugating enzyme 10 (UBC10)
  misc_feature (1)..(111): Homolog of NCBI NO: 40287554 NR Description: ubiquitin-conjugating enzyme 8 [Capsicum annuum]
  misc_feature (1)..(111): Homolog of NCBI NO: 464981 NR Description: Ubiquitin-conjugating enzyme E2-17 kDa
  misc_feature (1)..(111): Homolog of NCBI NO: 34909292 NR Description: ubiquitin conjugating enzyme
  misc_feature (1)..(111): Homolog of NCBI NO: 2668744 NR Description: ubiquitin conjugating enzyme [Zea mays]
  misc_feature (1)..(111): Homolog of NCBI NO: 18398206 NR Description: ubiquitin-conjugating enzyme 11 (UBC11)
MGPPDSPYAGGVFLVSIHFPPDYPFKPPKVSFKTRVYHPNINSNGSICLDILKEQWSPALTISKVLLSICSLLTDPNPDDPLVPEIAHMYKTDKTKYESTARSWTQKYAMG

SEQ ID NO: 109663 - DNA, 984 bp, Zea mays subsp. mays
  misc_feature (1)..(984): Ceres Seq. ID no. 15177541
aaaaaaggcttttgtcttcttgtcggagtgaaaatggcttcgtcgtacacgctttcctttatccctatgacggtcgtcgtttcgcggcggagtgcatctccctcgccttcttcttccctgattcctcctccgtctctgctaggtaagaagcttctggtgacacaaccgtcgcgccgccgcttcttctccaagaagcaccggtgcttgacgtcggccagcacggtctttagcgtcccaactgcgcagccggagaatggttcttcggacaagatcccaaaatggtcggcgagagcgataaaatcactggcgatgggggaattggaggctaggaagctcaagtatccaactaccggaagcgaagccattctcatgggaattttggtcgaaggtactagtacagctgctaagttcctgagggcgaatggaatcacactttttaaggtgagagatgagattataaagctgctagggaaatcagatatgtacttcttcagccctgagcatcctcctctaaccgaacccgctcgcaaggccgttgactgggctattgatgagaagaagaaatctggtgtggatggggaactaaccactgcctacttgcttcttggggtttggtctcaaaaggactcagcaggccgccagattttggaggcgctcgggtttaacgaagataaagccaaacaagttgctgaagcgatgaatgaagatgtagatttgagcttcaagaaacaaagtcaatagtgatgaaggttttattacaatcagcaaagcttatgcaactgtatggagtagcaaaaaccaactcctgattcaagacaaaccagtctcactctttattagcatttcagtatttggttgtttaagttttatttatttttgcattatacagctattgtgcatcttatcacaagttcttcacaactccaaaatataattcagttgcttttgcttcccggtctggtttatgttatttctattaaatac

SEQ ID NO: 109664 - protein, 246 aa, Zea mays subsp. mays
  misc_feature (1)..(246): Ceres Seq. ID no. 15177542
  misc_feature (182)..(234): Pfam Name: Clp amino terminal domain Pfam Description: Clp amino terminal domain
  misc_feature (93)..(240): Homolog of NCBI NO: 37521633 NR Description: endopeptidase Clp ATP-binding chain [Gloeobacter
  misc_feature (93)..(240): Homolog of NCBI NO: 22297851 NR Description: ATP-dependent Clp protease regulatory subunit
  misc_feature (86)..(240): Homolog of NCBI NO: 7428213 NR Description: endopeptidase Clp ATP-binding chain C -
  misc_feature (93)..(235): Homolog of NCBI NO: 23039549 NR Description: hypothetical protein [Trichodesmium erythraeum
  misc_feature (85)..(245): Homolog of NCBI NO: 17230491 NR Description: endopeptidase Clp ATP-binding chain [Nostoc sp.
  misc_feature (73)..(227): Homolog of NCBI NO: 7485569 NR Description: hypothetical protein F16J13.130 - Arabidopsis
  misc_feature (73)..(235): Homolog of NCBI NO: 18413740 NR Description: expressed protein [Arabidopsis thaliana]
  misc_feature (28)..(235): Homolog of NCBI NO: 21592785 NR Description: unknown [Arabidopsis thaliana]
  misc_feature (14)..(234): Homolog of NCBI NO: 7487579 NR Description: hypothetical protein T30C3.40 - Arabidopsis
  misc_feature (14)..(246): Homolog of NCBI NO: 18416540 NR Description: expressed protein [Arabidopsis thaliana]
KKGFCLLVGVKMASSYTLSFIPMTVVVSRRSASPSPSSSLIPPPSLLGKKLLVTQPSRRRFFSKKHRCLTSASTVFSVPTAQPENGSSDKIPKWSARAIKSLAMGELEARKLKYPTTGSEAILMGILVEGTSTAAKFLRANGITLFKVRDEIIKLLGKSDMYFFSPEHPPLTEPARKAVDWAIDEKKKSGVDGELTTAYLLLGVWSQKDSAGRQILEALGFNEDKAKQVAEAMNEDVDLSFKKQSQ

SEQ ID NO: 109665 - protein, 235 aa, Zea mays subsp. mays
  misc_feature (1)..(235): Ceres Seq. ID no. 15177543
  misc_feature (171)..(223): Pfam Name: Clp amino terminal domain Pfam Description: Clp amino terminal domain
  misc_feature (82)..(229): Homolog of NCBI NO: 23128552 NR Description: hypothetical protein [Nostoc punctiforme]
  misc_feature (82)..(229): Homolog of NCBI NO: 22297851 NR Description: ATP-dependent Clp protease regulatory subunit
  misc_feature (75)..(229): Homolog of NCBI NO: 7428213 NR Description: endopeptidase Clp ATP-binding chain C -
  misc_feature (82)..(224): Homolog of NCBI NO: 23039549 NR Description: hypothetical protein [Trichodesmium erythraeum
  misc_feature (74)..(234): Homolog of NCBI NO: 17230491 NR Description: endopeptidase Clp ATP-binding chain [Nostoc sp.
  misc_feature (62)..(216): Homolog of NCBI NO: 7485569 NR Description: hypothetical protein F16J13.130 - Arabidopsis
  misc_feature (62)..(224): Homolog of NCBI NO: 18413740 NR Description: expressed protein [Arabidopsis thaliana]
  misc_feature (17)..(224): Homolog of NCBI NO: 21592785 NR Description: unknown [Arabidopsis thaliana]
  misc_feature (3)..(223): Homolog of NCBI NO: 7487579 NR Description: hypothetical protein T30C3.40 - Arabidopsis
  misc_feature (3)..(235): Homolog of NCBI NO: 18416540 NR Description: expressed protein [Arabidopsis thaliana]
MASSYTLSFIPMTVVVSRRSASPSPSSSLIPPPSLLGKKLLVTQPSRRRFFSKKHRCLTSASTVFSVPTAQPENGSSDKIPKWSARAIKSLAMGELEARKLKYPTTGSEAILMGILVEGTSTAAKFLRANGITLFKVRDEIIKLLGKSDMYFFSPEHPPLTEPARKAVDWAIDEKKKSGVDGELTTAYLLLGVWSQKDSAGRQILEALGFNEDKAKQVAEAMNEDVDLSFKKQSQ

SEQ ID NO: 109666 - protein, 224 aa, Zea mays subsp. mays
  misc_feature (1)..(224): Ceres Seq. ID no. 15177544
  misc_feature (160)..(212): Pfam Name: Clp amino terminal domain Pfam Description: Clp amino terminal domain
  misc_feature (63)..(223): Homolog of NCBI NO: 17230491 NR Description: endopeptidase Clp ATP-binding chain [Nostoc sp.
  misc_feature (51)..(205): Homolog of NCBI NO: 7485569 NR Description: hypothetical protein F16J13.130 - Arabidopsis
  misc_feature (51)..(213): Homolog of NCBI NO: 18413740 NR Description: expressed protein [Arabidopsis thaliana]
  misc_feature (64)..(218): Homolog of NCBI NO: 7428213 NR Description: endopeptidase Clp ATP-binding chain C -
  misc_feature (71)..(218): Homolog of NCBI NO: 23128552 NR Description: hypothetical protein [Nostoc punctiforme]
  misc_feature (71)..(218): Homolog of NCBI NO: 22297851 NR Description: ATP-dependent Clp protease regulatory subunit
  misc_feature (71)..(213): Homolog of NCBI NO: 23039549 NR Description: hypothetical protein [Trichodesmium erythraeum
  misc_feature (6)..(213): Homolog of NCBI NO: 21592785 NR Description: unknown [Arabidopsis thaliana]
  misc_feature (1)..(212): Homolog of NCBI NO: 7487579 NR Description: hypothetical protein T30C3.40 - Arabidopsis
  misc_feature (1)..(224): Homolog of NCBI NO: 18416540 NR Description: expressed protein [Arabidopsis thaliana]
MTVVVSRRSASPSPSSSLIPPPSLLGKKLLVTQPSRRRFFSKKHRCLTSASTVFSVPTAQPENGSSDKIPKWSARAIKSLAMGELEARKLKYPTTGSEAILMGILVEGTSTAAKFLRANGITLFKVRDEIIKLLGKSDMYFFSPEHPPLTEPARKAVDWAIDEKKKSGVDGELTTAYLLLGVWSQKDSAGRQILEALGFNEDKAKQVAEAMNEDVDLSFKKQSQ

SEQ ID NO: 109667 - DNA, 837 bp, Zea mays subsp. mays
  misc_feature (1)..(837): Ceres Seq. ID no. 14309072
aataatttctgtaagatcatcaaaagttgatacaccaagctgatttataaacctctacacactcaatttctagcatacaaaaataaaagaaatgggaacagagatggtaatgattcacgaggttccttttcctccacagatcatcacttccaagcccttctctcttcttggccaaggcatcactgacatcgagatccatttccttcaagtgaagttcacggccataggagtttacttagatccttcagatgttaaaacccatcttgacaaatggaaaggcaagaccggaaaggatcttgccggtgatgacgacttcttcgacgccctggcctccggggagattgaaaaggttataagagtggtggtgataaaggaaataaaaggagctcagtacggtgtgcagctagagaattcggtgagagatcgtttggctgctgaggataagtacgaggaagaagaagaaaacgagctcgagaaagttgtaggattttttcagtctaagtacttcaagactcattccatcatcacttaccgtttctcagccaaagatggtatctgcgagattggatttgagacggaaggtaaagaagaggacaaattgaaagtagagaatgcgaatgtggtagggatgatgcagaaatggtacttgtctggaagtcgaggagtttcaccgtccaccatcgtctccctcgccgattctctgtccgcagttttaacctaaaactccttatataagcctatatcatctatgtgtgtgttttatgttgttgtattatgtcgttcttaagtgagacatcgtgtttggttatctttataaaatgttgaatggttgtcttt

SEQ ID NO: 109668 - protein, 209 aa, Zea mays subsp. mays; identical to SEQ ID NO: 52082
  misc_feature (1)..(209): Ceres Seq. ID no. 14309073
  misc_feature (1)..(209): Pfam Name: Chalcone-flavanone isomerase Pfam Description: Chalcone-flavanone isomerase
  misc_feature (6)..(208): Homolog of NCBI NO: 116134 NR Description: CHALCONE--FLAVONONE ISOMERASE 1 (CHALCONE
  misc_feature (3)..(209): Homolog of NCBI NO: 5921722 NR Description: Chalcone--flavonone isomerase (Chalcone
  misc_feature (6)..(208): Homolog of NCBI NO: 3041652 NR Description: CHALCONE--FLAVONONE ISOMERASE (CHALCONE
  misc_feature (3)..(208): Homolog of NCBI NO: 4126399 NR Description: chalcone isomerase [Citrus sinensis]
  misc_feature (5)..(209): Homolog of NCBI NO: 10176739 NR Description: contains similarity to chalcone-flavonone
  misc_feature (1)..(209): Homolog of NCBI NO: 18414838 NR Description: chalcone-flavanone isomerase family [Arabidopsis

SEQ ID NO: 109669 - protein, 205 aa, Zea mays subsp. mays; identical to SEQ ID NO: 52083
  misc_feature (1)..(205): Ceres Seq. ID no. 14309074
  misc_feature (1)..(205): Pfam Name: Chalcone-flavanone isomerase Pfam Description: Chalcone-flavanone isomerase
  misc_feature (2)..(204): Homolog of NCBI NO: 116134 NR Description: CHALCONE--FLAVONONE ISOMERASE 1 (CHALCONE
  misc_feature (1)..(205): Homolog of NCBI NO: 5921722 NR Description: Chalcone--flavonone isomerase (Chalcone
  misc_feature (2)..(204): Homolog of NCBI NO: 3041652 NR Description: CHALCONE--FLAVONONE ISOMERASE (CHALCONE
  misc_feature (1)..(204): Homolog of NCBI NO: 4126399 NR Description: chalcone isomerase [Citrus sinensis]
  misc_feature (1)..(205): Homolog of NCBI NO: 10176739 NR Description: contains similarity to chalcone-flavonone
  misc_feature (1)..(205): Homolog of NCBI NO: 18414838 NR Description: chalcone-flavanone isomerase family [Arabidopsis

SEQ ID NO: 109670 - protein, 203 aa, Zea mays subsp. mays; identical to SEQ ID NO: 52084
  misc_feature (1)..(203): Ceres Seq. ID no. 14309075
  misc_feature (1)..(203): Pfam Name: Chalcone-flavanone isomerase Pfam Description: Chalcone-flavanone isomerase
  misc_feature (1)..(202): Homolog of NCBI NO: 116134 NR Description: CHALCONE--FLAVONONE ISOMERASE 1 (CHALCONE
  misc_feature (1)..(203): Homolog of NCBI NO: 5921722 NR Description: Chalcone--flavonone isomerase (Chalcone
  misc_feature (1)..(202): Homolog of NCBI NO: 3041652 NR Description: CHALCONE--FLAVONONE ISOMERASE (CHALCONE
  misc_feature (1)..(202): Homolog of NCBI NO: 4126399 NR Description: chalcone isomerase [Citrus sinensis]
  misc_feature (1)..(203): Homolog of NCBI NO: 10176739 NR Description: contains similarity to chalcone-flavonone
  misc_feature (1)..(203): Homolog of NCBI NO: 18414838 NR Description: chalcone-flavanone isomerase family [Arabidopsis

SEQ ID NO: 109671 - DNA, 913 bp, Zea mays subsp. mays
  misc_feature (1)..(913): Ceres Seq. ID no. 15177534
  misc_feature: MA Experiment ID: 108522 Result: Up-regulated in Transcription
  misc_feature: MA Experiment 108522 PARAMETER Experiment Name: Zm_42deg_Heat_P Parameter: Age (day) Value: 8
  misc_feature: MA Experiment 108522 PARAMETER Experiment Name: Zm_42deg_Heat_P Parameter: Organism Value: Zea mays
  misc_feature: MA Experiment 108522 PARAMETER Experiment Name: Zm_42deg_Heat_P Parameter: Plant Line Value: 35A19
  misc_feature: MA Experiment 108522 PARAMETER Experiment Name: Zm_42deg_Heat_P Parameter: Temperature (deg C) Value: 42 vs. 22
  misc_feature: MA Experiment 108522 PARAMETER Experiment Name: Zm_42deg_Heat_P Parameter: Timepoint (hr) Value: 1
  misc_feature: MA Experiment 108522 PARAMETER Experiment Name: Zm_42deg_Heat_P Parameter: Tissue Value: Aerial
acatttaataatgatttcactcatcaatcaaacaaaaccttttgtatttgatttttggttcttctctctctctctctatcgattagatctctgaatacgaagatcataaaagttttctgaagacgactttgtcatgtttttgttcgattggttctatggaatcctggccacgctaggcttgtggcagaaagaggcgaagatcttgtttctaggtctcgacaatgccggaaaaacaactctgcttcacatgctcaaagacgagagattagttcagcaccagccaacacagcatcccacatctgaggaactgagcattggcaaaatcaagttcaaggcctttgacttgggtggccatcagattgcacgtagggtctggaaagactactatgccaaggttgatgctgttgtgtacctagttgatgcttacgacaaggagaggtttgtggagtcaaaaagagagcttgacgctcttctatctgatgaagcattagctagtgtcccttttcttatccttgggaacaagattgatattccttatgcagcctctgaagatgagctcaggtatcatttgggtctcaccaatttcactaccggtaaaagcaacgtgagtcttggagaatctggtgttcgtccccttgaggtcttcatgtgcagcatcgtccgcaaaatgggatatggtgagggcttcaagtggctgtcttactacatcaagtaggaaaccaaacaagcattggtgatttgcttcacggttttatgaatcagacatctcaaattttttcctctttgaaaagacaaactgtttctctcttgtagtttcctcttaaagttctaatactatatgttaagtctgatggcttacaactctaaaacaaaaatgtgattctgattgtgaagtagtaatcattattatttc
